United States Patent Application Publication US 2018/0126003 A1 - sequence listing, part 140

SEQ ID NO: 245526 - DNA, 3993 bp, Artificial Sequence
  derived and/or modified sequence
atgggcacagccagcagcctggtgtccccagctggaggagaggtgattgaggacacctacggggccggcggcggggaggcctgtgagatccctgtggaggtgaagcccaaggcccggctgctgaggaacagcttcagaagaggagctggagctgctgctggagctggccctggcagcctgccccggggcgtgggcgctgggggcctgctgggcgccagcttcaagagcacaggcagctctgtgcctgagctggagtatgctgctgctgaatatgagcggctgaggaaggagtatgagatcttccgggtgtccaagaaccaggagctgctgtccatgggccggcgggaggccaagctggacacagagaacaagaggctgcgggcagagctgcaggccctgcagaagacctaccagaagatcctgcgggagaaggagagcgccctggaggccaagtaccaggccatggagcgggccgccacctttgaacatgaccgggacaaggtgaagaggcagttcaagatcttccgggagaccaaggaaaatgagatccaggacctgctgcgggccaagcgggagctggagagcaagctgcagaggctgcaggcccagggcatccaggtgtttgaccccggggagagtgacagtgatgacaactgcacagatgtgacagctgctggcacccagtgtgagtactggacaggaggagccctgggcagcgagcccagcatcggctccatgatccagctgcagcagagcttccggggccctgagtttgcccacagcagcattgatgtggagggcccctttgccaacgtgaacagagatgactgggacattgctgtggccagcctgctgcaggtgacccccctcttcagccacagcctgtggagcaacacagtgcgctgctacctgatctacacagatgagacccagcctgagatggacctcttcctgaaggactacagccccaagctgaagaggatgtgtgagaccatgggctacttcttccacgctgtgtacttccccattgatgtggagaaccagtacctgactgtgaggaagtgggagattgagaagagcagcctggtgatcctcttcatccacctgaccctgcccagcctgctgctggaggactgtgaggaggccttcctgaagaaccctgagggcaagcccaggctcatcttccaccggctggaggatggcaaggtgtccagtgacagcgtgcagcagctgattgaccaggtgagcaacctgaacaagaccagcaaggccaagatcatcgaccacagcggggaccctgctgagggcgtgtacaagacctacatctgtgtggagaagatcatcaagcaggacatcctgggctttgagaacacagacctggagaccaaggacctgggcagcgaggacagcatccctgaggaggatgactttggagatgtgctgtgggacatccatgatgagcaggagcagatggagaccttccagcaggccagcaacagcgcccacgagctgggctttgagaagtactaccagaggctgaatgacctggtggccgccccagcccccatcccccccctgctggtgtctgggggccctggcagcggcaagagcctgctgctgagcaagtggatccagctgcagcagaagaacagccccaacaccctcatcctgagccactttgtgggccggcccatgagcaccagcagcgagagcagcctcatcatcaagaggctgaccctgaagctgatgcagcacagctggagcgtgtctgccctgaccctggaccctgccaagctgctggaggagttcccccgctggctggagaagctgagcgcccggcaccagggcagcatcatcatcgtcatcgacagcattgaccaggtgcagcaggtggagaagcacatgaagtggctgattgaccccctgcctgtgaatgtgcgggtgattgtgtctgtgaatgtggagacctgccccccagcctggaggctgtggcccaccctgcacctggaccccctgagccccaaggatgccaagagcatcatcatcgccgagtgccacagcgtggacatcaagctgagcaaggagcaggagaagaagctggagcggcactgccgcagcgccaccacctgcaatgccctgtatgtgaccctgtttgggaagatgattgcccgggccggccgggccggcaacctggacaagatcctgcaccagtgcttccagtgccaggacaccctgagcctgtaccgcctggtgctgcacagcatccgggagagcatggccaatgatgtggacaaggagctgatgaagcagatcctgtgcctggtgaatgtgagccacaacggggtgtctgagagcgagctgatggagctgtacccagagatgtcctggaccttcctgaccagcctcatccacagcctgtacaagatgtgcctgctgacctacggctgcggcctgctgcgcttccagcacctgcaggcctgggagaccgtgcggctggagtacctggagggccccaccgtgaccagcagctaccggcagaagctgatcaactacttcaccctgcagctgagccaggacagagtgacctggaggtctgcagatgagctgccctggctgttccagcagcagggcagcaagcagaagctgcatgactgcctgctgaacctgtttgtgtcccagaacctgtacaagaggggccactttgctgagctgctgagctactggcagtttgtgggcaaggacaagagcgccatggccacagagtactttgacagcctgaagcagtatgagaagaactgtgagggggaggacaacatgagctgcctggccgacctgtatgagaccctgggccgcttcctgaaggacctgggcctgctgagccaggccatcgtgcccctgcagaggagcctggagatccgggagacagccctggaccctgaccacccccgggtggcccagagcctgcaccagctggcctctgtgtatgtgcagtggaagaagtttggaaatgctgagcagctgtacaagcaggccctggagatcagtgaaaatgcctatggagctgaccacccctacacagcccgggagctggaggccctggccaccctgtaccagaagcagaacaagtatgagcaggccgagcacttcaggaagaagagcttcaagatccaccagaaggccatcaagaagaagggcaacctgtatggctttgccctgctgcggcggcgggccctgcagctggaggagctgaccctgggcaaggacaccccagacaatgcccggaccctgaatgagctgggcgtgctgtactacctgcagaacaacctggagacagctgaccagttcctgaagaggagcctggagatgagggagcgggtgctgggccctgaccacccagactgtgcccagagcctgaacaacctggccgccctgtgcaatgagaagaagcagtatgacaaggccgaggagctgtatgaaagagccctggacatcagaagaagagccctggccccagaccaccccagcctggcctacacagtgaagcacctggccatcctgtacaagaagatgggcaagctggacaaggctgtgcccctgtatgagctggccgtggagatccggcagaagagctttggccccaagcaccccagcgtggccacagccctggtgaacctggccgtgctgtacagccagatgaagaagcacgtggaggccctgcccctgtatgaaagagccctgaagatctatgaggacagcctgggccgcatgcacccccgggtgggggagaccctgaagaacctggccgtgctgtcctatgagggcggggactttgagaaggctgctgagctgtacaagagggccatggagatcaaggaggccgagaccagcctgctgggcggcaaggcccccagccgccacagcagcagcggggacaccttcagcctgaagacagcccacagccccaacgtgttcctgcagcagggccagaggtag

SEQ ID NO: 245527 - DNA, 720 bp, Artificial Sequence
  derived and/or modified sequence
atgggcacagccagcagcctggtgtccccagctggaggagaggtgattgaggacacctacggggccggcggcggggaggcctgtgagatccctgtggaggtgaagcccaaggcccggctgctgaggaacagcttcagaagaggagctggagctgctgctggagctggccctggcagcctgccccggggcgtgggcgctgggggcctgctgggcgccagcttcaagagcacaggcagctctgtgcctgagctggagtatgctgctgctgaatatgagcggctgaggaaggagtatgagatcttccgggtgtccaagaaccaggagctgctgtccatgggccggcgggaggccaagctggacacagagaacaagaggctgcgggcagagctgcaggccctgcagaagacctaccagaagatcctgcgggagaaggagagcgccctggaggccaagtaccaggccatggagcgggccgccacctttgaacatgaccgggacaaggtgaagaggcagttcaagatcttccgggagaccaaggaaaatgagatccaggacctgctgcgggccaagcgggagctggagagcaagctgcagaggctgcaggcccagggcatccaggtgtttgaccccggggagagtgacagtgatgacaactgcacagatgtgacagtgtccctggagagtgaccagcaccctggcatcttcatcgccaacttctag

SEQ ID NO: 245528 - DNA, 453 bp, Artificial Sequence
  derived and/or modified sequence
atgggcacagccagcagcctggtgtccccagctggaggagaggtgattgaggacacctacggggccggcggcggggaggcctgtgagatccctgtggaggtgaagcccaaggcccggctgctgaggaacagcttcagaagaggagctggagctgctgctggagctggccctggcagcctgccccggggcgtgggcgctgggggcctgctgggcgccagcttcaagagcacaggcagctctgtgcctgagctggagtatgctgctgctgaatatgagcggctgaggaaggagtatgagatcttccgggtgtccaagaaccaggagctgctgtccatgggccggcgggaggccaagctggacacagagaacaagaggctgcgggcagagctgcagggcctggccgctgtggcccggagccggctgacagccacctggaacagctgggcccagtag

SEQ ID NO: 245529 - DNA, 1914 bp, Artificial Sequence
  derived and/or modified sequence
atcatcgccaatgccggccgggccggcaacctggacaagatcctgcaccagtgcttccagtgccaggacaccctgagcctgtaccgcctggtgctgcacagcatccgggagagcatggccaatgatgtggacaaggagctgatgaagcagatcctgtgcctggtgaatgtgagccacaacggggtgtctgagagcgagctgatggagctgtacccagagatgtcctggaccttcctgaccagcctcatccacagcctgtacaagatgtgcctgctgacctacggctgcggcctgctgcgcttccagcacctgcaggcctgggagaccgtgcggctggagtacctggagggccccaccgtgaccagcagctaccggcagaagctgatcaactacttcaccctgcagctgagccaggacagagtgacctggaggtctgcagatgagctgccctggctgttccagcagcagggcagcaagcagaagctgcatgactgcctgctgaacctgtttgtgtcccagaacctgtacaagaggggccactttgctgagctgctgagctactggcagtttgtgggcaaggacaagagcgccatggccacagagtactttgacagcctgaagcagtatgagaagaactgtgagggggaggacaacatgagctgcctggccgacctgtatgagaccctgggccgcttcctgaaggacctgggcctgctgagccaggccatcgtgcccctgcagaggagcctggagatccgggagacagccctggaccctgaccacccccgggtggcccagagcctgcaccagctggcctctgtgtatgtgcagtggaagaagtttggaaatgctgagcagctgtacaagcaggccctggagatcagtgaaaatgcctatggagctgaccacccctacacagcccgggagctggaggccctggccaccctgtaccagaagcagaacaagtatgagcaggccgagcacttcaggaagaagagcttcaagatccaccagaaggccatcaagaagaagggcaacctgtatggctttgccctgctgcggcggcgggccctgcagctggaggagctgaccctgggcaaggacaccccagacaatgcccggaccctgaatgagctgggcgtgctgtactacctgcagaacaacctggagacagctgaccagttcctgaagaggagcctggagatgagggagcgggtgctgggccctgaccacccagactgtgcccagagcctgaacaacctggccgccctgtgcaatgagaagaagcagtatgacaaggccgaggagctgtatgaaagagccctggacatcagaagaagagccctggccccagaccaccccagcctggcctacacagtgaagcacctggccatcctgtacaagaagatgggcaagctggacaaggctgtgcccctgtatgagctggccgtggagatccggcagaagagctttggccccaagcaccccagcgtggccacagccctggtgaacctggccgtgctgtacagccagatgaagaagcacgtggaggccctgcccctgtatgaaagagccctgaagatctatgaggacagcctgggccgcatgcacccccgggtgggggagaccctgaagaacctggccgtgctgtcctatgagggcggggactttgagaaggctgctgagctgtacaagagggccatggagatcaaggaggccgagaccagcctgctgggcggcaaggcccccagccgccacagcagcagcggggacaccttcagcctgaagacagcccacagccccaacgtgttcctgcagcagggccagaggaaggtgcagagcaacctgctgagccctgagggcctgagcaacatctgtgcccaggagaagaccacccgcttcaccagcagctag

SEQ ID NO: 245530 - DNA, 1236 bp, Artificial Sequence
  derived and/or modified sequence
atgagctgcctggccgacctgtatgagaccctgggccgcttcctgaaggacctgggcctgctgagccaggccatcgtgcccctgcagaggagcctggagatccgggagacagccctggaccctgaccacccccgggtggcccagagcctgcaccagctggcctctgtgtatgtgcagtggaagaagtttggaaatgctgagcagctgtacaagcaggccctggagatcagtgaaaatgcctatggagctgaccacccctacacagcccgggagctggaggccctggccaccctgtaccagaagcagaacaagtatgagcaggccgagcacttcaggaagaagagcttcaagatccaccagaaggccatcaagaagaagggcaacctgtatggctttgccctgctgcggcggcgggccctgcagctggaggagctgaccctgggcaaggacaccccagacaatgcccggaccctgaatgagctgggcgtgctgtactacctgcagaacaacctggagacagctgaccagttcctgaagaggagcctggagatgagggagcgggtgctgggccctgaccacccagactgtgcccagagcctgaacaacctggccgccctgtgcaatgagaagaagcagtatgacaaggccgaggagctgtatgaaagagccctggacatcagaagaagagccctggccccagaccaccccagcctggcctacacagtgaagcacctggccatcctgtacaagaagatgggcaagctggacaaggctgtgcccctgtatgagctggccgtggagatccggcagaagagctttggccccaagcaccccagcgtggccacagccctggtgaacctggccgtgctgtacagccagatgaagaagcacgtggaggccctgcccctgtatgaaagagccctgaagatctatgaggacagcctgggccgcatgcacccccgggtgggggagaccctgaagaacctggccgtgctgtcctatgagggcggggactttgagaaggctgctgagctgtacaagagggccatggagatcaaggaggccgagaccagcctgctgggcggcaaggcccccagccgccacagcagcagcggggacaccttcagcctgaagacagcccacagccccaacgtgttcctgcagcagggccagagagctgggaagagcaaccccaccttctacctgcagaagggcttccagacctacgtgctgtag

SEQ ID NO: 245531 - DNA, 2115 bp, Artificial Sequence
  derived and/or modified sequence
atgggcaccgccagcagcctggtgagccccgccggcggcgaggtgattgaggacacttatggtgcaggtggtggagaggcctgcgagatccccgtagaagtgaagcctaaggccaggcttttgagaaattcatttaggcgaggtgccggagccgcggccggggccgggcccggctccctaccccgcggggtcggggcaggcgggttgctcggcgcttcctttaagtcaactggctcctccgttccggagctggagtacgcagcggcagagtacgagaggctccgcaaagagtatgagattttcagggtctccaaaaatcaagaacttttatctatgggaaggagggaagccaaactagacaccgaaaacaagcgtctgagggcggagctgcaagcccttcaaaagacataccagaagattctgcgcgagaaggaatcagccctggaggccaaatatcaggctatggagagggctgcgaccttcgaacatgatagggacaaagtgaagcgacaattcaagatattccgagaaaccaaggagaacgaaatacaggatcttctccgggctaaacgcgaattggagtccaaactccaacgccttcaggcacaggggatacaggtttttgatccgggcgaatccgatagcgacgacaactgcaccgatgtgacagccgccggtacacagtgcgagtactggaccgggggcgcattgggttccgagccctccatcggttccatgatccaacttcaacaaagttttcgggggccagaattcgcgcactcttcgatcgatgtggaaggcccttttgccaacgtgaatcgcgacgattgggatattgcagtggctagccttcttcaggttactcctttatttagccattccctctggagcaataccgtgagatgttacctgatctacacggacgagacgcaacccgaaatggacctttttctcaaagattattcccccaaactgaagcggatgtgcgagacaatgggatacttttttcacgctgtgtacttccccatagatgttgagaaccaatacctgactgtgaggaagtgggagatcgagaaatctagccttgtgatcctgttcatacatctgacattaccttcccttctgctggaagactgcgaggaggcttttctcaagaatccggagggtaaacccagactgattttccacaggttggaggatgggaaagtgtcctctgactctgtgcagcagttgattgatcaggtatccaacctcaacaagacaagcaaggcaaagattatcgatcattccggcgacccggccgagggagtgtacaagacctatatctgcgtagaaaaaatcatcaagcaggacatcctcggattcgaaaatactgaccttgagactaaggacctcggttcagaggatagtatacctgaggaggatgactttggcgacgtgctgtgggatatccatgatgagcaggaacagatggagacttttcagcaggcatcaaacagtgcgcatgagttgggctttgaaaaatactatcagaggctgaatgatcttgttgctgcccctgcacctataccccctcttctggtgtccggcggacccggcagcggaaaaagcctgctgctgtccaagtggatccaattacagcagaagaacagcccgaacactctgatactgtctcattttgtggggcgtcctatgtctaccagctcagagagctcactgattatcaaaagattaaccctgaaactgatgcagcattcatggagcgttagcgccctaactctggatcccgcgaagttactcgaggagtttccacgatggctagagaaactcagcgccaggcaccagggtagtatcatcatagtcatcgattctatcgatcaggttcaacaggtggaaaaacatatgaaatggctgattgatccactccctgtgaacgtccgcgtgatcgtgtctgtgaacgtggagacgtgccctcctgcatggcgactgtggccgactttacatcttgatcccctctcaccgaaagatgccaagtctatcatcatcgccgagtgccattcggtggatatcaaactctccaaagagcagtgctgggaaagtcggcagttccgatag

SEQ ID NO: 245532 - DNA, 3993 bp, Artificial Sequence
  derived and/or modified sequence
atgggcaccgccagcagcctggtgagccccgccggcggcgaggtgatcgaggatacctacggggctgggggcggcgaagcgtgcgaaatacccgtggaagtgaagcccaaggccaggctgctgagaaattcgttcaggcgcggggccggagcagcggcaggggccggacctggcagtcttccgcgtggcgtcggtgccgggggcctgcttggtgccagctttaagagtacggggtccagtgtccctgaactagagtacgcagctgccgaatacgagcggctcagaaaggaatacgaaatttttagagtgagcaaaaatcaagaacttttatccatgggacggagggaggccaagcttgataccgaaaacaaacggctgcgagccgagctgcaggcactgcaaaagacttatcagaaaatacttcgtgagaaagagtccgcactggaggctaaatatcaggcaatggagcgcgccgcgacattcgagcacgaccgggacaaggttaagagacagtttaagatatttcgagagaccaaggagaacgaaatacaggacctgctcagggccaaaagagaactagaatccaagctgcagaggttgcaggcccagggtattcaggtctttgaccccggagaaagcgactcagatgataattgtactgacgtgactgcggctggcacccaatgtgagtattggactggaggggccctcgggtcggagcccagcattggctcgatgattcagctccagcagtcttttagaggacccgagttcgcccactcttccatcgatgtagaggggcccttcgctaacgtaaaccgtgacgactgggatattgctgttgcatctttgctacaggtaaccccactgttctctcattctctgtggtctaataccgtgagatgctacctgatttacacagatgagacacaaccagagatggacctgttcctgaaagattacagtcctaagctcaagagaatgtgcgaaacgatgggctattttttccatgcggtttactttccaatcgacgtggagaatcagtatctcactgtgcgcaaatgggagatcgagaagtctagcttagtaatcctcttcattcacctgaccctgcctagccttctgctggaggattgcgaggaagcgtttctcaaaaatcccgagggtaaaccaagactgattttccaccgcttagaggacgggaaagtgtccagcgatagcgtccagcagcttattgatcaggtgagcaacctgaacaagacctcaaaagccaagatcatcgatcattcaggcgatcccgcggagggtgtgtataagacctacatttgtgtagagaagattatcaaacaggacattctggggtttgagaacacagaccttgagacaaaagacctagggtcggaggacagtattcctgaggaagatgatttcggagatgtgttgtgggatatacacgatgaacaagagcagatggaaacattccagcaagcctctaactctgcacacgaactgggattcgagaaatattaccaacgcctgaacgacctggttgcagcacctgctcccattccacctttgcttgtgagtggtggccccggtagtggaaagtcactgctgctgtccaagtggatccaattgcaacagaagaacagcccaaacactctgattctctcacattttgtgggccggcccatgtcaacttcctctgagtctagcctgattatcaaacgtctcaccctgaaacttatgcaacattcttggtctgtcagcgctctgacccttgaccccgcgaagcttctagaggagttcccacgctggctcgaaaagctgtcagcccgtcaccagggttcgatcattatcgtgatagattctatcgatcaggttcagcaggtcgagaaacacatgaaatggctgatcgatcctcttcccgtcaatgtgagagtgatcgtctctgtaaacgtggagacttgtccccccgcctggcggctgtggcctactctgcacctcgacccgctttctcctaaagatgcaaagtctatcattattgccgaatgtcattcagtggatatcaaactttccaaggagcaagaaaaaaaactagaaagacactgtcgaagcgctacgacttgcaacgccttgtatgtcaccctcttcggcaagatgattgctcgggccggtagagcaggcaacctggataagattctccaccagtgtttccagtgccaggataccctgtcattgtaccggcttgtacttcacagtatacgtgagagcatggccaacgacgtcgacaaagagctgatgaagcagatcctgtgcctcgtcaacgtcagtcataatggagtgtctgagagtgaattgatggagctctatccggaaatgtcctggacatttctcacttcacttatccactctctatataagatgtgtctgctgacctatggatgcgggctgctcaggttccagcaccttcaggcctgggaaaccgtccgcctggagtaccttgagggccccaccgtgacatcatcctatcggcagaagctaattaattacttcactctccagctgagccaggatcgcgtgacatggaggagcgccgacgagttaccttggcttttccaacaacagggaagcaaacagaagctacacgactgtctgttaaatctttttgtatcccagaacttgtataagcgcgggcactttgccgagctactgagctactggcagttcgtaggcaaggataaatccgctatggcaacagagtacttcgattcactcaagcagtacgagaaaaactgcgaaggggaggacaatatgtcttgcttggccgatctgtacgagacgcttgggcgctttctgaaagacctcggtcttctcagccaagctattgtcccactccagcgaagcctggagattcgggagacagccctcgaccccgatcacccacgtgtggctcagtccttacaccagctagccagtgtgtacgtgcagtggaaaaaattcggtaatgccgaacagctctacaagcaggcactggaaatttcggagaacgcctatggtgctgatcatccttacaccgcccgcgaactcgaagccctggcgacgctctaccaaaaacaaaataaatacgaacaggccgaacattttagaaagaagagctttaaaattcatcagaaagcaatcaaaaagaaagggaacctctatgggttcgcattgttgcggcgccgagctctgcagctggaagagctgaccctgggcaaggacacccccgacaacgccagaacactgaatgagctcggtgtcctgtactacctccagaataacctagagaccgccgatcagtttctgaagaggtcattagaaatgagagagcgggtcctgggacccgaccaccccgattgcgcacagagcctgaataacctggcggccctctgcaacgaaaagaagcaatacgacaaggctgaggaactgtatgaaagagctctggatattcgaaggcgagcactggccccagaccacccttccttggcatacacagttaagcatctggccatcctgtacaaaaagatgggtaagcttgataaggccgtgcccctttatgagctggctgtcgaaatcagacagaaaagcttcggacccaagcaccctagcgttgccacagcattggttaacttggccgtattgtactctcaaatgaagaagcacgtagaggctctgcctctgtatgagcgtgcccttaaaatctacgaggatagtctcggccgcatgcaccccagagttggggagacattgaagaacctggcggtcctgagttacgaaggtggagatttcgaaaaggctgcggagttatacaaaagagctatggagataaaggaggcagagaccagcctgctgggaggtaaggcgcctagccggcactcatcaagcggagatacattcagtttaaaaactgctcactcccccaacgtttttttgcagcagggccagcggtag

SEQ ID NO: 245533 - DNA, 720 bp, Artificial Sequence
  derived and/or modified sequence
atgggcaccgccagcagcctggtgagccccgccggcggcgaggtgattgaagacacatatggtgccggcgggggagaggcttgcgagatccctgtggaggtgaagcctaaagctcgtttgctgagaaattcttttcgaaggggagcaggcgccgccgctggcgccgggcccgggagtttgccccgcggggtgggcgccggtggattgctaggcgcatcttttaagagcactgggtccagtgtcccggagctggagtacgccgccgccgagtatgaaaggttgagaaaggagtacgagatctttagggtgtcaaaaaaccaggagctcctttctatggggcgcagagaagccaaattagataccgaaaacaagagactgcgggctgaattgcaggccctacagaaaacttaccaaaagattctgcgtgagaaggagagtgcattggaagccaagtaccaagctatggagcgcgcggctacctttgagcatgaccgggacaaagtgaagaggcagtttaaaatctttcgtgagactaaggagaatgagatccaggatcttctgcgcgcaaagcgagagctggaatcaaagttacaacgcctgcaagcccagggtatacaagtttttgacccaggcgaatcggactctgacgacaattgtaccgatgttacggtgtccctggaatctgaccagcaccctggaatcttcattgctaacttctag

SEQ ID NO: 245534 - DNA, 453 bp, Artificial Sequence
  derived and/or modified sequence
atgggcaccgccagcagcctggtgagccccgccggcggcgaggtgattgaagatacctatggcgctgggggaggtgaagcttgtgaaattccggtggaagtaaagcccaaagcccgtttgctgcgcaattctttccgtagaggggccggcgcagccgctggcgccggtcccgggtcactgcctcggggagttggcgctggcggactcttgggagcttctttcaagagcacgggaagctcagttccagagctggagtacgctgctgccgagtacgagagacttaggaaagaatacgaaatctttcgggtgtctaagaatcaagaattattatctatggggcggcgagaggcgaagctcgataccgaaaataaaaggctcagagctgagttgcaagggctggctgccgtggcccgatcgcgcctgacagcaacatggaacagttgggcacagtag

SEQ ID NO: 245535 - DNA, 1914 bp, Artificial Sequence
  derived and/or modified sequence
atcatcgccaacgccggccgggccggcaacctggacaagatcctgcatcaatgcttccagtgccaggacacactctcgttgtacagattggttctgcactctatcagggaaagcatggcaaacgatgtcgataaggagctgatgaagcaaattctgtgtctagtgaacgtgtcacacaacggagtctcagagagtgaattgatggaattatacccagaaatgtcttggacctttctcacttcccttatacatagcctgtataaaatgtgtctgctaacatacggatgcggtcttctgcgcttccagcatctgcaggcatgggagactgtccgcctcgagtatctggaaggacccactgtgacctcgtcctataggcagaagttaatcaactactttaccctgcagctgtcccaggatagagtgacctggaggtcagctgacgagcttccttggctcttccagcagcagggaagtaagcagaagctgcatgattgcctcctcaacctgtttgtgagccaaaacctgtataaacgcggacatttcgcggagctgctctcttactggcaatttgtgggcaaagataagagcgccatggcaactgagtatttcgattctctgaaacaatatgaaaagaactgtgagggtgaggataatatgtcctgtcttgccgacctgtacgagaccctgggacggtttctgaaggacctgggactgctgtctcaggctatagtcccactgcaaagatccttggagattagagaaaccgcgttagacccagaccatccccgggtggcccaatccttacaccagctcgccagtgtgtatgtgcagtggaaaaagttcggtaatgccgaacaactgtataaacaagcgctggaaatttctgaaaacgcttacggggcggatcacccttataccgcaagagagctggaagctctggcaacattgtaccagaagcagaataaatatgaacaggcggagcatttccgaaagaagtctttcaagatccaccaaaaggcaatcaagaagaaaggtaatctgtatggattcgctttacttaggcgcagagccttgcaactggaagagcttacgctggggaaagacaccccggacaacgcaagaacacttaacgagctgggtgtgctttactacctccagaacaatctggaaactgccgaccagttccttaagagatctctggagatgagggagcgcgtgcttggtcctgatcatcctgactgcgctcagtccctgaataaccttgcagcgctctgtaacgagaaaaaacaatacgataaggctgaggaactgtatgagagagctttagacatccggcgccgggcacttgccccagatcacccttcattagcatatactgtaaaacacttggctatactctacaaaaaaatgggcaagctggacaaggctgtgccattatacgaactggcagtggaaatcagacaaaagtccttcgggcccaagcacccctccgtcgccacagccctggtaaaccttgctgtgctgtactcccaaatgaaaaagcacgtagaggctctccccttgtacgaacgggcgctcaagatctacgaggacagtctgggacggatgcaccccagagttggggaaacactgaaaaacctcgccgttctgagctatgagggaggcgatttcgagaaagcagccgagctctataagcgggccatggagattaaggaagccgagaccagcctgcttgggggaaaagcccccagccggcactcctcatctggagacacgtttagtttgaagacagcccacagccctaacgtattcctccaacaggggcagcggaaggttcagagcaacctgttgtcacctgagggactgtccaacatttgcgcgcaagagaaaaccacgagatttacctcctcctag

SEQ ID NO: 245536 - DNA, 1236 bp, Artificial Sequence
  derived and/or modified sequence
atgagctgcctggccgacctgtacgagaccctgggccggttcctgaaagatctgggtttgctgagccaggctatcgttcctctgcagcggagcctggagatacgcgagactgcccttgatcccgatcatccgcgagtggcccagagtcttcatcagttggcctcagtgtatgtgcagtggaagaagttcggaaatgcagagcagctctacaagcaggctctcgagatttccgagaacgcttatggcgccgaccatccctacacagcacgcgaattggaggccctggccacgttatatcagaagcagaacaagtatgaacaggcggagcactttaggaagaaatcatttaaaatccaccaaaaagcgatcaaaaagaaagggaacctttacggttttgctctcttacggagacgggctctacagctcgaggagctgactctcgggaaggacaccccagataacgcccgaacactgaatgaactaggggttttgtactatctgcagaataatctcgagacggcggatcaattcctgaagagatccttggagatgcgcgagagagtgctggggcctgatcaccccgattgcgcccaatccctgaacaacttagcggccctgtgcaacgaaaagaaacagtacgacaaggccgaagaactgtacgagcgcgccctggacataagacgaagggcactggcaccggatcatcccagtctggcctatacagttaaacacctcgcaatcttgtataaaaaaatgggaaagctggacaaagcggtgccactgtacgaattagctgttgagataagacagaagagttttggccccaaacatcctagcgtggcgactgcacttgttaacctggctgtcttatattcccagatgaagaagcatgtggaggcgttgcccctgtacgagagggcactcaaaatctacgaagactcactggggaggatgcacccccgggtgggagagactctgaagaatctagcagtgttaagttacgaaggaggggattttgagaaggcagcagaactgtataagagggccatggagataaaggaagctgaaacatcactcctgggaggcaaagctccctctagacactcatcctccggcgatactttcagcctaaaaacagcccactctcccaatgtcttcctccaacaaggccaaagggctgggaaatctaaccctacattctacttgcagaaaggtttccagacttacgttctgtag

SEQ ID NO: 245537 - DNA, 5287 bp, Artificial Sequence
  derived and/or modified sequence
tctgccccaccccgtcccgttccgttccgctgcccagtcctgctggtactcactaggtagtagcggcaacggacgccatggggaccgcctcgtcgctcgtgagccccgcgggcggggaagtgatcgaggacacgtacggggcgggcggcggcgaggcctgcgagatcccggtggaggtgaagcccaaggcccgcctgctgcgcaactcgttccgccgaggcgcgggggcggcagcaggggccgggcccgggtcgctgccccgcggggtgggcgcgggcgggctgctgggggccagcttcaagtccactggctcgtcggtgccagagctggagtacgcggcggccgagtacgagcggctcaggaaggagtacgagatctttcgcgtcagcaagaaccaggagttgttgtccatgggccgccgcgaggccaagctggacacggagaacaagcggctgcgggccgaactgcaggcacttcaaaaaacgtatcagaagatacttcgagaaaaagaaagtgctttagaagcgaaataccaagcaatggagagagcagcaacatttgaacatgacagagataaagttaaaaggcaattcaagatttttagggagaccaaagaaaatgaaattcaggacttactgagggccaagagggagttggagagcaaacttcagaggctacaggctcagggtatccaagtatttgatcctggggagtctgattcagatgacaactgtacagatgtcactgctgctggaacccaatgtgaatattggactggcggagccttgggaagtgaaccttccataggaagcatgatccagcttcagcagtccttcagaggccctgagtttgcccatagttctatagatgtggaaggaccctttgcaaatgttaatagagatgactgggatattgctgtagctagtttattacaagttactcctctgttttcacattctctgtggagtaacactgtcagatgttacctcatttatacagatgaaacccagcctgagatggatcttttccttaaggactattcacctaaacttaagagaatgtgcgagacaatgggatattttttccatgctgtttattttccaatagatgttgaaaatcaatacctcactgtaagaaaatgggaaattgagaaaagttctttagttattttatttattcacttaacattaccaagccttttattggaagactgtgaagaagcttttctgaaaaaccctgaaggaaaacctcgattaatctttcatcgtttggaagatggaaaagtcagttctgactctgtccagcaattgattgatcaagtttctaatctaaacaagaccagcaaagccaagatcattgatcactcaggagatcctgcagaaggagtatataaaacttatatttgtgtagaaaagattattaaacaggacatactgggttttgagaacacagacttggagactaaggatttgggcagtgaggattccattccagaagaagatgattttggtgatgttctgtgggacatacatgatgaacaagagcaaatggaaacttttcagcaggcttctaattcagcccatgagttgggatttgagaaatattaccaacgccttaatgatctagtggcagcaccagccccgattccacctcttctcgtgtctggaggaccaggttctgggaagtctcttcttttatcaaagtggattcaattacaacagaagaattcccccaacacactgattctttcccattttgtgggaaggcccatgtcaaccagctcagagtcctccttgattattaaacgactaactctaaagttgatgcagcactcttggtcagtctctgctctgacactggatcctgctaagcttctggaagaatttccacgttggctggaaaaactctctgctcgtcatcaaggcagcatcatcatcgttattgattctatagatcaagttcagcaagttgaaaaacacatgaaatggctgatagatccactgccagtgaatgtaagagtaattgtttctgtgaatgtagaaacatgccctccagcatggaggttgtggcctacacttcatcttgatcccttaagtccaaaagatgcaaaatctattataattgcagaatgccactctgtagacattaaattgagtaaagagcagtgctgggagagcaggcaatttagataaaatccttcatcagtgtttccagtgtcaagatactctttcattatatagacttgttctgcactctatccgggagtccatggcaaatgatgtggataaagagctaatgaagcagatcctctgccttgtcaatgttagtcacaatggtgtgagtgaatcagaactgatggaactctatcctgagatgtcctggactttcttgacctcccttattcacagtttatacaaaatgtgtttgttgacttatggatgtggcttgcttaggtttcaacatctgcaggcttgggaaacagtgagattggagtacctggaaggccccactgttacttcttcatacaggcaaaagctaatcaactatttcaccttgcagctaagtcaggacagagtgacttggagaagtgcagatgaactcccgtggctttttcagcagcagggaagtaaacagaagctgcatgattgccttcttaatctctttgtgtctcaaaacctttataaaaggggacactttgctgagttgctgagttattggcagtttgttggcaaagacaaaagtgcaatggcaacagaatacttcgattcattgaagcagtatgagaaaaactgcgaaggcgaggacaacatgagttgcttagctgatctttatgaaaccttggggcgatttctcaaggatctaggccttctcagtcaggccatagtacctttgcagaggtctttagagattcgagaaacagctttagatcccgatcacccaagagtagcccagtccctccaccaactagcaagtgtatacgtgcagtggaagaagtttggcaatgcagaacaactgtataaacaggcgttggaaatctcagaaaatgcttatggtgcggaccatccatatactgctcgtgaacttgaagcacttgcaactttgtaccagaaacaaaataaatatgaacaagctgaacattttaggaaaaaatcctttaaaattcatcagaaagctataaagaaaaaaggcaacttgtacggatttgcccttttacgtagacgggctttacagttagaagagcttacattaggtaaggacacacctgataatgctcggaccctcaatgaactgggtgttctctactatcttcaaaataacctggaaacagctgaccagtttctgaagcgttccttagaaatgagggagcgagttctaggaccagatcaccctgactgtgctcagtctttgaataatctggcagctctatgcaatgaaaagaaacagtatgataaagcagaagaactttatgaaagagctttagatattcggagacgtgcattagctcctgatcacccttctttggcatatacggtgaagcatcttgccatcttgtataagaaaatggggaaacttgacaaagctgtacctttgtatgaattggctgttgaaattcgacagaaatcttttggcccaaagcaccctagtgtagctactgccttggtgaacttagctgttctttatagccaaatgaaaaaacacgttgaagctttgccattatatgaaagagcattaaagatttatgaagatagcctgggtcggatgcatcctcgagttggagaaacactgaaaaatttagctgtgcttagctatgaaggaggagattttgaaaaagctgctgaattatacaaaagggcaatggaaataaaagaagcagaaacatcactcttgggtggaaaagctccttcacgccattcatcaagtggagacacgtttagcttaaaaacagctcattctcctaatgttttccttcagcaaggacaaaggtaatagcagcagttagaattctttgcaaatgtaccttaagacaaaataattaaacatttggaacatttgaatttgaaactttaaaaaaatgttgtacgaaattttactacgtgtgatttaactgctatttgtatgaagttgtattggattacattaagttggaattgtgattatgtctgttttagttgtttaaaagaattttcctattatatggtatccaaggatgtagacacattagaattataagaagacatgaggagcaaatcatgaagagcggattggtctttgttcaacaagagctggcagagtagttaagacaaggagttcaaaaattccatgaatcttggccaggcatggtggctcatgcctgtaatcccaccactttgggagggtgatgcaggaggatcacttgaggccaggagttggagaccagcctggccaacatggtgaaaccctgtctctactaaaaatacaaaaaaaaattagctggacctggtggcgcatgcctgtaatcctagctactcaggaggctgaggcatgagaatcgcttgaactcagcaagtggaggttgctatgagctgagattgtgccagttcattccaccctgggcaacagggtgagactctgtctcaaaaaaaaaaaaaaaaaaaaaaagaattccatgattcttttgagctctcaagagctactttagccttgccattcctcttgcttttcagcagtagtctggcccaattctctacctcaaaggaaagtttcaaggattaaagggttaatgtttatgaacgattcaaattgtcttcagtgaaacacattagtcacaagaatccctgattgctgcactttaaaaaattctttaccttttccttgagcagattggtccagtccctctgctttctgttctgtctacattgtgtattatttattactatatagtatatgtatctgcataatgtctgaagtcattaatgcagtaacaggtcaagctctttagcattctttgacttttcccaaaatatagatatgacattctcctttatcttccttcttagatggcctaaatctgtctcttcatttacctcaaactcaaattagtatgccattttcatactgaaaattaaatatttttatggattttataaatattgcaacattttagatattgttttggaccatttgtgtatttatatataataaaatcatcaatttaatacttgtaagatcctaacatgtattgattgtaaaagtgaaatatgtaatagccacacttcactgttttaaaataaaagtgcaatttcaagtt

SEQ ID NO: 245538 - DNA, 4362 bp, Artificial Sequence
  derived and/or modified sequence
gttccgttcctctgccccaccccgtcccgttccgttccgctgcccagtcctgctggtactcactaggtagtagcggcaacggacgccatggggaccgcctcgtcgctcgtgagccccgcgggcggggaagtgatcgaggacacgtacggggcgggcggcggcgaggcctgcgagatcccggtggaggtgaagcccaaggcccgcctgctgcgcaactcgttccgccgaggcgcgggggcggcagcaggggccgggcccgggtcgctgccccgcggggtgggcgcgggcgggctgctgggggccagcttcaagtccactggctcgtcggtgccagagctggagtacgcggcggccgagtacgagcggctcaggaaggagtacgagatctttcgcgtcagcaagaaccaggagttgttgtccatgggccgccgcgaggccaagctggacacggagaacaagcggctgcgggccgaactgcaggcacttcaaaaaacgtatcagaagatacttcgagaaaaagaaagtgctttagaagcgaaataccaagcaatggagagagcagcaacatttgaacatgacagagataaagttaaaaggcaattcaagatttttagggagaccaaagaaaatgaaattcaggacttactgagggccaagagggagttggagagcaaacttcagaggctacaggctcagggtatccaagtatttgatcctggggagtctgattcagatgacaactgtacagatgtcactgctgctggaacccaatgtgaatattggactggcggagccttgggaagtgaaccttccataggaagcatgatccagcttcagcagtccttcagaggccctgagtttgcccatagttctatagatgtggaaggaccctttgcaaatgttaatagagatgactgggatattgctgtagctagtttattacaagttactcctctgttttcacattctctgtggagtaacactgtcagatgttacctcatttatacagatgaaacccagcctgagatggatcttttccttaaggactattcacctaaacttaagagaatgtgcgagacaatgggatattttttccatgctgtttattttccaatagatgttgaaaatcaatacctcactgtaagaaaatgggaaattgagaaaagttctttagttattttatttattcacttaacattaccaagccttttattggaagactgtgaagaagcttttctgaaaaaccctgaaggaaaacctcgattaatctttcatcgtttggaagatggaaaagtcagttctgactctgtccagcaattgattgatcaagtttctaatctaaacaagaccagcaaagccaagatcattgatcactcaggagatcctgcagaaggagtatataaaacttatatttgtgtagaaaagattattaaacaggacatactgggttttgagaacacagacttggagactaaggatttgggcagtgaggattccattccagaagaagatgattttggtgatgttctgtgggacatacatgatgaacaagagcaaatggaaacttttcagcaggcttctaattcagcccatgagttgggatttgagaaatattaccaacgccttaatgatctagtggcagcaccagccccgattccacctcttctcgtgtctggaggaccaggttctgggaagtctcttcttttatcaaagtggattcaattacaacagaagaattcccccaacacactgattctttcccattttgtgggaaggcccatgtcaaccagctcagagtcctccttgattattaaacgactaactctaaagttgatgcagcactcttggtcagtctctgctctgacactggatcctgctaagcttctggaagaatttccacgttggctggaaaaactctctgctcgtcatcaaggcagcatcatcatcgttattgattctatagatcaagttcagcaagttgaaaaacacatgaaatggctgatagatccactgccagtgaatgtaagagtaattgtttctgtgaatgtagaaacatgccctccagcatggaggttgtggcctacacttcatcttgatcccttaagtccaaaagatgcaaaatctattataattgcagaatgccactctgtagacattaaattgagtaaagagcaggagaagaagctagaacgacactgtcgttctgctacaacctgcaatgccctttatgtcacccttttcggcaaaatgatcgcgcgtgctgggagagcaggcaatttagataaaatccttcatcagtgtttccagtgtcaagatactctttcattatatagacttgttctgcactctatccgggagtccatggcaaatgatgtggataaagagctaatgaagcagatcctctgccttgtcaatgttagtcacaatggtgtgagtgaatcagaactgatggaactctatcctgagatgtcctggactttcttgacctcccttattcacagtttatacaaaatgtgtttgttgacttatggatgtggcttgcttaggtttcaacatctgcaggcttgggaaacagtgagattggagtacctggaaggccccactgttacttcttcatacaggcaaaagctaatcaactatttcaccttgcagctaagtcaggacagagtgacttggagaagtgcagatgaactcccgtggctttttcagcagcagggaagtaaacagaagctgcatgattgccttcttaatctctttgtgtctcaaaacctttataaaaggggacactttgctgagttgctgagttattggcagtttgttggcaaagacaaaagtgcaatggcaacagaatacttcgattcattgaagcagtatgagaaaaactgcgaaggcgaggacaacatgagttgcttagctgatctttatgaaaccttggggcgatttctcaaggatctaggccttctcagtcaggccatagtacctttgcagaggtctttagagattcgagaaacagctttagatcccgatcacccaagagtagcccagtccctccaccaactagcaagtgtatacgtgcagtggaagaagtttggcaatgcagaacaactgtataaacaggcgttggaaatctcagaaaatgcttatggtgcggaccatccatatactgctcgtgaacttgaagcacttgcaactttgtaccagaaacaaaataaatatgaacaagctgaacattttaggaaaaaatcctttaaaattcatcagaaagctataaagaaaaaaggcaacttgtacggatttgcccttttacgtagacgggctttacagttagaagagcttacattaggtaaggacacacctgataatgctcggaccctcaatgaactgggtgttctctactatcttcaaaataacctggaaacagctgaccagtttctgaagcgttccttagaaatgagggagcgagttctaggaccagatcaccctgactgtgctcagtctttgaataatctggcagctctatgcaatgaaaagaaacagtatgataaagcagaagaactttatgaaagagctttagatattcggagacgtgcattagctcctgatcacccttctttggcatatacggtgaagcatcttgccatcttgtataagaaaatggggaaacttgacaaagctgtacctttgtatgaattggctgttgaaattcgacagaaatcttttggcccaaagcaccctagtgtagctactgccttggtgaacttagctgttctttatagccaaatgaaaaaacacgttgaagctttgccattatatgaaagagcattaaagatttatgaagatagcctgggtcggatgcatcctcgagttggagaaacactgaaaaatttagctgtgcttagctatgaaggaggagattttgaaaaagctgctgaattatacaaaagggcaatggaaataaaagaagcagaaacatcactcttgggtggaaaagctccttcacgccattcatcaagtggagacacgtttagcttaaaaacagctcattctcctaatgttttccttcagcaaggacaaaggtaatagcagcagttagaattctttgcaaatgtaccttaagacaaaataattaaacatttggaacatttgaatttgaaactttaaaaaaatgttgtacgaaattttactacgtgtgatttaactgctatttgtatgaagttgtattggattacattaagttggaattgtgattatgtctgttttagttgtttaaaagaattttcctattatatggtatccaaggatgtagacacattagaattataagaagacatgaggagcaaatcatgaagagcggattggtct

SEQ ID NO: 245539 - DNA, 797 bp, Artificial Sequence
  derived and/or modified sequence
tctgccccaccccgtcccgttccgttccgctgcccagtcctgctggtactcactaggtagtagcggcaacggacgccatggggaccgcctcgtcgctcgtgagccccgcgggcggggaagtgatcgaggacacgtacggggcgggcggcggcgaggcctgcgagatcccggtggaggtgaagcccaaggcccgcctgctgcgcaactcgttccgccgaggcgcgggggcggcagcaggggccgggcccgggtcgctgccccgcggggtgggcgcgggcgggctgctgggggccagcttcaagtccactggctcgtcggtgccagagctggagtacgcggcggccgagtacgagcggctcaggaaggagtacgagatctttcgcgtcagcaagaaccaggagttgttgtccatgggccgccgcgaggccaagctggacacggagaacaagcggctgcgggccgaactgcaggcacttcaaaaaacgtatcagaagatacttcgagaaaaagaaagtgctttagaagcgaaataccaagcaatggagagagcagcaacatttgaacatgacagagataaagttaaaaggcaattcaagatttttagggagaccaaagaaaatgaaattcaggacttactgagggccaagagggagttggagagcaaacttcagaggctacaggctcagggtatccaagtatttgatcctggggagtctgattcagatgacaactgtacagatgtcactgtatcattggaatctgaccaacatcctggaatttttattgctaacttttaa

SEQ ID NO: 245540 - DNA, 486 bp, Artificial Sequence
  derived and/or modified sequence
ggtactcactaggtagtagcggcaacggacgccatggggaccgcctcgtcgctcgtgagccccgcgggcggggaagtgatcgaggacacgtacggggcgggcggcggcgaggcctgcgagatcccggtggaggtgaagcccaaggcccgcctgctgcgcaactcgttccgccgaggcgcgggggcggcagcaggggccgggcccgggtcgctgccccgcggggtgggcgcgggcgggctgctgggggccagcttcaagtccactggctcgtcggtgccagagctggagtacgcggcggccgagtacgagcggctcaggaaggagtacgagatctttcgcgtcagcaagaaccaggagttgttgtccatgggccgccgcgaggccaagctggacacggagaacaagcggctgcgggccgaactgcagggtctcgctgcggtggcacgatcgcggctcactgcaacctggaactcctgggctcaatga

SEQ ID NO: 245541 - DNA, 2186 bp, Artificial Sequence
  derived and/or modified sequence
ataatagcaaatgctgggagagcaggcaatttagataaaatccttcatcagtgtttccagtgtcaagatactctttcattatatagacttgttctgcactctatccgggagtccatggcaaatgatgtggataaagagctaatgaagcagatcctctgccttgtcaatgttagtcacaatggtgtgagtgaatcagaactgatggaactctatcctgagatgtcctggactttcttgacctcccttattcacagtttatacaaaatgtgtttgttgacttatggatgtggcttgcttaggtttcaacatctgcaggcttgggaaacagtgagattggagtacctggaaggccccactgttacttcttcatacaggcaaaagctaatcaactatttcaccttgcagctaagtcaggacagagtgacttggagaagtgcagatgaactcccgtggctttttcagcagcagggaagtaaacagaagctgcatgattgccttcttaatctctttgtgtctcaaaacctttataaaaggggacactttgctgagttgctgagttattggcagtttgttggcaaagacaaaagtgcaatggcaacagaatacttcgattcattgaagcagtatgagaaaaactgcgaaggcgaggacaacatgagttgcttagctgatctttatgaaaccttggggcgatttctcaaggatctaggccttctcagtcaggccatagtacctttgcagaggtctttagagattcgagaaacagctttagatcccgatcacccaagagtagcccagtccctccaccaactagcaagtgtatacgtgcagtggaagaagtttggcaatgcagaacaactgtataaacaggcgttggaaatctcagaaaatgcttatggtgcggaccatccatatactgctcgtgaacttgaagcacttgcaactttgtaccagaaacaaaataaatatgaacaagctgaacattttaggaaaaaatcctttaaaattcatcagaaagctataaagaaaaaaggcaacttgtacggatttgcccttttacgtagacgggctttacagttagaagagcttacattaggtaaggacacacctgataatgctcggaccctcaatgaactgggtgttctctactatcttcaaaataacctggaaacagctgaccagtttctgaagcgttccttagaaatgagggagcgagttctaggaccagatcaccctgactgtgctcagtctttgaataatctggcagctctatgcaatgaaaagaaacagtatgataaagcagaagaactttatgaaagagctttagatattcggagacgtgcattagctcctgatcacccttctttggcatatacggtgaagcatcttgccatcttgtataagaaaatggggaaacttgacaaagctgtacctttgtatgaattggctgttgaaattcgacagaaatcttttggcccaaagcaccctagtgtagctactgccttggtgaacttagctgttctttatagccaaatgaaaaaacacgttgaagctttgccattatatgaaagagcattaaagatttatgaagatagcctgggtcggatgcatcctcgagttggagaaacactgaaaaatttagctgtgcttagctatgaaggaggagattttgaaaaagctgctgaattatacaaaagggcaatggaaataaaagaagcagaaacatcactcttgggtggaaaagctccttcacgccattcatcaagtggagacacgtttagcttaaaaacagctcattctcctaatgttttccttcagcaaggacaaaggaaagtccaatccaaccttttatctccagaagggctttcaaacatatgtgctcaggaaaaaaccaccaggttcacttcttcctaaagcacatcagattgatagagaatttaaagtccagaaagccttgttttcaattggattccccgttcccaagcctatactgtactgcagtgatacttctgtcattggaacagaattttacgtaatggaacatgtgcagggtcgaatcttccgtgatttaacaattcctggacttagcccagcagaacgttcagccatatatgtggccacggtagaaacattggctcagttacgttccttgaatatacagtcactgcagctggaaggatatggta

SEQ ID NO: 245542 - DNA, 4124 bp, Artificial Sequence
  derived and/or modified sequence
tctgccccaccccgtcccgttccgttccgctgcccagtcctgctggtactcactaggtagtagcggcaacggacgccatggggaccgcctcgtcgctcgtgagccccgcgggcggggaagtgatcgaggacacgtacggggcgggcggcggcgaggcctgcgagatcccggtggaggtgaagcccaaggcccgcctgctgcgcaactcgttccgccgaggcgcgggggcggcagcaggggccgggcccgggtcgctgccccgcggggtgggcgcgggcgggctgctgggggccagcttcaagtccactggctcgtcggtgccagagctggagtacgcggcggccgagtacgagcggctcaggaaggagtacgagatctttcgcgtcagcaagaaccaggagttgttgtccatgggccgccgcgaggccaagctggacacggagaacaagcggctgcgggccgaactgcaggcacttcaaaaaacgtatcagaagatacttcgagaaaaagaaagtgctttagaagcgaaataccaagcaatggagagagcagcaacatttgaacatgacagagataaagttaaaaggcaattcaagatttttagggagaccaaagaaaatgaaattcaggacttactgagggccaagagggagttggagagcaaacttcagaggctacaggctcagggtatccaagtatttgatcctggggagtctgattcagatgacaactgtacagatgtcactgctgctggaacccaatgtgaatattggactggcggagccttgggaagtgaaccttccataggaagcatgatccagcttcagcagtccttcagaggccctgagtttgcccatagttctatagatgtggaaggaccctttgcaaatgttaatagagatgactgggatattgctgtagctagtttattacaagttactcctctgttttcacattctctgtggagtaacactgtcagatgttacctcatttatacagatgaaacccagcctgagatggatcttttccttaaggactattcacctaaacttaagagaatgtgcgagacaatgggatattttttccatgctgtttattttccaatagatgttgaaaatcaatacctcactgtaagaaaatgggaaattgagaaaagttctttagttattttatttattcacttaacattaccaagccttttattggaagactgtgaagaagcttttctgaaaaaccctgaaggaaaacctcgattaatctttcatcgtttggaagatggaaaagtcagttctgactctgtccagcaattgattgatcaagtttctaatctaaacaagaccagcaaagccaagatcattgatcactcaggagatcctgcagaaggagtatataaaacttatatttgtgtagaaaagattattaaacaggacatactgggttttgagaacacagacttggagactaaggatttgggcagtgaggattccattccagaagaagatgattttggtgatgttctgtgggacatacatgatgaacaagagcaaatggaaacttttcagcaggcttctaattcagcccatgagttgggatttgagaaatattaccaacgccttaatgatctagtggcagcaccagccccgattccacctcttctcgtgtctggaggaccaggttctgggaagtctcttcttttatcaaagtggattcaattacaacagaagaattcccccaacacactgattctttcccattttgtgggaaggcccatgtcaaccagctcagagtcctccttgattattaaacgactaactctaaagttgatgcagcactcttggtcagtctctgctctgacactggatcctgctaagcttctggaagaatttccacgttggctggaaaaactctctgctcgtcatcaaggcagcatcatcatcgttattgattctatagatcaagttcagcaagttgaaaaacacatgaaatggctgatagatccactgccagtgaatgtaagagtaattgtttctgtgaatgtagaaacatgccctccagcatggaggttgtggcctacacttcatcttgatcccttaagtccaaaagatgcaaaatctattataattgcagaatgccactctgtagacattaaattgagtaaagagcaggagaagaagctagaacgacactgtcgttctgctacaacctgcaatgccctttatgtcacccttttcggcaaaatgatcgcgcgtgctgggagagcaggcaatttagataaaatccttcatcagtgtttccagtgtcaagatactctttcattatatagacttgttctgcactctatccgggagtccatggcaaatgatgtggataaagagctaatgaagcagatcctctgccttgtcaatgttagtcacaatggtgtgagtgaatcagaactgatggaactctatcctgagatgtcctggactttcttgacctcccttattcacagtttatacaaaatgtgtttgttgacttatggatgtggcttgcttaggtttcaacatctgcaggcttgggaaacagtgagattggagtacctggaaggccccactgttacttcttcatacaggcaaaagctaatcaactatttcaccttgcagctaagtcaggacagagtgacttggagaagtgcagatgaactcccgtggctttttcagcagcagggaagtaaacagaagctgcatgattgccttcttaatctctttgtgtctcaaaacctttataaaaggggacactttgctgagttgctgagttattggcagtttgttggcaaagacaaaagtgcaatggcaacagaatacttcgattcattgaagcagtatgagaaaaactgcgaaggcgaggacaacatgagttgcttagctgatctttatgaaaccttggggcgatttctcaaggatctaggccttctcagtcaggccatagtacctttgcagaggtctttagagattcgagaaacagctttagatcccgatcacccaagagtagcccagtccctccaccaactagcaagtgtatacgtgcagtggaagaagtttggcaatgcagaacaactgtataaacaggcgttggaaatctcagaaaatgcttatggtgcggaccatccatatactgctcgtgaacttgaagcacttgcaactttgtaccagaaacaaaataaatatgaacaagctgaacattttaggaaaaaatcctttaaaattcatcagaaagctataaagaaaaaaggcaacttgtacggatttgcccttttacgtagacgggctttacagttagaagagcttacattaggtaaggacacacctgataatgctcggaccctcaatgaactgggtgttctctactatcttcaaaataacctggaaacagctgaccagtttctgaagcgttccttagaaatgagggagcgagttctaggaccagatcaccctgactgtgctcagtctttgaataatctggcagctctatgcaatgaaaagaaacagtatgataaagcagaagaactttatgaaagagctttagatattcggagacgtgcattagctcctgatcacccttctttggcatatacggtgaagcatcttgccatcttgtataagaaaatggggaaacttgacaaagctgtacctttgtatgaattggctgttgaaattcgacagaaatcttttggcccaaagcaccctagtgtagctactgccttggtgaacttagctgttctttatagccaaatgaaaaaacacgttgaagctttgccattatatgaaagagcattaaagatttatgaagatagcctgggtcggatgcatcctcgagttggagaaacactgaaaaatttagctgtgcttagctatgaaggaggagattttgaaaaagctgctgaattatacaaaagggcaatggaaataaaagaagcagaaacatcactcttgggtggaaaagctccttcacgccattcatcaagtggagacacgtttagcttaaaaacagctcattctcctaatgttttccttcagcaaggacaaagagcaggaaagtccaatccaaccttttatctccagaagggctttcaaacatatgtgctc

SEQ ID NO: 245543 - DNA, 2115 bp, Artificial Sequence
  derived and/or modified sequence
atgggcacagcttcttcactggtttcaccagcgggtggggaggtcatcgaggatacttatggcgctggaggaggtgaagcttgtgagattcctgtcgaggtgaagcctaaagccagactccttcgcaattccttccgcagaggagccggtgccgctgccggagcgggtccagggagcttgcccaggggggtcggcgctggaggtctgctgggtgctagtttcaaatccaccggcagttccgtgcctgaactcgagtatgccgctgctgagtatgagagactgaggaaagagtacgagatctttagggtatcaaagaaccaggaactcctatctatgggtaggcgagaggccaagttggacacagagaacaagcggctgcgggcagaactccaagctctccagaagacgtatcagaagattttacgcgaaaaagagagtgccctggaagctaagtaccaggcaatggaaagggccgctaccttcgagcacgatagagacaaagtcaagcgtcaattcaaaatatttcgtgagacgaaggaaaatgagattcaggacctgcttcgagccaagagggaattggaaagtaaactgcagagactccaggcccaggggattcaggtcttcgatccaggtgagtctgactccgacgacaattgtaccgatgtgacggcagcgggaacccagtgcgagtactggaccggtggggctctggggtctgagccgtctatcggtagcatgatccagttgcagcaatcttttcgtggccctgagtttgcacattctagcatcgacgtggaggggccatttgccaatgttaatagggacgattgggatattgccgtggcctcacttctgcaggtgacgccacttttcagccacagtctgtggagtaacaccgtgaggtgttacctgatctacacagacgagacacagccggagatggacctgttccttaaggactattctccaaaattgaagagaatgtgcgaaaccatgggctacttttttcacgcggtttacttccccatagatgttgagaatcaatacttgacagtcagaaaatgggagatcgaaaagagttctcttgtcattctgtttattcatctgaccctcccctcactgctcctggaagattgcgaagaggccttcctcaaaaacccagagggtaagcccaggctgatctttcacaggctggaagacggtaaggtgagcagcgattctgtgcagcagctgatagatcaggttagtaacctaaataaaaccagtaaagcaaaaataatcgaccatagtggagacccggcagagggtgtttacaaaacctatatctgcgttgagaagattatcaaacaggacatcctgggcttcgagaacacagacctggagactaaagatctgggatccgaggactcaattccggaggaggacgacttcggagacgttctttgggatatccatgacgagcaggagcagatggaaactttccaacaggctagtaattctgcccatgagcttgggtttgagaagtattaccaacgcctgaatgatctggttgccgcacctgcccctattcctccactgctggtcagcggtgggcctggctccggcaagtccctcctgctgtccaagtggattcagttgcagcaaaagaatagcccaaacacgctaattctgtcacactttgtcggcaggcccatgtctacatcctctgaaagctcattgattatcaaaagactgacactgaagctgatgcaacactcctggtctgtgtcggccctcactctcgaccccgcaaaactcctggaggagttccctcgttggctggaaaagctttccgctcgccaccagggcagtatcatcatcgtgattgactctatcgatcaggtgcagcaggtcgaaaaacacatgaagtggttgattgaccctctccccgtaaatgtccgagtgatcgtgtccgtgaacgtggagacatgtcccccagcgtggcgtctgtggcccaccctgcatctggacccattatcgcccaaggatgctaaatctatcatcattgctgagtgtcacagtgtagatataaagctgagtaaggagcaatgctgggagtctcggcagttccgctag

SEQ ID NO: 245544 - DNA, 3993 bp, Artificial Sequence
  derived and/or modified sequence
atgggaaccgcaagcagcctcgtgagtccagcaggcggtgaggtgatagaagacacatatggagccggaggcggagaggcctgcgagatacccgtcgaggtaaagccaaaggccaggctgcttcggaactcctttaggcgaggggcaggagcagccgctggcgctggacccggatcgctgccaaggggcgtaggcgctggagggctgctgggagcttcattcaaatccaccgggtctagcgtcccagaactggagtatgccgcagcagagtacgaacgactcagaaaggagtacgagatctttagggttagcaagaatcaggaattactgagcatgggtcgccgagaagccaaattagataccgaaaataaaaggctcagagctgaactgcaagcgctccagaaaacttatcagaagatactgagggaaaaagagtcggctctagaggccaagtaccaggcaatggagcgcgctgcaactttcgagcacgatcgggataaggtgaaaaggcagttcaagatatttcgcgagaccaaggaaaatgagattcaggatttgctaagagctaagagggaacttgagtccaaactgcagaggctgcaggcacaggggatccaggtgttcgatccaggagaaagcgattctgacgacaactgcactgatgtcaccgccgctggaacgcagtgtgagtactggactggcggtgctctgggctcagaaccttccataggatccatgattcagcttcagcagtcatttaggggacccgagtttgctcatagttccattgatgtggagggcccttttgctaatgtgaaccgggatgattgggatattgcagtggcatctcttctgcaggttacacctctgttttctcattccctgtggtctaatactgtgcgatgttacctaatctacacagatgaaactcagccggagatggatctatttctcaaagattattccccaaagcttaagcgcatgtgcgagacgatggggtacttcttccacgcggtctatttccctattgatgtggagaatcagtacctgaccgtgcggaagtgggaaattgagaaaagctcactggtgatcctgttcatccatttaaccctgcctagcttgctcctcgaggactgtgaggaagcattcttgaagaaccccgaaggtaaacctcgattgattttccaccgactggaggacggtaaagtgagttccgacagtgtgcaacagctgattgatcaagtaagcaatctgaataagacatctaaggctaagatcattgaccactcaggtgacccggctgaaggggtttataaaacttacatctgcgttgaaaaaatcatcaaacaagatatccttggcttcgaaaataccgacctggaaaccaaggacctgggcagcgaagactccattccagaagaggatgatttcggtgatgttttatgggacatccatgatgagcaagaacagatggagactttccaacaggcaagcaactccgctcacgaattggggtttgaaaaatattaccagaggctgaacgatcttgtcgcggctcccgctcccatccctcccctcctggtgtcaggagggccagggtccggaaaatctctgctactttctaagtggatccaactgcaacagaaaaactcccctaacacactgattctcagccatttcgtgggaaggccaatgtccacaagtagcgaatccagccttattataaaaaggctgacactgaaactcatgcaacactcctggtctgtgtctgccttaacactggaccccgctaaactcctggaagagttcccacgttggctcgagaaactgtcagctcggcatcagggttccatcatcattgttattgattccattgaccaagttcaacaggtagagaaacatatgaagtggcttatcgacccgctgcccgtaaatgtcagagtaatcgtctctgtgaatgtcgagacgtgccctcctgcgtggaggctatggccaactctgcatttagaccccctctctcctaaagacgcaaaatcaattatcatcgcagagtgtcactccgtcgatataaagcttagcaaggagcaggaaaagaagcttgaacggcactgcaggagcgccacaacctgcaatgcattgtatgtaacacttttcggaaagatgatcgctagggccggacgagccggaaatttagataagatactgcatcagtgcttccagtgtcaagacacgctgtctctgtaccggctggtgcttcacagcattcgcgaatcaatggccaacgatgtggacaaggaactcatgaaacagatactttgtttggtcaacgtctcccataatggtgtctccgagtccgagctgatggagctctaccccgagatgtcttggacctttctgacttcacttatacacagcctctataagatgtgtctgctgacgtacggctgcgggctattacgattccagcatcttcaagcttgggaaactgtcagactagagtacctggaggggccaaccgtcacctcgtcatatcgccagaagctcattaactacttcacgctacaactgtcgcaggatagagtgacctggcggtcagctgatgaactcccctggctcttccagcagcagggctcaaagcagaaactccatgattgtttgttaaacctgttcgtgtcccagaatctatacaagcggggacacttcgctgaactgctatcctactggcaattcgtgggcaaggataagtccgcaatggctacagagtacttcgacagcctaaagcaatatgagaaaaactgcgaaggcgaggacaatatgtcctgtttggcagatttatacgaaaccttgggcagatttctgaaggacttaggactgctgagtcaagccattgtaccactgcaacgcagtctggaaattagggaaaccgccctcgatccagatcaccccagagttgcacagagcctccaccaactcgcttcagtttacgtgcagtggaagaagttcggcaacgccgaacagctttataaacaagcccttgagataagcgagaacgcatacggagcagaccacccctacaccgccagggagctggaagcactcgccaccctgtatcagaaacagaataaatacgagcaggctgagcatttccggaaaaaaagctttaagatccaccaaaaagccataaagaaaaaagggaatctgtacgggtttgcactgctgagacgcagagcgctgcagcttgaagaattgacgctcgggaaggacactccagacaatgcaaggactctgaatgaattgggagtgctatactatctgcagaacaacctggagactgccgatcagtttcttaaacgatcactcgagatgcgggagcgcgtcctggggccagatcacccggactgtgctcaatctctgaataacctggcggctctgtgcaatgaaaaaaaacagtacgacaaggctgaggagctttacgagagagcccttgacatcagacgacgggctctagcccctgaccacccgtcgctagcttacacagtcaagcacctggcaattctgtataaaaagatggggaagttagacaaagccgtgccgctgtatgagctggctgtggagatcagacagaagagtttcggacctaagcacccgtcggtggcaaccgccctcgtgaacctggccgttctctattcgcagatgaagaagcacgtagaagctctcccgctgtacgagcgcgctttgaagatttatgaggactctttgggacgaatgcacccaagagtgggcgagactctcaagaacctagcagtgttgagctatgagggaggagacttcgaaaaggccgcagagctgtacaaaagagcaatggagattaaggaggcggaaaccagtcttcttggcggtaaagcccctagtagacattcatcctctggcgataccttcagtttgaaaacagcacatagccctaacgtttttttgcagcagggccagagatag

SEQ ID NO: 245545 - DNA, 720 bp, Artificial Sequence
  derived and/or modified sequence
atggggaccgcaagttcgttggtttcaccagctggaggagaagtgattgaagacacctatggcgcaggcggaggtgaggcatgtgagattcccgtggaagtgaagccaaaagcgagactgctgcggaactctttccgtcgtggggcaggcgcagctgcaggcgcaggcccaggcagcctgccacggggtgtgggagcgggtgggctgctgggcgcatcgttcaagtcaaccggatctagcgtgcccgagctagaatacgctgccgctgaatatgagcgactacggaaagaatacgaaatctttcgtgtttccaagaaccaggagctgctgagtatgggtcgccgagaggctaaactggacaccgagaataaacggcttcgcgcagaattacaggccctgcagaaaacttatcagaagatcctgagggaaaaagaaagcgccctggaagcaaaataccaagccatggagagagccgcaacatttgagcacgatagagataaagtaaagagacagtttaagatcttcagagagactaaagagaatgagatccaggatcttctccgggctaagcgggagttggaatccaagctgcagagacttcaggcccagggcatccaagtgttcgaccctggagagtccgacagtgatgacaattgcaccgatgttaccgtgagtctagagagcgaccaacatcccggtatattcatagctaatttctag

SEQ ID NO: 245546 - DNA, 453 bp, Artificial Sequence
  derived and/or modified sequence
atgggcactgcttctagtttggtgtctcctgctgggggtgaggtgatagaggacacctatggagcaggcggaggagaggcttgcgaaatccctgtggaggtgaaacccaaggctaggcttctcaggaactccttcaggcgaggtgcaggtgccgcagcaggagccggtcctggttcccttcctcggggtgtcggagctggaggcctcctcggcgcttccttcaagagtaccggatctagcgtgccggagctggagtatgctgccgcagagtacgagcggctccggaaagagtacgaaatttttcgggtgtcaaagaatcaggaattactgtccatgggcagacgcgaggccaaactggacactgaaaacaagcggctgagggccgagttgcaggggctcgccgcagtagccagaagccgattaactgccacctggaactcctgggcccaatag

SEQ ID NO: 245547 - DNA, 1914 bp, Artificial Sequence
  derived and/or modified sequence
atcatcgcaaatgcgggtcgggcaggaaacttagataagatcttgcatcagtgtttccaatgtcaagatacactgagcctgtatcggctcgtcttgcacagtattcgcgagagcatggccaatgatgttgacaaggagttaatgaagcagatcctttgcctggtcaacgtgtctcataatggggtatcggagtctgagctgatggagttgtacccagaaatgagctggacattcctcacctcccttatccattcattgtataagatgtgtctgctgacctacgggtgcggcctgctgaggttccagcatttgcaggcttgggagaccgtccggttggaatatcttgaaggaccaacagtgacaagctcatacaggcagaagcttatcaactactttaccctgcaactgtcgcaggaccgggtcacatggagatcagccgatgagttgccgtggttatttcaacagcagggcagcaagcagaaactgcacgactgcctccttaacctctttgtatcccaaaatctgtacaaacggggacactttgcagaactgctgtcttattggcagttcgtgggcaaagataaaagtgcaatggcaaccgaatatttcgactccctgaaacagtatgaaaagaattgcgagggagaagataacatgagctgcttggcagatctgtacgaaactttgggccgattcctgaaagacctggggctcctttcacaagccatcgtgcctctgcaacggtcccttgaaataagagaaacggcccttgatcctgaccacccaagagtggctcagtccctgcaccagctcgcctctgtgtacgttcagtggaaaaagttcgggaacgccgagcagctatacaagcaggccctggagatctccgagaatgcttacggggcagaccacccttacacagctagggaactcgaagctctggctaccctgtatcagaagcagaacaagtacgagcaggccgaacacttcaggaaaaaaagctttaagatccaccagaaggcaattaaaaagaagggcaacctatatggcttcgcccttctccgacgccgagcactgcagctggaggagctgactctggggaaagatacccctgacaatgctagaacccttaacgaattgggcgtgttgtactatctgcaaaacaacctggagactgccgatcagtttctcaagaggtccctggaaatgcgcgaacgagtgttggggccagaccatccagactgtgctcagagcctgaataatctggcagcactgtgtaatgagaagaaacagtacgataaagctgaagaattgtacgagcgggctctggacataaggaggcgcgcactcgccccagaccatcccagccttgcatacacagtaaagcacctggccatcctctacaagaagatgggcaaacttgacaaagcagttccactgtacgaattggcggtggaaatccggcaaaagagctttggccctaagcatcccagcgttgccactgcactggtcaatctggcagtgctctactcccagatgaaaaagcacgtcgaggcactgccactttacgaaagagcccttaagatttatgaagactccctcggacgcatgcaccccagagtgggagagaccctgaagaatctggccgttctctcgtacgaaggcggtgatttcgagaaggcggctgagctgtataagcgagccatggagattaaagaggccgaaactagcctgctggggggaaaggctccgtcccggcatagcagctctggcgatacgtttagcctgaaaactgcacacagccctaacgtttttctgcaacaggggcaacgcaaggtccagtctaatctactctcacccgaaggcctgtctaatatctgcgcccaagaaaagacaacaaggtttaccagcagctag

SEQ ID NO: 245548 - DNA, 1236 bp, Artificial Sequence
  derived and/or modified sequence
atgagctgcctggccgacctgtatgaaactctcggcagattcctaaaggacctcggcctgctcagccaggccatcgtgcccctacagaggtcactcgagatacgggagaccgctctggaccccgaccatcctcgcgtggcccagagcttgcatcaactggcctcggtatacgtacaatggaagaaatttggaaatgccgagcagctttacaaacaggcgttagagatctctgagaacgcgtatggtgctgatcacccctacaccgctcgcgaattagaagctcttgctacgctgtaccagaagcagaataagtacgagcaggccgaacactttagaaagaaaagcttcaagattcatcaaaaggccattaaaaagaagggcaatctgtatggattcgctctgcttcggagaagagcactgcagttggaggaactgacgttgggaaaagacactccagataacgccagaactctgaatgaactcggcgtgctttattatcttcagaacaacttggaaacagccgatcagttcctgaagcgtagcctggaaatgagagaacgggttttaggtcccgaccatcctgactgcgcccagtcccttaacaatctggcagccctttgcaatgagaagaaacagtatgacaaggcagaagagttatacgaacgcgcattagacatccgcaggcgggctcttgcaccagaccatccttcgctggcttacacagtgaaacatttggcaatcctttataaaaaaatgggaaagcttgacaaggcagtgccactgtacgagctcgcagttgaaatccgccagaaatcttttggcccaaagcaccccagcgttgccacggctcttgtgaacctggccgtgttgtattcccagatgaagaagcacgtggaggctcttcctttgtatgaacgagccctaaaaatctacgaggatagcctaggacgaatgcatccccgtgtgggagaaaccctcaagaatttagccgtcttgtcctacgaggggggtgatttcgagaaggccgctgaattgtataagagggccatggagatcaaggaagccgagaccagtctgttaggtgggaaggctccttccaggcactcatcatctggcgacacgttctcacttaagaccgcccacagtccaaatgtgttcctacagcagggtcaaagagccggtaaatccaatccaacgttctacctgcagaagggcttccagacttacgtcctttag

SEQ ID NO: 245549 - DNA, 2115 bp, Artificial Sequence
  derived and/or modified sequence
atgggcaccgccagcagcctggtgagccccgccggcggcgaggtgatcgaggacacctacggcgccggcggcggcgaggcctgcgagatccccgtggaggtgaagcccaaggccagactgctgagaaacagcttcagaagaggcgccggcgccgccgccggcgccggccccggcagcctgcccagaggcgtgggcgccggcggcctgctgggcgccagcttcaagagcaccggcagcagcgtgcccgagctggagtacgccgccgccgagtacgagagactgagaaaggagtacgagatcttcagagtgagcaagaaccaggagctgctgagcatgggcagaagagaggccaagctggacaccgagaacaagagactgagagccgagctgcaggccctgcagaagacctaccagaagatcctgagagagaaggagagcgccctggaggccaagtaccaggccatggagagagccgccaccttcgagcacgacagagacaaggtgaagagacagttcaagatcttcagagagaccaaggagaacgagatccaggacctgctgagagccaagagagagctggagagcaagctgcagagactgcaggcccagggcatccaggtgttcgaccccggcgagagcgacagcgacgacaactgcaccgacgtgaccgccgccggcacccagtgcgagtactggaccggcggcgccctgggcagcgagcccagcatcggcagcatgatccagctgcagcagagcttcagaggccccgagttcgcccacagcagcatcgacgtggagggccccttcgccaacgtgaacagagacgactgggacatcgccgtggccagcctgctgcaggtgacccccctgttcagccacagcctgtggagcaacaccgtgagatgctacctgatctacaccgacgagacccagcccgagatggacctgttcctgaaggactacagccccaagctgaagagaatgtgcgagaccatgggctacttcttccacgccgtgtacttccccatcgacgtggagaaccagtacctgaccgtgagaaagtgggagatcgagaagagcagcctggtgatcctgttcatccacctgaccctgcccagcctgctgctggaggactgcgaggaggccttcctgaagaaccccgagggcaagcccagactgatcttccacagactggaggacggcaaggtgagcagcgacagcgtgcagcagctgatcgaccaggtgagcaacctgaacaagaccagcaaggccaagatcatcgaccacagcggcgaccccgccgagggcgtgtacaagacctacatctgcgtggagaagatcatcaagcaggacatcctgggcttcgagaacaccgacctggagaccaaggacctgggcagcgaggacagcatccccgaggaggacgacttcggcgacgtgctgtgggacatccacgacgagcaggagcagatggagaccttccagcaggccagcaacagcgcccacgagctgggcttcgagaagtactaccagagactgaacgacctggtggccgcccccgcccccatcccccccctgctggtgagcggcggccccggcagcggcaagagcctgctgctgagcaagtggatccagctgcagcagaagaacagccccaacaccctgatcctgagccacttcgtgggcagacccatgagcaccagcagcgagagcagcctgatcatcaagagactgaccctgaagctgatgcagcacagctggagcgtgagcgccctgaccctggaccccgccaagctgctggaggagttccccagatggctggagaagctgagcgccagacaccagggcagcatcatcatcgtgatcgacagcatcgaccaggtgcagcaggtggagaagcacatgaagtggctgatcgaccccctgcccgtgaacgtgagagtgatcgtgagcgtgaacgtggagacctgcccccccgcctggagactgtggcccaccctgcacctggaccccctgagccccaaggacgccaagagcatcatcatcgccgagtgccacagcgtggacatcaagctgagcaaggagcagtgctgggagagcagacagttcagatag

SEQ ID NO: 245550 - DNA, 3993 bp, Artificial Sequence
  derived and/or modified sequence
atgggcaccgccagcagcctggtgagccccgccggcggcgaggtgatcgaggacacctacggcgccggcggcggcgaggcctgcgagatccccgtggaggtgaagcccaaggccagactgctgagaaacagcttcagaagaggcgccggcgccgccgccggcgccggccccggcagcctgcccagaggcgtgggcgccggcggcctgctgggcgccagcttcaagagcaccggcagcagcgtgcccgagctggagtacgccgccgccgagtacgagagactgagaaaggagtacgagatcttcagagtgagcaagaaccaggagctgctgagcatgggcagaagagaggccaagctggacaccgagaacaagagactgagagccgagctgcaggccctgcagaagacctaccagaagatcctgagagagaaggagagcgccctggaggccaagtaccaggccatggagagagccgccaccttcgagcacgacagagacaaggtgaagagacagttcaagatcttcagagagaccaaggagaacgagatccaggacctgctgagagccaagagagagctggagagcaagctgcagagactgcaggcccagggcatccaggtgttcgaccccggcgagagcgacagcgacgacaactgcaccgacgtgaccgccgccggcacccagtgcgagtactggaccggcggcgccctgggcagcgagcccagcatcggcagcatgatccagctgcagcagagcttcagaggccccgagttcgcccacagcagcatcgacgtggagggccccttcgccaacgtgaacagagacgactgggacatcgccgtggccagcctgctgcaggtgacccccctgttcagccacagcctgtggagcaacaccgtgagatgctacctgatctacaccgacgagacccagcccgagatggacctgttcctgaaggactacagccccaagctgaagagaatgtgcgagaccatgggctacttcttccacgccgtgtacttccccatcgacgtggagaaccagtacctgaccgtgagaaagtgggagatcgagaagagcagcctggtgatcctgttcatccacctgaccctgcccagcctgctgctggaggactgcgaggaggccttcctgaagaaccccgagggcaagcccagactgatcttccacagactggaggacggcaaggtgagcagcgacagcgtgcagcagctgatcgaccaggtgagcaacctgaacaagaccagcaaggccaagatcatcgaccacagcggcgaccccgccgagggcgtgtacaagacctacatctgcgtggagaagatcatcaagcaggacatcctgggcttcgagaacaccgacctggagaccaaggacctgggcagcgaggacagcatccccgaggaggacgacttcggcgacgtgctgtgggacatccacgacgagcaggagcagatggagaccttccagcaggccagcaacagcgcccacgagctgggcttcgagaagtactaccagagactgaacgacctggtggccgcccccgcccccatcccccccctgctggtgagcggcggccccggcagcggcaagagcctgctgctgagcaagtggatccagctgcagcagaagaacagccccaacaccctgatcctgagccacttcgtgggcagacccatgagcaccagcagcgagagcagcctgatcatcaagagactgaccctgaagctgatgcagcacagctggagcgtgagcgccctgaccctggaccccgccaagctgctggaggagttccccagatggctggagaagctgagcgccagacaccagggcagcatcatcatcgtgatcgacagcatcgaccaggtgcagcaggtggagaagcacatgaagtggctgatcgaccccctgcccgtgaacgtgagagtgatcgtgagcgtgaacgtggagacctgcccccccgcctggagactgtggcccaccctgcacctggaccccctgagccccaaggacgccaagagcatcatcatcgccgagtgccacagcgtggacatcaagctgagcaaggagcaggagaagaagctggagagacactgcagaagcgccaccacctgcaacgccctgtacgtgaccctgttcggcaagatgatcgccagagccggcagagccggcaacctggacaagatcctgcaccagtgcttccagtgccaggacaccctgagcctgtacagactggtgctgcacagcatcagagagagcatggccaacgacgtggacaaggagctgatgaagcagatcctgtgcctggtgaacgtgagccacaacggcgtgagcgagagcgagctgatggagctgtaccccgagatgagctggaccttcctgaccagcctgatccacagcctgtacaagatgtgcctgctgacctacggctgcggcctgctgagattccagcacctgcaggcctgggagaccgtgagactggagtacctggagggccccaccgtgaccagcagctacagacagaagctgatcaactacttcaccctgcagctgagccaggacagagtgacctggagaagcgccgacgagctgccctggctgttccagcagcagggcagcaagcagaagctgcacgactgcctgctgaacctgttcgtgagccagaacctgtacaagagaggccacttcgccgagctgctgagctactggcagttcgtgggcaaggacaagagcgccatggccaccgagtacttcgacagcctgaagcagtacgagaagaactgcgagggcgaggacaacatgagctgcctggccgacctgtacgagaccctgggcagattcctgaaggacctgggcctgctgagccaggccatcgtgcccctgcagagaagcctggagatcagagagaccgccctggaccccgaccaccccagagtggcccagagcctgcaccagctggccagcgtgtacgtgcagtggaagaagttcggcaacgccgagcagctgtacaagcaggccctggagatcagcgagaacgcctacggcgccgaccacccctacaccgccagagagctggaggccctggccaccctgtaccagaagcagaacaagtacgagcaggccgagcacttcagaaagaagagcttcaagatccaccagaaggccatcaagaagaagggcaacctgtacggcttcgccctgctgagaagaagagccctgcagctggaggagctgaccctgggcaaggacacccccgacaacgccagaaccctgaacgagctgggcgtgctgtactacctgcagaacaacctggagaccgccgaccagttcctgaagagaagcctggagatgagagagagagtgctgggccccgaccaccccgactgcgcccagagcctgaacaacctggccgccctgtgcaacgagaagaagcagtacgacaaggccgaggagctgtacgagagagccctggacatcagaagaagagccctggcccccgaccaccccagcctggcctacaccgtgaagcacctggccatcctgtacaagaagatgggcaagctggacaaggccgtgcccctgtacgagctggccgtggagatcagacagaagagcttcggccccaagcaccccagcgtggccaccgccctggtgaacctggccgtgctgtacagccagatgaagaagcacgtggaggccctgcccctgtacgagagagccctgaagatctacgaggacagcctgggcagaatgcaccccagagtgggcgagaccctgaagaacctggccgtgctgagctacgagggcggcgacttcgagaaggccgccgagctgtacaagagagccatggagatcaaggaggccgagaccagcctgctgggcggcaaggcccccagcagacacagcagcagcggcgacaccttcagcctgaagaccgcccacagccccaacgtgttcctgcagcagggccagagatag

SEQ ID NO: 245551 - DNA, 720 bp, Artificial Sequence
  derived and/or modified sequence
atgggcaccgccagcagcctggtgagccccgccggcggcgaggtgatcgaggacacctacggcgccggcggcggcgaggcctgcgagatccccgtggaggtgaagcccaaggccagactgctgagaaacagcttcagaagaggcgccggcgccgccgccggcgccggccccggcagcctgcccagaggcgtgggcgccggcggcctgctgggcgccagcttcaagagcaccggcagcagcgtgcccgagctggagtacgccgccgccgagtacgagagactgagaaaggagtacgagatcttcagagtgagcaagaaccaggagctgctgagcatgggcagaagagaggccaagctggacaccgagaacaagagactgagagccgagctgcaggccctgcagaagacctaccagaagatcctgagagagaaggagagcgccctggaggccaagtaccaggccatggagagagccgccaccttcgagcacgacagagacaaggtgaagagacagttcaagatcttcagagagaccaaggagaacgagatccaggacctgctgagagccaagagagagctggagagcaagctgcagagactgcaggcccagggcatccaggtgttcgaccccggcgagagcgacagcgacgacaactgcaccgacgtgaccgtgagcctggagagcgaccagcaccccggcatcttcatcgccaacttctag

SEQ ID NO: 245552 - DNA, 453 bp, Artificial Sequence
  derived and/or modified sequence
atgggcaccgccagcagcctggtgagccccgccggcggcgaggtgatcgaggacacctacggcgccggcggcggcgaggcctgcgagatccccgtggaggtgaagcccaaggccagactgctgagaaacagcttcagaagaggcgccggcgccgccgccggcgccggccccggcagcctgcccagaggcgtgggcgccggcggcctgctgggcgccagcttcaagagcaccggcagcagcgtgcccgagctggagtacgccgccgccgagtacgagagactgagaaaggagtacgagatcttcagagtgagcaagaaccaggagctgctgagcatgggcagaagagaggccaagctggacaccgagaacaagagactgagagccgagctgcagggcctggccgccgtggccagaagcagactgaccgccacctggaacagctgggcccagtag

SEQ ID NO: 245553 - DNA, 1914 bp, Artificial Sequence
  derived and/or modified sequence
atcatcgccaacgccggcagagccggcaacctggacaagatcctgcaccagtgcttccagtgccaggacaccctgagcctgtacagactggtgctgcacagcatcagagagagcatggccaacgacgtggacaaggagctgatgaagcagatcctgtgcctggtgaacgtgagccacaacggcgtgagcgagagcgagctgatggagctgtaccccgagatgagctggaccttcctgaccagcctgatccacagcctgtacaagatgtgcctgctgacctacggctgcggcctgctgagattccagcacctgcaggcctgggagaccgtgagactggagtacctggagggccccaccgtgaccagcagctacagacagaagctgatcaactacttcaccctgcagctgagccaggacagagtgacctggagaagcgccgacgagctgccctggctgttccagcagcagggcagcaagcagaagctgcacgactgcctgctgaacctgttcgtgagccagaacctgtacaagagaggccacttcgccgagctgctgagctactggcagttcgtgggcaaggacaagagcgccatggccaccgagtacttcgacagcctgaagcagtacgagaagaactgcgagggcgaggacaacatgagctgcctggccgacctgtacgagaccctgggcagattcctgaaggacctgggcctgctgagccaggccatcgtgcccctgcagagaagcctggagatcagagagaccgccctggaccccgaccaccccagagtggcccagagcctgcaccagctggccagcgtgtacgtgcagtggaagaagttcggcaacgccgagcagctgtacaagcaggccctggagatcagcgagaacgcctacggcgccgaccacccctacaccgccagagagctggaggccctggccaccctgtaccagaagcagaacaagtacgagcaggccgagcacttcagaaagaagagcttcaagatccaccagaaggccatcaagaagaagggcaacctgtacggcttcgccctgctgagaagaagagccctgcagctggaggagctgaccctgggcaaggacacccccgacaacgccagaaccctgaacgagctgggcgtgctgtactacctgcagaacaacctggagaccgccgaccagttcctgaagagaagcctggagatgagagagagagtgctgggccccgaccaccccgactgcgcccagagcctgaacaacctggccgccctgtgcaacgagaagaagcagtacgacaaggccgaggagctgtacgagagagccctggacatcagaagaagagccctggcccccgaccaccccagcctggcctacaccgtgaagcacctggccatcctgtacaagaagatgggcaagctggacaaggccgtgcccctgtacgagctggccgtggagatcagacagaagagcttcggccccaagcaccccagcgtggccaccgccctggtgaacctggccgtgctgtacagccagatgaagaagcacgtggaggccctgcccctgtacgagagagccctgaagatctacgaggacagcctgggcagaatgcaccccagagtgggcgagaccctgaagaacctggccgtgctgagctacgagggcggcgacttcgagaaggccgccgagctgtacaagagagccatggagatcaaggaggccgagaccagcctgctgggcggcaaggcccccagcagacacagcagcagcggcgacaccttcagcctgaagaccgcccacagccccaacgtgttcctgcagcagggccagagaaaggtgcagagcaacctgctgagccccgagggcctgagcaacatctgcgcccaggagaagaccaccagattcaccagcagctag

SEQ ID NO: 245554 - DNA, 1236 bp, Artificial Sequence
  derived and/or modified sequence
atgagctgcctggccgacctgtacgagaccctgggcagattcctgaaggacctgggcctgctgagccaggccatcgtgcccctgcagagaagcctggagatcagagagaccgccctggaccccgaccaccccagagtggcccagagcctgcaccagctggccagcgtgtacgtgcagtggaagaagttcggcaacgccgagcagctgtacaagcaggccctggagatcagcgagaacgcctacggcgccgaccacccctacaccgccagagagctggaggccctggccaccctgtaccagaagcagaacaagtacgagcaggccgagcacttcagaaagaagagcttcaagatccaccagaaggccatcaagaagaagggcaacctgtacggcttcgccctgctgagaagaagagccctgcagctggaggagctgaccctgggcaaggacacccccgacaacgccagaaccctgaacgagctgggcgtgctgtactacctgcagaacaacctggagaccgccgaccagttcctgaagagaagcctggagatgagagagagagtgctgggccccgaccaccccgactgcgcccagagcctgaacaacctggccgccctgtgcaacgagaagaagcagtacgacaaggccgaggagctgtacgagagagccctggacatcagaagaagagccctggcccccgaccaccccagcctggcctacaccgtgaagcacctggccatcctgtacaagaagatgggcaagctggacaaggccgtgcccctgtacgagctggccgtggagatcagacagaagagcttcggccccaagcaccccagcgtggccaccgccctggtgaacctggccgtgctgtacagccagatgaagaagcacgtggaggccctgcccctgtacgagagagccctgaagatctacgaggacagcctgggcagaatgcaccccagagtgggcgagaccctgaagaacctggccgtgctgagctacgagggcggcgacttcgagaaggccgccgagctgtacaagagagccatggagatcaaggaggccgagaccagcctgctgggcggcaaggcccccagcagacacagcagcagcggcgacaccttcagcctgaagaccgcccacagccccaacgtgttcctgcagcagggccagagagccggcaagagcaaccccaccttctacctgcagaagggcttccagacctacgtgctgtag

SEQ ID NO: 245555 - protein, 1802 aa, Artificial Sequence
  derived and/or modified sequence
MAAAPTQIEAELYYLIARFLQSGPCNKSAQVLVQELEEHQLIPRRLDWEGKEHRRSFEDLVAANAHIPPDYLLKICERIGPLLDKEIPQSVPGVQTLLGVGRQSLLRDAKDCKSTLWNGSAFAALHRGRPPELPVNYVKPPNVVNITSARQLTGCSRFGHIFPSSAYQHIKMHKRILGHLSSVYCVAFDRSGRRIFTGSDDCLVKIWATDDGRLLATLRGHSAEISDMAVNYENTLIAAGSCDKVVRVWCLRTCAPVAVLQGHSASITSIQFCPSTKGTNRYLTSTGADGTICFWQWHVKTMKFRDRPVKFTERSRPGVQISCSSFSSGGMFITTGSTDHVIRIYYLGSEVPEKIAELESHTDKVVAVQFCNNGDSLRFVSGSRDGTARIWQYQQQEWKSIVLDMATKMTGNNLPSGEDKITKLKVTMVAWDRYDTTVITAVNNFLLKVWNSITGQLLHTLSGHDDEVFVLEAHPFDQRIILSAGHDGNIFIWDLDRGTKIRNYFNMIEGQGHGAVFDCKFSPDGNHFACTDSHGHLLLFGFGCSKYYEKIPDQMFFHTDYRPLIRDANNYVLDEQTQQAPHLMPPPFLVDVDGNPHPTKFQRLVPGRENCKDEQLIPQLGYVANGDGEVVEQVIGQQTNDQDESILDGIIRELQREQDLRLINEGDVPHLPVNRAYSVNGALRSPNMDISSSPNIRLRRHSSQIEGVRQMHNNAPRSQMATERDLMAWSRRVVVNELNNGVSRVQEECRTAKGDIEISLYTVEKKKKPSYTTQRNDYEPSCGRSLRRTQRKRQHTYQTRSNIEHNSQASCQNSGVQEDSDSSSEEDETVGTSDASVEDPVVEWQSESSSSDSSSEYSDWTADAGINLQPPKRQTRQTTRKICSSSDEENLKSLEERQKKPKQTRKKKGGLVSIAGEPNEEWFAPQWILDTIPRRSPFVPQMGDELIYFRQGHEAYVRAVRKSKIYSVNLQKQPWNKMDLREQEFVKIVGIKYEVGPPTLCCLKLAFLDPISGKMTGESFSIKYHDMPDVIDFLVLHQFYNEAKERNWQIGDRFRSIIDDAWWFGTVESQQPFQPEYPDSSFQCYSVHWDNNEREKMSPWDMEPIPEGTAFPDEVGAGVPVSQEELTALLYKPQEGEWGAHSRDEECERVIQGINHLLSLDFASPFAVPVDLSAYPLYCTVVAYPTDLNTIRRRLENRFYRRISALMWEVRYIEHNARTFNEPDSPIVKAAKIVTDVLLRFIGDQSCTDILDTYNKIKAEERNSTDAEEDTEIVDLDSDGPGTSSGRKVKCRGRRQSLKCNPDAWKKQCKELLSLIYEREDSEPFRQPADLLSYPGHQEQEGESSESVVPERQQDSSLSEDYQDVIDTPVDFSTVKETLEAGNYGSPLEFYKDVRQIFNNSKAYTSNKKSRIYSMMLRLSALFESHIKNIISEYKSAIQSQKRRRPRYRKRLRSSSSSLSSSGAPSPKGKQKQMKLQPKNDQNTSVSHARTSSPFSSPVSDAAEGLSLYLLDDEPDGPFSSSSFGGYSRSGNSHDPGKAKSFRNRVLPVKQDHSLDGPLTNGDGREPRTGIKRKLLSASEEDENMGGEDKEKKETKEKSHLSTSESGELGSSLSSESTCGSDSDSESTSRTDQDYVDGDHDYSKFIQTRPKRKLRKQHGNGKRNWKTRGTGGRGRWGRWGRWSRGGRGRGGRGRGSRGRGGGGTRGRGRGRGGRGASRGATRAKRARIADDEFDTMFSGRFSRLPRIKTRNQGRRTVLYNDDSDNDNFVSTEDPLNLGTSRSGRVRKMTEKARVSHLMGWNY

SEQ ID NO: 245556 - DNA, 5409 bp, Artificial Sequence
  derived and/or modified sequence
atggccgccgctccaacacagatcgaggcagagttatattacctgattgctcgatttctccagtccggaccctgtaacaagtccgcccaagtccttgtccaggagctggaggagcaccagctcattccacgccgcctcgactgggaaggaaaggagcatcgtagaagtttcgaggatctggtcgccgccaacgcgcacatcccaccagattatctgctgaaaatttgtgagcgcatcggaccgctgctggataaggagatcccgcagagtgtgccaggtgtgcaaaccctcctgggggtagggcgtcagtcccttctgagagatgccaaggactgcaaatccaccctgtggaatggtagtgcatttgcagcgctgcatcgaggccggccacccgaactcccagtaaactatgtcaaaccgcctaacgttgtgaatatcacctcagctcgacaactcacgggatgttcacgttttgggcatatcttcccaagcagtgcctaccagcacattaaaatgcacaagaggatcctgggtcatctgagctccgtttattgcgtggcttttgatcgtagtggccggcgcatatttacaggcagcgacgactgtctggttaagatctgggctactgacgatgggaggcttctcgctacgttgcggggtcattccgctgagatctccgatatggcagtcaactacgaaaatactttgatcgccgctgggtcttgtgacaaggtggtccgagtatggtgcctgaggacctgcgcccctgttgctgttctccaggggcacagtgcttccattacaagtatacagttttgtcctagtaccaaaggaacaaacaggtacctgacatccactggggctgacggcacaatttgcttctggcagtggcacgttaaaactatgaaattccgcgaccgtcccgtgaaattcacagaacgctcccgacctggcgtgcagatcagttgcagttctttctccagcggtggtatgtttatcaccactggcagcactgatcacgtgatcaggatttactatctgggaagtgaggtccctgaaaaaatcgcagagctcgaaagccatactgataaagtagttgccgtccagttctgcaataatggtgactcccttcgcttcgtaagcgggtcccgggacgggaccgcgcgaatatggcagtatcaacaacaggagtggaaaagtatagtcctggacatggccaccaaaatgactgggaataacctgccctctggcgaagataaaataaccaagctgaaagttacgatggtggcatgggataggtatgacactaccgtcatcacagctgtgaataatttcctgttaaaagtatggaattctatcactgggcagctcctccatactctatccggccatgacgacgaagttttcgtgctcgaggcgcatccatttgaccagaggatcatcctgtcagcaggccacgacggtaacatttttatttgggatcttgaccggggcactaaaattaggaactacttcaatatgatcgagggccagggccacggcgcagtgtttgactgcaagtttagtccagacgggaatcacttcgcttgcaccgacagccacggccacttgctgctcttcggcttcggctgtagcaaatactatgaaaaaatcccagaccagatgttcttccatactgattatagacctctaatcagagacgcaaataactacgtgctggacgagcagactcagcaagccccccatttgatgccacctccatttctcgtagacgtggatggaaacccccatcctactaagtttcaacgtctggttcccggacgcgagaattgcaaagatgagcagctgattcctcagcttgggtacgtggcaaatggtgacggagaagtggtagaacaggtgatcggacagcagacaaacgatcaggatgagtctatcctcgacgggataatccgcgagctgcagagggaacaagacctgcgtttgataaacgagggagacgtgccccatctgccagtaaatagggcgtactctgtgaatggcgcgctgaggtcccctaatatggacatcagcagcagtcccaatataagactacgcaggcatagtagccaaatagagggggttaggcaaatgcacaacaacgctccacggagccagatggctactgagcgcgatctcatggcatggagccgtcgggtggtagtcaatgagcttaacaacggagtatcacgcgttcaggaggagtgtcgaacggcaaagggggacatagagattagtctgtacaccgtagagaagaagaaaaagccctcatacactacccagcgcaacgactacgagcccagttgtggccggtccctcaggagaacgcagcggaagcgacagcatacataccagaccaggtccaatatcgagcataactcacaagccagttgccagaattcaggtgtccaagaggatagtgattcttccagcgaggaagatgagacagtgggtacaagtgatgcatcagtggaagatcccgtcgttgagtggcagagtgagagctcttcaagcgattcatcatctgagtattccgactggactgccgacgcgggcattaatctgcagcccccgaaacggcagacacggcagacaacgcgcaagatttgctcttcctctgatgaggagaatcttaaaagcctcgaggagaggcagaagaaaccaaagcagaccagaaagaagaaaggtggcttagtgagcatagctggcgaacccaatgaagagtggttcgcgccccagtggatcttagacaccattcctcgcagaagcccctttgttcctcaaatgggggatgagctgatctatttcaggcaaggacacgaagcttatgtccgtgccgtgcgcaagtctaaaatctattccgtcaacctccagaagcagccctggaacaagatggacctgagggaacaagagttcgtgaagatagtgggtattaaatacgaagtcggaccacccaccctgtgttgtctcaagctcgcttttctcgatccaatctccgggaaaatgaccggagaatctttcagcattaaatatcatgatatgccagacgtgattgacttcttagttcttcaccaattctataatgaggcaaaggagagaaattggcagatcggtgaccggttcaggagcatcattgatgatgcgtggtggttcggcacagtggagagtcaacagccttttcagccagagtatcccgactctagcttccaatgttactctgtccattgggacaataacgagcgtgagaagatgtcaccttgggacatggaaccgatcccagagggtactgccttccccgacgaggttggcgcgggggtccctgtctcccaggaggaacttaccgcgcttctgtacaaaccccaggaaggtgagtggggtgcacattcacgagacgaagagtgtgagcgagtgatacagggcattaaccacttgctcagccttgacttcgctagtccctttgcagtgcctgtggatctgagcgcttatcccttgtactgcaccgtcgtggcataccctactgacctcaacaccatcaggcggaggctggaaaatcgcttttacagaaggatctctgcgttgatgtgggaagtgcggtatatcgagcacaatgcaaggaccttcaacgaacccgatagtcccatcgtaaaggccgccaaaatcgtgaccgacgttctgctgagatttatcggggaccaatcttgtacagacatactcgatacctacaacaagattaaggccgaagaacggaatagcactgatgctgaggaggacaccgagatcgtcgacctggacagtgacgggccaggcaccagtagcgggaggaaagtgaaatgtcgcggccgacgtcagagtctgaagtgcaatcccgatgcctggaagaagcagtgcaaagaactgctgagtctgatttacgaacgagaggatagtgagccctttcgacagcctgccgacctgctgagctacccggggcaccaagagcaggaaggcgagtcttcagagagcgttgtcccagagcggcagcaggatagcagcctctctgaggactaccaggacgtgattgacacccccgtcgatttctccacggtgaaagagaccctagaagccggcaattacgggtcaccgttggagttttataaggacgtacgccagatcttcaataattctaaggcttatacttcaaacaagaagagtcgtatctattctatgatgctcagattgtccgccctgtttgagtcccacattaagaatatcataagcgaatataagtccgctattcagtcacagaagaggcgacgcccgcgttaccgaaagcggctacgaagtagttcctcctctctttcctcatctggagccccgagccccaaaggtaaacagaaacaaatgaaactccaaccaaagaacgatcagaatacctcagtttcacacgcacgtacaagttcccccttcagctctcccgtatccgacgccgccgaaggtctgtcgctttacctcctcgatgacgagcccgacggtccgttttctagctccagctttggtggctacagccgaagtggaaactcacacgaccccggcaaagctaagagctttcgaaacagggtgcttcccgtgaaacaggaccattccctggatggccctctcactaatggcgatggcagggaacctaggacgggcatcaaacgcaagcttctgagcgcctccgaggaggacgaaaatatgggcggagaggataaggagaagaaagaaaccaaagagaagtcacatttgagcaccagtgagtctggggaactgggatcttctctaagcagcgagagcacctgtggttctgattccgacagcgaaagtacgtcacgtaccgatcaagattacgtggatggggaccatgattacagcaagtttatccagaccagaccgaagagaaagctgcggaagcagcacggcaacggcaaaaggaactggaagacacgaggaactggcgggaggggtaggtggggccggtggggaagatggagtcgcggcggccggggtcggggcggcagggggagaggttcccgtgggcgcggcgggggtggaaccagaggtcggggcaggggccggggtggacggggggcatcgagaggcgctacacgtgccaagagggctcgcatcgccgacgacgagttcgacacaatgttttcaggaagattctcacgccttccgcgtattaaaacgcgcaatcaaggccgccgcacagtcctgtacaatgatgatagcgacaacgacaacttcgtgagcacagaggatccgttaaatctgggcacaagtaggtccggaagagtgaggaaaatgaccgagaaagcccgcgtgagccacctgatgggctggaattactag

SEQ ID NO: 245557 - DNA, 5409 bp, Artificial Sequence
  derived and/or modified sequence
atggctgctgcccccacccagatcgaggccgagctgtactacctgattgcccgcttcctgcagagcggcccctgcaacaagagcgcccaggtgctggtgcaggagctggaggagcaccagctgatcccccggcggctggactgggagggcaaggagcaccggcgcagctttgaggacctggtggccgccaatgcccacatccccccagactacctgctgaagatctgtgaaagaattggccccctgctggacaaggagatcccccagagcgtgcctggggtgcagaccctgctgggcgtgggccggcagagcctgctgagagatgccaaggactgcaagagcaccctgtggaatggcagcgcctttgctgccctgcaccggggccggcccccagagctgcctgtgaactacgtgaagccacccaacgtggtgaacatcaccagcgcccggcagctgaccggctgcagccgcttcggccacatcttccccagcagcgcctaccagcacatcaagatgcacaagaggatcctgggccacctgagctctgtgtactgtgtggcctttgacagaagtggaagacgcatcttcaccggcagtgatgactgcctggtgaagatctgggccacagatgatggccgcctgctggccaccctgcggggccacagcgctgagatcagtgacatggctgtgaactatgagaacaccctgattgctgctggcagctgtgacaaggtggtgcgggtgtggtgcctgcggacctgtgcccctgtggccgtgctgcagggccacagcgccagcatcaccagcatccagttctgccccagcaccaagggcaccaaccgctacctgaccagcactggagcagatggcaccatctgcttctggcagtggcacgtgaagaccatgaagttccgggacaggcctgtgaagttcacagagaggagcaggcctggggtgcagatcagctgcagcagcttcagcagcggcggcatgttcatcaccaccggcagcacagaccacgtgatccgcatctactacctgggcagcgaggtgcctgagaagattgctgagctggagagccacacagacaaggtggtggccgtgcagttctgcaacaatggagacagcctgcgctttgtgtctggcagcagagatggaacagcccgcatctggcagtaccagcagcaggagtggaagagcatcgtgctggacatggccaccaagatgacaggcaacaacctgcccagcggggaggacaagatcaccaagctgaaggtgaccatggtggcctgggacagatatgacaccaccgtcatcacagctgtgaacaacttcctgctgaaggtgtggaacagcatcaccggccagctgctgcacaccctgagcggccatgatgatgaggtgtttgtgctggaggcccacccctttgaccagaggatcatcctgtctgctggccatgatggcaacatcttcatctgggacctggaccggggcaccaagatccggaactacttcaacatgattgagggccagggccatggagctgtgtttgactgcaagttctccccagatggcaaccactttgcctgcacagacagccacggccacctgctgctgtttggcttcggctgcagcaagtactatgagaagatcccagaccagatgttcttccacacagactaccggcccctcatcagagatgccaacaactacgtgctggatgagcagacccagcaggccccccacctgatgcccccacccttcctggtggatgtggatggcaacccccaccccaccaagttccagaggctggtgcccggccgggagaactgcaaggatgagcagctgatcccccagctgggctacgtggccaatggagatggagaggtggtggagcaggtgattggccagcagaccaatgaccaggatgagagcatcctggatggcatcatccgggagctgcagcgggagcaggacctgcggctcatcaatgaaggagatgtgccccacctgcctgtgaacagagcctacagcgtgaatggagccctgcggagccccaacatggacatcagcagcagccccaacatccggctgcggcggcacagcagccagattgaaggagtgcggcagatgcacaacaatgcccccaggagccagatggccacagagcgggacctgatggcctggagcagaagagtggtggtgaatgagctgaacaacggggtgtcccgggtgcaggaggagtgcaggacagccaagggggacatcgagatcagcctgtacacagtggagaagaagaagaagcccagctacaccacccagagaaatgactatgagcccagctgtggccgcagcctgcggaggacccagaggaagaggcagcacacctaccagaccaggagcaacatcgagcacaacagccaggccagctgccagaacagcggcgtgcaggaggacagcgacagcagcagcgaggaggatgaaacagtgggcaccagtgatgcctctgtggaggaccctgtggtggagtggcagagcgagagcagcagcagtgacagcagcagcgagtacagcgactggacagcagatgctggcatcaacctgcagccccccaagaggcagacccggcagaccaccaggaagatctgcagcagcagtgatgaggagaacctgaagagcctggaggagcggcagaagaagcccaagcagaccaggaagaagaagggcggcctggtgtccattgctggggagcccaatgaggagtggtttgccccccagtggatcctggacaccatcccccggcgcagcccctttgtgccccagatgggagatgagctgatctacttccggcagggccacgaggcctacgtgcgggctgtgaggaagagcaagatctacagcgtgaacctgcagaagcagccctggaacaagatggacctgcgggagcaggagtttgtgaagatcgtgggcatcaagtatgaggtgggcccccccaccctgtgctgcctgaagctggccttcctggaccccatcagcggcaagatgaccggggagagcttcagcatcaagtaccatgacatgccagatgtgattgacttcctggtgctgcaccagttctacaatgaggccaaggagaggaactggcagatcggggaccgcttccgcagcatcattgatgatgcctggtggtttggcaccgtggagagccagcagcccttccagcctgagtacccagacagcagcttccagtgctacagcgtgcactgggacaacaatgaaagagagaagatgagcccctgggacatggagcccatccctgagggcacagccttcccagatgaggtgggcgccggcgtgcctgtgtcccaggaggagctgacagccctgctgtacaagccccaggagggggagtggggcgcccacagcagagatgaggagtgtgagagggtcatccagggcatcaaccacctgctgagcctggactttgccagcccctttgctgtgcctgtggacctgagcgcctaccccctgtactgcaccgtggtggcctaccccacagacctgaacaccatcagaagaaggctggagaaccgcttctaccgccgcatcagcgccctgatgtgggaggtgcgctacatcgagcacaatgcccggaccttcaatgaaccagacagccccatcgtgaaggccgccaagatcgtgacagatgtgctgctgcgcttcatcggggaccagagctgcacagacatcctggacacctacaacaagatcaaggccgaggagaggaacagcacagatgctgaggaggacacagaaattgtggacctggacagtgatggccctggcaccagcagcggcaggaaggtgaagtgccggggccggcggcagagcctgaagtgcaacccagatgcctggaagaagcagtgcaaggagctgctgagcctcatctatgagcgggaggacagcgagcccttccggcagcctgctgacctgctgagctacccaggccaccaggagcaggagggggagagcagcgagagcgtggtgcctgagcggcagcaggacagcagcctgtctgaggactaccaggacgtcatcgacacccctgtggacttcagcacagtgaaggagaccctggaggccggcaactacggcagccccctggagttctacaaggatgtgcggcagatcttcaacaacagcaaggcctacaccagcaacaagaagagccgcatctacagcatgatgctgcggctgagcgccctgtttgagagccacatcaagaacatcatcagcgagtacaagagcgccatccagagccagaagagaagaagaccccgctacaggaagaggctgcggagcagcagcagcagcctgagcagcagcggggcccccagccccaagggcaagcagaagcagatgaagctgcagcccaagaatgaccagaacacctctgtgagccacgcccggaccagcagccccttcagcagccctgtgtctgatgctgctgagggcctgagcctgtacctgctggatgatgagccagatggccccttcagcagcagcagctttggaggctacagccgcagcggcaacagccatgaccccgggaaggccaagagcttcaggaacagagtgctgcctgtgaagcaggaccacagcctggatggccccctgaccaatggagatggccgggagcccaggacaggcatcaagaggaagctgctgagcgcctctgaagaagatgagaacatgggcggggaggacaaggagaagaaggagaccaaggagaagagccacctgagcaccagcgagagcggggagctgggcagcagcctgagcagcgagagcacctgtggcagtgacagcgacagcgagagcaccagcaggacagaccaggactatgtggatggagaccatgactacagcaagttcatccagacccggcccaagaggaagctgaggaagcagcacggcaatggcaagaggaactggaagacccggggcaccggcggccggggccgctggggccgctggggccgctggagcagaggaggccggggccggggcggccggggccggggcagccggggccggggcggcggcggcacccggggccggggccggggccggggcggccgcggggccagcagaggagccacccgggccaagagggccagaattgctgatgatgaatttgacaccatgttcagcggccgcttcagccggctgccccgcatcaagaccaggaaccagggccgcaggacagtgctgtacaatgatgacagcgacaatgacaactttgtgtccacagaggaccccctgaacctgggcaccagccgcagcggccgggtgaggaagatgacagagaaggcccgggtgagccacctgatgggctggaactactag

SEQ ID NO: 245558 - DNA, 5409 bp, Artificial Sequence
  derived and/or modified sequence
atggccgccgcccccacccagatcgaggccgagctgtactacctgattgcaaggtttttacaaagcggaccctgtaacaagtcagcgcaagtgctggtacaagagctagaggagcaccagctcattccccggcggctagattgggaaggtaaagagcatcgacggtctttcgaagacctcgtggctgcaaacgcacacattcctcctgattatcttctgaagatatgtgagaggattgggcctctcctcgacaaggagattccacagtccgtgccaggagtgcaaaccctcctgggagtgggtagacaatctttgttgcgcgatgcaaaggactgtaagagtacattatggaacggaagcgcctttgcagctctgcaccggggtcgtcccccagaactgcccgtgaattatgtgaagccccctaacgtggtaaacatcactagcgcaaggcagctcacaggttgttcccgcttcgggcacatattcccttcaagcgcttatcaacacattaagatgcacaagagaatcctgggtcacctgtcatccgtgtattgtgtggcattcgatcgctctggacgacgtatcttcaccgggtccgatgactgtttggtcaagatctgggccactgacgatggacgcctacttgccactcttcgaggacacagtgcggaaatcagtgacatggccgtaaactacgagaataccctgattgccgcaggctcctgcgataaggtggtgagagtctggtgcctcagaacatgcgcaccagtggcagtgctgcaggggcacagcgcctcaattacatctatacagttctgtccgtccaccaaagggaccaatagatacctgacatctaccggagctgatggcaccatttgtttctggcagtggcatgtgaaaactatgaaattccgggataggcccgtgaaatttacagagaggtctcgccccggcgttcagataagctgttccagtttctccagtggcggcatgttcattacaaccggcagcacagatcacgtgatccggatttactatctggggtccgaggtcccggagaaaatcgcagaactggagagtcacacagataaggtggttgccgtacagttttgcaataatggcgattccttgcgatttgtgtcaggctctagagacggcaccgcacgtatatggcaataccagcagcaagaatggaagagtatagtgttggatatggccacgaaaatgaccggcaataacctgccctctggggaggataaaatcacaaagcttaaagtaacaatggtggcttgggacagatatgatacaacagttattaccgcggtcaataattttctcctgaaggtgtggaatagcattactggacagctgctccatacactctccggacacgatgacgaagttttcgtattagaggcacacccttttgaccagcggatcatactcagcgcaggacacgacggaaatatctttatatgggacctggacagaggcacaaagataagaaattacttcaacatgattgagggacaaggacacggcgcggtctttgattgcaagttctctcccgacggcaatcatttcgcctgcaccgatagccacggacacctgctgttatttggtttcggatgtagtaagtattatgagaagatacccgatcaaatgttcttccataccgattatcggccactgatcagagatgcgaataactacgtgctggatgagcagactcagcaggcacctcacctgatgccacccccattcctcgtcgatgttgacgggaacccccacccaacaaagttccagcggctggttcccgggagggagaattgtaaggacgaacaactgatcccccagctaggctacgttgctaatggtgacggtgaagtagtggagcaggttatcgggcagcagaccaatgatcaggacgaaagcatcctggacggaataatcagagagctgcaaagggagcaggatctgaggctgattaatgagggggacgtgcctcatctgcctgtaaacagagcatactcagttaatggcgctcttcgctccccaaatatggacatttcctcctcccctaatatcaggctcaggagacactcttcacaaatcgagggggttaggcaaatgcacaacaacgccccacggagccagatggcaacagagagggatctgatggcttggtcccgccgagtggtggtgaacgagcttaataacggagtatcccgcgttcaggaggaatgtcgtaccgctaagggcgacatagaaatttctctctatacggtggagaaaaagaaaaagccttcttataccacgcaacgtaacgactatgagccgagctgtggcaggagtcttcggcgcacacagcggaagcgacagcacacctaccaaactcgctctaacatcgaacacaacagccaagcctcttgccagaactcaggcgtccaggaggactctgattcctcttcggaggaggacgagaccgtcggaactagtgacgcatctgtggaggatcccgttgtcgaatggcagtctgaaagttcgtcaagcgactcaagctcagaatatagcgactggacggccgatgcaggtataaacctgcagccaccaaagcgccagacgcggcagacaacccggaaaatctgcagttctagtgatgaagagaatctgaagtcactcgaggagcggcagaagaaacccaagcaaacccggaagaaaaagggaggactcgtcagcatcgccggcgaaccgaatgaggaatggtttgccccccagtggatcttagacactatacctcgacgtagcccctttgtgcctcagatgggagatgaactgatttatttcaggcaaggccacgaggcatacgtgcgtgcagttcgcaagagcaagatctatagtgtaaatctgcaaaagcagccttggaacaaaatggacctcagagagcaggaattcgtgaagatcgtagggatcaagtatgaggtcggcccccctactctgtgctgcctgaagctggcatttctcgaccccataagtggcaagatgacgggcgagtccttcagtatcaagtaccacgacatgccagacgtgatcgactttttggtcctccaccaattctataatgaggctaaagagcggaactggcaaattggggataggttccgttcaatcattgatgatgcctggtggtttggcacagtggagtctcagcagccatttcagcctgaatacccggacagctccttccaatgctattccgtccattgggacaataacgagcgtgaaaaaatgagcccatgggatatggagcctatccccgaaggtaccgcgttcccggatgaggtgggcgccggagtgccagtttcacaggaggaattgacagctttgctctacaaacctcaggagggtgaatggggggcgcattcaagagatgaggaatgtgagcgggttatccagggcatcaaccatcttctgtctcttgatttcgcctctcctttcgccgtcccagttgacctctctgcttatccactgtattgcaccgtcgtcgcgtacccgacagatttaaatacaatccgcagacgcctggagaatcgtttttatcgccgaatctccgctttaatgtgggaggtcagatatatcgaacacaatgctcgtacatttaatgagcctgactcgcctatcgttaaagctgcaaaaatcgtgacggacgtgttgctgcgctttatcggagatcagtcctgcaccgacatcctggatacctataacaaaatcaaggcagaagaaaggaattccaccgatgctgaagaggataccgagatcgtggacttggacagtgatggacctggcacctcatcagggagaaaagtaaagtgcaggggcaggagacagagccttaagtgcaaccccgacgcctggaagaagcaatgtaaagagctgctctcgctgatctacgagagggaagattccgagcccttccgccagcctgcggatttgctgtcataccctggccaccaggagcaagaaggcgagagctcggaaagcgtagtgcccgagaggcagcaagacagcagcctgtctgaagactatcaggatgttatcgacacccccgtcgatttcagtaccgtcaaagaaacactggaagctggtaattacggtagcccactggagttttataaagatgtccgtcaaatctttaataattcaaaagcatataccagtaataaaaagtctaggatctatagcatgatgttgagactgtccgctctgtttgagtctcatattaaaaacatcataagtgagtacaaatctgctatccagtcccagaagagaagacgacctagataccgcaaacgcctccggtcaagctcctccagtctatcatcatctggcgcaccctctccaaaaggtaagcagaagcagatgaagctgcagcccaagaacgatcagaacaccagcgtgtctcatgctagaacatcaagtcctttcagcagcccggtgtccgatgccgccgaggggcttagtctttacttgctagacgatgagcctgacggacccttttcctcgagctcttttggaggttattcacggtcaggaaactctcacgacccaggcaaggccaaatccttccgaaatcgcgtactgccagtcaagcaggatcatagcttggacgggccattgaccaacggcgacggaagggaaccccgcaccggaataaaacgtaagctgcttagcgcttcagaggaggacgagaatatgggcggcgaggataaggaaaagaaggaaacaaaggagaagtctcatctgtccacatccgagagcggcgagctaggctcttctttgtcgagtgagagtacgtgcggcagtgattctgattctgagtctacatcacggacagaccaagattacgtggacggcgatcatgactacagtaagtttattcagaccagaccgaaacgcaagttgaggaaacagcacggcaacggcaagcgtaattggaagacccgtgggacgggcggtcggggcagatgggggcggtggggccggtggagtagaggcgggaggggcaggggaggcaggggtcgtggatcccgcggacgcggcggaggtggcacaagggggcggggccgtggtcgcggtggcagaggagcttccagaggtgccaccagagccaagagggccaggatagccgacgatgagtttgatactatgtttagtggccggttttcccgcctgccccgaattaagacgaggaaccaggggaggagaaccgtcctctataacgatgattccgacaacgacaacttcgtgagtaccgaggaccccctcaatctcggcacgagccgatcgggccgcgtccggaaaatgaccgaaaaggcaagagtgtctcacctgatgggctggaattactag

SEQ ID NO: 245559 - DNA, 5408 bp, Artificial Sequence
  derived and/or modified sequence
atggccgcagctcctactcagattgaggcagaactgtattatctcattgcaagatttttacagagcgggccatgtaacaaatctgcacaggttctggtccaagagctggaagagcatcagttgattcctagaagactagactgggagggcaaagagcatagacggtcttttgaagacctggtcgcagccaatgcacacatacccccagactatcttctgaaaatatgcgaacgaatcggacccctcctggataaagagatcccacagtcggtgcctggagtgcagacactgctgggggtcgggaggcagtccctgctgagggacgccaaagattgcaagtccacgctatggaatggaagcgctttcgcagctttgcatcgcggtcgcccaccggagcttcccgtcaactacgtcaagcctcccaacgtcgtgaatattacctccgcgagacagctgaccggatgctcccgctttggccacatctttcctagtagtgcatatcaacatataaaaatgcataagaggatattaggacacctgtccagcgtatattgcgtcgccttcgatagaagcggacgcagaatatttaccggcagcgacgattgtctggttaagatctgggcaacagacgatggccgtctgctcgccacactccgtggacactctgcagagatttccgatatggcggtgaactatgagaatactctgatcgctgccggttcttgcgacaaggtagtacgcgtgtggtgcctcaggacctgcgctccggtggctgtactgcagggccactctgcgtctatcacgagcatacaattctgcccaagcaccaaagggaccaatagatacttaacatctaccggggcagatgggaccatctgcttttggcaatggcatgttaagacaatgaagttccgcgacagaccagtgaagtttaccgagcgaagccgtcctggcgtacaaattagctgcagttcctttagctcaggcggaatgtttatcacaacaggcagtacggatcacgtgattcgtatatactatttgggatctgaagtgcccgagaagattgctgaactggaaagtcatactgataaagtggtggcggtacagttttgcaataatggggacagtctgcggttcgtgagcggatcaagggacggtacagccaggatatggcaatatcaacagcaggagtggaagagtatagtgctggacatggcaacaaagatgaccggtaataacctgccatccggtgaagataaaattaccaaattaaaggtcactatggtggcttgggaccgctacgacaccaccgtgatcacagccgtcaacaacttcctcctgaaggtatggaattctatcacaggacaactgcttcacactctcagcggccacgacgatgaagtgttcgtcctggaggcccacccctttgatcagaggatcatcttgagcgctggccacgatgggaatatcttcatctgggacttggatcgaggtacaaagattcggaattatttcaacatgatcgagggccagggccatggcgctgtcttcgactgcaagtttagtccggatggcaaccacttcgcctgcactgattctcatggccacttactgctttttgggtttggctgtagcaaatattatgaaaaaatcccagaccagatgttctttcataccgattaccggcctctgattcgagatgctaacaattatgtcttggacgaacagacacagcaggcacctcatctgatgcctcctcccttcctcgtggatgtggacgggaacccacatccgacaaagttccagaggttggtgcccggaagagagaactgcaaagacgaacagctgattccacagctgggttacgtggcaaatggcgacggagaggtcgtggaacaagtgataggccaacagacaaatgaccaggacgaaagcatcttggatggtattattcgtgagctccagagagagcaggacttaagattaattaatgagggcgacgtgccacacctgcccgtgaaccgggcatactcagtcaatggggcattgcggtcccccaacatggacatctctagttctcccaacatccgcctgcgcagacactcttcccaaatagaaggagtgaggcaaatgcacaacaacgcacctcgatctcagatggctacagaaagagatcttatggcctggagccgccgagtggtagttaacgagttgaacaacggcgtgtctcgggtgcaggaagaatgtagaactgcaaaaggggacattgaaatttccctgtatacagtagagaagaaaaaaaagcctagttacacaacccaacggaacgactacgaaccttcgtgcggccgtagccttcgccgaacgcagcggaaacgccagcatacttaccagactcgcagtaatattgagcacaattcacaggcatcctgtcagaactccggcgtgcaggaagactctgactcaagcagtgaagaggatgagaccgttggcacatctgatgctagcgtggaggaccctgtcgttgagtggcagagcgaatctagttcttccgattcttccagtgaatattcggattggacagccgatgccggaatcaacctgcaacccccaaagaggcagaccaggcagacgacgcgcaagatctgttccagcagcgacgaagaaaacctcaagtctctggaagagcgccagaaaaaaccgaagcagacccgcaagaaaaaaggaggacttgtttctatcgcaggagaaccaaacgaagagtggttcgctccccaatggattctcgatacgattcccaggcgctcccccttcgtaccacaaatgggggatgaattgatctactttagacagggccacgaagcctacgtccgcgctgtcagaaagtccaagatctattctgtcaatttgcaaaaacagccttggaataagatggacctcagggagcaggagtttgtaaaaattgtgggaattaagtacgaagtcggcccaccaaccctgtgctgcctcaagctggcatttcttgatcccattagtggaaaaatgacaggcgaatccttttctatcaaataccatgatatgcccgacgtgatcgattttttggtactccatcaattttataacgaggccaaggaaaggaactggcagattggagaccggttccgaagcatcattgatgacgcctggtggtttggcacagtagagtctcagcaaccctttcagcccgaatacccagattcatcttttcagtgctatagtgtccactgggacaacaacgaacgggaaaagatgagtccatgggacatggagccaattccggagggtacagcattccctgacgaggtgggcgcaggcgtgcccgtaagtcaggaagagctgaccgcactgctgtacaagccacaggaaggggagtggggtgcccattcacgcgacgaggaatgtgagcgtgtgattcaagggatcaatcacttgctcagcctcgatttcgccagtccgttcgccgtgccagtcgatctttctgcatacccactgtattgtacagtcgttgcctatccaactgacttgaacaccatccgcagaaggcttgaaaatcgtttttaccggaggatatctgctctgatgtgggaggtccgctacatcgagcataacgcccgaacgtttaatgagccagactccccaattgttaaagcagcaaaaatcgtgacagacgtgcttcttaggttcataggtgatcaatcctgtacagatatcttggatacctacaacaaaataaaggctgaggagagaaactctactgatgcagaagaagacaccgaaatcgtggatctggactctgacggccctggcacaagctcgggcaggaaggtcaaatgccggggtcggaggcagagtctcaaatgtaatcctgatgcatggaagaagcagtgcaaggagctgctgtcactgatttacgagagagaggacagtgagccgttccggcaaccagcggacctgctttcataccccggacaccaggaacaggaaggcgaaagctcggagtcagtggtgcccgagaggcaacaagattccagcctgtcggaggactaccaggacgtcatcgatactcctgtcgatttctccacagtgaaggagaccctagaggctgggaactatggctccccactggagttctacaaagacgtccggcagatcttcaacaattccaaggcctatacatctaacaaaaaatcacggatctactctatgatgttgagactgagcgccttgttcgaatctcacattaagaacatcatctcagaatataaaagcgctatccagtcacagaaacggagacgcccaaggtaccgcaagcgccttagatcctcgtcttcatccctgtcctcgtctggggcaccctcacccaagggcaaacaaaagcagatgaagttgcaaccaaaaaatgaccaaaacacatctgtctcacacgccaggacatcctcaccgttttcctcccctgtgtcagatgctgccgagggtctgtctctctatctgttggacgacgaacccgacgggcctttctctagtagtagctttgggggatactcccgatccgggaacagccacgacccaggaaaagccaaatcattccgcaacagagttctgcctgtgaagcaggaccacagtcttgatgggccactaactaacggcgatggaagggaaccacggacaggcattaaaagaaaactgctttctgcgtcagaagaggacgaaaacatggggggagaggacaaagagaagaaagagaccaaggaaaaaagccacctttctacgtccgagtctggagaactggggtcgtccttatcaagcgagtccacatgtggatctgatagcgactctgagtccacgtcaagaacagaccaggattatgttgacggcgatcacgattacagcaagttcattcaaacaaggccaaagaggaagcttcgaaagcaacacgggaacgggaaaagaaattggaagacccggggaactggagggagaggccgttggggccgttgggggcgttggtctaggggtggaagaggccgtggcggtcggggacggggtagcaggggacggggagggggtggcacccgcggacgcggtagggggaggggcggtcgaggcgcttcccgtggcgctacacgggctaagcgagccaggattgcggacgacgaattcgatacaatgttctcagggcgattctctcgtcttccccgtatcaaaacaaggaaccagggtcggcgaaccgttttgtataatgatgactctgacaacgacaattttgttagtaccgaagatcccctgaacctaggtacttcccggtctggacgggttcggaagatgaccgagaaggcacgagtttcccatctcatgggatggaactacta

SEQ ID NO: 245560 - DNA, 11381 bp, Artificial Sequence
  derived and/or modified sequence
ctctccttcctcctccgcctcctcagctcttgggctagaatatctatgggtcgaaacgtgatgcgatgaattcgagagagagcgaaactaggacgaggagtgcggcggaagcggcgggactcccgggcatgggggcttcaccacaatagaggcagcgcccccacccgcccccgccagcccctccggagcgaagcccccaaaccccctcgggaaaaggatggcggcagcacctacccagatcgaagccgagctgtattacctgatcgctaggttcttgcagtctggaccctgcaacaaatccgctcaggtgctagtgcaggagctcgaggagcatcagctgattccgcgccgcttagattgggaggggaaagagcaccgaagaagcttcgaggatctggtggcagcaaatgcacacattcctccagactacctccttaaaatttgtgagagaattggtcctttactagataaagagatccctcagagtgttcctggggtacagacattattaggtgttggtcggcagtctctgctacgggatgccaaagactgtaagagtacactatggaatgggtctgcttttgcggctctgcatagaggcagacctccagaactacctgtaaattatgtgaaacctccaaatgtggtgaatatcacctctgccaggcaattaaccggctgtagtcgctttggtcatattttcccttcatctgcttaccagcacattaagatgcataagagaattctggggcacttgtcatctgtctactgtgtagcatttgaccgaagcgggagaagaatttttacaggttcagatgactgtttagtaaaaatttgggctacagatgatggacgccttcttgctacacttcgtggacactctgctgaaatttctgacatggctgttaactatgaaaacactcttattgctgcaggcagctgtgataaggtagtaagagtatggtgtcttcgaacttgtgcacccgttgcagtccttcagggccattcagcttctattacttccatacagttttgtccatcaactaaaggcacaaacagatacctcacttctactggtgctgatggaacaatctgtttctggcaatggcatgtaaaaacaatgaagtttagagatcgcccggtgaaatttactgagagatccagacctggagtccagatatcttgttcatctttcagttctggtggtatgttcattacaactggtagtactgaccatgtgattagaatatattatttgggttctgaggttcctgagaaaattgctgaattagagtcacatacggataaagttgttgctgttcagttctgtaacaatggagacagtttaagatttgttagtggaagtcgagatggaacggcaagaatttggcagtatcagcaacaagaatggaagagtatagtgctagacatggctactaaaatgactggcaataatttgccatctggagaagacaagatcactaaacttaaggtgactatggtggcctgggatcgctatgataccacagttattactgcagtgaacaattttcttttgaaagtgtggaattctatcacaggacagcttcttcatacattatctggacatgatgatgaagtattcgttctagaagcccatccatttgatcaaaggatcatactttcagcaggtcatgatgggaacatttttatttgggaccttgaccgggggaccaaaattcggaattactttaacatgattgaaggccaaggccatggtgcggtgtttgattgtaaattttcaccagatggaaaccattttgcctgcacagattctcatggacatttgctgctttttggttttggatgcagtaaatactacgaaaagattccagatcagatgttcttccacacggattatcgtcctcttattcgtgatgccaataactatgtattggatgaacaaacccaacaagctcctcacctcatgcctcctccatttttggtggatgttgatggaaatcctcatcccacaaaattccaacggttggtaccaggacgggaaaattgtaaagatgaacagcttataccacagctgggatatgtggctaatggtgatggtgaggtagtagaacaggtaattgggcagcaaaccaatgaccaagatgagagcattcttgatggaataatcagggagctgcagagagaacaagacctgagactaattaatgaaggagatgttccacatttaccagttaatagagcatactctgttaatggtgctctgagaagtccaaacatggacatatcttcttccccaaacatcaggcttcgaagacatagtagtcaaattgaaggtgttagacaaatgcataacaatgctcctcggagccagatggccactgaaagagatctcatggcgtggagcagaagagtggtggtcaatgaactaaataatggggttagtagggtacaggaagaatgtcgaactgcaaaaggtgacatagaaatcagtctttatacagttgaaaagaagaaaaagccatcttacactactcaaaggaatgattatgagcctagctgtgggcgttctttacgcaggacacagcgcaaacgtcagcatacttaccaaacacggtccaacatagagcataattcacaggcatcatgtcaaaattcaggtgtacaggaagactcagacagttcttcagaggaagatgaaactgttggcacaagtgacgcttcggtagaggatcctgttgttgaatggcaaagtgaaagttcttccagtgactcatcaagtgaatattctgattggacagcagatgctggaataaatttacaacccccaaaaagacaaaccagacagacaacacgtaaaatatgcagcagctctgatgaggaaaatttgaagtccctagaagaaaggcagaagaaacctaagcagactagaaagaagaaaggaggactggtttctatagcaggtgagcctaatgaagaatggtttgcccctcagtggatcttggatactataccccgacgttccccatttgtcccacaaatgggagatgagcttatctattttaggcaaggacatgaagcttatgttcgggctgtaaggaaatcgaaaatatacagtgttaatttacaaaaacagccatggaacaaaatggatctcagggagcaagagtttgttaagattgtaggaatcaaatatgaggttggcccacccacactgtgctgcttgaagcttgcatttctggacccaatttcaggcaaaatgactggagaatctttttccattaagtatcatgacatgccggatgtcattgacttccttgtgctacatcagttttataatgaagccaaagaaaggaactggcagattggtgatagattccgcagtataatagatgacgcctggtggtttgggactgtggagagtcagcagccttttcaaccagagtatcctgatagttctttccagtgttacagtgttcactgggacaataatgagagagaaaagatgagcccatgggatatggagccaattccagaaggaactgcctttccagatgaagttggtgctggtgttcctgtctcccaggaagaattgactgctttgctatacaaaccccaggaaggagagtggggggctcattccagagacgaagaatgtgaacgggttattcagggcatcaaccaccttctttccctggattttgccagcccttttgctgttccagtggatctcagtgcctaccccttgtattgtactgtagttgcttatccaactgacctcaataccatcaggcggagacttgaaaatcgcttttacaggagaatatcagcattaatgtgggaggtacgctatattgaacataatgccaggactttcaatgagccagacagtcctatagttaaagcagctaaaattgtaactgatgtcttacttcgatttattggggatcagagctgtactgatatactggatacttataataaaattaaagcagaagaacgaaacagtactgatgcagaggaggatacagaaattgttgatttagattcagacggtcctggtacttcatctggaagaaaggtcaaatgccgaggcagaagacagtctttaaagtgtaatcctgatgcttggaaaaaacaatgcaaggaactattgagcctcatttatgaacgtgaagactcggagccatttcgacagccagctgatcttctttcttacccaggtcatcaggagcaagagggagaatcctcagagtctgttgttccagaaagacaacaagattcatctctttctgaggattatcaagatgttatagatactcctgtggacttcagcactgtgaaagaaactttggaagcaggaaactatggtagtcctctggaattttataaggatgttcgccaaatattcaacaactccaaagcttatacctctaataaaaagtcaaggatctatagcatgatgctgcgattatctgccttatttgaaagtcatatcaaaaatatcatctctgaatataagtcagcaatccagagtcagaagaggagaaggccacggtacagaaaacgtctaagaagcagcagcagttcattatctagtagtggagcacctagtccaaaagggaagcagaaacaaatgaagttgcagcctaaaaatgaccagaatacctcagtatctcatgccaggactagctctcctttctcatctcctgtttcagatgctgctgaagggctttcactatatctacttgatgatgagccagatgggccattttcttcatcgagcttcggtggatatagccgaagtggaaatagccatgacccagggaaagccaaatcatttcggaatagagttttgccagttaaacaagatcactcccttgatggaccccttacaaatggtgatggcagagagccccggacaggaatcaagagaaaactacttagtgcatcagaagaagatgaaaacatgggaggagaagataaagagaaaaaagaaacaaaagagaaatctcatttatccacctcagagagtggagagttaggatccagtttaagttctgaaagtacctgtggttctgactctgactctgaatcaacttccagaacagatcaagattacgtagatggagaccatgattatagcaaattcatacaaaccagacctaaaagaaaactcagaaagcaacatggcaatggaaaaagaaattggaagaccagaggcacaggaggaagaggcagatggggaagatggggtagatggagtagaggaggcagaggaagaggaggcaggggacgagggagtcgaggaagaggtggaggtggcactagggggaggggaagagggagaggaggaagaggtgcttctagaggagctaccagagccaaacgagcacgtattgcagatgatgaatttgataccatgttttcaggacgtttcagtagactgcctcgaattaaaacaagaaaccaaggcaggaggactgttttatataatgatgattctgataatgacaattttgtgtccactgaggatcctctgaatcttggtacatccagatcaggcagagtgcgtaaaatgacagaaaaagccagggttagccatctcatgggatggaattattaacagttaataaatttagaataacttaaaaaattcaatggccttctactgcagggaatttaccaggaaatctacaaagcaagttgtgtggggacttctgcttcctttcacattggtgcttttccatttatgccagtatacatttgtttcaagacttttgatctccacacttcatttgttcaaataagccttactcattaggccttaaattaaaagaaattctgcccacacacacacaaacacatacacacacatacacacacacagacacacacacacgaaacacaacacagacactacagatttactacattaaaggagcattcagcttcttaagagtagcatgacatttttatctcaatagaatagccctcttttgcttttgtatcacagaagtatagcaccttcttacagagttttatatagtttgtttttgccattttgattcctatacccagtaataataacttttgcacaatacaccaatcctaaaggcagctattaaatgtttacagtttctatattgtaagagcgatctggattattttactcttcccaggccaaactttcatgacttgtactgaactgaagtatatatttatactacagttttttggggggtggggggatcttgatatgcttttcattgatttgcataattcacgttaaaggtgagaaagggttggtgccttgtaaatatgtagcagatcttcgtggtgtgttctgatgtgtgcattaactttattaaaaaagaatacttgaggtatcaatctagacaaggtgccaaatgcaaaagtttcccgcatcaatttttttcctatcacattttattgcattaatagaatttgtgtagcttaaataacttaaacatttgaaaaatcctcatccacaaagaacaacttctttgaacagtagctcagctacctcttaactacaactactggaaacattaaggaaaatagatgctgttattccttactgactaaggagaaatagaacaagcttagtaggaatgaataccccataagttataagctgagaggttgttaataattgtattggctctcaaattaataattgtaattaacaaagtttcataaatatagtatgctctaccaccttaggctttcttagaacatatttgtgtaagtagacttgggctactgcttatatatttctgctccacttaccatttaacagctgtgagttgctggttttcatttgaatcttaaaatttaacaaagcacctggtttgatttggaatgttttggctagctagtattatgaatcaacttatagattctgctcatatcattccaaagggttcttctgttctagtctttcaggaaagaaccttattgcactgcacactcatgttgtgaatcattattttatagataaaaaacatctttaaaaacccttattgtcttgtttacagcagtagagtgcacatggttccataagtgagcttgagttccaaggtcagttttactccccaaatttaatattacagatttgttcatttgttagatacttacatttctgaggtaagagggataatagcaatttctgtttctgtaacagcaaatttgttgcacttagatcaggctcatgggataaaacagacttcttagtatatacctagctatcccaggatatttcttaagctaatgtgtttgtctcatgctttcaatcatttcatgcatctgaaaacccttaagtgcagaggaaggcgtacacacataaaactttgcttttttggtagggtcggcagtagggttattcttggactaacatctttaagcagttttcacttgcagtggaaatgatgttcaggctttaagagaaagtattgtgaattgttaatggcactaacttctgttactagacagcagaccaagctatttttttgttgtagtctttttttcactaaaccaaaactacttctggttgtaactcagctgccactttaaaccatagtagagattcaaaacgttcctatttgaaactacatttgatttttgctaaaatgtgctgtttcggttatttatctcttgggcatttagactaaattgtgcctgtattcctgaaatcaataatactttggcttatcctgatctaagtaacatagttacttaaattcctggatatacccaaatatggatcacatgtatcattttagtttgaaattttttgttgacattcttctatgaagagctgacctcttgaaatgtagaagaattgacatttgtgtgattttggctatctggagctttatttataatttattttgaaaaataaaaatgccacatttatttcccaaatgtcaagattttctagaattagataattagaataataaggctgaagacattttaaagcatattttatatgtagtgaaatactgtgaaaatattagtgaacagcattttgctgtaatgtttatttcagttattaagatttaaagagttagtcatcagggtatgttagataaacatagttatcatttattaaacaaacagataattttctgtttgcatgcaaattattttaataagtgtgaaaataaaagtttggaagatagtatttttacttttatatctggacttttttttcccccaatttacactttgctttcttgtaataccacctcctgtgaatgtgttgtaattagtatcacattgattactttatcattttaatttctttgaggccctttaaacctacgtaaaatctgggtccagccatagcaaagcaagtacaaaatgaacaaagaattttgaagaaaagcctaaatcttaaattgctaagaaaaaacactgttatatttaggcccgtgagagcatatacatgtataaacctaatcctatgctagatatgaatagtcagtgagctgtaatatttctcataaatgctaataatgtttaaattcccagctttaagatcttagtgtgtgtatatatttataaaatctgaattgtgtgtttcttctatggcttactgtgtgtttctctttcagcaataggatgctctctaaaacattcactagcctactagcctacttactaaatttttgtatatgtgtgtttgtgcacttgtatgtgtgtaaagttttttccccaacttgacacaccttatctcagacattcaaaaaaagagaacattttgtatggaggacagtctgccaactttttgcctctctacagctcttagcctgtatatttactgcttgatcattcattatgccttctagataaccagtccaggttttgtcatatacctgtgtccctctattctttttatttccctttttaattttttttcttttttttccctccccagaaatcaggcttgtgttggaattcttctctataatactttgtttcccgcagatgcaaagtaacaaagtaactgagtaaaattagaaatctcattctgcacaactgtgcgctcagatatttaactcagccttctaatacttttaagtacgtttctgttatttatctttttgttgtttttgttttaatcccatagattgtcatcagacaataatagagtgattgagagagaaagatataaatgccacttctaactttttgataaaacttttttgagcatttttcaaaaatttgtatgtttgtggtaatggggaattaaacaccttttacagctgatgtatgttggaaatcattttatgtacatttaccaactggtacttatcttcaagttggaattttcacatccataaaagggagacttgcatcatatataattttcagtatactttgctgtccagccttttaaacaattacagtaacattttgagttctgtgatgaatagttctaggggaagggatggaactttcgacatgtaaagtccattgttttaaatgctaaccccatccccaatatttttgtggaacgtgaggctttatgaaaggtttatcagaaatagaatattctaaagtcacttttatggcttatttcaaaaactagtgtgaaagtattttcatgcttttttgtttctcatcttttagcaaagcttctttaccaagttttgattaaattgcaatataaaattaagttttttcacggtgctatattttgtggaatatgggtagcactcaggtttctttcttttttcttttctccttccttcttccttcattccttcattcctccctcccccctccctccctccctctcttccttccctccttccttccttcctcacctcggcctcccaaagtgctgggattacaggcatgagccaccgtgcccggcctatatacccttattcttgattatttcttttttcatcttttcaatcctgcttacttttatcctcacttttctttctgccatgaaaactgcacctaatttaccacacttaagattggcaatttttgattcattgatgggagaagtacagtagaaaggccctgcagtttagaattaagttgtgtttgtttatttacatgtatgcccatttcttctaaattaaatctagaatgtgagactttgacatataaaagcatgataagtattttcttaaaaaataagactattgatacataatgaaaccaccattggtaattgaattttaaaatgatatgcaaaaatatttagaaatccagttgggaaatgtgtttttgcatatgtcaccagatacacattaggcagtactacaaatgttaattcttaaacaatactgtggtgatggcaatcagtaatttatttctttgtcctgtaacttatcattcttgtcttttgtaatgtcttacacagtattaacataactgtaccttttttttgttcttggtatccatacattttaagatggaaaatcagttcatagttgatatgatattgtatatgggcaaaatgtccgttaaactaaaattcagtaaaaaaggtaatataaactggcttgatttataaaagatgttttgtttggcagttatcagtcattataagcaattatcttcaaagacaaaaaaactggactaatttgttgccattctttatgggatgtttacaataaaattccaagttgtttggaatcaattgcactcttgctgctttatgccttaatttatgtaccagagaaaaattaaccagaagaaagaaatatggagttacctattcagctttagagattgtaacatgtaactcttaggtctttcttgtttctttgtcatagaatattttattactattactttttaatctgagaaactaggatgcttcttcctatcaaagaaaaggttttgttttttgttttcatcttagacattgcaaatattctttgggtcacttttaggataataaatatgatgtttacactttaaatgtgggctgcttggtgcattcaataacagcctgcaaagcatttgtcaacattttgttttgcagagcttttcaaaatgaatagatctctaacatatttatgacttacaacttttaacagctgagttatatgtacctgacattttaaaatgtatagtaagattacctacattgtaaatggtgctttaattcagtgtaagtgtaggagagagagaagtgaggtgagatgatctgaatgctctaacaggaacattcataactatatagttacccagaatttgtctcccagtggcaaacattccactaggttcaagataaataagctggccaaagactggactgtatctttgatatatatatactgtgtattttgtgtatttagaataaaaaaaatgcatttaggaaaaaa

SEQ ID NO: 245561 - DNA, 5409 bp, Artificial Sequence
  derived and/or modified sequence
atggccgccgcccccacccagatcgaggccgagctgtactacctgatcgccagattcctgcagagcggcccctgcaacaagagcgcccaggtgctggtgcaggagctggaggagcaccagctgatccccagaagactggactgggagggcaaggagcacagaagaagcttcgaggacctggtggccgccaacgcccacatcccccccgactacctgctgaagatctgcgagagaatcggccccctgctggacaaggagatcccccagagcgtgcccggcgtgcagaccctgctgggcgtgggcagacagagcctgctgagagacgccaaggactgcaagagcaccctgtggaacggcagcgccttcgccgccctgcacagaggcagaccccccgagctgcccgtgaactacgtgaagccccccaacgtggtgaacatcaccagcgccagacagctgaccggctgcagcagattcggccacatcttccccagcagcgcctaccagcacatcaagatgcacaagagaatcctgggccacctgagcagcgtgtactgcgtggccttcgacagaagcggcagaagaatcttcaccggcagcgacgactgcctggtgaagatctgggccaccgacgacggcagactgctggccaccctgagaggccacagcgccgagatcagcgacatggccgtgaactacgagaacaccctgatcgccgccggcagctgcgacaaggtggtgagagtgtggtgcctgagaacctgcgcccccgtggccgtgctgcagggccacagcgccagcatcaccagcatccagttctgccccagcaccaagggcaccaacagatacctgaccagcaccggcgccgacggcaccatctgcttctggcagtggcacgtgaagaccatgaagttcagagacagacccgtgaagttcaccgagagaagcagacccggcgtgcagatcagctgcagcagcttcagcagcggcggcatgttcatcaccaccggcagcaccgaccacgtgatcagaatctactacctgggcagcgaggtgcccgagaagatcgccgagctggagagccacaccgacaaggtggtggccgtgcagttctgcaacaacggcgacagcctgagattcgtgagcggcagcagagacggcaccgccagaatctggcagtaccagcagcaggagtggaagagcatcgtgctggacatggccaccaagatgaccggcaacaacctgcccagcggcgaggacaagatcaccaagctgaaggtgaccatggtggcctgggacagatacgacaccaccgtgatcaccgccgtgaacaacttcctgctgaaggtgtggaacagcatcaccggccagctgctgcacaccctgagcggccacgacgacgaggtgttcgtgctggaggcccaccccttcgaccagagaatcatcctgagcgccggccacgacggcaacatcttcatctgggacctggacagaggcaccaagatcagaaactacttcaacatgatcgagggccagggccacggcgccgtgttcgactgcaagttcagccccgacggcaaccacttcgcctgcaccgacagccacggccacctgctgctgttcggcttcggctgcagcaagtactacgagaagatccccgaccagatgttcttccacaccgactacagacccctgatcagagacgccaacaactacgtgctggacgagcagacccagcaggccccccacctgatgcccccccccttcctggtggacgtggacggcaacccccaccccaccaagttccagagactggtgcccggcagagagaactgcaaggacgagcagctgatcccccagctgggctacgtggccaacggcgacggcgaggtggtggagcaggtgatcggccagcagaccaacgaccaggacgagagcatcctggacggcatcatcagagagctgcagagagagcaggacctgagactgatcaacgagggcgacgtgccccacctgcccgtgaacagagcctacagcgtgaacggcgccctgagaagccccaacatggacatcagcagcagccccaacatcagactgagaagacacagcagccagatcgagggcgtgagacagatgcacaacaacgcccccagaagccagatggccaccgagagagacctgatggcctggagcagaagagtggtggtgaacgagctgaacaacggcgtgagcagagtgcaggaggagtgcagaaccgccaagggcgacatcgagatcagcctgtacaccgtggagaagaagaagaagcccagctacaccacccagagaaacgactacgagcccagctgcggcagaagcctgagaagaacccagagaaagagacagcacacctaccagaccagaagcaacatcgagcacaacagccaggccagctgccagaacagcggcgtgcaggaggacagcgacagcagcagcgaggaggacgagaccgtgggcaccagcgacgccagcgtggaggaccccgtggtggagtggcagagcgagagcagcagcagcgacagcagcagcgagtacagcgactggaccgccgacgccggcatcaacctgcagccccccaagagacagaccagacagaccaccagaaagatctgcagcagcagcgacgaggagaacctgaagagcctggaggagagacagaagaagcccaagcagaccagaaagaagaagggcggcctggtgagcatcgccggcgagcccaacgaggagtggttcgccccccagtggatcctggacaccatccccagaagaagccccttcgtgccccagatgggcgacgagctgatctacttcagacagggccacgaggcctacgtgagagccgtgagaaagagcaagatctacagcgtgaacctgcagaagcagccctggaacaagatggacctgagagagcaggagttcgtgaagatcgtgggcatcaagtacgaggtgggcccccccaccctgtgctgcctgaagctggccttcctggaccccatcagcggcaagatgaccggcgagagcttcagcatcaagtaccacgacatgcccgacgtgatcgacttcctggtgctgcaccagttctacaacgaggccaaggagagaaactggcagatcggcgacagattcagaagcatcatcgacgacgcctggtggttcggcaccgtggagagccagcagcccttccagcccgagtaccccgacagcagcttccagtgctacagcgtgcactgggacaacaacgagagagagaagatgagcccctgggacatggagcccatccccgagggcaccgccttccccgacgaggtgggcgccggcgtgcccgtgagccaggaggagctgaccgccctgctgtacaagccccaggagggcgagtggggcgcccacagcagagacgaggagtgcgagagagtgatccagggcatcaaccacctgctgagcctggacttcgccagccccttcgccgtgcccgtggacctgagcgcctaccccctgtactgcaccgtggtggcctaccccaccgacctgaacaccatcagaagaagactggagaacagattctacagaagaatcagcgccctgatgtgggaggtgagatacatcgagcacaacgccagaaccttcaacgagcccgacagccccatcgtgaaggccgccaagatcgtgaccgacgtgctgctgagattcatcggcgaccagagctgcaccgacatcctggacacctacaacaagatcaaggccgaggagagaaacagcaccgacgccgaggaggacaccgagatcgtggacctggacagcgacggccccggcaccagcagcggcagaaaggtgaagtgcagaggcagaagacagagcctgaagtgcaaccccgacgcctggaagaagcagtgcaaggagctgctgagcctgatctacgagagagaggacagcgagcccttcagacagcccgccgacctgctgagctaccccggccaccaggagcaggagggcgagagcagcgagagcgtggtgcccgagagacagcaggacagcagcctgagcgaggactaccaggacgtgatcgacacccccgtggacttcagcaccgtgaaggagaccctggaggccggcaactacggcagccccctggagttctacaaggacgtgagacagatcttcaacaacagcaaggcctacaccagcaacaagaagagcagaatctacagcatgatgctgagactgagcgccctgttcgagagccacatcaagaacatcatcagcgagtacaagagcgccatccagagccagaagagaagaagacccagatacagaaagagactgagaagcagcagcagcagcctgagcagcagcggcgcccccagccccaagggcaagcagaagcagatgaagctgcagcccaagaacgaccagaacaccagcgtgagccacgccagaaccagcagccccttcagcagccccgtgagcgacgccgccgagggcctgagcctgtacctgctggacgacgagcccgacggccccttcagcagcagcagcttcggcggctacagcagaagcggcaacagccacgaccccggcaaggccaagagcttcagaaacagagtgctgcccgtgaagcaggaccacagcctggacggccccctgaccaacggcgacggcagagagcccagaaccggcatcaagagaaagctgctgagcgccagcgaggaggacgagaacatgggcggcgaggacaaggagaagaaggagaccaaggagaagagccacctgagcaccagcgagagcggcgagctgggcagcagcctgagcagcgagagcacctgcggcagcgacagcgacagcgagagcaccagcagaaccgaccaggactacgtggacggcgaccacgactacagcaagttcatccagaccagacccaagagaaagctgagaaagcagcacggcaacggcaagagaaactggaagaccagaggcaccggcggcagaggcagatggggcagatggggcagatggagcagaggcggcagaggcagaggcggcagaggcagaggcagcagaggcagaggcggcggcggcaccagaggcagaggcagaggcagaggcggcagaggcgccagcagaggcgccaccagagccaagagagccagaatcgccgacgacgagttcgacaccatgttcagcggcagattcagcagactgcccagaatcaagaccagaaaccagggcagaagaaccgtgctgtacaacgacgacagcgacaacgacaacttcgtgagcaccgaggaccccctgaacctgggcaccagcagaagcggcagagtgagaaagatgaccgagaaggccagagtgagccacctgatgggctggaactactag

SEQ ID NO: 245562 - protein, 1042 aa, Artificial Sequence
  derived and/or modified sequence
MPMWAGGVGSPRRGMAPASTDDLFARKLRQPARPPLTPHTFEPRPVRGPLLRSGSDAGEARPPTPASPRARAHSHEEASRPAATSTRLFTDPLALLGLPAEEPEPAFPPVLEPRWFAHYDVQSLLFDWAPRSQGMGSHSEASSGTLASAEDQAASSDLLHGAPGFVCELGGEGELGLGGPASPPVPPALPNAAVSILEEPQNRTSAYSLEHADLGAGYYRKYFYGKEHQNFFGMDESLGPVAVSLRREEKEGSGGGTLHSYRVIVRTTQLRTLRGTISEDALPPGPPRGLSPRKLLEHVAPQLSPSCLRLGSASPKVPRTLLTLDEQVLSFQRKVGILYCRAGQGSEEEMYNNQEAGPAFMQFLTLLGDVVRLKGFESYRAQLDTKTDSTGTHSLYTTYQDHEIMFHVSTMLPYTPNNQQQLLRKRHIGNDIVTIVFQEPGSKPFCPTTIRSHFQHVFLVVRAHTPCTPHTTYRVAVSRTQDTPAFGPALPAGGGPFAANADFRAFLLAKALNGEQAAGHARQFHAMATRTRQQYLQDLATNEVTTTSLDSASRFGLPSLGGRRRAAPRGPGAELQAAGSLVWGVRAAPGARVAAGAQASGPEGIEVPCLLGISAEALVLVAPRDGRVVFNCACRDVLAWTFSEQQLDLYHGRGEAITLRFDGSPGQAVGEVVARLQLVSRGCETRELALPRDGQGRLGFEVDAEGFVTHVERFTFAETAGLRPGARLLRVCGQTLPSLRPEAAAQLLRSAPKVCVTVLPPDESGRPRRSFSELYTLSLQEPSRRGAPDPVQDEVQGVTLLPTTKQLLHLCLQDGGSPPGPGDLAEERTEFLHSQNSLSPRSSLSDEAPVLPNTTPDLLLATTAKPSVPSADSETPLTQDRPGSPSGSEDKGNPAPELRASFLPRTLSLRNSISRIMSEAGSGTLEDEWQAISEIASTCNTILESLSREGQPIPESGDPKGTPKSDAEPEPGNLSEKVSHLESMLRKLQEDLQKEKADRAALEEEVRSLRHNNRRLQAESESAATRLLLASKQLGSPTADLA

SEQ ID NO: 245563 - protein, 940 aa, Artificial Sequence
  derived and/or modified sequence
MPMWAGGVGSPRRGMAPASTDDLFARKLRQPARPPLTPHTFEPRPVRGPLLRSGSDAGEARPPTPASPRARAHSHEEASRPAATSTRLFTDPLALLGLPAEEPEPAFPPVLEPRWFAHYDVQSLLFDWAPRSQGMGSHSEASSGTLASAEDQAASSDLLHGAPGFVCELGGEGELGLGGPASPPVPPALPNAAVSILEEPQNRTSAYSLEHADLGAGYYRKYFYGKEHQNFFGMDESLGPVAVSLRREEKEGSGGGTLHSYRVIVRTTQLRTLRGTISEDALPPGPPRGLSPRKLLEHVAPQLSPSCLRLGSASPKVPRTLLTLDEQVLSFQRKVGILYCRAGQGSEEEMYNNQEAGPAFMQFLTLLGDVVRLKGFESYRAQLDTKTDSTGTHSLYTTYQDHEIMFHVSTMLPYTPNNQQQLLRKRHIGNDIVTIVFQEPGSKPFCPTTIRSHFQHVFLVVRAHTPCTPHTTYRVAVSRTQDTPAFGPALPAGGGPFAANADFRAFLLAKALNGEQAAGHARQFHAMATRTRQQYLQDLATNEQLDLYHGRGEAITLRFDGSPGQAVGEVVARLQLVSRGCETRELALPRDGQGRLGFEVDAEGFVTHVERFTFAETAGLRPGARLLRVCGQTLPSLRPEAAAQLLRSAPKVCVTVLPPDESGRPRRSFSELYTLSLQEPSRRGAPDPVQDEVQGVTLLPTTKQLLHLCLQDGGSPPGPGDLAEERTEFLHSQNSLSPRSSLSDEAPVLPNTTPDLLLATTAKPSVPSADSETPLTQDRPGSPSGSEDKGNPAPELRASFLPRTLSLRNSISRIMSEAGSGTLEDEWQAISEIASTCNTILESLSREGQPIPESGDPKGTPKSDAEPEPGNLSEKVSHLESMLRKLQEDLQKEKADRAALEEEVRSLRHNNRRLQAESESAATRLLLASKQLGSPTADLA

SEQ ID NO: 245564 - protein, 103 aa, Artificial Sequence
  derived and/or modified sequence
MPMWAGGVGSPRRGMAPASTDDLFARKLRQPARPPLTPHTFEPRPVRGPLLRSGSDAGEARPPTPASPRARAHSHEEASRPAATSTRLFTDPLALLGLPAEEP

SEQ ID NO: 245565 - DNA, 237 bp, Artificial Sequence
  derived and/or modified sequence
atgggccagggccagcaggccatgtgccacgaggccctgagccacatctgggtgccctttgacctgaagcgctggctgctgtacaccttctgcaactggtttgatgtgaccttccagctgcagctgtgcatcctgcggaccctgaagcgcttctgccgcagcatcctgtacaacctgaaggacaggaagaccttctggctgccccaggcctacctgtccttcctgctgatccagtag

SEQ ID NO: 245566 - DNA, 3129 bp, Artificial Sequence
  derived and/or modified sequence
atgccgatgtgggctggtggggtgggtagtcctcgccgagggatggccccagcatctactgatgatcttttcgcccgaaaactgcgccagccagcccgccctcccctgacgccccacacatttgagcctaggccagtgcgaggtcctctcctgcgctccggctcagatgccggggaagccaggcctccaacgccagcttccccaagggcccgagctcattcccacgaggaagcctcccgaccggctgccacttctactagactttttacagatccacttgcactgcttgggttgccagctgaggagccagaaccagcctttcctcctgtactagagccccgctggttcgcacactatgatgtccagtcgttactgttcgattgggccccacgcagccaagggatgggttctcactcggaagcgagctccggaaccctcgcatccgccgaagatcaagctgcaagtagcgacctgctgcacggggcccccggctttgtttgcgaattagggggcgaaggggaactgggactcgggggacctgccagtccgcctgtcccacccgcgctgcccaatgccgctgtgtcaattctggaagagccccagaaccgtacaagcgcttactctctggaacacgctgacctcggcgcaggatactacagaaagtacttctatggaaaagagcatcaaaactttttcggcatggatgagtctctgggccccgtggctgtgagcctgcggcgggaagagaaggaaggtagtggcggcgggacactgcacagctaccgtgtcatcgttcgaacaacccagctacgtaccctgcggggaactatatccgaggacgccctccctcccggtcccccacggggactaagccctcgcaagttactcgagcatgttgccccacagttgtccccatcctgtcttcgcctaggatcagcctctcctaaggtacctaggaccttactcacactggacgagcaggtgctcagctttcagcgaaaagtggggatcctctactgtagagctggccagggatccgaagaagaaatgtacaataaccaggaagccggccccgcatttatgcaattcctgaccttattgggagatgtcgtgaggctcaagggcttcgagagttacagagcacagctggataccaaaactgactcgacgggaactcattccttgtatacaacttaccaggaccatgagattatgttccatgtttctaccatgctgccttacacccccaataaccaacagcagctgcttcgtaaacgccacatcggaaacgacatcgtcacgattgtattccaagagcccggatccaagcccttctgtccaacaaccatacgtagccattttcagcatgtcttcttggttgttcgggcacacacaccatgtaccccccatactacatacagggtcgcagtaagcaggactcaggatacccctgcttttggtccagccctgccagcaggaggtggacccttcgcagcaaatgccgacttccgggcatttctccttgcaaaggctcttaatggcgaacaagccgctgggcacgctcgccagtttcacgccatggctaccaggacacggcagcagtatctccaggatctggcaacaaacgaagtcacaaccaccagcctcgattccgcatctagattcggcctgcctagcctcggcgggcgcagacgcgcagcaccgaggggccccggggcggaattgcaggccgcagggtccctggtatggggggtgcgggctgccccgggtgcgcgggtggctgcaggcgctcaagcttctggccctgaaggcatcgaagtaccttgtctgttagggatttcagccgaggcccttgttttagtggccccacgggacgggcgggtcgtattcaattgtgcttgcagagatgtgctggcatggactttctctgagcaacagctggacctgtaccacggccggggggaggctataacactaaggttcgacgggtctccaggccaggcggtcggggaagtcgtggccaggcttcagcttgtttccaggggctgtgagacacgcgagctcgccctaccaagagatgggcagggcagactgggttttgaggtggatgcagagggcttcgtaacccacgtcgaaaggtttaccttcgctgagactgccgggctgagaccaggagctaggcttctccgtgtgtgcgggcagacactgccctcactccggcccgaagctgccgcccagcttctgcggtccgctcccaaagtgtgtgtgactgttcttccacccgatgaaagcggcaggcctcgccgaagtttcagcgagctttatacgctgagcctccaggagccaagtcggagaggagcaccggatccagtgcaggatgaggtacaaggggtgacattactccccactacgaagcagctgctacatttatgtcttcaggatggaggctctccccccggcccgggtgatctcgccgaagagagaaccgagtttctccactctcagaacagcctgagcccgcgcagctccctaagcgacgaagccccagtgctgccaaatacaacgcccgatttgctgctcgccaccaccgctaagccgtctgtcccaagcgccgactccgagacccctctgacgcaggatagacccggaagccccagtggctctgaggacaagggaaatccagctccagaactccgcgccagtttcctcccgcggactctgtcgcttcggaactccatatctcgtataatgagtgaggcaggctcggggaccctagaagacgaatggcaggctatctctgagattgcctctacttgcaacaccattctggaaagcctgagcagagaaggacaacctattcccgagagtggcgaccctaaagggacaccaaagtccgacgccgaaccggagcctgggaacctcagcgagaaggtttctcatctggagtcaatgcttcgtaagctgcaggaggatctgcagaaagagaaggccgatcgcgccgcgctggaagaggaggtcagaagtctgagacacaacaacagacgcttgcaggcagagtcagaaagtgccgccactagactattgttggcaagcaaacagctgggctctcccacagctgatttggcctag

SEQ ID NO: 245567 - DNA, 2823 bp, Artificial Sequence
  derived and/or modified sequence
atgcccatgtgggcagggggcgtgggctcgccgcgccgggggatggcaccagcctcaaccgatgacctcttcgccagaaagttgcgacagcctgctaggccccccctgacccctcacactttcgagccgagacccgtgcgaggcccactgctcaggagtggttctgatgcaggggaggctcgtccccccacccctgcatccccacgcgcacgagcacactcccatgaagaagccagccggccagccgctacttccactaggctttttaccgaccctctggccctgctcggcctgccggcagaggaacctgaacctgcgtttccacctgtcctggagcccaggtggtttgcccattacgacgtgcaatccctgctgtttgactgggcgccgcgatcacaaggtatgggctcccacagtgaagcaagcagcggcaccttggcgagtgctgaggaccaggccgcgtcatccgaccttcttcatggcgctccaggcttcgtatgcgaacttgggggcgagggagagcttggccttggagggccagccagtcccccagtccctcccgcgctccccaatgccgcagtgtcgattcttgaagagccgcagaatcgaacaagcgcttacagcctggaacatgccgacttaggagccggatactaccggaaatatttttatggcaaggaacaccagaactttttcggcatggacgagtcactggggcccgtggctgtgtcccttagacgcgaagagaaggaaggcagtgggggcggaacactgcacagctaccgtgtaatagtgcggaccactcaactcagaaccctgcgtgggaccatctcggaagatgcacttccacccggccctcctcggggcctgagtcctaggaagttacttgagcacgtggccccccagttgagtccatcctgtctgcgcttggggagtgcttcgcctaaggttccgaggacactgctcacattggatgaacaggtcctatccttccagcggaaagtcggtatactgtactgtcgcgccggccagggctccgaggaggagatgtacaacaatcaggaagcaggcccagcctttatgcagttcttaaccttgttaggggatgtagtgagattgaagggattcgaatcctaccgcgcgcagctcgacaccaagactgactccactgggactcatagtctgtacacaacttaccaagatcatgaaataatgtttcacgtatcgacaatgctgccttatacgccaaacaaccaacaacaattactacgcaaacggcacatagggaacgacatcgtgacaatcgtgttccaggaacctgggagcaaacccttttgcccaacaactattagatctcatttccaacacgtcttccttgtcgtccgcgcgcacacaccatgcactccccatacaacatacagagtggccgtgtctcggacccaggatacccccgcatttggacctgccctccccgctggcggtggaccatttgcagccaacgcagatttcagagcctttctgttggctaaggcacttaacggcgagcaagccgccggccacgctagacagtttcacgcaatggctacacgcactcgtcagcagtacttgcaggatttagctacaaatgagcagctggatttgtatcacggtagaggtgaggccatcactcttcggttcgatggcagccccggccaggcagtaggcgaggttgtcgcgcgcttgcagctcgtatctaggggatgtgagacaagggaactcgccctgccgagggatggtcaggggcgactcggattcgaggtggatgccgaaggatttgtgactcatgttgaaaggttcacgttcgctgagacagctggactgaggccaggggcccgtttgttgcgtgtgtgcggacaaactctaccctccctgcgaccagaggcggcggctcaactgctgcgctctgccccgaaggtatgcgtgaccgtgctgcctccagatgagagtggcaggccaagacggtccttttctgaactctatacgctgtcgctgcaagaacctagcagacgtggtgcgcctgatcctgtgcaggacgaggtgcaaggcgtcactttgttgcccacaacaaaacagctcctgcacctgtgtctccaggatggcggatctccacccggtccgggggatttggcagaagaaaggaccgagtttcttcactcccagaacagcctgagccccagatcttcattgtcagatgaagcaccggtactgccaaatactaccccagatctgctattggcaacaactgcgaaaccgtctgtgccatctgcggattccgaaactccattaactcaggatcgccccggcagtccttcaggcagcgaggataagggcaaccccgcaccagaattgagagcctctttcctccctagaactctgagtcttaggaacagtatttccagaattatgtccgaagctggatccggaaccttagaggatgagtggcaggctatcagcgagattgcttcaacctgcaacacaatactcgaaagcttgagccgggaaggccaacccatccccgaaagcggggacccgaaaggaaccccgaagtccgacgcggaacctgaacctggaaatctatcagagaaagtgtctcacctggagagcatgctgcgtaagctgcaggaagacttgcagaaagagaaggccgacagagcagcgctggaagaagaagtgcgttctctaaggcacaacaacaggagactccaggcggagtccgagagcgctgcaactagactgctcctggcgagtaagcagctcggtagtcccacagccgatcttgcttag

SEQ ID NO: 245568 - DNA, 312 bp, Artificial Sequence
  derived and/or modified sequence
atgccaatgtgggctgggggtgtcgggagcccacgtcgaggcatggcacccgccagcacagacgatctttttgccagaaaactcagacagccagcgagaccccctctgacacctcacacatttgagcctcgcccggtacgggggcctctcctgcgttctggcagtgatgcaggggaggctaggccgccaaccccagcctcacctcgggcacgagcgcattcccatgaagaagctagtaggcctgcagccacgagcacaagactgttcactgaccccctcgctctcctgggcctccctgccgaggagccttag

SEQ ID NO: 245569 - DNA, 3129 bp, Artificial Sequence
  derived and/or modified sequence
atgcctatgtgggccggtggggtgggttctccccggcgcggcatggccccagcaagtacagatgacttgtttgctcgtaaattgcgccaaccagcccgtccgcctctgaccccacatacgttcgaacctcgacccgtcagagggccactccttaggtccggaagtgacgccggcgaggcaagacccccaactccggcctcccctcgtgcaagagcacactcccatgaagaagcctcccgcccagcggcaacaagcacccgactatttaccgacccactagcgctcctgggtctgcctgccgaagagccagagcctgcctttccgcccgtcttggagccccggtggttcgcacactatgatgttcagtccctcctgtttgattgggctcctaggtcccaggggatggggagtcatagtgaagccagttctggaacactggcctcagctgaagaccaggctgcctcaagtgaccttctccatggcgctccgggttttgtgtgcgagttagggggggaaggcgaacttggtctaggcggaccagccagccctcctgtcccgccagctttgccgaacgcagcagtgtctatcctggaggagccacagaaccgcacgtctgcctactcactcgagcacgccgatctcggagccggctattaccgaaagtatttttacggtaaggaacatcagaatttttttggaatggatgagtcgttgggacctgttgctgtaagccttagacgagaagagaaggaggggagcggcggggggaccctgcactcctatagggtgatagtgcggaccacccaattgcggaccctccgcggaaccatttctgaagatgcgctgccacccggcccccctcgcggactgagtccacgtaagctgttagagcacgtggctccacagctctcccccagctgcctgcgcctggggagtgccagccccaaagtgcccaggaccctactcacactcgacgaacaggtactgtcttttcagcgtaaagtcggcattctgtactgtcgagccggtcagggctccgaggaggaaatgtacaataaccaagaggcaggaccagccttcatgcaatttctcacgctcctaggagatgtagtgcggctgaaaggatttgaaagctacagggcccagctagacaccaaaacagatagtaccggaactcactcactttacaccacctatcaggaccatgaaatcatgtttcacgtgtctaccatgctcccatacacccccaataatcaacagcaactgctccgcaaaaggcatatcggcaacgatatcgttaccatcgtgtttcaggaaccgggcagcaagccgttttgccccacaacgatccggtctcatttccaacacgtcttcttggtggtgcgggcacacactccatgtaccccacataccacatatcgcgtcgcggtttctcggactcaggatacacccgcctttggccccgcgctgccagccggaggtggtcctttcgctgcgaacgcggacttcagggcttttctgcttgccaaagccctgaatggcgaacaggctgctggccacgcacgacagtttcacgcaatggcaacgcgaacccgccagcaatatctgcaggatttggcaacaaacgaagtcacaaccaccagcttggacagcgcaagtaggttcggcctaccgtccctcggcggccggaggagagcagctccacgtggacctggcgccgagctgcaggccgctggcagcctggtctggggagttagagccgctcccggtgcccgagtggccgccggagctcaggccagcggccctgaagggatcgaggtcccctgtctgttaggaatctctgcagaagctctagtgctcgtggcccccagggatggcagagtagttttcaactgtgcttgtagagatgtattggcttggactttcagcgaacagcaactggacctctaccatggtcgcggagaagccataacgctgcggtttgacggcagccccggacaggctgtgggtgaggtggtggctagactgcagcttgtgtcaagaggttgcgagactcgcgaactggctcttcccagggacggtcaggggcggctaggcttcgaggttgacgcagagggatttgtcacccacgtggaacggtttacttttgcggagaccgctggtctcagaccaggagccaggctacttcgcgtgtgcgggcaaacgctacccagtctccgccccgaggccgcggcccagttactcaggagcgccccaaaagtgtgcgttactgtgttaccccctgacgaaagcggccggccacgaaggtccttcagcgagctctacactctttctctgcaagagccttctcgccgaggggcgcccgatccagttcaagacgaagtgcaaggagtgaccttgcttcccacgactaaacagctgctccatctgtgtctgcaggacggtggatcgccccccggcccgggtgacctggcagaggagcgaaccgaatttctgcattctcagaattctctgtcccccaggtccagccttagcgatgaagcccccgtcttgccgaacacaacaccagacctcctgcttgcgacaactgccaagccgtcagtgccttcagcggactcggaaacgcccttaactcaggacagacccggatctccgtcgggctctgaggataagggtaatccagctccagagctccgtgcctccttcctccctagaaccctgagtctgcgaaactccatatcccggataatgtccgaggcaggcagcggaacactagaagacgagtggcaggccatctctgagatcgcatcgacctgtaacactattctggagagtctgtctcgcgaaggccaacctatcccagagagcggtgatccgaaaggtaccccgaagagtgatgctgagcccgagcctggaaatttgtcggaaaaagtatcccacctcgaaagcatgcttagaaagcttcaagaggacctacaaaaagaaaaggccgaccgagctgcactcgaggaggaggtgcgctctttacgccataataacagacgcttgcaggccgagtctgagagtgcggctacacggctacttctggccagcaagcagctgggaagtcccaccgctgatctcgcgtag

SEQ ID NO: 245570 - DNA, 3129 bp, Artificial Sequence
  derived and/or modified sequence
atgcccatgtgggccggcggcgtgggcagcccccggcggggcatggccccagccagcacagatgacctgtttgccaggaagctgcggcagcctgcccggccccccctgaccccccacacctttgagcccaggcctgtgcggggccccctgctgcggagcggcagtgatgctggggaggcccggccccccaccccagccagcccccgggcccgggcccacagccatgaggaggccagcaggcctgctgccaccagcaccaggctcttcacagaccccctggccctgctgggcctgcctgctgaggagcctgagcccgccttcccccctgtgctggagccccgctggtttgcccactatgatgtgcagagcctgctgtttgactgggcccccaggagccagggcatgggcagccacagcgaggccagcagcggcaccctggccagcgctgaggaccaggccgccagcagtgacctgctgcacggggcccctggctttgtgtgtgagctgggcggggagggggagctgggcctgggcggccctgccagcccccctgtgcccccagccctgcccaatgctgctgtgtccatcctggaggagccccagaacagaacatctgcctacagcctggagcacgccgacctgggcgccggctactacaggaagtacttctacggcaaggagcaccagaacttcttcggcatggatgagagcctgggccctgtggccgtgtccctgcggcgggaggagaaggagggcagcggcggcggcaccctgcacagctacagagtcatcgtgaggaccacccagctgcggaccctgcggggcaccatcagtgaagatgccctgcccccaggccccccccggggcctgagccccaggaagctgctggagcacgtggccccccagctgagccccagctgcctgcggctgggcagcgccagccccaaggtgcccaggaccctgctgaccctggatgagcaggtgctgtccttccagaggaaggtgggcatcctgtactgccgggccggccagggcagcgaggaggagatgtacaacaaccaggaggccggccctgccttcatgcagttcctgaccctgctgggagatgtggtgcggctgaagggctttgagagctaccgggcccagctggacaccaagacagacagcacaggcacccacagcctgtacaccacctaccaggaccacgagatcatgtttcatgtgtccaccatgctgccctacacccccaacaaccagcagcagctgctgaggaagaggcacatcggaaatgacatcgtgaccatcgtgttccaggagcccggcagcaagcccttctgccccaccaccatccgcagccacttccagcacgtgttcctggtggtgcgggcccacaccccctgcaccccccacaccacctacagagtggccgtgtccaggacccaggacaccccagccttcggccctgccctgcctgctgggggcggcccctttgctgccaatgctgacttccgggccttcctgctggccaaggccctgaatggagagcaggccgccggccacgcccggcagttccacgccatggccaccaggacccggcagcagtacctgcaggacctggccaccaatgaggtgaccaccaccagcctggacagcgccagcagatttggcctgcccagcctgggcggcagaagaagagctgccccccggggccctggagctgagctgcaggccgccggcagcctggtgtggggcgtgcgggccgcccctggggcccgggtggccgccggggcccaggccagcggccctgagggcatcgaggtgccctgcctgctgggcatctctgctgaggccctggtgctggtggcccccagagatggccgggtggtgttcaactgtgcctgcagagatgtgctggcctggaccttcagcgagcagcagctggacctgtaccacggccgcggggaggccatcaccctgcgctttgatggcagccctggccaggccgtgggggaggtggtggcccggctgcagctggtgtcccggggctgtgagacccgggagctggccctgcccagagatggccagggccgcctgggctttgaggtggatgctgagggctttgtgacccacgtggagcgcttcacctttgctgagacagctggcctgcggcctggggcccggctgctgcgggtgtgtggccagaccctgcccagcctgcggcctgaggccgccgcccagctgctgcggagcgcccccaaggtgtgtgtgacagtgctgcccccagatgagagcggccggccccggcgctccttcagcgagctgtacaccctgagcctgcaggagcccagccggcggggggccccagaccctgtgcaggatgaggtgcagggcgtgaccctgctgcccaccaccaagcagctgctgcacctgtgcctgcaggacggcggcagccccccaggccctggggacctggccgaggagaggacagagttcctgcacagccagaacagcctgagccccaggagcagcctgagtgatgaggcccctgtgctgcccaacaccaccccagacctgctgctggccaccacagccaagcccagcgtgcccagcgctgacagcgagacccccctgacccaggaccggcccggcagccccagcggctctgaagataaaggaaatcctgcccctgagctgcgggccagcttcctgcccaggaccctgagcctgaggaacagcatcagccgcatcatgtctgaggccggcagcggcaccctggaggatgagtggcaggccatcagcgagatcgccagcacctgcaacaccatcctggagagcctgagccgggagggccagcccatccctgagagcggggaccccaagggcacccccaagagtgatgctgagcctgagcccggcaacctgtctgagaaggtgagccacctggagagcatgctgaggaagctgcaggaggacctgcagaaggagaaggctgaccgggccgccctggaggaggaggtgcgcagcctgcggcacaacaacagaaggctgcaggccgagagcgagagcgctgccacccggctgctgctggccagcaagcagctgggcagccccacagctgacctggcctag

SEQ ID NO: 245571 - DNA, 2823 bp, Artificial Sequence
  derived and/or modified sequence
atgcccatgtgggccggcggcgtgggcagcccccggcggggcatggccccagccagcacagatgacctgtttgccaggaagctgcggcagcctgcccggccccccctgaccccccacacctttgagcccaggcctgtgcggggccccctgctgcggagcggcagtgatgctggggaggcccggccccccaccccagccagcccccgggcccgggcccacagccatgaggaggccagcaggcctgctgccaccagcaccaggctcttcacagaccccctggccctgctgggcctgcctgctgaggagcctgagcccgccttcccccctgtgctggagccccgctggtttgcccactatgatgtgcagagcctgctgtttgactgggcccccaggagccagggcatgggcagccacagcgaggccagcagcggcaccctggccagcgctgaggaccaggccgccagcagtgacctgctgcacggggcccctggctttgtgtgtgagctgggcggggagggggagctgggcctgggcggccctgccagcccccctgtgcccccagccctgcccaatgctgctgtgtccatcctggaggagccccagaacagaacatctgcctacagcctggagcacgccgacctgggcgccggctactacaggaagtacttctacggcaaggagcaccagaacttcttcggcatggatgagagcctgggccctgtggccgtgtccctgcggcgggaggagaaggagggcagcggcggcggcaccctgcacagctacagagtcatcgtgaggaccacccagctgcggaccctgcggggcaccatcagtgaagatgccctgcccccaggccccccccggggcctgagccccaggaagctgctggagcacgtggccccccagctgagccccagctgcctgcggctgggcagcgccagccccaaggtgcccaggaccctgctgaccctggatgagcaggtgctgtccttccagaggaaggtgggcatcctgtactgccgggccggccagggcagcgaggaggagatgtacaacaaccaggaggccggccctgccttcatgcagttcctgaccctgctgggagatgtggtgcggctgaagggctttgagagctaccgggcccagctggacaccaagacagacagcacaggcacccacagcctgtacaccacctaccaggaccacgagatcatgtttcatgtgtccaccatgctgccctacacccccaacaaccagcagcagctgctgaggaagaggcacatcggaaatgacatcgtgaccatcgtgttccaggagcccggcagcaagcccttctgccccaccaccatccgcagccacttccagcacgtgttcctggtggtgcgggcccacaccccctgcaccccccacaccacctacagagtggccgtgtccaggacccaggacaccccagccttcggccctgccctgcctgctgggggcggcccctttgctgccaatgctgacttccgggccttcctgctggccaaggccctgaatggagagcaggccgccggccacgcccggcagttccacgccatggccaccaggacccggcagcagtacctgcaggacctggccaccaatgagcagctggacctgtaccacggccgcggggaggccatcaccctgcgctttgatggcagccctggccaggccgtgggggaggtggtggcccggctgcagctggtgtcccggggctgtgagacccgggagctggccctgcccagagatggccagggccgcctgggctttgaggtggatgctgagggctttgtgacccacgtggagcgcttcacctttgctgagacagctggcctgcggcctggggcccggctgctgcgggtgtgtggccagaccctgcccagcctgcggcctgaggccgccgcccagctgctgcggagcgcccccaaggtgtgtgtgacagtgctgcccccagatgagagcggccggccccggcgctccttcagcgagctgtacaccctgagcctgcaggagcccagccggcggggggccccagaccctgtgcaggatgaggtgcagggcgtgaccctgctgcccaccaccaagcagctgctgcacctgtgcctgcaggacggcggcagccccccaggccctggggacctggccgaggagaggacagagttcctgcacagccagaacagcctgagccccaggagcagcctgagtgatgaggcccctgtgctgcccaacaccaccccagacctgctgctggccaccacagccaagcccagcgtgcccagcgctgacagcgagacccccctgacccaggaccggcccggcagccccagcggctctgaagataaaggaaatcctgcccctgagctgcgggccagcttcctgcccaggaccctgagcctgaggaacagcatcagccgcatcatgtctgaggccggcagcggcaccctggaggatgagtggcaggccatcagcgagatcgccagcacctgcaacaccatcctggagagcctgagccgggagggccagcccatccctgagagcggggaccccaagggcacccccaagagtgatgctgagcctgagcccggcaacctgtctgagaaggtgagccacctggagagcatgctgaggaagctgcaggaggacctgcagaaggagaaggctgaccgggccgccctggaggaggaggtgcgcagcctgcggcacaacaacagaaggctgcaggccgagagcgagagcgctgccacccggctgctgctggccagcaagcagctgggcagccccacagctgacctggcctag

SEQ ID NO: 245572 - DNA, 312 bp, Artificial Sequence
  derived and/or modified sequence
atgcccatgtgggccggcggcgtgggcagcccccggcggggcatggccccagccagcacagatgacctgtttgccaggaagctgcggcagcctgcccggccccccctgaccccccacacctttgagcccaggcctgtgcggggccccctgctgcggagcggcagtgatgctggggaggcccggccccccaccccagccagcccccgggcccgggcccacagccatgaggaggccagcaggcctgctgccaccagcaccaggctcttcacagaccccctggccctgctgggcctgcctgctgaggagccctag

SEQ ID NO: 245573 - DNA, 3129 bp, Artificial Sequence
  derived and/or modified sequence
atgcccatgtgggccggcggcgtgggcagcccccggcggggcatggccccggcgtctactgacgacctttttgcacgcaagcttcggcagccagctagacctcctctgaccccccacacgttcgagcccaggcccgttagagggcccctgctgcggtccggaagcgatgcaggcgaagcacggccccccacccccgcctccccccgggctagggcgcattcccacgaggaggccagccggcccgcagcgacttcgaccagattgtttactgatcccctcgcactgctgggactcccagccgaagagcccgagcccgccttcccccctgttctcgagcctcgatggtttgcacattacgacgtgcaatccctcctatttgattgggccccccgttcccagggaatgggatcacacagcgaagcctccagtgggacactggctagtgccgaggaccaagccgccagtagcgatctcctccatggggcaccggggttcgtttgcgagctcggtggggagggagagttagggttgggcggacccgcctccccccctgtcccccccgcactacccaatgctgccgtctcaatccttgaagaaccccagaacaggacttcagcctattcccttgagcacgctgatcttggcgccggatactataggaaatacttttatgggaaggagcaccagaacttcttcgggatggatgaatccctcggccctgttgcagtaagtcttcggcgcgaggagaaggagggtagcggcggcggtacccttcatagttaccgggtcatcgtcagaacaactcaactgaggactttgcgcggtaccatcagcgaagacgccttacccccaggccctccacgtgggctttcaccacgcaaacttttggagcacgtcgcaccgcaattgagcccttcttgtctgcgactcggctcagcttcgcccaaagtcccccggacattattgacactggacgagcaggttttatccttccagagaaaagtgggcatactctactgtagagctgggcaaggctctgaggaagagatgtataacaaccaagaagcgggccctgcctttatgcagtttctgacgcttctcggagacgtggtgagactgaagggctttgagtcttatagagcacagttagatactaagaccgactctacaggcacccattcactttatacaacatatcaagatcatgagatcatgtttcacgtcagtaccatgttgccatacacgcccaacaaccagcaacagctgttgagaaagaggcatataggaaacgacatcgtgactatcgtgtttcaggagcccggctccaagccattttgcccaactaccatccggtcacactttcagcacgtattccttgtagtcagagctcatacgccgtgtacccctcacacaacctaccgagtagctgtgtctaggacccaagacacgccagccttcgggcccgcccttccagcaggagggggcccctttgctgccaatgctgactttagggcatttctattagcaaaagctctgaatggagagcaggcggctggccatgctaggcagtttcacgccatggcaacacgcaccaggcaacaatacctgcaggatctggctaccaatgaggtgacaactacgtccctcgacagcgcctcccgctttggactgccaagcttgggcgggagacggagagcagcacctagagggccaggggccgaacttcaggctgccggcagcctcgtttggggtgttcgggccgctcccggcgcccgggtcgctgctggggcacaagcgtctggcccagaaggaatcgaggtgccctgtctgcttggcatttctgcagaggccctggtgcttgtcgcacctagagacggaagggtggtctttaactgtgcttgtcgcgatgtgttggcgtggacattctctgaacaacaactggacttgtatcatggtagaggagaggccatcacactgaggtttgatgggagccctggccaggcagtcggcgaggtggtggcgaggctgcagctggtttcccgcggttgcgaaacgagagagctcgcactgcccagggacggacagggtcgactcggtttcgaagtagacgccgagggatttgttacacacgttgaacggttcacgttcgctgagacagctggcctgcgcccaggggctcgactgctgcgagtttgcggccagaccctgccaagcttgcgaccagaggcagctgctcaactactgcgttccgcaccaaaggtctgtgtaaccgtgttacctcctgacgaatcaggtcgcccacggcggtccttcagtgagctgtacactttatccttgcaagagccttcgcggcgcggcgcgcctgatccagttcaagacgaggtacagggcgtcacactccttccaacaacgaagcagcttttgcatctgtgccttcaggatggagggtccccacctggaccaggcgacctggctgaggaaaggactgagttcctgcactcgcagaatagcctgtccccaagaagcagcctgagtgatgaagctcccgtgctgccaaacacaacaccagatctgctgttagccactactgccaaaccttccgttcctagcgcagacagcgagacccctctgacacaggacagaccggggagccccagcggctcagaggataaaggaaaccctgcgccggagctgagagcctcatttctcccacgcaccctctctttaaggaactcgatctctcggattatgtcggaagctggatctgggacactcgaggatgaatggcaggccatctccgagatagccagcacctgtaacactatcctggagagtctcagcagagagggtcaacctattccggaatctggagaccctaaggggactccaaagtcagatgcagaacccgagccaggtaacctctcagagaaggtttcccaccttgaaagcatgttgagaaagctgcaagaggatttacagaaagagaaagccgacagggctgccctcgaagaggaggtgcgcagtctacgtcataataatcgccgcctgcaggcagagtccgagagtgctgccacgcggctcttattagcatcaaagcagctagggtcacctaccgcagacttggcttag

SEQ ID NO: 245574 - DNA, 2823 bp, Artificial Sequence
  derived and/or modified sequence
atgcccatgtgggccggcggcgtgggcagcccccggcggggcatggcgcctgcgagcaccgatgacttgtttgccaggaaattgcggcagcccgcccgcccccccttaacaccccatacctttgaaccacgaccggtccgcgggccattgcttcgctcaggtagcgatgcgggggaagcacgaccaccaacccccgcatcacctagggcccgagcccatagtcacgaagaggcgagcagacccgccgcaacaagcacaaggctgttcactgaccccttagccctcctggggctgcccgccgaagagccagaacccgcctttccacctgtattggaacccaggtggttcgctcactatgatgtgcagtctctgttgttcgattgggcacctagatctcaaggtatgggtagtcactcagaggctagttccggaaccctggctagcgccgaagatcaggccgcgagctctgacctgttacatggggcaccaggtttcgtgtgcgaattaggcggggaaggtgaactcggtcttggagggccagctagtccccccgtaccacccgccctacctaatgctgctgtatcaattttggaggaacctcagaaccggactagcgcgtactcgctggagcatgccgatctgggagcagggtattatcgaaaatacttttatggcaaggagcatcagaactttttcgggatggacgagtccctggggcccgtggcggtgtctctccggagagaggaaaaggaaggaagtggcggaggcaccttgcattcctaccgcgtgattgttcgaactactcaactgagaactctgcgcggaacaatctctgaggacgccctcccacctggcccaccacggggcctgagtcctagaaaacttctggagcacgtagctcctcagctatccccatcgtgcttgcggttggggagcgccagtcccaaggtgccccgcacactgttaaccttagatgaacaggtgctgtctttccaacgaaaggtgggtatactctattgcagagccggccaaggctcagaggaagagatgtataacaatcaggaggccggcccggccttcatgcagttcctgaccctcctcggggatgtcgtaaggctcaaaggcttcgaatcttaccgggctcagctcgatacaaaaaccgattcaacagggacacacagcctgtatactacttatcaagaccacgagataatgttccatgtgtcgacaatgcttccttacacccctaataaccaacagcaactgcttcggaaacgccacatcggcaatgatattgtcacaatcgtatttcaggagccaggaagcaaacccttttgtcccactacaatcagaagccactttcaacatgtctttcttgttgtgcgggctcacacaccatgcaccccacacacaacatatcgggtggccgtgtcccggacacaagatactcccgcttttggccctgctctgcccgctgggggtggaccatttgctgccaatgcagacttcagagccttcctgctggcaaaagcactaaacggggaacaagcggccgggcacgcccgccaatttcatgctatggccaccaggacccggcagcaatacctccaagacctcgcgaccaacgagcagctggatctgtaccatggcagaggggaagcaatcactcttaggttcgatggatcacctgggcaggccgtaggggaggtggtagcccgactgcagctggtgtctcgagggtgcgaaacccgggagctggccctgcctcgagatggacaaggcagattgggattcgaggtggatgccgagggcttcgttactcacgtggagaggtttacattcgcagagactgcaggattacgccccggtgcgcgtctgttacgggtttgtggacagaccctccctagcctgcgccctgaggccgctgcccagctgctacggtccgcccctaaggtctgcgtaaccgtccttcctcccgacgaatcaggccggccccgacgatccttttcagagttgtataccttatctctgcaggagccaagcaggcgaggagcacccgatcctgtgcaggacgaggtgcagggtgtgacattactgcctaccactaagcagttgctccatctatgtctccaggatggcggttcccctccagggccaggtgaccttgccgaggaaagaaccgagttcctgcacagccagaattccttgtcgccacgttcctctctgtctgacgaagcaccagtcctgccgaataccactccagatctgctactagccactaccgcaaaaccgtccgtacccagcgctgacagcgagacacccctcacacaggaccggcccggtagcccaagcggctcggaggacaaaggaaatcctgcccccgagctgagggccagctttctccctagaaccctctcgttacggaactctatctccagaatcatgtctgaagccgggtctggtacactcgaagatgagtggcaggccatcagcgagattgcatctacctgcaatacgattctggagtccctcagcagggagggtcagccaatccctgaatcaggcgatcctaagggcacgccgaaatctgatgcagaaccggagcccggaaatttaagtgaaaaagtaagccacttggagtccatgctgcgtaaacttcaggaggacctccaaaaggaaaaggctgatcgggccgcactggaggaggaggttcggtccctgcggcataataaccgcagactgcaggcagagtccgagagcgccgcaactcgacttcttctcgcttctaagcagctcggatctccgaccgccgatttggcctag

SEQ ID NO: 245575 - DNA, 312 bp, Artificial Sequence
  derived and/or modified sequence
atgcccatgtgggccggcggcgtgggcagcccccggcggggcatggctcctgctagcacagatgacctgtttgctcgaaaacttcgtcagccagctcggcctccactgacacctcacacattcgaacctaggccagtgaggggtcccctgctcaggagcgggtctgatgctggagaggcccggccccctacacccgctagtccccgtgccagagcccacagccacgaagaagctagtcggcccgccgccacaagcacacgcctctttaccgatccccttgcccttctggggctgccggccgaagaaccatag

SEQ ID NO: 245576 - DNA, 3129 bp, Artificial Sequence
  derived and/or modified sequence
atgcccatgtgggccggcggcgtgggcagcccccggcggggcatggcgccagcctcaacggacgatctctttgctcgcaagctgcggcagccagccaggcccccgcttacacctcatacattcgagccccgtccggtgcgtggccctctactgagatcagggagtgacgcgggggaggctcgtcccccgactccagcctccccaagggccagggctcacagccacgaagaggctagcaggcctgcagcgacaagcaccaggctctttactgatcccctcgccctgctggggctccccgccgaggaacctgagcccgcctttcctcccgtcctcgaacccagatggtttgcccactatgacgtgcagagtctgctgttcgattgggccccacgctcccaaggaatgggtagtcactcagaggcctctagtggcaccctggcatctgctgaagatcaggcagcttcgtctgacctcctgcacggcgccccggggtttgtctgtgaacttggtggagaaggtgaactagggctgggaggtcctgcaagtccccctgtcccccccgccttgccaaacgccgccgttagtattcttgaggagccccagaacagaacctctgcttatagcctggaacatgcagatctgggtgccggctattatcggaaatatttctatggcaaagaacatcagaatttcttcggcatggacgagtctctgggcccagtggccgtgtctctacgacgagaggagaaggaaggatccggaggcggtacgcttcactcataccgagtcatcgtgcgcactacacagctgagaacgcttcgaggtaccatatccgaggatgccttgcccccgggtcccccccgaggtctctcaccccgcaaactcctcgagcatgttgcaccccagctgtctccgagttgcttgcgtctgggcagtgccagccccaaggtccctcggacactcctgactttggatgagcaggtgctgagcttccaacggaaggtcggtatactatactgccgggccggccagggcagcgaggaagaaatgtataataatcaggaagccggcccggctttcatgcaattcctgaccctgctcggagatgtagtgagacttaagggcttcgagagttaccgcgcccaattagacactaaaacagattcgaccgggacacacagcctctacaccacctatcaggaccacgagattatgttccacgtatctactatgctaccctatacccccaacaaccagcaacaattgttaagaaaaaggcatattggtaatgacatcgtaacaatcgtttttcaggaacccgggagcaaaccattttgcccaactaccatccgtagccatttccagcatgtgttcttagtcgttcgggctcacaccccgtgtactccacacactacttatagggtggccgtctcccggacacaggatacacctgcttttggccccgccctgcccgccgggggaggcccttttgctgccaatgctgactttagagccttcctgctggccaaggccctaaacggagaacaagccgcaggtcacgcccgacaatttcacgccatggccaccagaacccggcagcagtatttacaggatctcgctactaacgaagtgaccactaccagtctcgattcggcctccagattcggcctgccaagcctgggtggaaggcggcgggccgctcccaggggccctggagcagaattgcaggccgctgggtcactcgtgtggggcgtaagggccgctcccggggcccgcgtcgccgccggcgcccaagccagcggacccgaagggatcgaggtgccttgcctgctgggaatctccgccgaggcgcttgtcttagtggctccaagggatggacgggtggtatttaactgtgcctgcagagacgtcttagcttggacgttcagtgaacagcagctggacctctaccatggccgaggagaggctataacgctgcgtttcgacggaagtccaggccaagctgtgggtgaggtggtggccaggctccagttagtgtcacggggctgcgaaacgagagagttagcccttcctagggacggacagggaagactgggcttcgaagtcgatgctgagggatttgtgacccacgtggagcgctttacgtttgctgagacggctgggcttcgccctggggcccgtttgcttagggtttgcggacagaccctgcctagtttaagacccgaggccgccgcccagctgctccgcagcgctcctaaggtatgtgtcacggtgctgcctcccgacgagtcaggcagaccccgaaggtctttttccgaattgtatacccttagcctccaggaacccagtcgcagaggggcaccggatcctgtccaggacgaggtccagggtgtgacactgttgccaacaaccaagcagttgctccatttgtgcctgcaggacggtggcagcccacctggtcctggcgatcttgcggaagagcgaactgaatttcttcactcgcagaattccttaagcccaaggtcaagtctgtcagatgaggccccagtgttacctaacaccacgcccgacctgctcctcgctaccaccgccaaaccctctgtgcccagcgccgacagcgagacaccacttacccaggaccgccctggctctccatccggaagtgaggacaagggcaaccccgcacccgaacttcgcgctagtttcctacctcgtactctgtctctgaggaatagtatctccaggataatgtccgaagctggctccggtacccttgaggatgagtggcaggccatcagcgagatcgccagtacctgtaacacaattctggagagccttagcagagagggccagcccattcccgaatccggcgatcctaaaggtacgccaaagagtgacgccgaaccagagccaggcaatctgtctgaaaaagtgtcccatttggaatcaatgctgcgcaagctacaggaggatctgcagaaggagaaggccgatagagccgctcttgaggaagaggtcagaagcctccgccacaataaccgaaggctgcaggctgagtctgaatctgctgctacccgcctgttgttggcttcgaagcaactcggatcccctacggccgacctggcttag

SEQ ID NO: 245577 - DNA, 3129 bp, Artificial Sequence
  derived and/or modified sequence
atgccaatgtgggctgggggagtggggtctcccagacgcggaatggcccctgcttccacagacgacttgttcgcccgaaagttacgccagcccgctagacctccactgacacctcacacttttgaacctcggccagtgaggggacctctcctacgttcagggagcgatgccggagaagcgcgtcctccgaccccagcatcccctagagccagagctcatagtcacgaagaagccagtaggcctgccgctacctcaactcgcttatttaccgatcctcttgcacttttgggtttgccagcggaggaacctgagcctgctttcccgccagtgctagaacccaggtggtttgcacactacgacgttcagtctcttctgttcgactgggcccctcgctcccagggcatgggtagccactccgaagcaagtagcggcacattggcctctgccgaagatcaggccgctagttccgatcttctccatggcgctcctggctttgtgtgcgaattgggaggcgaaggcgaacttgggttgggagggccagcaagccccccagtcccacccgctttacctaacgcagctgtgtccattcttgaagaaccacagaacagaactagcgcttactcgcttgagcatgccgatctgggggctgggtactaccgaaagtatttctatgggaaggagcaccaaaacttctttggcatggatgagtcactggggcctgtcgccgtgagcctgcgccgtgaggagaaggaaggttctgggggaggcacactgcacagctatcgagtaatcgtgcggaccacacagctacgtaccctgcggggaactatctccgaagacgccttgccaccgggaccccctcgcggactgtctccacgcaagctgttagaacacgttgccccacagctgagtcccagttgtctgcgcctggggtccgcaagtcccaaggtgcccagaacgctacttaccttggacgaacaggtactctcctttcaacggaaggttggtatcctctattgcagagccggacaaggatccgaggaggagatgtacaataaccaggaggctggtcccgcatttatgcagtttctgaccctacttggagacgtcgtgagattaaaaggcttcgagtcatatcgagcacagctggacactaagacagactctaccggcacccatagcctgtacaccacttaccaggaccacgaaatcatgtttcacgttagtacaatgctgccatataccccaaacaaccaacagcagctgttgcggaaacggcacatcggtaatgacatcgtaactattgtcttccaggagcccggttccaagcccttctgccctactaccattcgctctcacttccagcacgttttcttggtggtgagagctcacaccccttgtaccccacataccacatacagggtcgctgtgtcacggacacaagatacaccagctttcggaccagccttacccgctggcggtggcccttttgccgcaaatgctgacttccgagcctttctgctcgcgaaggccctgaacggcgagcaggctgctggccatgccagacagtttcatgcgatggcaaccaggacccgacagcagtacctgcaggatttggccacgaatgaggtgacaacgacatcactggattctgcatccagattcggactgcccagtctaggcggaagacggagagcagctcctagaggccctggcgcagagcttcaggccgcagggagtctggtctggggggtgcgggcagcgcctggcgcaagggtcgctgccggtgctcaagcttcaggaccagagggcatagaggttccatgtttgctcgggattagcgcagaggcgttggtgctagtcgctccccgagacggcagggttgtgttcaattgcgcatgccgagatgtgctggcctggactttcagcgagcaacagctggatttatatcacggacgcggagaagcgatcacccttcgtttcgatggcagtccagggcaggccgtcggtgaggttgtggcgagactgcagctagtgtcccgcggatgcgaaactcgcgagctcgcacttcctagggacggtcagggtcgtctgggctttgaggtggatgccgaggggttcgtcacacacgtggagaggttcacatttgccgagactgccggtctacgcccaggcgcaagactcttgagggtctgtggccagaccctgccatcactgcggcctgaggcggctgcacagctcctgcgctcggcccctaaggtttgcgtgaccgtcctcccccctgacgagagtgggagacctagacgatctttctccgagctctatactctgagcctgcaggagccaagccggagaggagcccctgacccagtccaagatgaggtccaaggagttacgctcctgccgacaacaaaacaactgttgcatttgtgtctgcaagatgggggaagtcctcccggaccaggcgacctggcagaagagagaactgagttccttcacagtcagaatagtctttctcctcgctcatccctcagcgatgaggcccctgtgctccctaatacaacccccgatctccttctcgcaacaacagctaagccgagtgtgccctctgccgactctgagacaccactgacgcaagaccgacctggctctcctagtgggtccgaagacaaggggaatcccgcaccagagttgcgcgcatcctttctcccccgtacgttgtcacttcggaactcaatttcacgaatcatgtccgaagccggaagcggaactctggaggacgaatggcaggcaatcagtgaaattgcctctacttgtaataccatcctggagagcctgagccgcgaggggcaacctatcccagagtcgggtgaccctaagggcacccccaaatctgatgccgaaccagagccaggaaatcttagtgagaaggtgtctcacctggaatctatgttacgcaaattacaagaggacttgcagaaggaaaaagcggacagagccgctttggaggaagaggtcagatctttaaggcacaacaaccgccgtttacaggctgagtccgaatcagcagctactaggcttcttctggctagtaaacaactgggttctcccacagctgatctcgcttag

SEQ ID NO: 245578 - DNA, 2823 bp, Artificial Sequence
  derived and/or modified sequence
atgcccatgtgggcaggcggtgtcggatctcctcgaagaggaatggcgcctgccagcaccgacgacctctttgcccgtaagctacgccagcccgcacgtccacctctgacgccacacacctttgagccacgcccagtgcggggaccattactgcgaagtggctccgatgctggggaagctaggccccctacccccgcatcaccaagagcaagagctcacagtcacgaagaagcctcccgaccggcagcaacatctactcgtttattcaccgatccgctggctctgctgggtttacccgctgaggagcccgagccagccttccctcccgtgctcgaacccaggtggttcgcgcattacgacgtacagtctttgttgtttgactgggcacccaggagccagggcatgggcagccacagcgaagcaagtagcggtacgctggcctccgctgaagaccaagccgcatcctcagatctgttgcatggcgctcccggttttgtttgcgaactgggcggagagggagagctaggtctgggcggtcctgcatcacccccagtgcctcccgcactgccaaatgccgctgtttccatccttgaggaaccccagaataggacctcggcatacagcctggaacacgctgatttaggggctggatactaccgcaagtacttttacggcaaagagcaccaaaacttcttcggtatggacgaaagtctgggccctgtcgcggttagcttacggagggaggaaaaagaaggtagcgggggtggaaccctgcattcctaccgggtgattgtaaggaccacacagctcaggaccctaaggggaactatctcggaagacgccttgcctcctgggcctccacgcggacttagccctcgcaagttgctggagcatgtcgcccctcagctatcaccctcttgccttaggctgggctctgccagtcctaaggtgccacggaccctcctcacgctggacgagcaggtcctttcatttcagaggaaagttggtattctgtactgtcgagccggacaggggagcgaggaggaaatgtacaataaccaggaagctggacccgcatttatgcagtttttgactttgctgggcgacgtagtgcgcctgaagggattcgaatcttacagagcccagttggatacaaagacagattcaaccggtactcactctctttatactacctaccaagatcacgaaattatgttccacgtttcgaccatgctcccttatactcctaacaaccaacagcagctgcttcggaagagacatatagggaatgatattgttactattgtctttcaggagcctgggagtaagccgttttgccctactacaattcgatcccactttcagcacgtgtttttggtcgttcgggcacatacaccctgcaccccgcacaccacctaccgggtagccgtaagtagaactcaggacactccggctttcggtcctgcactgcccgcaggcggaggaccttttgctgctaatgcggacttcagagctttccttctcgctaaggcgctgaacggcgaacaagcggctggccatgctcgacagttccatgcaatggccaccagaacaaggcagcagtacttacaggacctggcaacgaatgagcagctcgacctttaccatgggcgaggcgaggcaataacgctccgttttgacggctcaccaggtcaggccgtcggggaggtagtggcgaggttgcagctggtgagcaggggctgcgagactagggagctcgcactcccaagggacgggcagggccgacttggctttgaggtggatgccgagggatttgtgactcacgtcgaaagattcaccttcgccgaaaccgcaggcctacggcctggggcacgtctgttaagggtctgtggacaaaccttgccctccttgcggcctgaagctgctgctcaactactgaggtccgcacccaaggtgtgtgtcaccgttctaccccctgacgagagtggcagacctcgaagaagcttttctgagctctacactctctccttgcaggagcccagcagaaggggcgctcctgatccagtccaagatgaggtgcaaggcgtgaccctgctgcccacaacaaaacagctgctacacctgtgcctgcaagatggtgggagccctccaggcccaggtgacctggctgaggagcgtactgagttcctccacagccaaaattctctatcgcccaggagctcacttagcgatgaggctcctgtgctccctaacacaacacctgacctgctgttggccacaactgcaaagccttctgtgcctagtgctgactccgagacgcctttgacacaggacagacccggatcacctagtgggagcgaggacaaagggaatccagcgccagaactcagggcttccttcctgccgagaacgctgagcttgcgaaactccataagtcggatcatgtcagaagccggatccgggaccttggaggatgagtggcaggccatttcagagattgcgtccacgtgtaatactatcctggaatcactatcaagagaaggccagccaatccccgagtccggagacccaaaaggcaccccgaaaagcgatgccgagcccgagcctgggaacttgtccgaaaaagtttctcatcttgagagcatgctacggaagctgcaggaggacctccaaaaggaaaaagcagacagagccgctctcgaggaagaagtgaggtccttgcgccacaacaaccggaggttgcaggctgagtccgaatcggcagccaccagactgctgctggcttcaaagcagttaggcagccccacagcggatctggcctag

SEQ ID NO: 245579 - DNA, 312 bp, Artificial Sequence
  derived and/or modified sequence
atgccaatgtgggcaggaggtgtaggctctccacgtagaggcatggcgccagcatcgactgatgatctattcgcaagaaaactgagacagccagctcggcctccccttacccctcatacctttgaaccgcgacctgtgcgaggtccacttcttcgcagtggaagtgacgcgggagaggcacgcccaccgacaccggcatctcctcgcgctcgggcacactcccacgaagaggcaagccgcccagccgctacttctactcgtctcttcactgatcctctggccttgctcggcctccccgctgaagagccgtag

SEQ ID NO: 245580 - DNA, 3129 bp, Artificial Sequence
  derived and/or modified sequence
atgccaatgtgggccggtggtgtcgggtccccaaggagaggtatggctccagcctctacagatgacctgtttgcccgaaagttgcgtcagcccgctcgccctcccctgacccctcataccttcgagccacgccctgtgagaggacctctgttgagaagcggctccgatgccggtgaggccagacctcccactccagcctctcccagggcacgcgcacatagccacgaagaagcctctagaccagctgccacatccacaaggctgttcaccgaccccttggccctgctgggcctgcccgcagaggagcccgaacctgcatttccaccagtgctcgagcccaggtggttcgcccattacgatgtgcagtcactacttttcgattgggcaccgcgttcccaaggtatgggctcgcacagtgaagctagtagcggcaccctcgctagcgccgaagatcaggccgcaagctccgacctcctgcatggggcacccggattcgtgtgcgaactaggaggcgaaggtgaactgggtctgggaggtcccgcttctcctcccgtgccgccagctcttcctaacgctgcagtgtcgatcttagaggaacctcagaatcggacatctgcctacagcctggagcacgcagacctgggcgctggatattaccgcaagtatttctatggcaaggagcatcagaacttttttgggatggatgaatcgctggggccagtggctgtgtcgcttcgacgagaggaaaaagaaggctccggcggaggcaccctccactcctaccgagtgatagttcgaacgactcagttgcggaccctgcggggaacaatatcagaagacgccctgccacctggaccaccgcgaggactttcccccaggaaactgctcgagcatgtggcaccccaactgtccccttcttgcctccgccttggatccgctagcccaaaggttccacgaacattgctgacactcgacgaacaggtgttgtctttccagcggaaagtcggcatactttactgtcgcgcaggccaggggtccgaggaagagatgtacaacaaccaggaggccggaccagcgttcatgcagtttttaaccctccttggagacgttgtgaggctaaagggctttgagtcctatcgtgcccagctggacactaagacagacagcaccggcacccattccctgtacaccacctaccaagaccacgagatcatgttccacgtttccactatgctgccttatacaccgaataatcaacagcagctcctacgcaagaggcacatcggcaacgacatcgttaccatcgttttccaagagcccggttcgaagccgttttgccctaccacgattcggtctcactttcaacatgtttttttagttgtacgcgctcatactccctgcaccccccacactacatatagggtggcagttagtaggactcaggataccccagcattcggccctgctctgccggctgggggaggcccattcgcagcaaacgccgacttccgtgccttcttgttagccaaggccctcaatggcgagcaggctgccggtcacgcaaggcagttccacgctatggccacaaggacgagacagcagtatctacaggacctggcaactaatgaggtgaccacgacctcattggattctgcatctagatttggactcccctccctcggaggacgacgcagggcagcccctagaggcccaggcgctgagctgcaggcggcaggatctctcgtttggggagttagggccgctccaggtgcccgtgtggccgcaggggctcaggcctctgggccagaggggatcgaagtaccgtgcctgctcggcatctccgctgaggcattggtactggtcgctccgagagatggcagagtcgtttttaattgtgcttgccgcgatgtacttgcatggaccttctcggaacaacaattggacctgtatcatgggaggggggaagctattacactccgattcgatggctcaccgggacaagccgtcggggaggtggtggcacgcctgcaactcgtgagcaggggttgcgaaactagagaactcgctctgccgcgtgacgggcagggtcgcctgggtttcgaggtcgacgctgagggctttgtaacacacgtggaaaggtttacgttcgctgagaccgccggtctgcgccctggcgctagacttcttcgggtgtgcggccagaccctaccatccctgagacccgaggccgctgctcagctccttcggtccgcgccaaaggtgtgcgtgactgtgctcccaccggatgagagcgggcgaccaagaaggagtttcagcgagctatataccctgagtttacaggaaccttcacggaggggcgcacctgatcctgtacaggacgaagttcagggcgtgactcttctgccgacaacaaagcagctacttcatctttgtttgcaggacggtggtagcccacctggtccgggagacctcgccgaggaacgcactgagtttcttcattcgcaaaactctttatcccccagatctagtctgtctgatgaggcaccagtgttgcctaataccaccccagatcttttgctggctaccacagccaagccatccgtgcccagcgccgattccgaaacgccactgacccaggataggccgggatctcccagcggatctgaggacaagggcaatcctgcacctgaactgagagcctcctttctgccacgaacactctcactgcgcaacagcatctcacgaatcatgtctgaggctggttcaggcactctcgaggacgaatggcaggccatctctgagatcgcttcaacatgtaacacaatcttagagtcgctgagccgagagggacagccaattccagaatccggcgacccaaaaggtaccccaaagtcagacgctgaaccagaacccggtaatttgtctgagaaggtgtctcacttagagagcatgctgagaaaactacaggaggacctccagaaggaaaaagccgaccgcgctgctctggaggaggaggtgcgttcactgaggcataacaaccggaggcttcaggccgagagcgagagcgccgcaacacggcttttactggccagcaagcaactagggtcccctaccgccgatctggcctag

SEQ ID NO: 245581 - DNA, 3628 bp, Artificial Sequence
  derived and/or modified sequence
ggcagggtgactggggtcccatgacagctgctgtgaccccagcaccttcctcaggatgtgggggcctggcagagggctgggcccacagttggggctacttcctgtgctgaaggaagtcctcttgccattcctgctgccctgccgctgcctccctgggaacccatgtgtccttgtggcccctctgagcagccccctcctccttcagggcaggaactgctgccacaacctcaggctgggcaccaaacacccgtgcccgccaatgcggcccagcccccggagagtcaggcccacagagcatgcccatgtgggccggcggtgtggggagccctcggcggggcatggcccctgcgtccacagatgacctctttgcccgcaagctgcgccagccagcaaggcccccgctgacaccgcacaccttcgagccgaggccagtccggggcccactcctgcgcagcggcagcgatgcaggcgaggccaggccccccacgccagccagcccccgtgcccgtgcccacagccacgaagaggccagccgacctgcagccacttccacccggctcttcactgacccgctggcactgctggggctgccagcagaggaaccagagcctgccttcccaccagtgcttgagcctcgatggtttgcccactatgacgtgcaaagcctgctctttgattgggctccgaggtctcaggggatggggagccactcagaggccagctctgggaccctggcttcagccgaggaccaggctgccagctcggacctgctgcatggggcacctggctttgtgtgtgagctcgggggtgagggtgagctaggcctgggtggaccagcatccccacctgtgccccctgcactgcccaacgcggccgtgtccatcctggaggagccacagaaccgaacctcggcctacagcctggagcacgcagacctgggtgctggctactaccgcaaatacttctatggcaaagaacatcagaacttcttcgggatggacgagtcgctgggcccggtggcagtgagcctgcggcgggaggagaaggagggcagcggagggggcaccctgcacagctaccgcgtcatcgtgcggaccacgcagctccggacactccgtggcaccatctcggaggacgcgctgccgccggggcccccacggggtctgtccccaaggaaacttctggagcacgtggcgccgcagctgagccccagctgcctgcgcctgggctcagcttcacccaaggtaccacggacgctgctcacactggatgagcaagtgctgagcttccaacgcaaggtgggcatcctgtactgccgggcgggccagggctcggaggaggagatgtacaacaaccaggaggcgggaccggccttcatgcagtttctcaccttgctgggcgatgtggtgcggctcaaaggctttgagagttaccgggcccagctagacaccaaaacggattccacaggcacgcactccctctacaccacataccaggaccacgagatcatgttccacgtgtccacgatgctgccttacacccctaataaccagcagcagctcctccggaagcgccacattggcaacgacattgtgaccatcgtgttccaggagcctggcagcaagcccttctgccccaccaccatccgctcgcacttccagcacgtgttcctagtggtgcgggcacacacaccctgcacgccacacaccacctacagggtggccgtgagccgcacccaggacacccctgccttcgggccagctctgcctgctggcggaggccccttcgcagccaacgccgacttccgggccttcctgctggccaaagcgctgaatggtgagcaggcggccggccacgcgcgccagttccacgccatggccacgcgcacccgccagcagtacctgcaagacctggccaccaacgaggtgaccactacgtcgctggactcggcttcacgcttcggcctgccctccctgggtgggaggcgccgggcggcccctcggggcccaggcgccgagctgcaggcagcgggctcactggtgtggggagtgcgcgcggcgcccggggcgcgggtcgccgccggggctcaggcgagcggccccgaaggcatcgaggtgccctgcctgctgggcatctcggccgaggctctggtgctggtggcgccgcgcgacggccgcgtagtgttcaattgcgcctgtcgcgacgtgctggcctggaccttctccgagcagcagctggacctgtaccacggccgcggggaggcgatcacgctgcgcttcgacgggtcccccggccaagccgtgggcgaggtggtggcgcgcctgcagctggtgagccgtggctgcgagacccgcgagctggcgctgccccgcgacggtcaaggccgcctgggcttcgaggtggacgccgagggattcgtcacgcacgtggagcgcttcacattcgccgagacggcggggctgcggcccggggcgcgcctcctgcgcgtgtgcggccagactctgcccagcctccggcccgaggccgctgcccagctcctgcgctcggcgcccaaggtctgcgtcaccgtcctgccccccgacgagagcggccggccccgcaggagtttttcggagctgtacacgctgtcgctgcaggagcctagccggcggggggccccagatcctgtgcaggatgaggtccagggggtgaccctgctgcccaccacaaagcagctgctgcacctgtgcctgcaagatggtggcagtcctccagggcctggggatctggccgaggagaggactgagttcctgcacagccagaactcgctgtcaccacgcagctctctgtcggatgaggccccagtcctgcccaacaccaccccggacctcctcctggccaccacagccaagccatcagtacccagtgctgacagtgagacacccctgacccaggacaggccaggcagtcccagtggctctgaggacaagggcaacccggcgccggagctgagggcctcctttctgccacgtaccttgtctctgcggaactccatcagcaggatcatgtcggaggcgggcagtgggaccctggaggacgagtggcaggccatctcggagattgcctctacttgcaacaccattctggagtcgctgtcccgagagggacagcccatcccagagagtggagaccctaagggaactccaaaatctgatgctgagccagagcctgggaacctctcagagaaggtctctcacttggagtccatgctcaggaagctgcaggaggacctgcagaaggagaaggcggacagggcggccctggaggaggaggtgcggagcctgagacacaacaaccggcggctgcaggcggagtctgagagtgcagccacacgcctcctcctggcctccaagcagctgggctcacccaccgccgacctggcctgagccgtctggaaccacctgggcccctgagggcactgtggtcacactgggccctcctcaggaactctccctgcgcagaggcgtgtcttagcactgcccccctccctagccccttatttggtggcggaagtggcctccaccccttccctgtttgtaaatattctgtggagaaaagaggacttcagggagtaaaaaagccactgatg

SEQ ID NO: 245582 - DNA, 3082 bp, Artificial Sequence
  derived and/or modified sequence
cagggcaggaactgctgccacaacctcaggctgggcaccaaacacccgtgcccgccaatgcggcccagcccccggagagtcaggcccacagagcatgcccatgtgggccggcggtgtggggagccctcggcggggcatggcccctgcgtccacagatgacctctttgcccgcaagctgcgccagccagcaaggcccccgctgacaccgcacaccttcgagccgaggccagtccggggcccactcctgcgcagcggcagcgatgcaggcgaggccaggccccccacgccagccagcccccgtgcccgtgcccacagccacgaagaggccagccgacctgcagccacttccacccggctcttcactgacccgctggcactgctggggctgccagcagaggaaccagagcctgccttcccaccagtgcttgagcctcgatggtttgcccactatgacgtgcaaagcctgctctttgattgggctccgaggtctcaggggatggggagccactcagaggccagctctgggaccctggcttcagccgaggaccaggctgccagctcggacctgctgcatggggcacctggctttgtgtgtgagctcgggggtgagggtgagctaggcctgggtggaccagcatccccacctgtgccccctgcactgcccaacgcggccgtgtccatcctggaggagccacagaaccgaacctcggcctacagcctggagcacgcagacctgggtgctggctactaccgcaaatacttctatggcaaagaacatcagaacttcttcgggatggacgagtcgctgggcccggtggcagtgagcctgcggcgggaggagaaggagggcagcggagggggcaccctgcacagctaccgcgtcatcgtgcggaccacgcagctccggacactccgtggcaccatctcggaggacgcgctgccgccggggcccccacggggtctgtccccaaggaaacttctggagcacgtggcgccgcagctgagccccagctgcctgcgcctgggctcagcttcacccaaggtaccacggacgctgctcacactggatgagcaagtgctgagcttccaacgcaaggtgggcatcctgtactgccgggcgggccagggctcggaggaggagatgtacaacaaccaggaggcgggaccggccttcatgcagtttctcaccttgctgggcgatgtggtgcggctcaaaggctttgagagttaccgggcccagctagacaccaaaacggattccacaggcacgcactccctctacaccacataccaggaccacgagatcatgttccacgtgtccacgatgctgccttacacccctaataaccagcagcagctcctccggaagcgccacattggcaacgacattgtgaccatcgtgttccaggagcctggcagcaagcccttctgccccaccaccatccgctcgcacttccagcacgtgttcctagtggtgcgggcacacacaccctgcacgccacacaccacctacagggtggccgtgagccgcacccaggacacccctgccttcgggccagctctgcctgctggcggaggccccttcgcagccaacgccgacttccgggccttcctgctggccaaagcgctgaatggtgagcaggcggccggccacgcgcgccagttccacgccatggccacgcgcacccgccagcagtacctgcaagacctggccaccaacgagcagctggacctgtaccacggccgcggggaggcgatcacgctgcgcttcgacgggtcccccggccaagccgtgggcgaggtggtggcgcgcctgcagctggtgagccgtggctgcgagacccgcgagctggcgctgccccgcgacggtcaaggccgcctgggcttcgaggtggacgccgagggattcgtcacgcacgtggagcgcttcacattcgccgagacggcggggctgcggcccggggcgcgcctcctgcgcgtgtgcggccagactctgcccagcctccggcccgaggccgctgcccagctcctgcgctcggcgcccaaggtctgcgtcaccgtcctgccccccgacgagagcggccggccccgcaggagtttttcggagctgtacacgctgtcgctgcaggagcctagccggcggggggccccagatcctgtgcaggatgaggtccagggggtgaccctgctgcccaccacaaagcagctgctgcacctgtgcctgcaagatggtggcagtcctccagggcctggggatctggccgaggagaggactgagttcctgcacagccagaactcgctgtcaccacgcagctctctgtcggatgaggccccagtcctgcccaacaccaccccggacctcctcctggccaccacagccaagccatcagtacccagtgctgacagtgagacacccctgacccaggacaggccaggcagtcccagtggctctgaggacaagggcaacccggcgccggagctgagggcctcctttctgccacgtaccttgtctctgcggaactccatcagcaggatcatgtcggaggcgggcagtgggaccctggaggacgagtggcaggccatctcggagattgcctctacttgcaacaccattctggagtcgctgtcccgagagggacagcccatcccagagagtggagaccctaagggaactccaaaatctgatgctgagccagagcctgggaacctctcagagaaggtctctcacttggagtccatgctcaggaagctgcaggaggacctgcagaaggagaaggcggacagggcggccctggaggaggaggtgcggagcctgagacacaacaaccggcggctgcaggcggagtctgagagtgcagccacacgcctcctcctggcctccaagcagctgggctcacccaccgccgacctggcctgagccgtctggaaccacctgggcccctgagggcactgtggtcacactgggccctcctcaggaactctccctgcgcagaggcgtgtcttagcactgcccccctccctagccccttatttggtggcggaagtggcctccaccccttccctgtttgtaaatattctgtgg

SEQ ID NO: 245583 - DNA, 562 bp, Artificial Sequence
  derived and/or modified sequence
agcgggaccccagcgcgggcggcggcggctgggcgggagccccagagtctcactctgtcccgcaggctggagttcagtggcgcgatctcggctcactgcaacctctgcctcccaggtttaagcgattctcctgcctcagcctcctgagtggctgggactacagggcaggaactgctgccacaacctcaggctgggcaccaaacacccgtgcccgccaatgcggcccagcccccggagagtcaggcccacagagcatgcccatgtgggccggcggtgtggggagccctcggcggggcatggcccctgcgtccacagatgacctctttgcccgcaagctgcgccagccagcaaggcccccgctgacaccgcacaccttcgagccgaggccagtccggggcccactcctgcgcagcggcagcgatgcaggcgaggccaggccccccacgccagccagcccccgtgcccgtgcccacagccacgaagaggccagccgacctgcagccacttccacccggctcttcactgacccgctggcactgctggggctgccagcagaggaacc

SEQ ID NO: 245584 - DNA, 3521 bp, Artificial Sequence
  derived and/or modified sequence
aggcggagccggcgccgggagcggtagcgggagagcggcagcgggaccccagcgcgggcggcggcggctgggcgggagccccagagggcaggaactgctgccacaacctcaggctgggcaccaaacacccgtgcccgccaatgcggcccagcccccggagagtcaggcccacagagcatgcccatgtgggccggcggtgtggggagccctcggcggggcatggcccctgcgtccacagatgacctctttgcccgcaagctgcgccagccagcaaggcccccgctgacaccgcacaccttcgagccgaggccagtccggggcccactcctgcgcagcggcagcgatgcaggcgaggccaggccccccacgccagccagcccccgtgcccgtgcccacagccacgaagaggccagccgacctgcagccacttccacccggctcttcactgacccgctggcactgctggggctgccagcagaggaaccagagcctgccttcccaccagtgcttgagcctcgatggtttgcccactatgacgtgcaaagcctgctctttgattgggctccgaggtctcaggggatggggagccactcagaggccagctctgggaccctggcttcagccgaggaccaggctgccagctcggacctgctgcatggggcacctggctttgtgtgtgagctcgggggtgagggtgagctaggcctgggtggaccagcatccccacctgtgccccctgcactgcccaacgcggccgtgtccatcctggaggagccacagaaccgaacctcggcctacagcctggagcacgcagacctgggtgctggctactaccgcaaatacttctatggcaaagaacatcagaacttcttcgggatggacgagtcgctgggcccggtggcagtgagcctgcggcgggaggagaaggagggcagcggagggggcaccctgcacagctaccgcgtcatcgtgcggaccacgcagctccggacactccgtggcaccatctcggaggacgcgctgccgccggggcccccacggggtctgtccccaaggaaacttctggagcacgtggcgccgcagctgagccccagctgcctgcgcctgggctcagcttcacccaaggtaccacggacgctgctcacactggatgagcaagtgctgagcttccaacgcaaggtgggcatcctgtactgccgggcgggccagggctcggaggaggagatgtacaacaaccaggaggcgggaccggccttcatgcagtttctcaccttgctgggcgatgtggtgcggctcaaaggctttgagagttaccgggcccagctagacaccaaaacggattccacaggcacgcactccctctacaccacataccaggaccacgagatcatgttccacgtgtccacgatgctgccttacacccctaataaccagcagcagctcctccggaagcgccacattggcaacgacattgtgaccatcgtgttccaggagcctggcagcaagcccttctgccccaccaccatccgctcgcacttccagcacgtgttcctagtggtgcgggcacacacaccctgcacgccacacaccacctacagggtggccgtgagccgcacccaggacacccctgccttcgggccagctctgcctgctggcggaggccccttcgcagccaacgccgacttccgggccttcctgctggccaaagcgctgaatggtgagcaggcggccggccacgcgcgccagttccacgccatggccacgcgcacccgccagcagtacctgcaagacctggccaccaacgaggtgaccactacgtcgctggactcggcttcacgcttcggcctgccctccctgggtgggaggcgccgggcggcccctcggggcccaggcgccgagctgcaggcagcgggctcactggtgtggggagtgcgcgcggcgcccggggcgcgggtcgccgccggggctcaggcgagcggccccgaaggcatcgaggtgccctgcctgctgggcatctcggccgaggctctggtgctggtggcgccgcgcgacggccgcgtagtgttcaattgcgcctgtcgcgacgtgctggcctggaccttctccgagcagcagctggacctgtaccacggccgcggggaggcgatcacgctgcgcttcgacgggtcccccggccaagccgtgggcgaggtggtggcgcgcctgcagctggtgagccgtggctgcgagacccgcgagctggcgctgccccgcgacggtcaaggccgcctgggcttcgaggtggacgccgagggattcgtcacgcacgtggagcgcttcacattcgccgagacggcggggctgcggcccggggcgcgcctcctgcgcgtgtgcggccagactctgcccagcctccggcccgaggccgctgcccagctcctgcgctcggcgcccaaggtctgcgtcaccgtcctgccccccgacgagagcggccggccccgcaggagtttttcggagctgtacacgctgtcgctgcaggagcctagccggcggggggccccagatcctgtgcaggatgaggtccagggggtgaccctgctgcccaccacaaagcagctgctgcacctgtgcctgcaagatggtggcagtcctccagggcctggggatctggccgaggagaggactgagttcctgcacagccagaactcgctgtcaccacgcagctctctgtcggatgaggccccagtcctgcccaacaccaccccggacctcctcctggccaccacagccaagccatcagtacccagtgctgacagtgagacacccctgacccaggacaggccaggcagtcccagtggctctgaggacaagggcaacccggcgccggagctgagggcctcctttctgccacgtaccttgtctctgcggaactccatcagcaggatcatgtcggaggcgggcagtgggaccctggaggacgagtggcaggccatctcggagattgcctctacttgcaacaccattctggagtcgctgtcccgagagggacagcccatcccagagagtggagaccctaagggaactccaaaatctgatgctgagccagagcctgggaacctctcagagaaggtctctcacttggagtccatgctcaggaagctgcaggaggacctgcagaaggagaaggcggacagggcggccctggaggaggaggtgcggagcctgagacacaacaaccggcggctgcaggcggagtctgagagtgcagccacacgcctcctcctggcctccaagcagctgggctcacccaccgccgacctggcctgagccgtctggaaccacctgggcccctgagggcactgtggtcacactgggccctcctcaggaactctccctgcgcagaggcgtgtcttagcactgcccccctccctagccccttatttggtggcggaagtggcctccaccccttccctgtttgtaaatattctgtggagaaaagaggacttcagggagtaaaaaagccactgatgtctgtgtctgaa

SEQ ID NO: 245585 - DNA, 3129 bp, Artificial Sequence
  derived and/or modified sequence
atgcccatgtgggccggcggcgtgggcagccccagaagaggcatggcccccgccagcaccgacgacctgttcgccagaaagctgagacagcccgccagaccccccctgaccccccacaccttcgagcccagacccgtgagaggccccctgctgagaagcggcagcgacgccggcgaggccagaccccccacccccgccagccccagagccagagcccacagccacgaggaggccagcagacccgccgccaccagcaccagactgttcaccgaccccctggccctgctgggcctgcccgccgaggagcccgagcccgccttcccccccgtgctggagcccagatggttcgcccactacgacgtgcagagcctgctgttcgactgggcccccagaagccagggcatgggcagccacagcgaggccagcagcggcaccctggccagcgccgaggaccaggccgccagcagcgacctgctgcacggcgcccccggcttcgtgtgcgagctgggcggcgagggcgagctgggcctgggcggccccgccagcccccccgtgccccccgccctgcccaacgccgccgtgagcatcctggaggagccccagaacagaaccagcgcctacagcctggagcacgccgacctgggcgccggctactacagaaagtacttctacggcaaggagcaccagaacttcttcggcatggacgagagcctgggccccgtggccgtgagcctgagaagagaggagaaggagggcagcggcggcggcaccctgcacagctacagagtgatcgtgagaaccacccagctgagaaccctgagaggcaccatcagcgaggacgccctgccccccggcccccccagaggcctgagccccagaaagctgctggagcacgtggccccccagctgagccccagctgcctgagactgggcagcgccagccccaaggtgcccagaaccctgctgaccctggacgagcaggtgctgagcttccagagaaaggtgggcatcctgtactgcagagccggccagggcagcgaggaggagatgtacaacaaccaggaggccggccccgccttcatgcagttcctgaccctgctgggcgacgtggtgagactgaagggcttcgagagctacagagcccagctggacaccaagaccgacagcaccggcacccacagcctgtacaccacctaccaggaccacgagatcatgttccacgtgagcaccatgctgccctacacccccaacaaccagcagcagctgctgagaaagagacacatcggcaacgacatcgtgaccatcgtgttccaggagcccggcagcaagcccttctgccccaccaccatcagaagccacttccagcacgtgttcctggtggtgagagcccacaccccctgcaccccccacaccacctacagagtggccgtgagcagaacccaggacacccccgccttcggccccgccctgcccgccggcggcggccccttcgccgccaacgccgacttcagagccttcctgctggccaaggccctgaacggcgagcaggccgccggccacgccagacagttccacgccatggccaccagaaccagacagcagtacctgcaggacctggccaccaacgaggtgaccaccaccagcctggacagcgccagcagattcggcctgcccagcctgggcggcagaagaagagccgcccccagaggccccggcgccgagctgcaggccgccggcagcctggtgtggggcgtgagagccgcccccggcgccagagtggccgccggcgcccaggccagcggccccgagggcatcgaggtgccctgcctgctgggcatcagcgccgaggccctggtgctggtggcccccagagacggcagagtggtgttcaactgcgcctgcagagacgtgctggcctggaccttcagcgagcagcagctggacctgtaccacggcagaggcgaggccatcaccctgagattcgacggcagccccggccaggccgtgggcgaggtggtggccagactgcagctggtgagcagaggctgcgagaccagagagctggccctgcccagagacggccagggcagactgggcttcgaggtggacgccgagggcttcgtgacccacgtggagagattcaccttcgccgagaccgccggcctgagacccggcgccagactgctgagagtgtgcggccagaccctgcccagcctgagacccgaggccgccgcccagctgctgagaagcgcccccaaggtgtgcgtgaccgtgctgccccccgacgagagcggcagacccagaagaagcttcagcgagctgtacaccctgagcctgcaggagcccagcagaagaggcgcccccgaccccgtgcaggacgaggtgcagggcgtgaccctgctgcccaccaccaagcagctgctgcacctgtgcctgcaggacggcggcagcccccccggccccggcgacctggccgaggagagaaccgagttcctgcacagccagaacagcctgagccccagaagcagcctgagcgacgaggcccccgtgctgcccaacaccacccccgacctgctgctggccaccaccgccaagcccagcgtgcccagcgccgacagcgagacccccctgacccaggacagacccggcagccccagcggcagcgaggacaagggcaaccccgcccccgagctgagagccagcttcctgcccagaaccctgagcctgagaaacagcatcagcagaatcatgagcgaggccggcagcggcaccctggaggacgagtggcaggccatcagcgagatcgccagcacctgcaacaccatcctggagagcctgagcagagagggccagcccatccccgagagcggcgaccccaagggcacccccaagagcgacgccgagcccgagcccggcaacctgagcgagaaggtgagccacctggagagcatgctgagaaagctgcaggaggacctgcagaaggagaaggccgacagagccgccctggaggaggaggtgagaagcctgagacacaacaacagaagactgcaggccgagagcgagagcgccgccaccagactgctgctggccagcaagcagctgggcagccccaccgccgacctggcctag

SEQ ID NO: 245586 - DNA, 2823 bp, Artificial Sequence
  derived and/or modified sequence
atgcccatgtgggccggcggcgtgggcagccccagaagaggcatggcccccgccagcaccgacgacctgttcgccagaaagctgagacagcccgccagaccccccctgaccccccacaccttcgagcccagacccgtgagaggccccctgctgagaagcggcagcgacgccggcgaggccagaccccccacccccgccagccccagagccagagcccacagccacgaggaggccagcagacccgccgccaccagcaccagactgttcaccgaccccctggccctgctgggcctgcccgccgaggagcccgagcccgccttcccccccgtgctggagcccagatggttcgcccactacgacgtgcagagcctgctgttcgactgggcccccagaagccagggcatgggcagccacagcgaggccagcagcggcaccctggccagcgccgaggaccaggccgccagcagcgacctgctgcacggcgcccccggcttcgtgtgcgagctgggcggcgagggcgagctgggcctgggcggccccgccagcccccccgtgccccccgccctgcccaacgccgccgtgagcatcctggaggagccccagaacagaaccagcgcctacagcctggagcacgccgacctgggcgccggctactacagaaagtacttctacggcaaggagcaccagaacttcttcggcatggacgagagcctgggccccgtggccgtgagcctgagaagagaggagaaggagggcagcggcggcggcaccctgcacagctacagagtgatcgtgagaaccacccagctgagaaccctgagaggcaccatcagcgaggacgccctgccccccggcccccccagaggcctgagccccagaaagctgctggagcacgtggccccccagctgagccccagctgcctgagactgggcagcgccagccccaaggtgcccagaaccctgctgaccctggacgagcaggtgctgagcttccagagaaaggtgggcatcctgtactgcagagccggccagggcagcgaggaggagatgtacaacaaccaggaggccggccccgccttcatgcagttcctgaccctgctgggcgacgtggtgagactgaagggcttcgagagctacagagcccagctggacaccaagaccgacagcaccggcacccacagcctgtacaccacctaccaggaccacgagatcatgttccacgtgagcaccatgctgccctacacccccaacaaccagcagcagctgctgagaaagagacacatcggcaacgacatcgtgaccatcgtgttccaggagcccggcagcaagcccttctgccccaccaccatcagaagccacttccagcacgtgttcctggtggtgagagcccacaccccctgcaccccccacaccacctacagagtggccgtgagcagaacccaggacacccccgccttcggccccgccctgcccgccggcggcggccccttcgccgccaacgccgacttcagagccttcctgctggccaaggccctgaacggcgagcaggccgccggccacgccagacagttccacgccatggccaccagaaccagacagcagtacctgcaggacctggccaccaacgagcagctggacctgtaccacggcagaggcgaggccatcaccctgagattcgacggcagccccggccaggccgtgggcgaggtggtggccagactgcagctggtgagcagaggctgcgagaccagagagctggccctgcccagagacggccagggcagactgggcttcgaggtggacgccgagggcttcgtgacccacgtggagagattcaccttcgccgagaccgccggcctgagacccggcgccagactgctgagagtgtgcggccagaccctgcccagcctgagacccgaggccgccgcccagctgctgagaagcgcccccaaggtgtgcgtgaccgtgctgccccccgacgagagcggcagacccagaagaagcttcagcgagctgtacaccctgagcctgcaggagcccagcagaagaggcgcccccgaccccgtgcaggacgaggtgcagggcgtgaccctgctgcccaccaccaagcagctgctgcacctgtgcctgcaggacggcggcagcccccccggccccggcgacctggccgaggagagaaccgagttcctgcacagccagaacagcctgagccccagaagcagcctgagcgacgaggcccccgtgctgcccaacaccacccccgacctgctgctggccaccaccgccaagcccagcgtgcccagcgccgacagcgagacccccctgacccaggacagacccggcagccccagcggcagcgaggacaagggcaaccccgcccccgagctgagagccagcttcctgcccagaaccctgagcctgagaaacagcatcagcagaatcatgagcgaggccggcagcggcaccctggaggacgagtggcaggccatcagcgagatcgccagcacctgcaacaccatcctggagagcctgagcagagagggccagcccatccccgagagcggcgaccccaagggcacccccaagagcgacgccgagcccgagcccggcaacctgagcgagaaggtgagccacctggagagcatgctgagaaagctgcaggaggacctgcagaaggagaaggccgacagagccgccctggaggaggaggtgagaagcctgagacacaacaacagaagactgcaggccgagagcgagagcgccgccaccagactgctgctggccagcaagcagctgggcagccccaccgccgacctggcctag

SEQ ID NO: 245587 - DNA, 312 bp, Artificial Sequence
  derived and/or modified sequence
atgcccatgtgggccggcggcgtgggcagccccagaagaggcatggcccccgccagcaccgacgacctgttcgccagaaagctgagacagcccgccagaccccccctgaccccccacaccttcgagcccagacccgtgagaggccccctgctgagaagcggcagcgacgccggcgaggccagaccccccacccccgccagccccagagccagagcccacagccacgaggaggccagcagacccgccgccaccagcaccagactgttcaccgaccccctggccctgctgggcctgcccgccgaggagccctag

SEQ ID NO: 245588 - protein, 391 aa, Artificial Sequence
  derived and/or modified sequence
MNSDQVTLVGQVFESYVSEYHKNDILLILKERDEDAHYPVVVNAMTLFETNMEIGEYFNMFPSEVLTIFDSALRRSALTILQSLSQPEAVSMKQNLHARISGLPVCPELVREHIPKTKDVGHFLSVTGTVIRTSLVKVLEFERDYMCNKCKHVFVIKADFEQYYTFCRPSSCPSLESCDSSKFTCLSGLSSSPTRCRDYQEIKIQEQVQRLSVGSIPRSMKVILEDDLVDSCKSGDDLTIYGIVMQRWKPFQQDVRCEVEIVLKANYIQVNNEQSSGIIMDEEVQKEFEDFWEYYKSDPFAGRNVILASLCPQVFGMYLVKLAVAMVLAGGIQRTDATGTRVRGESHLLLVGDPGTGKSQFLKYAAKITPRSVLTTGIGSTSAGIVCDNFK

SEQ ID NO: 245589 - DNA, 1176 bp, Artificial Sequence
  derived and/or modified sequence
atgaacagcgaccaggtgaccctggtgggccaggtgttcgagagctacgtgagcgagtaccacaagaacgacatcctgctgatcctgaaggagagagacgaggacgcccactaccccgtggtggtgaacgccatgaccctgttcgagaccaacatggagatcggcgagtacttcaacatgttccccagcgaggtgctgaccatcttcgacagcgccctgagaagaagcgccctgaccatcctgcagagcctgagccagcccgaggccgtgagcatgaagcagaacctgcacgccagaatcagcggcctgcccgtgtgccccgagctggtgagagagcacatccccaagaccaaggacgtgggccacttcctgagcgtgaccggcaccgtgatcagaaccagcctggtgaaggtgctggagttcgagagagactacatgtgcaacaagtgcaagcacgtgttcgtgatcaaggccgacttcgagcagtactacaccttctgcagacccagcagctgccccagcctggagagctgcgacagcagcaagttcacctgcctgagcggcctgagcagcagccccaccagatgcagagactaccaggagatcaagatccaggagcaggtgcagagactgagcgtgggcagcatccccagaagcatgaaggtgatcctggaggacgacctggtggacagctgcaagagcggcgacgacctgaccatctacggcatcgtgatgcagagatggaagcccttccagcaggacgtgagatgcgaggtggagatcgtgctgaaggccaactacatccaggtgaacaacgagcagagcagcggcatcatcatggacgaggaggtgcagaaggagttcgaggacttctgggagtactacaagagcgaccccttcgccggcagaaacgtgatcctggccagcctgtgcccccaggtgttcggcatgtacctggtgaagctggccgtggccatggtgctggccggcggcatccagagaaccgacgccaccggcaccagagtgagaggcgagagccacctgctgctggtgggcgaccccggcaccggcaagagccagttcctgaagtacgccgccaagatcacccccagaagcgtgctgaccaccggcatcggcagcaccagcgccggcatcgtgtgcgacaacttcaagtag

SEQ ID NO: 245590 - DNA, 471 bp, Artificial Sequence
  derived and/or modified sequence
atgaacagcgaccaggtgaccctggtgggccaggtgttcgagagctacgtgagcgagtaccacaagaacgacatcctgctgatcctgaaggagagagacgaggacgcccactaccccgtggtggtgaacgccatgaccctgttcgagaccaacatggagatcggcgagtacttcaacatgttccccagcgaggtgctgaccatcttcgacagcgccctgagaagaagcgccctgaccatcctgcagagcctgagccagcccgaggccgtgagcatgaagcagaacctgcacgccagaatcagcggcctgcccgtgtgccccgagctggtgagagagcacatccccaagaccaaggacgtgggccacttcctgagcgtgaccggcaccgtgatcagaaccagcctggtgaaggtgctggagttcgagagagactacatgtgcaacaagtgcaagcacgtgttcgtgatctag

SEQ ID NO: 245591 - DNA, 237 bp, Artificial Sequence
  derived and/or modified sequence
atgaacagcgaccaggtgaccctggtgggccaggtgttcgagagctacgtgagcgagtaccacaagaacgacatcctgctgatcctgaaggagagagacgaggacgcccactaccccgtggtggtgaacgccatgaccctgttcgagaccaacatggagatcggcgagtacttcaacatgttccccagcgaggtgctgaccatcttcgacagcgccctgagaagaagcgccctgtag

SEQ ID NO: 245592 - DNA, 1176 bp, Artificial Sequence
  derived and/or modified sequence
atgaacagcgatcaggtgactctggtgggacaggtcttcgagtcatacgtcagcgagtatcataaaaacgacattctgttgatattaaaagaacgcgacgaggacgcccattaccccgtagtggttaacgccatgacgctcttcgagacaaatatggaaatcggcgaatattttaatatgttcccgtctgaggtcctgactattttcgacagtgccctgcgcagaagtgccttgaccatcctgcagtccctgagccagcccgaggcagtctctatgaagcagaacctgcatgccaggattagcggcttgcctgtctgccctgaattagtccgggaacacatccccaagacaaaagacgtgggccactttctcagcgtgacagggacggttataaggacctccctcgtgaaggtcctggagttcgaaagagattacatgtgcaacaagtgcaagcatgtcttcgtgattaaggctgacttcgagcagtactacacattttgtcgccctagcagctgtccttcccttgagagctgcgatagctccaaatttacttgcttgagtggactgagtagtagtccgactagatgcagagattaccaggagattaagattcaggaacaggtccagcgcctatccgttggaagcatcccaagaagtatgaaagttattttagaagacgacctagtggactcctgtaagagtggagatgatctaaccatctacggtatcgtcatgcaaagatggaagccattccagcaggacgtccggtgcgaggtggaaatagtcctgaaagctaactatattcaggtcaacaacgaacagagttcaggcatcattatggatgaggaggtgcagaaggagttcgaggacttttgggagtactataaatctgatccattcgccgggaggaacgttattctggctagcctgtgcccacaggtgtttggtatgtatctagtcaaactggccgtggccatggtgctcgccggcgggattcagagaacagacgccacaggcacccgagttcgaggcgaatctcatcttcttttagttggagacccagggacaggaaagtcccagttcctgaaatacgctgccaagatcacgcctcgttcagttctgaccacaggcatcgggtccacctccgccgggattgtttgcgacaatttcaaatag

SEQ ID NO: 245593 - DNA, 471 bp, Artificial Sequence
  derived and/or modified sequence
atgaatagtgatcaagtcaccctggtcggtcaggttttcgagtcctatgtttcagagtaccataagaatgatattctccttatactgaaagagagagatgaggatgctcattacccggtagtcgttaacgccatgacactgtttgagactaatatggaaatcggtgaatactttaacatgtttccgtcagaagtcttgaccatttttgattcggcattgcggagatccgcattgacaattctccagtcactgagccagcccgaagctgttagcatgaagcaaaacttgcacgcacgcatatccggactacccgtgtgtcctgagttggtccgcgaacacatcccaaagaccaaggatgtgggacacttcttaagcgtcaccggcactgtgataagaacttccctcgtgaaggtgctggagttcgagcgagattacatgtgtaataaatgcaagcacgtgtttgtgatctag

SEQ ID NO: 245594 - DNA, 237 bp, Artificial Sequence
  derived and/or modified sequence
atgaattctgaccaagtcaccctggtcgggcaggtgttcgagtcctatgtcagtgagtatcataagaatgacatcctgctgatccttaaggagagagatgaggacgcccactacccagtcgtcgtgaacgctatgacactattcgagaccaatatggagatcggcgagtacttcaatatgtttccttccgaggtactgactatttttgatagcgccttgaggagaagcgcattgtag

SEQ ID NO: 245595 - DNA, 1176 bp, Artificial Sequence
  derived and/or modified sequence
atgaacagcgaccaggtgaccctggtgggccaggtgtttgagagctatgtgtctgagtaccacaagaatgacatcctgctgatcctgaaggagagagatgaagatgcccactaccctgtggtggtgaatgccatgaccctgtttgagaccaacatggagatcggggagtacttcaacatgttccccagcgaggtgctgaccatctttgattctgccctgcggcgcagcgccctgaccatcctgcagagcctgagccagcctgaggccgtgtccatgaagcagaacctgcacgcccgcatcagcggcctgcctgtgtgcccagagctggtgcgggagcacatccccaagaccaaggatgtgggccacttcctgtctgtgactggaacagtcatccgcaccagcctggtgaaggtgctggagtttgagcgggactacatgtgcaacaagtgcaagcacgtgtttgtgatcaaggctgactttgagcagtactacaccttctgccggcccagcagctgccccagcctggagagctgtgacagcagcaagttcacctgcctgagcggcctgagcagcagccccacccgctgccgggactaccaggagatcaagatccaggagcaggtgcagaggctgtctgtgggcagcatccccaggtccatgaaggtgatcctggaggatgacctggtggacagctgcaagtctggagatgacctgaccatctatggaattgtgatgcagcgctggaagcccttccagcaggatgtgcgctgtgaggtggagatcgtgctgaaggccaactacatccaggtgaacaatgagcagagcagcggcatcatcatggatgaggaggtgcagaaggagtttgaggacttctgggagtactacaagagtgacccctttgctggaagaaatgtcatcctggccagcctgtgcccccaggtgtttggcatgtacctggtgaagctggccgtggccatggtgctggccggcggcatccagaggacagatgccaccggcaccagggtgcggggggagagccacctgctgctggtgggggaccccggcaccgggaagagccagttcctgaagtatgctgccaagatcacccccaggtctgtgctgaccaccggcatcggcagcaccagcgctggcatcgtgtgtgacaacttcaagtag

SEQ ID NO: 245596 - DNA, 471 bp, Artificial Sequence
  derived and/or modified sequence
atgaacagcgaccaggtgaccctggtgggccaggtgtttgagagctatgtgtctgagtaccacaagaatgacatcctgctgatcctgaaggagagagatgaagatgcccactaccctgtggtggtgaatgccatgaccctgtttgagaccaacatggagatcggggagtacttcaacatgttccccagcgaggtgctgaccatctttgattctgccctgcggcgcagcgccctgaccatcctgcagagcctgagccagcctgaggccgtgtccatgaagcagaacctgcacgcccgcatcagcggcctgcctgtgtgcccagagctggtgcgggagcacatccccaagaccaaggatgtgggccacttcctgtctgtgactggaacagtcatccgcaccagcctggtgaaggtgctggagtttgagcgggactacatgtgcaacaagtgcaagcacgtgtttgtgatctag

SEQ ID NO: 245597 - DNA, 237 bp, Artificial Sequence
  derived and/or modified sequence
atgaacagcgaccaggtgaccctggtgggccaggtgtttgagagctatgtgtctgagtaccacaagaatgacatcctgctgatcctgaaggagagagatgaagatgcccactaccctgtggtggtgaatgccatgaccctgtttgagaccaacatggagatcggggagtacttcaacatgttccccagcgaggtgctgaccatctttgattctgccctgcggcgcagcgccctgtag

SEQ ID NO: 245598 - DNA, 1176 bp, Artificial Sequence
  derived and/or modified sequence
atgaacagcgaccaggtgaccctggtgggccaggtgttcgagagctacgtaagtgaatatcacaagaacgacattttgttgatcttaaaagaacgagatgaagacgctcactacccagtcgtcgtcaacgccatgactttattcgaaactaatatggagatcggggagtattttaatatgtttccctccgaggtcctgactatatttgacagcgctcttaggaggtcggcattaactattctacagtccctgtctcagcccgaggccgtttcaatgaagcagaaccttcatgcccgcatttcaggcctcccggtttgccccgagttagtgcgcgaacacataccaaaaacgaaggacgtggggcacttcctctcggtcactggaacggtgatccgcacgtctctggtcaaagtgttagagttcgaaagagattatatgtgtaacaagtgcaaacatgtgttcgtcatcaaagccgatttcgaacagtactacaccttctgtcgcccgtcttcttgcccttctctggagagctgcgactcaagtaagttcacctgtctatccgggctttcaagcagcccaaccagatgtcgcgattatcaggaaattaaaatccaggaacaggtccagagactgtctgtgggctcgatcccccgatcaatgaaagtcatcctggaggatgacctcgtcgatagctgcaaaagcggagacgaccttaccatttacggtatcgtgatgcagcgttggaaaccttttcaacaggatgtgagatgtgaagtcgaaatagtgttgaaggccaactatatccaggtgaacaatgagcagtcctcggggatcatcatggatgaggaggtgcagaaagaattcgaagatttttgggagtactataagagtgacccttttgcgggtcgaaacgttattctcgcttccctgtgtcctcaggtttttggaatgtatctggtaaagttagccgttgccatggtgctggccggcggcatacagcggacagatgctacgggaactcgggtgcgcggcgagagtcacctcctgctagtaggcgatcccggtaccggaaagagtcagtttcttaaatacgctgccaagattacccctcgctcggtacttactactgggattggaagtacatccgctggtatagtctgtgataacttcaagtag

SEQ ID NO: 245599 - DNA, 471 bp, Artificial Sequence
  derived and/or modified sequence
atgaacagcgaccaggtgaccctggtgggccaggtgttcgagagctatgtgtcagagtatcataagaacgacatactgctaatactgaaggagagagatgaggacgcccactatccagtcgtggtcaatgctatgaccctttttgaaacaaatatggagatcggtgaatacttcaacatgttcccctcggaagtgcttacgatctttgacagtgctctgcgtcggagtgccctcactatactccaatctctttctcagcccgaagctgtgtctatgaaacagaatctgcatgcccgaatctccggattaccggtatgtcctgagttggtgcgtgagcacattccaaaaacgaaagatgtaggccactttctgtcagttaccggcaccgtgatcagaacctctctcgtgaaagtgctggaatttgaaagagactatatgtgcaataagtgcaagcatgtgttcgtgatttag

SEQ ID NO: 245600 - DNA, 237 bp, Artificial Sequence
  derived and/or modified sequence
atgaacagcgaccaggtgaccctggtgggccaggtgttcgagagctatgtgtcagagtatcataagaatgatatcctgttaatcctcaaagaacgagacgaagacgcccattatcccgtggtggtgaacgccatgactctcttcgaaacaaatatggagattggggagtattttaacatgtttcccagtgaggtactgaccatcttcgattccgccctcagaagatctgcgttatag

SEQ ID NO: 245601 - DNA, 2442 bp, Artificial Sequence
  derived and/or modified sequence
ccggcgtcggtcgagagcgcaggcccggcagagccgcaggcgctaggccgcccgacacagcccgcgcgtccccgcggccggtggcgcctcgagcggccacgtgcacgcgcgcactccgcctcaccagccttcttgcgccggagacgaacccgctgcctggctggagctctctgggcccttcggcctcgggagcaacgcgttcccggcgacttctgacacagccattacctagattcaagatgaatagcgatcaagttacactggttggtcaagtgtttgagtcatatgtttcggaataccataagaatgatattcttctaatcttgaaggaaagggatgaagatgctcattacccagttgtggttaatgccatgactctgtttgagaccaacatggaaatcggggaatatttcaacatgttccccagtgaagtgcttacaatttttgatagtgcactgcgaaggtcagccttgacaattctccagtccctttctcagcctgaggctgtttccatgaaacagaatcttcatgccaggatatcaggtttgcctgtctgtcctgagctggtgagggaacacatacctaaaaccaaggatgtgggacactttttatctgtcactgggacagtgattcgaacaagtctggtgaaggttctggagtttgagcgggattacatgtgtaacaaatgcaagcatgtgtttgtgatcaaggctgactttgagcagtattacaccttttgccggccatcctcgtgtcccagcttggagagctgtgattcctctaaattcacttgcctctcaggcttgtcttcgtctccaaccaggtgtagagattaccaggaaatcaaaattcaggaacaggttcaaaggctatctgttggaagtattccacgatctatgaaggttattctggaagatgacttagtggatagttgcaaatctggtgatgacctcactatttacgggattgtaatgcaacggtggaagccctttcagcaagatgtgcgctgtgaagtggagatagtcctgaaagcaaattacatccaagtaaataatgagcagtcctcagggatcatcatggatgaggaggtccaaaaggaattcgaagatttttgggaatactataagagcgatccctttgcaggaaggaatgtaatattggctagcttgtgccctcaagtgtttggaatgtatctagtaaagcttgctgtggccatggtgctggctggtgggattcaaaggactgatgctacaggaacacgggtcagaggagaatctcatcttttattggttggggatcctggcacagggaaatctcagttcctcaaatatgcagcaaagattacaccaagatctgtgctgaccacaggaattggatctactagtgcaggtattgtatgtgacaatttcaagtaatttaacattacttcagaagttaacacaatggttttttctaatgaaaaactacctataataggataaatttcaagctaatttttgagttaccactaaaaatggaaggaaatatgcaatgttattttggtagctctaagaaaatatcttgcaagctccaccttcactttgcatcttagttttgaacaatcctattcaattttctcattctctagtgattaccttcatacttttatgcaggaaaaagtccgtatcatctggcattttatcaagactcagcaactggaatgttaaactaaagagggggatatttcactttaccaagtagatagatggtatagagcttaaggcattttcatgctcataaatctgataggcaacagtagctcctactgaaatttcttaggtagggaatgtttattaatatttggaaaatatacttccatcattgcaatgtggagcttcattcataagttgtaatgattctttagcaagtacacttaaaagcctttgcaggtagaatgtcaagatttgattataaataaagtgacccagggaatttagaaaaaaattattttaaaaaatatgtttgatgctattttgtatttttacagttttgattgggtaatgtttctgttcttctgaaaacagacccttggcttcacacattttaaaaatgtttgctacttgttaagggagtcagattaacttccattgggctaatgaatgctcaaatttctaatgagaaactaacactttaaaatttatcatacaacagaaaatggccaattaatggtcctgtataagtggaaaactgttaaggaggtctcaggttttgaaatataactcaacagtatattaaccattgacaagaatggatttttggaattgagaagggtagacaaacttcaggatactaggcaagaatatataaagaatatttcccatgcgttttaaatccgtatgacccagtgttctagagttctgtataaaatgataccaacaacaaataaagatgcttcccaagtaa

SEQ ID NO: 245602 - DNA, 752 bp, Artificial Sequence
  derived and/or modified sequence
gagcggccacgtgcacgcgcgcactccgcctcaccagccttcttgcgccggagacgaacccgctgcctggctggagctctctgggcccttcggcctcgggagcaacgcgttcccggcgacttctgacacagccactgtttctgcagaacccagtagatttcctacggtaagaaagagaaagaaggaaacaaattcacttccaagtatgaatttctaaggacagtctgttaattattcatgtcagaactggctgtcagtctgattaatgttacctagattcaagatgaatagcgatcaagttacactggttggtcaagtgtttgagtcatatgtttcggaataccataagaatgatattcttctaatcttgaaggaaagggatgaagatgctcattacccagttgtggttaatgccatgactctgtttgagaccaacatggaaatcggggaatatttcaacatgttccccagtgaagtgcttacaatttttgatagtgcactgcgaaggtcagccttgacaattctccagtccctttctcagcctgaggctgtttccatgaaacagaatcttcatgccaggatatcaggtttgcctgtctgtcctgagctggtgagggaacacatacctaaaaccaaggatgtgggacactttttatctgtcactgggacagtgattcgaacaagtctggtgaaggttctggagtttgagcgggattacatgtgtaacaaatgcaagcatgtgtttgtgatca

SEQ ID NO: 245603 - DNA, 470 bp, Artificial Sequence
  derived and/or modified sequence
gattcccggagacagctgggggatgccagtgcagttaggcactctcctgtcttcttttcgacgcttcgctgtggtcaagaggacaaactgtttctgcagaacccagtagatttcctacggtaagaaagagaaagaaggaaacaaattcacttccaagtatgaatttctaaggacagtctgttaattattcatgtcagaactggctgtcagtctgattaatgttacctagattcaagatgaatagcgatcaagttacactggttggtcaagtgtttgagtcatatgtttcggaataccataagaatgatattcttctaatcttgaaggaaagggatgaagatgctcattacccagttgtggttaatgccatgactctgtttgagaccaacatggaaatcggggaatatttcaacatgttccccagtgaagtgcttacaatttttgatagtgcactgcgaaggtcagccttg

SEQ ID NO: 245604 - DNA, 1176 bp, Artificial Sequence
  derived and/or modified sequence
atgaacagcgaccaagtgacactggtcggtcaggtgtttgagtcatatgtcagcgagtatcataagaatgacatcttgctgattttgaaagagcgggacgaggacgcacattatccagttgtggtgaacgctatgacacttttcgagactaacatggagattggggagtatttcaatatgttcccttcggaagttctgaccatatttgactcagctctcagaagatcggccctaactattttacagtctctatctcagccagaggccgtgagtatgaaacagaacctgcacgctagaatctcaggcttgcccgtgtgtccggaactggtgcgcgagcacattccaaaaactaaagacgtaggccacttcctgtctgtaacgggaaccgtaataaggacctcactggtgaaagtgttagagttcgagagagattacatgtgcaataaatgtaaacacgtgttcgttattaaagccgacttcgaacaatactacaccttctgcaggccttcatcctgtccttccctggaaagctgtgatagctcaaagtttacttgcctctccggactttctagctcaccaacaagatgcagagactaccaggagatcaaaattcaagagcaggtccaaaggctgtctgttggctctattcccagaagcatgaaagtcatcctggaggacgacttggtggattcttgtaagtcaggcgacgacctgacaatatacggtattgtgatgcagcggtggaaaccttttcaacaggacgttcggtgcgaagtggagatcgtcttaaaagctaattacatccaagtgaacaacgaacagagctccggcatcattatggacgaggaggtgcagaaagaattcgaggacttttgggaatactataaatctgaccccttcgccggacggaacgtgattctcgcaagcctgtgtccccaagtttttggcatgtacctggtgaagctggccgtcgcaatggtccttgctggcggtatccagagaaccgacgccaccggcactagagtcagaggggagtctcatctcctgctggttggcgatccgggtacgggaaaatcacagttcttgaaatatgcggctaagatcactcctcgaagtgttctcacaaccgggattggcagtacgtccgccggtatagtttgtgacaattttaaatag

SEQ ID NO: 245605 - DNA, 471 bp, Artificial Sequence
  derived and/or modified sequence
atgaactccgatcaagtaaccttggtgggacaggtgtttgaatcctatgtctcagagtaccacaaaaatgacatcctactgatcttaaaggagcgcgacgaggacgctcattacccagtggttgtaaatgcgatgacgctatttgaaactaacatggagatcggagagtacttcaacatgtttccatcggaggtgttaaccatctttgacagtgccctgagaaggtccgctttgaccattctgcagagcctcagccaacctgaagccgtgagtatgaaacagaatctgcacgctcgtatctcaggcttgcctgtttgtcccgagctggtgagggagcatattccaaagactaaggatgttggtcattttctttcagtaacaggtactgttatcagaacaagtctggtaaaagtcctggaattcgaacgagattacatgtgcaataagtgcaagcacgtgtttgttatctag

SEQ ID NO: 245606 - DNA, 237 bp, Artificial Sequence
  derived and/or modified sequence
atgaatagtgatcaggtgacacttgtgggccaggtgttcgagtcctatgtgagcgagtaccataagaacgatatcttgctgatcctcaaggaaagggatgaagatgcccactaccctgtggtcgttaacgcgatgacactttttgagacaaacatggaaataggcgaatactttaatatgtttccgagtgaagtccttacaatctttgacagcgcacttcgacggtccgcgctgtag

SEQ ID NO: 245607 - protein, 458 aa, Artificial Sequence
  derived and/or modified sequence
MAIEGGERTCGVHELICIRKVSPEAVGFLSAVGVFIILMLLLFLYINKKFCFENVGGFPDLGSEYSTRKNSQDKIYNSYMDKDEHGSSSESEDEALGKYHEALSRTHNSRLPLADSRQRNYAWETRQKYSPLSAEYDGYSSEASIDEGNCIQRMRRTPPLDELQPPPYQDDSGSPHLSCTPSEIGDSKCEFSHCSNSPRCSYNKCPSEGSTGHEIESFHNKGYEEDVPSDSTAVLSPEDMSAQGSSSQLPKPFDPEPEAKYGTLDVTFDYDSQEQKLLVTVTAVTDIPTYNRTGGNSWQVHLVLLPIKKQRAKTSIQRGPCPVFTETFKFNHVESEMIGNYAVRFRLYGVHRMKKEKIVGEKIFYLTKLNLQGKMSLPVILEPSYNHSGCDSQMSVSEMSCSESTSSCQSLEHGSVPEILIGLLYNATTGRLSAEVIKGSHFKNLAANRPPKMDCSVV

SEQ ID NO: 245608 - protein, 555 aa, Artificial Sequence
  derived and/or modified sequence
MAIEGGERTCGVHELICIRKVSPEAVGFLSAVGVFIILMLLLFLYINKKFCFENVGGFPDLGSEYSTRKNSQDKIYNSYMDKDEHGSSSESEDEALGKYHEALSRTHNSRLPLADSRQRNYAWETRQKYSPLSAEYDGYSSEASIDEGNCIQRMRRTPPLDELQPPPYQDDSGSPHLSCTPSEIGDSKCEFSHCSNSPRCSYNKCPSEGSTGHEIESFHNKGYEEDVPSDSTAVLSPEDMSAQGSSSQLPKPFDPEPEAKYGTLDVTFDYDSQEQKLLVTVTAVTDIPTYNRTGGNSWQVHLVLLPIKKQRAKTSIQRGPCPVFTETFKFNHVESEMIGNYAVRFRLYGVHRMKKEKIVGEKIFYLTKLNLQGKMSLPVILEPSYNHSGCDSQMSVSEMSCSESTSSCQSLEHGSVPEILIGLLYNATTGRLSAEVIKGSHFKNLAANRPPNTYVKLTLLNSMGQEMSKCKTSIRRGQPNPVYKETFVFQVALFQLSDVTLILSVYNKRSMKRKEMIGWISLGLNSSGEEELNHWTEMKESKGQQVCRWHALLES

SEQ ID NO: 245609 - DNA, 1377 bp, Artificial Sequence
  derived and/or modified sequence
atggccatcgagggcggcgagagaacctgcggcgtgcacgagctgatctgcatcagaaaggtgagccccgaggccgtgggcttcctgagcgccgtgggcgtgttcatcatcctgatgctgctgctgttcctgtacatcaacaagaagttctgcttcgagaacgtgggcggcttccccgacctgggcagcgagtacagcaccagaaagaacagccaggacaagatctacaacagctacatggacaaggacgagcacggcagcagcagcgagagcgaggacgaggccctgggcaagtaccacgaggccctgagcagaacccacaacagcagactgcccctggccgacagcagacagagaaactacgcctgggagaccagacagaagtacagccccctgagcgccgagtacgacggctacagcagcgaggccagcatcgacgagggcaactgcatccagagaatgagaagaaccccccccctggacgagctgcagccccccccctaccaggacgacagcggcagcccccacctgagctgcacccccagcgagatcggcgacagcaagtgcgagttcagccactgcagcaacagccccagatgcagctacaacaagtgccccagcgagggcagcaccggccacgagatcgagagcttccacaacaagggctacgaggaggacgtgcccagcgacagcaccgccgtgctgagccccgaggacatgagcgcccagggcagcagcagccagctgcccaagcccttcgaccccgagcccgaggccaagtacggcaccctggacgtgaccttcgactacgacagccaggagcagaagctgctggtgaccgtgaccgccgtgaccgacatccccacctacaacagaaccggcggcaacagctggcaggtgcacctggtgctgctgcccatcaagaagcagagagccaagaccagcatccagagaggcccctgccccgtgttcaccgagaccttcaagttcaaccacgtggagagcgagatgatcggcaactacgccgtgagattcagactgtacggcgtgcacagaatgaagaaggagaagatcgtgggcgagaagatcttctacctgaccaagctgaacctgcagggcaagatgagcctgcccgtgatcctggagcccagctacaaccacagcggctgcgacagccagatgagcgtgagcgagatgagctgcagcgagagcaccagcagctgccagagcctggagcacggcagcgtgcccgagatcctgatcggcctgctgtacaacgccaccaccggcagactgagcgccgaggtgatcaagggcagccacttcaagaacctggccgccaacagaccccccaagatggactgcagcgtggtgtag

SEQ ID NO: 245610 - DNA, 1668 bp, Artificial Sequence
  derived and/or modified sequence
atggccatcgagggcggcgagagaacctgcggcgtgcacgagctgatctgcatcagaaaggtgagccccgaggccgtgggcttcctgagcgccgtgggcgtgttcatcatcctgatgctgctgctgttcctgtacatcaacaagaagttctgcttcgagaacgtgggcggcttccccgacctgggcagcgagtacagcaccagaaagaacagccaggacaagatctacaacagctacatggacaaggacgagcacggcagcagcagcgagagcgaggacgaggccctgggcaagtaccacgaggccctgagcagaacccacaacagcagactgcccctggccgacagcagacagagaaactacgcctgggagaccagacagaagtacagccccctgagcgccgagtacgacggctacagcagcgaggccagcatcgacgagggcaactgcatccagagaatgagaagaaccccccccctggacgagctgcagccccccccctaccaggacgacagcggcagcccccacctgagctgcacccccagcgagatcggcgacagcaagtgcgagttcagccactgcagcaacagccccagatgcagctacaacaagtgccccagcgagggcagcaccggccacgagatcgagagcttccacaacaagggctacgaggaggacgtgcccagcgacagcaccgccgtgctgagccccgaggacatgagcgcccagggcagcagcagccagctgcccaagcccttcgaccccgagcccgaggccaagtacggcaccctggacgtgaccttcgactacgacagccaggagcagaagctgctggtgaccgtgaccgccgtgaccgacatccccacctacaacagaaccggcggcaacagctggcaggtgcacctggtgctgctgcccatcaagaagcagagagccaagaccagcatccagagaggcccctgccccgtgttcaccgagaccttcaagttcaaccacgtggagagcgagatgatcggcaactacgccgtgagattcagactgtacggcgtgcacagaatgaagaaggagaagatcgtgggcgagaagatcttctacctgaccaagctgaacctgcagggcaagatgagcctgcccgtgatcctggagcccagctacaaccacagcggctgcgacagccagatgagcgtgagcgagatgagctgcagcgagagcaccagcagctgccagagcctggagcacggcagcgtgcccgagatcctgatcggcctgctgtacaacgccaccaccggcagactgagcgccgaggtgatcaagggcagccacttcaagaacctggccgccaacagaccccccaacacctacgtgaagctgaccctgctgaacagcatgggccaggagatgagcaagtgcaagaccagcatcagaagaggccagcccaaccccgtgtacaaggagaccttcgtgttccaggtggccctgttccagctgagcgacgtgaccctgatcctgagcgtgtacaacaagagaagcatgaagagaaaggagatgatcggctggatcagcctgggcctgaacagcagcggcgaggaggagctgaaccactggaccgagatgaaggagagcaagggccagcaggtgtgcagatggcacgccctgctggagagctag

SEQ ID NO: 245611 - DNA, 1377 bp, Artificial Sequence
  derived and/or modified sequence
atggccatcgaaggtggcgagcggacatgtggagtacatgaacttatttgcatccgtaaggtcagtcccgaagctgtgggattcctcagcgcagttggcgtttttattattcttatgttacttctgttcctctatattaacaaaaaattttgctttgagaacgtgggcggttttcccgatctgggctctgagtacagcacacggaaaaacagtcaagataaaatctataattcttacatggacaaagacgaacatggatccagctcggagtccgaagatgaagcccttggaaaataccacgaagcactctcccggacacataacagccgactgcctctggccgactcgcggcagcgaaattatgcgtgggagaccaggcagaagtattctccactgagtgctgagtacgatggttacagcagtgaagcgtccattgacgaaggtaattgtatccaaagaatgaggcgcacacctcctctggacgagcttcaacctcctccctaccaggacgattccggttcaccacacctgtcatgtacacctagcgagattggcgattccaagtgtgagtttagccactgttcgaactccccaagatgctcttataacaaatgtccgtctgaaggatccactgggcatgagattgagtcgtttcacaacaagggttacgaagaagacgtgccaagtgacagcactgctgtactgagcccagaagatatgtccgcacagggctcctccagtcagctgccgaaaccctttgaccctgagcccgaggccaaatacgggactctggatgttacatttgattacgacagccaggaacagaaactactcgtgacagttaccgccgtgaccgatatccccacctataacagaactggtgggaactcatggcaggtgcacttggtgctactacctatcaaaaagcagagagcgaagacatccattcagcgcgggccatgtccagtgtttacagagacgttcaagttcaaccacgttgaatcagagatgattggcaattacgccgtgcgcttccggctatatggcgtccatagaatgaagaaggagaagattgtgggggagaaaatcttctacctaacgaaactcaatctgcagggaaagatgagcctccccgttatcttggagccaagctataaccacagcggttgcgattcccaaatgtccgtttccgagatgagttgttctgagagcacatcttcttgccagagtctggaacacggaagcgtccctgagatactgatcggactcttgtataatgcgacgacgggccgcctgtccgctgaagtcattaaaggttcgcatttcaaaaacttagctgctaataggccccccaagatggactgtagcgttgtgtag

SEQ ID NO: 245612 - DNA, 1668 bp, Artificial Sequence
  derived and/or modified sequence
atggctattgaaggcggagagcgaacatgtggtgtgcatgagctgatttgcatcagaaaggtgtctcccgaggccgtcggattcttgagcgcagtcggagtattcatcatcctgatgctgttgctatttctttacatcaataagaagttttgtttcgaaaatgttggaggctttcctgatcttggctctgagtactccacaagaaagaatagccaggacaaaatctataactcttacatggataaggacgagcacggcagtagcagtgagtctgaggacgaggcgttaggtaagtaccacgaggccctttcccgaactcacaactcgagactccctctcgccgattcacgccagcggaactacgcatgggagactcggcaaaagtactcccccttgtcggcggagtatgacgggtacagttcggaggcctcaattgatgaggggaactgcattcagcggatgcggagaacccctccactggatgagttacagcctcctccgtaccaagacgatagtggttcccctcacctttcatgtactccatccgaaattggagactcaaagtgcgaattttcccactgcagcaacagtccgcgttgttcttacaacaaatgccctagcgagggttctacagggcacgagatcgagagctttcataataaaggatacgaagaagatgtaccatccgactccacagctgtgctgtccccggaggatatgagcgctcagggaagttccagccagctccccaagccctttgatcccgaacccgaagcaaaatatggtaccctggacgtgacttttgattatgatagccaggagcagaaactcctcgttaccgtaaccgctgtcaccgacattccgacttacaacaggacaggggggaattcatggcaagtgcatctcgtccttctaccaatcaagaagcaaagagcaaaaactagcattcagcgtgggccgtgtcccgtttttactgagaccttcaagtttaatcatgtggaaagcgagatgatcggaaattacgcagtccgcttccgcctatatggggtgcatagaatgaagaaggagaaaatcgtcggggagaaaatcttttatttaaccaaattaaacctgcagggcaagatgtccctccctgtgattctggagcctagttataaccactcaggatgtgattctcagatgtcggttagcgaaatgagctgtagtgaaagcacatcctcttgtcagtccctggagcatggaagtgtgccagaaattctgatcggcctgttatacaacgcgaccaccggacgcctgtctgcagaagttataaagggctctcatttcaaaaacctggcagccaaccgcccccccaatacatatgtcaagctgacgctgctcaatagtatgggacaagagatgtcaaagtgcaaaacaagcattaggcgtggtcaaccgaaccccgtgtacaaggaaacttttgtattccaggtagcactcttccagttaagcgatgtgactttgattttaagcgtctacaacaaaaggtccatgaagaggaaagaaatgattggttggatatcccttggcctcaactcgtctggagaagaagaacttaaccattggaccgagatgaaggagtccaagggacaacaggtgtgccgttggcacgccctgctggagagctag

SEQ ID NO: 245613 - DNA, 1377 bp, Artificial Sequence
  derived and/or modified sequence
atggccattgaaggaggagagaggacctgtggggtgcatgagctgatctgcatcaggaaggtgtccccagaggccgtgggcttcctgtctgctgtgggcgtcttcatcatcctgatgctgctgctcttcctgtacatcaacaagaagttctgctttgaaaatgtgggcggcttcccagacctgggcagcgagtacagcaccaggaagaacagccaggacaagatctacaacagctacatggacaaggatgaacatggcagcagcagcgagagtgaagatgaggccctgggcaagtaccacgaggccctgagcaggacccacaacagccggctgcccctggccgacagccggcagagaaattatgcctgggagacccggcagaagtacagccccctgtctgcagaatatgatggctacagcagcgaggccagcattgatgagggcaactgcatccagaggatgaggaggaccccacccctggatgagctgcagcccccaccctaccaggatgacagcggcagcccccacctgagctgcacccccagcgagatcggggacagcaaatgtgagttcagccactgcagcaacagcccccgctgcagctacaacaagtgccccagcgagggcagcactggacatgaaattgagagcttccacaacaagggctatgaagaagatgtgcccagcgacagcacagctgtgctgagccctgaggacatgtctgcccagggcagcagcagccagctgcccaagccctttgatcctgagcctgaggccaagtatggcaccctggatgtgacctttgattatgacagccaggagcagaagctgctggtgacagtgacagctgtgacagacatccccacctacaacagaactggaggcaacagctggcaggtgcacctggtgctgctgcccatcaagaagcagagggccaagaccagcatccagaggggcccctgccctgtgttcacagagaccttcaagttcaaccacgtggagagcgagatgattggcaactatgctgtgcgcttccggctgtatggagtgcacaggatgaagaaggagaagatcgtgggggagaagatcttctacctgaccaagctgaacctgcagggcaagatgagcctgcccgtcatcctggagcccagctacaaccacagcggctgtgacagccagatgtctgtgtctgagatgagctgcagcgagagcaccagcagctgccagagcctggagcacggctctgtgcctgagatcctgattggcctgctgtacaatgccaccaccggccgcctgtctgctgaggtgatcaagggcagccacttcaagaacctggccgccaaccggccccccaagatggactgcagcgtggtgtag

SEQ ID NO: 245614 - DNA, 1668 bp, Artificial Sequence
  derived and/or modified sequence
atggccattgaaggaggagagaggacctgtggggtgcatgagctgatctgcatcaggaaggtgtccccagaggccgtgggcttcctgtctgctgtgggcgtcttcatcatcctgatgctgctgctcttcctgtacatcaacaagaagttctgctttgaaaatgtgggcggcttcccagacctgggcagcgagtacagcaccaggaagaacagccaggacaagatctacaacagctacatggacaaggatgaacatggcagcagcagcgagagtgaagatgaggccctgggcaagtaccacgaggccctgagcaggacccacaacagccggctgcccctggccgacagccggcagagaaattatgcctgggagacccggcagaagtacagccccctgtctgcagaatatgatggctacagcagcgaggccagcattgatgagggcaactgcatccagaggatgaggaggaccccacccctggatgagctgcagcccccaccctaccaggatgacagcggcagcccccacctgagctgcacccccagcgagatcggggacagcaaatgtgagttcagccactgcagcaacagcccccgctgcagctacaacaagtgccccagcgagggcagcactggacatgaaattgagagcttccacaacaagggctatgaagaagatgtgcccagcgacagcacagctgtgctgagccctgaggacatgtctgcccagggcagcagcagccagctgcccaagccctttgatcctgagcctgaggccaagtatggcaccctggatgtgacctttgattatgacagccaggagcagaagctgctggtgacagtgacagctgtgacagacatccccacctacaacagaactggaggcaacagctggcaggtgcacctggtgctgctgcccatcaagaagcagagggccaagaccagcatccagaggggcccctgccctgtgttcacagagaccttcaagttcaaccacgtggagagcgagatgattggcaactatgctgtgcgcttccggctgtatggagtgcacaggatgaagaaggagaagatcgtgggggagaagatcttctacctgaccaagctgaacctgcagggcaagatgagcctgcccgtcatcctggagcccagctacaaccacagcggctgtgacagccagatgtctgtgtctgagatgagctgcagcgagagcaccagcagctgccagagcctggagcacggctctgtgcctgagatcctgattggcctgctgtacaatgccaccaccggccgcctgtctgctgaggtgatcaagggcagccacttcaagaacctggccgccaaccggccccccaacacctacgtgaagctgaccctgctgaacagcatgggccaggagatgagcaagtgcaagaccagcatcagaagaggccagcccaaccctgtgtacaaggagacctttgtgttccaggtggccctcttccagctgagtgatgtgaccctcatcctgtctgtgtacaacaagaggtccatgaagaggaaggagatgattggctggatcagcctgggcctgaacagcagtggagaggaggagctgaaccactggacagagatgaaggagagcaagggccagcaggtgtgccgctggcacgccctgctggagagctag

SEQ ID NO: 245615 - DNA, 1377 bp, Artificial Sequence
  derived and/or modified sequence
atggccatcgagggcggcgagcggacctgcggcgtgcacgagctgatctgcattagaaaggtttccccagaagctgtcgggtttctgtccgccgttggagtgtttatcattctgatgctgctgctttttctctatatcaacaaaaagttttgctttgaaaacgtcggtggcttccctgacttggggtcagaatactcaacgaggaagaatagccaggataagatttacaatagctacatggacaaggacgagcacggttcatcgtccgaatcagaggatgaggcccttgggaagtatcatgaagccctctcgaggactcataactctcgcctaccactggctgattctaggcagcggaactacgcttgggaaaccaggcagaaatattcaccactctcagctgagtatgacgggtactcctccgaagcttccattgatgagggcaactgtatccagcgtatgaggcggacgcccccgctagacgaattgcaaccaccaccttatcaggacgacagcggtagccctcatctttcgtgcacaccatctgagatcggagactcgaaatgtgagttctcccattgcagtaacagcccacgctgttcatataacaagtgtcccagtgagggatccacgggccatgagatcgagtctttccacaacaagggttacgaagaggatgttccatccgatagtaccgcggttctgtcaccagaagacatgagcgcccaaggctctagctcccaacttcccaaaccattcgatcctgaaccggaggccaagtacggcacattggatgttactttcgactacgattctcaggaacagaagcttctcgttaccgtcacagctgttacagatatacctacttataatcggaccggcgggaatagttggcaggtgcacctggtgctcctgccaataaaaaaacagcgggctaagacatccattcagagaggcccgtgtccagtattcaccgaaacatttaagtttaaccacgtggagagcgagatgatcggcaactacgcagtccggttccgattgtacggagtccaccggatgaagaaggagaagatagtgggtgagaagatattttatttaactaaactgaatttacaagggaagatgtctctgcccgttatcctcgagccatcctacaatcactcaggttgcgactcccagatgagcgtctcagagatgtcttgcagtgagagcacctcatcctgccaatcactggagcatggcagtgtacccgagatcctcatcggactgctgtacaacgccactacagggaggttgagcgcggaggtgatcaaggggtcccattttaagaacttggctgcgaatagacctcccaagatggattgctcggtggtgtag

SEQ ID NO: 245616 - DNA, 1668 bp, Artificial Sequence
  derived and/or modified sequence
atggccatcgagggcggcgagcggacctgcggcgtgcacgagctgatatgtatacgcaaggtgtccccggaggcagtgggattcctgtccgccgttggcgtttttatcatattgatgctgttactgttcctttatatcaataaaaagttttgtttcgaaaacgtaggcgggtttccggacttgggatctgagtactctacacggaagaacagccaagataaaatctacaactcgtatatggacaaagacgaacacgggtcatcttcagagtccgaagatgaggccctcggaaagtatcacgaggctctgtctcgcactcataacagtaggctacctctcgccgattctcggcagagaaattatgcttgggagacgcggcagaaatatagcccactgtcagcagagtatgacggttactcaagtgaggcatctatagacgagggaaattgcattcagaggatgcgtcgcaccccacctctcgatgagctgcagccacccccatatcaggatgacagcggttctccccacctctcttgcactccctctgaaatcggtgactcaaaatgcgaatttagccactgttcaaactcaccacggtgtagttataacaagtgccccagcgaaggttccacaggacacgagatagagagcttccacaacaagggatacgaggaggacgtacctagcgatagcacagcagtgttatctcctgaggacatgagtgcccaaggatcatcctcccagctcccgaaacctttcgaccctgaacctgaggccaaatatggcaccctggacgtcaccttcgactacgattcgcaggagcaaaaactgttagtgacagtgaccgcagtgacagatatacccacctacaaccggactggcggaaactcctggcaggtgcatctcgttctgctgcccatcaagaagcaaagagcaaaaacaagcatccagcggggaccatgcccagtgtttaccgagactttcaaattcaaccatgtggagtccgagatgatcggcaactatgcagtcagattcaggctgtatggtgtacaccgaatgaagaaggaaaagatcgtgggtgaaaagatcttctacctaactaagctcaatctgcaaggcaaaatgtccctgcctgtaatcttggagccgagctacaaccactctggttgtgacagtcagatgtccgttagcgagatgagctgctccgaaagtacctcctcctgccagagtctggaacacgggagcgtccctgaaattttaatcggcttactttataacgccactacaggaagactgagcgctgaggtgattaaaggttcgcactttaagaatcttgccgccaaccggcctcccaacacctacgttaagcttaccttattgaacagcatgggccaagagatgtcaaaatgtaagacctctattcgaaggggccagcctaacccggtatataaggagacttttgtgtttcaggtggctttgttccagctctctgacgtgaccctgatcctcagtgtatataataaacgatccatgaagcgaaaggagatgataggctggatatcattgggcttaaactcgagcggtgaggaggagttgaatcactggaccgagatgaaggaatctaaaggccaacaggtgtgccggtggcacgcactgcttgaatcctag

SEQ ID NO: 245617 - DNA, 1377 bp, Artificial Sequence
  derived and/or modified sequence
atggccatcgaaggtggcgagcggacctgtggcgtccatgaactcatctgcataagaaaggtgtcacccgaggcagtgggatttctctccgcagtgggtgtgttcattatcctgatgttactcctgttcctatacatcaacaagaagttttgcttcgagaacgtagggggtttcccagaccttggctccgagtattctacacgtaaaaactcccaggacaagatctacaacagttacatggataaggacgagcacggtagcagcagtgaatccgaggatgaggcccttggcaaatatcatgaagctctgagccgcacacataattctcgcctgcctctagccgactcgcggcagcggaactacgcctgggaaacccgacagaagtactcacccctgtctgcagagtacgacggttactcgagtgaagcaagcatcgatgaggggaattgtatacaacgcatgaggaggacaccccctctcgacgagctgcagcctcccccttaccaggatgattctggatctcctcacctcagttgcaccccttccgaaattggagattcaaaatgtgaattcagccattgctcaaacagtcccagatgctcatataataaatgtccctccgaggggagcaccgggcatgaaattgagagctttcataacaaaggctatgaggaggacgttccatcagactccacggccgtgttatcccctgaagacatgagcgcacaaggctctagctcacagttacctaaaccttttgatcccgagcccgaagctaagtatggcactctggatgtgacctttgattacgatagccaagagcagaagctacttgttaccgtcacagcagtgaccgacataccaacctacaaccgcacaggaggaaatagctggcaggtacacctggtgctactccccattaagaaacagcgggctaagactagtattcagagaggcccttgtcctgtctttaccgagacattcaaattcaaccacgtggaaagtgagatgatcggcaattatgcggtcagattcagactgtacggagttcacaggatgaagaaagagaagatcgtcggggagaagatattttatctcaccaaactgaacctgcaaggaaagatgtcactccccgtcattctggaaccctcttacaatcactctggctgcgactctcagatgtccgtgagtgaaatgtcttgcagcgagtccacgtcctcttgtcagagtctggaacatgggagcgtacccgaaatactgattgggctgctgtacaacgctaccacaggtcggctgtctgcagaagtgattaagggaagccactttaagaacctagcagccaatcgccctccaaaaatggactgtagtgtcgtatag

SEQ ID NO: 245618 - DNA, 1668 bp, Artificial Sequence
  derived and/or modified sequence
atggccatcgaaggcggagagcggacctgcggcgtgcatgagctgatttgcattagaaaggtttccccagaggcggtcggatttctatccgcagtaggagtattcatcatattgatgctgttactgtttctctacattaataagaaattttgctttgagaacgtgggtggctttcctgacctgggcagcgaatatagcacgcggaagaactcacaggacaagatatacaattcttacatggataaggatgaacatggatcctctagtgagtccgaagacgaagccctggggaaataccacgaagctttgagcagaactcataactctcgtctgcccttagccgacagccgacagcgcaactacgcttgggagacgcggcagaaatatagccctctgtcagccgagtatgatggctattctagtgaggcgtctatcgatgaaggcaattgtattcaaaggatgcggaggacgccgccacttgatgaactgcagcctcctccgtaccaagacgacagtggctccccccacctatcatgtactcctagcgagatcggcgatagcaaatgtgaattcagccactgcagcaatagccctaggtgctcctacaacaagtgccccagtgaaggctccacagggcatgagattgaaagcttccacaacaaaggctatgaggaagatgtcccttctgattcaactgcagtgctgtcaccggaagatatgtcggcccagggatccagctcacagcttcctaaaccttttgaccctgaaccggaggccaaatacggcaccctcgatgtgacattcgattatgattcccaagagcagaaactgctggtgacggtcacagctgtcactgacatacctacatataatcggacagggggaaatagttggcaagttcacctcgtgctgttgccaattaaaaaacagagggccaagacttccatacaacgtggaccctgtcctgtgttcactgaaacattcaaattcaatcacgtcgagtcggaaatgatcggcaactatgcggtgaggtttcggttgtacggcgtgcaccgtatgaagaaagagaagatcgtcggtgagaaaatattttatctgacgaagctcaatctgcaagggaagatgtctctcccagtaatactggagccgagttacaatcacagtgggtgcgactcgcagatgtccgtctcagagatgtcctgctctgaaagcacctcgagttgtcagtcccttgagcacggatctgtgccagaaatcttaatcgggctgctatacaatgctactacaggacggctatctgcagaggtcattaaaggatcccacttcaagaatttggctgcaaataggccccctaacacctacgtaaagctaactctgcttaactccatgggccaggagatgtcaaaatgtaagacaagcatacgccgaggccaacccaatcccgtgtacaaggagacgttcgtgtttcaagtggccctgttccagctgtccgacgttacactcatactctcagtgtataataagagaagtatgaagcgcaaagagatgattggctggatttctctcgggttgaattccagcggcgaagaagaactgaaccactggactgagatgaaagagagcaaggggcagcaggtgtgcaggtggcacgctctgctcgagagctag

SEQ ID NO: 245619 - DNA, 2966 bp, Artificial Sequence
  derived and/or modified sequence
atggcgagcgcatcatggcgattgaaggtggagagagaacctgtggagtacatgaacttatctgtattagaaaagtatctccagaggcagttggatttttgtcagctgttggggtgtttattatcttgatgctgctcctttttctctatattaataagaagttctgttttgaaaatgttggcgggtttccagatcttggttcagaatacagtacaaggaagaattcacaagataaaatttataattcctacatggacaaagatgagcatggttcatcctctgaaagtgaagatgaagcgctgggtaaatatcatgaggccttatccagaacacacaattccagactaccactggcagattctagacaaaggaactatgcttgggaaacaaggcagaaatacagtcctctatcggcagagtatgatggatacagtagtgaagcatcaatagatgaaggaaactgcattcagagaatgagaagaacacccccgctggatgaattgcagccaccaccatatcaggatgacagtggttctccccatctgtcatgtacaccctcagaaattggggacagtaaatgtgaattttcccactgcagcaacagtccaagatgctcatataacaagtgcccaagtgaaggaagcacaggtcatgaaatagaaagttttcataataaaggatatgaagaagatgttccaagtgacagcactgcagtcctgagccctgaagatatgtcagctcaaggatcatcttcgcagcttcctaaaccttttgatcctgagccagaagctaaatatggcacactggatgtgacttttgactatgactcacaagaacagaagcttctggtaacagtgacagctgtcacagacatcccaacatataacaggacaggtggcaactcatggcaagtacaccttgttcttctacctataaagaaacagagagcaaaaaccagcatccagagaggaccatgccctgtcttcacagaaacatttaaatttaatcatgttgaatctgagatgattggaaattatgcagttcggtttagactgtatggtgtacatcgcatgaaaaaagaaaagattgtgggggaaaagattttttatttaacaaaattgaatcttcaagggaaaatgtcattgcctgtgatattggaaccttcttacaatcattctggctgtgactcccaaatgagcgtgtcagaaatgtcgtgtagtgaaagtacatcctcatgtcagtctcttgaacatggctcagttccagaaattcttattggcctgctttataatgccacaactggaagactatcagcagaagtgataaaaggcagccacttcaaaaatttggcagcaaacagaccacccaatacatatgttaagttaactctactgaattccatgggtcaagagatgtccaaatgcaagacatccatccgcagagggcagccaaatccagtatataaggaaacttttgtctttcaagtggccctatttcagctttctgatgtgacactcatactgtctgtgtataacaaacgcagcatgaaaagaaaagagatgataggctggatttctttaggtctcaacagctctggagaagaagaactcaatcactggactgaaatgaaagagtcaaaaggacagcaagtatgtagatggcatgcgttgctagagtcatgatgaatagaataagcaagcagttaccatcaaaggcagcatatttccaattccaacattactgtttctaccaagtcccattagaagagctgttctttgaagaatcatattcaaccttctaccaaaatgctttaagttctatggaaagaacgtctcatactgacataaatgaagaaaatatgtgtatctagtagagcttgtttaggaaactgagaaacgtacactatcattgctaaactaacagtcctccagaaatttaataagatgtttttgatttgaagttaattttaatttagcaaaagagccagtcattttatgaaaaatcaaaattataagtgattttaaaaaccagaattttagttgcaatacaattttaatatcaccctacatattatttataaaacatagtttgactggccagtccctggtgtttgtaatgttctttaatatgaaaaagtagttctccaactctatcataagtcatatctaatggtgaagggtttcagtcacattgaaaattgttttatttcaggcatgttccctttgtgcacttaggttcattgtgcctcagttcctctcaaaagcactaaatctaagtgcaaacaagtattcattttcatacaggaatttttttaatatgttatttttttaaaagttcatttttcatttgcctccgctttcgcctgatccaaagagaccaagtcactgtactggtcccttgcaagtcttctagacaggttgtactgtagaactacgtaactttctgttgaaagcacttcctgtattcttgtattccaatgtaggaagctaatagagcaggactttactttcaaatttctttcagtgattgactcttcaaaattgcagtagtgtgaaaatacattttttacaaactgaaaatacagtagataagctgtcgaaaatggaaaacaattcaattttaattttctgctctgagtatttagtaaccaacactgcgtaaagcaggtagcattcaaaataagaaactgttctctctctaaatcttcactcttacttcaatttatatttgtgatatgaagactatccagttctcagtttgaattggaacatcatgttaaaaacagttatgagattccttatgaagtttctagtaacttgtaactagactttatgaaattaacagataaagttcttcaacgtgatgtcatcttgtgcctttcatgtaagttaaatttgctcatacagcttgaacgttgtatttgcaaaattaagccttcgatttttataaatgtaaagattcctcag

SEQ ID NO: 245620 - DNA, 7581 bp, Artificial Sequence
  derived and/or modified sequence
atgaagatcctgctgatcatcttcgtgctgatcatctggaccgagaccctggccgaccagagccccggccccggccccgtgtacgccgacgtggtgttcctggtggacagcagcgaccacctgggccccaagagcttccccttcgtgaagaccttcatcaacaagatgatcaacagcctgcccatcgaggccaacaagtacagagtggccctggcccagtacagcgacgagttccacagcgagttccacctgagcaccttcaagggcagaagccccatgctgaaccacctgaagaagaacttccagttcatcggcggcagcctgcagatcggcaaggccctgcaggaggcccacagaacctacttcagcgcccccatcaacggcagagacagaaagcagttcccccccatcctggtggtgctggccagcgccgagagcgaggacgaggtggaggaggccagcaaggccctgcagaaggacggcgtgaagatcatcagcgtgggcgtgcagaaggccagcgaggagaacctgaaggccatggccaccagccacttccacttcaacctgagaaccatcagagacctgagcaccttcagccagaacatgacccagatcatcaaggacgtgaccaagtacaaggagggcgccgtggacgccgacatgcaggtgcacttccccatcagctgccagaaggacagcctggccgacctggtgttcctggtggacgagagcctgggcaccggcggcaacctgagacacctgcagaccttcctggagaacatcaccagcagcatggacgtgaaggagaactgcatgagactgggcctgatgagctacagcaacagcgccaagaccatcagcttcctgaagagcagcaccacccagagcgagttccagcagcagatcaagaacctgagcatccaggtgggcaagagcaacaccggcgccgccatcgaccagatgagaagagacggcttcagcgagagctacggcagcagaagagcccagggcgtgccccagatcgccgtgctggtgacccacagacccagcgacgacgaggtgcacgacgccgccctgaacctgagactggaggacgtgaacgtgttcgccctgagcatccagggcgccaacaacacccagctggaggagatcgtgagctacccccccgagcagaccatcagcaccctgaagagctacgccgacctggagacctacagcaccaagttcctgaagaagctgcagaacgagatctggagccagatcagcacctacgccgagcagagaaacctggacaagaccggctgcgtggacaccaaggaggccgacatccacttcctgatcgacggcagcagcagcatccaggagaagcagttcgagcagatcaagagattcatgctggaggtgaccgagatgttcagcatcggccccgacaaggtgagagtgggcgtggtgcagtacagcgacgacaccgaggtggagttctacatcaccgactacagcaacgacatcgacctgagaaaggccatcttcaacatcaagcagctgaccggcggcacctacaccggcaaggccctggactacatcctgcagatcatcaagaacggcatgaaggacagaatgagcaaggtgccctgctacctgatcgtgctgaccgacggcatgagcaccgacagagtggtggagcccgccaagagactgagagccgagcagatcaccgtgcacgccgtgggcatcggcgccgccaacaagatcgagctgcaggagatcgccggcaaggaggagagagtgagcttcggccagaacttcgacgccctgaagagcatcaagaacgaggtggtgagagagatctgcgccgagaagggctgcgaggacatgaaggccgacatcatgttcctggtggacagcagctggagcatcggcaacgagaacttcagaaagatgaagatcttcatgaagaacctgctgaccaagatccagatcggcgccgacaagacccagatcggcgtggtgcagttcagcgacaagaccaaggaggagttccagctgaacagatacttcacccagcaggagatcagcgacgccatcgacagaatgagcctgatcaacgagggcaccctgaccggcaaggccctgaacttcgtgggccagtacttcacccacagcaagggcgccagactgggcgccaagaagttcctgatcctgatcaccgacggcgtggcccaggacgacgtgagagaccccgccagaatcctgagaggcaaggacgtgaccatcttcagcgtgggcgtgtacaacgccaacagaagccagctggaggagatcagcggcgacagcagcctggtgttccacgtggagaacttcgaccacctgaaggccctggagagaaagctgatcttcagagtgtgcgccctgcacgactgcaagagaatcaccctgctggacgtggtgttcgtgctggaccacagcggcagcatcaagaagcagtaccaggaccacatgatcaacctgaccatccacctggtgaagaaggccgacgtgggcagagacagagtgcagttcggcgccctgaagtacagcgaccagcccaacatcctgttctacctgaacacctacagcaacagaagcgccatcatcgagaacctgagaaagagaagagacaccggcggcaacacctacaccgccaaggccctgaagcacgccaacgccctgttcaccgaggagcacggcagcagaatcaagcagaacgtgaagcagatgctgatcgtgatcaccgacggcgagagccacgaccacgaccagctgaacgacaccgccctggagctgagaaacaagggcatcaccatcttcgccgtgggcgtgggcaaggccaaccagaaggagctggagggcatggccggcaacaagaacaacaccatctacgtggacaacttcgacaagctgaaggacgtgttcaccctggtgcaggagagaatgtgcaccgaggcccccgaggtgtgccacctgcaggaggccgacgtgatcttcctgtgcgacggcagcgacagagtgagcaacagcgacttcgtgaccatgaccaccttcctgagcgacctgatcgacaacttcgacatccagagccagagaatgaagatcggcatggcccagttcggcagcaactaccagagcatcatcgagctgaagaacagcctgaccaagacccagtggaagacccagatccagaacgtgagcaagagcggcggcttccccagaatcgacttcgccctgaagaaggtgagcaacatgttcaacctgcacgccggcggcagaagaaacgccggcgtgccccagaccctggtggtgatcaccagcggcgaccccagatacgacgtggccgacgccgtgaagaccctgaaggacctgggcatctgcgtgctggtgctgggcatcggcgacgtgtacaaggagcacctgctgcccatcaccggcaacagcgagaagatcatcaccttccaggacttcgacaagctgaagaacgtggacgtgaagaagagaatcatcagagagatctgccagagctgcggcaagaccaactgcttcatggacatcgtggtgggcttcgacatcagcacccacgtgcagggccagcccctgttccagggccacccccagctggagagctacctgcccggcatcctggaggacatcagcagcatcaagggcgtgagctgcggcgccggcaccgaggcccaggtgagcctggccttcaaggtgaacagcgaccagggcttccccgccaagttccagatctaccagaaggccgtgttcgacagcctgctgcaggtgaacgtgagcggccccacccacctgaacgcccagttcctgagaagcctgtgggacaccttcaaggacaagagcgccagcagaggccaggtgctgctgatcttcagcgacggcctgcagagcgagagcaacatcatgctggagaaccagagcgacagactgagagaggccggcctggacgccctgctggtggtgagcctgaacaccaccgcccaccacgagttcagcagcttcgagttcggcaagagattcgactacagaacccacctgaccatcggcatgagagagctgggcaagaagctgagccagtacctgggcaacatcgccgagagaacctgctgctgcaccttctgcaagtgccccggcatccccggcccccacggcaccagaggcctgcaggccatgaagggcagccagggcctgaagggcagcagaggccacagaggcgaggacggcaaccccggcgtgagaggcgacaccggcccccagggcgacaagggcatcgccggctgccccggcgcctggggccagaagggcctgaagggcttcagcggccccaagggcggccacggcgacgacggcatcgacggcctggacggcgaggagggctgccacggcttccccggcatcaagggcgagaagggcgaccccggcagccagggcagccccggcagcagaggcgcccccggccagtacggcgagaagggcttccccggcgaccccggcaaccccggccagaacaacaacatcaagggccagaagggcagcaagggcgagcagggcagacagggcagaagcggccagaagggcgtgcagggcagccccagcagcagaggcagcagaggcagagagggccagagaggcctgagaggcgtgagcggcgagcccggcaaccccggccccaccggcaccctgggcgccgagggcctgcagggcccccagggcagccagggcaaccccggcagaaagggcgagaagggcagccagggccagaagggcccccagggcagccccggcctgatgggcgccaagggcagcaccggcagacccggcctgctgggcaagaagggcgagcccggcctgcccggcgacctgggccccgtgggccagaccggccagagaggcagacagggcgacagcggcatccccggctacggccagatgggcagaaagggcgtgaagggccccagaggcttccccggcgacgccggccagaagggcgacatcggcaaccccggcatccccggcggccccggccccaagggcttcagaggcctggccctgaccgtgggcctgaagggcgaggagggcagcagaggcctgcccggcccccccggccagagaggcatcaagggcatggccggccagcccgtgtacagccagtgcgacctgatcagattcctgagagagcacagcctgtgcagcctggagaagtgccccgcctaccccaccgagctggtgttcgccctggacaacagctacgacgtgaccgaggagagcttcaacaagaccagagacatcatcaccagcatcgtgaacgacctgaacatcagagagaacaactgccccgtgggcgccagagtggccatggtgagctacaacagcggcaccagctacctgatcagatggagcgactacaacagaaagaagcagctgctgcagcagctgagccagatcaagtaccaggacaccaccgagcccagagacgtgggcaacgccatgagattcgtgaccagaaacgtgttcaagagaacctacgccggcgccaacgtgagaagagtggccgtgttcttcagcaacggccagaccgccagcagaagcagcatcatcaccgccaccatggagttcagcgccctggacatcagccccaccgtgttcgccttcgacgagagagtgttcctggaggccttcggcttcgacaacaccggcaccttccaggtgatccccgtgccccccaacggcgagaaccagaccctggagagactgagaagatgcgccctgtgctacgacaagtgcttccccaacgcctgcatcagagaggccttcctgcccgaggacagctacatggacgtggtgttcctgatcgacaacagcagaaacatcgccaaggacgagttcaaggccgtgaaggccctggtgagcagcgtgatcgacaacttcaacatcgccagcgaccccctgatcagcgacagcggcgacagaatcgccctgctgagctacagcccctgggagagcagcagaagaaagatgggcaccgtgaagaccgagttcgacttcatcacctacgacaaccagctgctgatgaagaaccacatccagaccagcttccagcagctgaacggcgaggccaccatcggcagagccctgctgtggaccaccgagaacctgttccccgagaccccctacctgagaaagcacaaggtgatcttcgtggtgagcgccggcgagaactacgagagaaaggagttcgtgaagatgatggccctgagagccaagtgccagggctacgtgatcttcgtgatcagcctgggcagcaccagaaaggacgacatggaggagctggccagctaccccctggaccagcacctgatccagctgggcagaatccacaagcccgacctgaactacatcgccaagttcctgaagcccttcctgtacagcgtgagaagaggcttcaaccagtaccccccccccatgctggaggacgcctgcagactgatcaacctgggcggcgagaacatccagaacgacggcttccagttcgtgaccgagctgcaggaggacttcctgggcggcaacggcttcatcggccaggagctgaacagcggcagagagagccccttcgtgaagaccgaggacaacggcagcgactacctggtgtacctgcccagccagatgttcgagccccagaagctgatgatcaactacgagaaggaccagaagagcgccgagatcgccagcctgaccagcggccacgagaactacggcagaaaggaggagcccgaccacacctacgagcccggcgacgtgagcctgcaggagtactacatggacgtggccttcctgatcgacgccagccagagagtgggcagcgacgagttcaaggaggtgaaggccttcatcaccagcgtgctggactacttccacatcgcccccacccccctgaccagcaccctgggcgacagagtggccgtgctgagctacagcccccccggctacatgcccaacaccgaggagtgccccgtgtacctggagttcgacctggtgacctacaacagcatccaccagatgaagcaccacctgcaggacagccagcagctgaacggcgacgtgttcatcggccacgccctgcagtggaccatcgacaacgtgttcgtgggcacccccaacctgagaaagaacaaggtgatcttcgtgatcagcgccggcgagaccaacagcctggacaaggacgtgctgagaaacgtgagcctgagagccaagtgccagggctacagcatcttcgtgttcagcttcggccccaagcacaacgacaaggagctggaggagctggccagccaccccctggaccaccacctggtgcagctgggcagaacccacaagcccgactggaactacatcatcaagttcgtgaagcccttcgtgcacctgatcagaagagccatcaacaagtaccccaccgaggacatgaaggccacctgcgtgaacatgaccagccccaaccccgagaacggcggcaccgagaacaccgtgctgtggtag

SEQ ID NO: 245621 - DNA, 7581 bp, Artificial Sequence
  derived and/or modified sequence
atgaaaatcctactcatcatcttcgtcctgattatatggacggaaacactggccgatcaatctccaggtcctgggccagtgtatgcggacgtggtttttctcgtagacagtagtgaccacttgggtccaaagagcttcccttttgtcaagacatttatcaacaagatgattaacagtttgccaatcgaagctaacaagtatagagttgctctagctcaatattcagacgaattccactcagaattccatctgagcacttttaaaggcaggtcccccatgcttaaccacttgaagaagaacttccagttcataggtggcagcttacagatcggaaaggcgctacaggaagcccatcgaacttatttcagtgcacccataaatggccgggaccggaagcagttccctccaatccttgtcgtgctcgctagtgccgagagcgaggacgaggtggaagaagcctcaaaagctctgcagaaggatggcgttaagattattagtgtgggggtgcagaaagctagcgaggagaacttaaaggccatggccaccagccacttccattttaatctgaggaccataagggatttaagcacgttcagtcagaacatgactcagatcatcaaagacgtgacgaagtacaaagagggcgccgtcgatgccgatatgcaggtgcatttccccatcagttgtcagaaggattctcttgcagacctggtgttcttggtcgatgagtctttgggtacaggtgggaacctaaggcacctacaaacatttcttgagaacatcacgagttccatggatgtaaaggagaactgtatgcgcttgggccttatgtcttactccaatagcgcaaaaacaattagcttcttaaagagctcaaccactcagtctgagttccagcagcagatcaaaaatctgagcatccaggtgggcaagtccaatacaggagcagcaattgatcaaatgcgccgggatggcttctccgagtcatacggctcaaggcgggcacaaggcgtaccacaaatcgcggtcctggttacacaccggcctagcgatgatgaggttcatgatgctgctctaaacctgcggctggaagatgtgaacgtgtttgcattgagtatccagggagccaataacacacagcttgaagaaatcgtgtcttatccaccggagcagactatctctaccttgaagtcgtacgcagatttggaaacctatagcacaaaattcctaaagaagcttcaaaatgagatatggtcccagatctctacttatgctgagcagcgtaatttggacaagacagggtgtgtagacacaaaagaggcagacatccattttctaatcgatgggtcaagttcaattcaggagaagcaattcgaacagatcaagaggttcatgcttgaagtaaccgagatgttcagcatagggcccgataaggtccgagtaggcgtggttcagtactctgacgatacagaagtagagttttacattaccgactactcaaacgacatcgacttacggaaggccatttttaatattaaacagcttacaggcggaacctatacaggcaaagcattggactacattctgcagatcatcaaaaatggcatgaaagatcggatgtcaaaagttccttgttacttgatcgtcctgacggatggaatgtcaaccgaccgcgtcgttgagcctgcaaagcggctgcgggccgaacagatcacagtgcatgcagtgggaattggcgcggcaaataaaattgagctacaggagatcgccgggaaagaggaacgagtgagctttgggcaaaacttcgacgcgctgaagtccatcaagaacgaagtcgtgcgcgaaatttgtgccgagaagggatgtgaagacatgaaagcagatatcatgttcctggtcgattcttcatggtcaatcgggaacgagaatttccgcaagatgaaaatcttcatgaagaatctgttgaccaaaattcagataggcgctgataaaacccaaattggggtggtgcaattctcggacaaaaccaaggaagagtttcaactgaatagatacttcacacaacaggaaatctcagacgccattgaccgcatgtcactaattaatgagggaactctgacaggaaaagccctcaactttgtgggacagtacttcacccatagcaaaggcgcacgtcttggtgctaaaaagttcctcatcctgattacggacggagtggctcaggatgatgtgcgggatcccgcaaggattctacgcgggaaggacgtcacaatattcagcgtcggcgtgtataacgccaaccgctcacagttggaagagatatcgggggacagtagcctagtgtttcatgttgagaactttgaccatctaaaggcccttgaaagaaaactcatctttagggtttgcgctcttcatgattgcaagagaattacattgctcgatgttgtgttcgtgctggaccacagtggctccattaaaaagcagtatcaggatcacatgataaacctgacaattcatctggtcaagaaggccgatgtcggacgcgatcgcgtacagttcggggctctgaaatacagcgaccagcctaacatactgttttacctgaacacctattctaacaggtcggccattatcgagaaccttcgcaaacgcagagacacggggggcaatacatacactgcgaaggcccttaagcatgcgaacgccctgtttaccgaggaacatggctccaggatcaagcagaatgtgaaacagatgctgatcgtgattacagatggcgaaagtcacgaccatgatcaactgaacgataccgcactggagcttaggaacaaagggattacaatctttgccgtgggcgtgggtaaggccaatcaaaaagaactagaggggatggcgggaaataagaataacacaatctatgtggacaacttcgataaactaaaagacgtgttcactctggtccaggaacgcatgtgcacagaggcacccgaggtttgtcatcttcaggaggctgatgttattttcctgtgtgatggttccgatcgtgtctcaaattccgacttcgtaactatgactacattcctgagtgatctgatcgataacttcgatatacagtctcagcgaatgaaaataggaatggcacaatttggctcaaactaccaatccatcatcgagctcaagaacagcctcaccaagacacagtggaagactcagatccagaatgtgtcaaagtccggcggctttcctagaatcgacttcgctctaaagaaggtgagcaacatgttcaatctccatgcaggtggcagacggaacgccggcgttcctcagactctcgtagtgattacaagtggcgatccccgatatgatgtcgctgacgcggtgaaaaccctgaaagatctgggcatctgcgttttggttctgggtataggcgatgtttataaagagcatctgttaccaataaccggaaattccgagaagattattacatttcaagactttgacaagctgaagaacgttgacgtcaagaagcgtattatccgtgagatttgccagagttgtggtaagaccaactgttttatggacatcgttgtgggctttgatatcagcacccacgtccaagggcagcctttgttccaaggtcatccacaactggaaagctaccttccaggaatacttgaagacatctcttcaatcaagggggtatcatgtggggcagggacagaggcccaggtttccctcgccttcaaggtgaacagtgatcagggcttccccgccaagttccagatctaccagaaagctgttttcgatagccttttgcaggtgaatgtgagtggtccaactcacctgaacgctcagttcctacgatcgctctgggacacattcaaagacaaatctgcgtcacgcgggcaagtactgcttattttttcagatggcttacagagtgagagtaatatcatgctggagaatcagtcagatcggctgagggaggccggattggacgcactgctcgtggtgtctctcaacaccactgcacaccacgaattttctagcttcgagttcgggaaaaggttcgattatcgcactcaccttacaattggaatgcgagaactcggaaaaaagttgagccagtacctaggcaacatcgccgagcggacgtgttgctgcacattttgtaagtgtccggggattccaggcccacatgggacccgcggtcttcaggccatgaagggttcgcaagggctcaaagggagccgagggcatcgaggtgaagacggcaaccccggcgtacgcggagacactgggcctcagggtgacaagggcatagcaggatgtcccggagcgtggggacagaagggtcttaaagggtttagcggcccaaaaggggggcacggcgacgatggcattgatggcctggacggagaagaaggctgccatggatttcccggcatcaaaggtgagaaaggagatcccggaagccagggctctcctggatcccggggcgcacccggccagtacggagaaaaagggttccccggcgatccaggcaatcctggtcagaataacaatatcaaggggcaaaaaggcagcaaaggggaacagggaaggcaagggaggtcaggccagaagggggtgcagggtagcccctcctcaagaggttcacggggcagggaagggcagagaggacttcgaggcgtttcgggggagcctggtaatcccgggcctaccggtacactgggggccgaagggttacagggtccacagggatcccagggcaatccaggtagaaagggtgaaaaaggtagccaaggacagaagggaccacagggctctccaggcctcatgggcgcaaagggctccactggaagacctggtctgttaggcaagaaaggcgagcccggcctccccggggatctcgggccagtgggccagacaggtcaacggggacgccagggcgacagcggtatcccaggttacgggcaaatggggcggaagggcgtgaaggggcctagaggatttcccggggacgccggccaaaaaggtgacattggcaaccccggcatcccaggaggccctggaccaaagggcttcagaggtctcgctctcactgtgggcttgaaaggcgaggagggttccagggggctgcccggaccacctgggcaacggggaattaagggcatggcagggcaacctgtatactcacagtgcgaccttatccggtttctgagggaacattcattatgcagcctggagaagtgccccgcgtacccaacagaacttgtatttgcgttggacaacagctacgacgtcacagaggagtccttcaataagacacgggatatcattacatccatagttaacgatttgaatatcagggagaataactgtcccgtgggggcgagggtcgccatggtctcttacaactctggaacgtcctatttgatccgatggtcagattataaccgaaagaaacaactgctccagcagctcagccaaatcaaataccaggacaccacagagccccgtgatgtaggcaatgctatgagattcgtgactagaaacgtttttaagagaacatacgccggcgcaaacgtacgccgtgtcgccgtgtttttctcaaatgggcagacagcatcccggtcctctatcattaccgctaccatggaattttccgcactcgatatcagtcctacagtgtttgctttcgacgaaagggtgtttctggaggctttcggcttcgacaatacaggcaccttccaagtgatcccagtccctccaaacggcgagaaccagaccctagagcggctgcgccggtgtgccctgtgctatgacaaatgttttcctaacgcttgcataagggaggcttttctgccggaagacagttatatggatgtagtatttttgatcgacaactcccgtaatatcgccaaagacgagtttaaggccgtgaaggccctggtgtcatctgttatcgacaattttaacatcgcctctgaccccctgatttccgattctggggaccggatcgccctgctgagctactctccttgggagagcagccggcggaagatgggcaccgtgaagacagagttcgatttcatcacgtacgataatcagttgctcatgaaaaatcacattcagacaagctttcagcaactgaatggggaagcgacgattggaagagccttgctctggactactgaaaacctgtttcctgaaacgccttatctgcgcaaacacaaggtcatcttcgtggtaagcgccggagagaactacgaacgtaaagagttcgtgaagatgatggccctaagggccaagtgccagggctatgtaatcttcgtgataagtttaggatcgaccagaaaggatgacatggaggaactcgccagttatcccctggaccagcatctgatccagctgggccgaatacacaaaccagacctgaactacatcgccaagtttttaaagccgtttctctactcggtgcggagaggttttaaccagtaccctcccccgatgttggaggatgcctgtcggctgatcaatttgggaggtgagaacatccagaatgacggtttccagttcgtaaccgagctacaggaagactttctgggcggcaacggattcattggccaggagctcaactcaggaagagagagccccttcgtgaagacggaggataatggctccgactacctggtatacctgccctctcagatgttcgagccccagaaactgatgatcaattacgaaaaggaccaaaaatcggcagagatcgcatcgctgacaagtggacacgagaattacggccggaaagaagagcccgaccacacctacgagcctggagatgttagcctgcaggaatattacatggatgtggccttcctgatcgacgcttctcaacgagtcggctccgatgagtttaaggaagtgaaagcgtttattactagtgtgctggattatttccacatagctcctacacccctgacatctacccttggcgatagagtggctgtcttatcctactcacctccgggatacatgcccaacaccgaagaatgccccgtgtacctggaattcgatctagtaacttacaactcaattcaccagatgaaacaccatctccaagattcacagcagctgaacggggatgtctttattggacacgcactgcaatggaccatcgacaacgtgttcgtgggaacccctaatctgaggaagaacaaggtcatattcgtcatatccgccggcgaaaccaattctctagataaagatgtgctcagaaatgtctccctccgggctaaatgccagggatatagcattttcgtgtttagttttggcccgaagcacaatgataaggaacttgaagagcttgcttcacatccgttggaccatcacctggtacaactgggaagaacccacaagccagactggaattacatcattaagtttgtaaagcccttcgtccatctcattagacgcgccatcaataaatatcccactgaggatatgaaggctacctgcgttaatatgaccagcccaaaccccgaaaacggcggcactgagaacactgttttatggtag

SEQ ID NO: 245622 - DNA, 7581 bp, Artificial Sequence
  derived and/or modified sequence
atgaagatcctgctgatcatctttgtgctgatcatctggacagagaccctggccgaccagagccctggccctggccctgtgtatgcagatgtggtgttcctggtggacagcagtgaccacctgggccccaagagcttcccctttgtgaagaccttcatcaacaagatgatcaacagcctgcccatcgaggccaacaagtacagagtggccctggcccagtacagtgatgagttccacagcgagttccacctgagcaccttcaagggccgcagccccatgctgaaccacctgaagaagaacttccagttcatcggcggcagcctgcagatcggcaaggccctgcaggaggcccacaggacctacttcagcgcccccatcaatggccgggacaggaagcagtttcctcccatcctggtggtgctggccagcgctgagagtgaagatgaggtggaggaggccagcaaggccctgcagaaggatggagtgaagatcatctctgtgggcgtgcagaaggccagcgaggagaacctgaaggccatggccaccagccacttccacttcaacctgcggaccatccgggacctgagcaccttcagccagaacatgacccagatcatcaaggatgtgaccaagtacaaggagggcgctgtggatgctgacatgcaggtgcacttccccatcagctgccagaaggacagcctggccgacctggtgttcctggtggatgagagcctgggcactggaggcaacctgcggcacctgcagaccttcctggagaacatcaccagctccatggatgtgaaggagaactgcatgaggctgggcctgatgagctacagcaacagcgccaagaccatctccttcctgaagagcagcaccacccagagcgagttccagcagcagatcaagaacctgagcatccaggtgggcaagagcaacacaggagctgccatcgaccagatgagaagagatggcttcagcgagagctatggcagcagaagagcccagggcgtgccccagattgctgtgctggtgacccaccggcccagtgatgatgaggtgcatgatgctgccctgaacctgcggctggaggatgtgaatgtgtttgccctgagcatccagggcgccaacaacacccagctggaggagatcgtgtcctacccacctgagcagaccatcagcaccctgaagagctatgctgacctggagacctacagcaccaagttcctgaagaagctgcagaatgagatctggagccagatcagcacctatgcagagcagaggaacctggacaagacaggctgtgtggacaccaaggaggccgacatccacttcctgattgatggcagcagcagcatccaggagaagcagtttgagcagatcaagcgcttcatgctggaggtgacagagatgttcagcatcggccctgacaaggtgcgggtgggcgtggtgcagtacagtgatgacacagaggtggagttctacatcacagactacagcaatgacatcgacctgaggaaggccatcttcaacatcaagcagctgaccggcggcacctacacaggcaaggccctggactacatcctgcagatcatcaagaatggcatgaaggacaggatgagcaaggtgccctgctacctgattgtgctgacagatggcatgagcacagacagagtggtggagcccgccaagaggctgcgggcagagcagatcaccgtgcatgctgtgggcatcggggccgccaacaagattgagctgcaggagattgctgggaaggaggagcgggtgtcctttggccagaactttgatgccctgaagagcatcaagaatgaggtggtgcgggagatctgtgccgagaagggctgtgaggacatgaaggctgacatcatgttcctggtggacagctcctggagcattggaaatgaaaacttcaggaagatgaagatcttcatgaagaacctgctgaccaagatccagatcggggctgacaagacccagattggagtggtgcagttcagtgacaagaccaaggaggagttccagctgaaccgctacttcacccagcaggagatcagtgatgccatcgacaggatgagcctcatcaatgaaggcaccctgaccgggaaggccctgaactttgtgggccagtacttcacccacagcaagggggcccggctgggcgccaagaagttcctgatcctgatcacagatggagtggcccaggatgatgtgcgggaccctgcccgcatcctgcggggcaaggatgtgaccatcttctctgtgggcgtgtacaatgccaacagaagccagctggaggagatcagcggggacagcagcctggtgttccacgtggagaactttgaccacctgaaggccctggagaggaagctgatcttccgggtgtgtgccctgcatgactgcaagaggatcaccctgctggatgtggtgtttgtgctggaccacagcggcagcatcaagaagcagtaccaggaccacatgatcaacctgaccatccacctggtgaagaaggcagatgtgggccgggacagagtgcagtttggagccctgaagtacagcgaccagcccaacatcctcttctacctgaacacctacagcaacagaagtgccatcatcgagaacctgaggaagaggcgggacacaggaggcaacacctacacagccaaggccctgaagcacgccaatgccctcttcacagaggagcacggcagccgcatcaagcagaatgtgaagcagatgctgattgtcatcacagatggagagagccatgaccatgaccagctgaatgacacagccctggagctgaggaacaagggcatcaccatctttgctgtgggcgtgggcaaggccaaccagaaggagctggagggcatggccggcaacaagaacaacaccatctacgtggacaactttgacaagctgaaggatgtgttcaccctggtgcaggagaggatgtgcacagaggcccctgaggtgtgccacctgcaggaggctgatgtgatcttcctgtgtgatggcagtgacagagtgagcaacagcgactttgtgaccatgaccaccttcctgagtgacctgattgacaactttgacatccagagccagaggatgaagattggcatggcccagtttggcagcaactaccagagcatcatcgagctgaagaacagcctgaccaagacccagtggaagacccagatccagaatgtgtccaagagcggcggcttccccagaattgactttgccctgaagaaggtgagcaacatgttcaacctgcatgctgggggcagaagaaatgccggcgtgccccagaccctggtggtgatcaccagcggggaccccaggtatgatgtggctgatgctgtgaagaccctgaaggacctgggcatctgtgtgctggtgctgggcattggagatgtgtacaaggagcacctgctgcccatcaccggcaacagcgagaagatcatcaccttccaggactttgacaagctgaagaatgtggatgtgaagaagaggatcatccgggagatctgccagagctgtgggaagaccaactgcttcatggacatcgtggtgggctttgacatcagcacccacgtgcagggccagcccctcttccagggccacccccagctggagagctacctgcccggcatcctggaggacatcagcagcatcaagggcgtgtcctgtggggccggcacagaggcccaggtgtccctggccttcaaggtgaacagcgaccagggcttccctgccaagttccagatctaccagaaggctgtgtttgacagcctgctgcaggtgaatgtgtctggccccacccacctgaatgcccagttcctgcggagcctgtgggacaccttcaaggacaagagcgccagccggggccaggtgctgctgatcttcagtgatggcctgcagagcgagagcaacatcatgctggagaaccagagcgaccggctgcgggaggccggcctggatgccctgctggtggtgtccctgaacaccacagcccaccacgagttcagcagctttgaatttgggaagagatttgactaccgcacccacctgaccatcggcatgagggagctgggcaagaagctgagccagtacctgggcaacattgctgagaggacctgctgctgcaccttctgcaagtgccccggcatccctggcccccacggcacccggggcctgcaggccatgaagggcagccagggcctgaagggcagccggggccacagaggagaagatggcaaccctggggtgcggggggacaccggcccccagggcgacaagggcattgctggctgccctggggcctggggccagaagggcctgaagggcttcagcggccccaagggcggccatggagatgatggcattgatggcctggatggagaggagggctgccacggcttccctggcatcaagggggagaagggggaccccggcagccagggcagccctggcagcagaggagcccctggccagtatggagagaagggcttccctggggaccccggcaaccctggccagaacaacaacatcaagggccagaagggcagcaagggggagcagggccggcagggccgcagcggccagaagggcgtgcagggcagccccagcagccggggcagccggggccgggagggccagaggggcctgcggggcgtgtctggagagcccggcaaccctggccccaccggcaccctgggcgctgagggcctgcagggcccccagggcagccagggcaaccctggcaggaagggggagaagggcagccagggccagaagggcccccagggcagccctggcctgatgggcgccaagggcagcacaggccggcccggcctgctgggcaagaagggggagcccggcctgcccggggacctgggccctgtgggccagacaggccagaggggccggcagggcgacagcggcatccctggctacggccagatgggcaggaagggcgtgaagggcccccggggcttccctggagatgctggccagaagggggacatcggcaaccctggcatccctgggggccctggccccaagggcttccggggcctggccctgactgtgggcctgaagggggaggagggcagccggggcctgcccggccccccaggccagaggggcatcaagggcatggccggccagcctgtgtacagccagtgtgacctgatccgcttcctgcgggagcacagcctgtgcagcctggagaagtgcccagcctaccccacagagctggtgtttgccctggacaacagctatgatgtgacagaggagagcttcaacaagacccgggacatcatcaccagcatcgtgaatgacctgaacatccgggagaacaactgccctgtgggcgcccgggtggccatggtgtcctacaacagcggcaccagctacctgatccgctggagcgactacaacaggaagaagcagctgctgcagcagctgagccagatcaagtaccaggacaccacagagcccagagatgtgggcaatgccatgagatttgtgaccagaaatgtgttcaagaggacctacgccggggccaacgtgagaagagtggccgtgttcttcagcaatggccagacagccagccgcagcagcatcatcacagccaccatggagttcagcgccctggacatcagccccaccgtgtttgcctttgatgagagggtcttcctggaggccttcggctttgacaacacaggcaccttccaggtgattcctgtgccccccaacggggagaaccagaccctggagcggctgcggcgctgtgccctgtgctatgacaagtgcttccccaatgcctgcatccgggaggccttcctgcctgaggacagctacatggatgtggtgttcctgattgacaacagcaggaacatcgccaaggatgagttcaaggctgtgaaggccctggtgagcagcgtcatcgacaacttcaacatcgccagtgaccccctcatcagtgacagcggggaccgcatcgccctgctgagctacagcccctgggagagcagcaggaggaagatgggcaccgtgaagacagaatttgacttcatcacctatgacaaccagctgctgatgaagaaccacatccagaccagcttccagcagctgaatggagaggccaccatcggccgggccctgctgtggaccacagaaaatctcttccctgagaccccctacctgaggaagcacaaggtgatctttgtggtgtctgctggagaaaattatgaaaggaaggagtttgtgaagatgatggccctgcgggccaagtgccagggctacgtgatcttcgtcatcagcctgggcagcaccaggaaggatgacatggaggagctggccagctaccccctggaccagcacctgatccagctgggccgcatccacaagccagacctgaactacatcgccaagttcctgaagcccttcctgtacagcgtgcggcggggcttcaaccagtaccccccacccatgctggaggatgcctgccgcctcatcaacctgggcggggagaacatccagaatgatggcttccagtttgtgacagagctgcaggaggacttcctgggcggcaatggcttcatcggccaggagctgaacagcggccgggagagcccctttgtgaagacagaagataatggaagtgactacctggtgtacctgcccagccagatgtttgagccccagaagctgatgatcaactatgagaaggaccagaagtctgctgagatcgccagcctgaccagcggccacgagaactacggcaggaaggaggagccagaccacacctatgagcctggagatgtgtccctgcaggagtactacatggatgtggccttcctgattgatgccagccagagggtgggcagtgatgagttcaaggaggtgaaggccttcatcacctctgtgctggactacttccacatcgcccccacccccctgaccagcaccctgggggacagagtggccgtgctgagctacagccccccaggctacatgcccaacacagaggagtgccctgtgtacctggagtttgacctggtgacctacaacagcatccaccagatgaagcaccacctgcaggacagccagcagctgaatggagatgtgttcatcggccacgccctgcagtggaccatcgacaacgtgtttgtgggcacccccaacctgaggaagaacaaggtgatctttgtgatctctgctggggagaccaacagcctggacaaggatgtgctgagaaatgtgtccctgcgggccaagtgccagggctacagcatctttgtgttctcctttggccccaagcacaatgacaaggagctggaggagctggccagccaccccctggaccaccacctggtgcagctgggccgcacccacaagccagactggaactacatcatcaagtttgtgaagccctttgtgcacctgatccggcgggccatcaacaagtaccccacagaggacatgaaggccacctgtgtgaacatgaccagccccaacccagaaaatggaggaacagaaaatacagtgctgtggtag

SEQ ID NO: 245623 - DNA, 8878 bp, Artificial Sequence
  derived and/or modified sequence
aaatggcgattcctctgtctaagtagtagaagtgaccgcagctcggctgctagtaaagattgcccttggtttctgagaaattctgactccctaagttcatttggcagccggcggcttctctgaaacaaagccagcaaacagctggagcgtctctggacactcacattaaaacttgtgaagagttaaaagccccagggaagagccaggccaagggcacgggtcagcgccggcttaaaagaccctctcagggcacgaggcgttcgctgcgggaatccacctgcagctgtgcggcgcggaccagggcgtgcggcgcggaccagggcttccggcgcgcgctctatccaactgcgccgcgggcgcccgagaggcgcgcgtttactgcgctcaggagctcggtgcagcctcttctggagagttgggggcggtttccagggtccggagtgtcccctgaccccgggaaagctggaacaaaagtaaaaatcttcactaacaaaatgaagatcttgctaattatatttgtcctaatcatttggactgaaacattggcagaccagagcccagggccaggccctgtgtatgcagatgtcgtgtttctggtggacagctccgatcacctgggacctaagtcattcccattcgtgaaaacgttcatcaacaaaatgatcaacagtctccccatagaggccaacaaataccgtgtagccctggcccagtacagcgacgagtttcacagtgaattccatctgagcaccttcaaaggcagaagccccatgctgaaccacctcaagaagaactttcagttcattggcgggtccctgcagataggaaaggctcttcaggaggctcataggacctacttctctgcacccataaatgggagagacaggaaacagtttcccccaattttggtggtcctggcttcggctgagtctgaggatgaagtggaagaggcttcgaaagccctgcagaaagacggggtgaaaattatctccgtgggggtgcagaaagcttctgaggaaaatctgaaggccatggccacatcccatttccatttcaaccttcggacaatcagagacctcagcacattttcccaaaacatgacacagatcatcaaggatgtaaccaagtataaggagggagccgtcgatgctgatatgcaagttcacttccccatatcctgtcagaaagattcactcgctgacctcgtgttcctggtggatgagtcacttgggaccggaggaaatttaaggcatcttcagaccttccttgagaacattaccagctccatggatgtgaaggaaaattgcatgcgacttggactgatgagttacagcaatagtgccaagactatttcttttcttaaatcaagcacaacccaatctgaatttcagcagcaaatcaagaatctttctatccaagttgggaaatccaatacaggggctgccattgatcagatgagaagagacggcttctcagagtcatatggcagcagaagagcacaaggagtgcctcagattgcagttctggtcacccacagaccatcagatgatgaggtgcatgatgctgcgctgaaccttcgactggaggatgtaaacgtgtttgccttgagcatccaaggggctaacaatacccagttagaagaaatagtgtcttatcctccagaacagacaatttccacgctgaagtcctatgcagacttagaaacttacagtacaaagttcctgaaaaagctccagaatgaaatatggtcccaaatttctacttatgctgaacaaaggaatcttgataaaactggctgtgtggatacaaaagaggctgatatccacttcctcattgatggctcaagcagcatccaggagaaacagtttgagcaaatcaagagatttatgttggaagtgacagaaatgtttagcattggcccagacaaagtccgagttggagttgtgcagtattcagatgacacagaagtggaattttatatcactgactattctaatgatattgacttaagaaaggctatttttaacattaagcaactaactggtggaacttatactgggaaagctctggattacatactgcaaataataaaaaatggaatgaaggatagaatgagcaaggttccctgttacctcattgtgttgactgatgggatgtccacagacagagtcgtggaacctgctaagagactaagggctgagcaaatcactgttcatgcagttggcattggggcagctaataaaatagaactgcaagaaattgctgggaaagaagaaagggttagctttgggcagaactttgatgctttgaaaagcataaaaaatgaagtcgttcgtgaaatctgcgctgaaaaaggatgtgaagacatgaaggccgacatcatgtttctggtggacagttcttggagtataggaaatgaaaattttaggaaaatgaaaatcttcatgaaaaacctgttaactaaaattcaaattggtgcagacaaaacccagattggtgttgttcagttcagtgataaaactaaggaagagttccagcttaatagatattttacacagcaagaaatttctgatgcaatagatagaatgtctctcatcaatgaaggcactttaactggaaaggcactaaattttgtaggtcaatacttcacccactccaagggggcccgtttgggggccaaaaaatttctcatcctcatcacagatggagtagcgcaggatgatgtgagagatcctgctagaattcttcggggcaaagatgtgaccatcttctctgtaggagtatacaatgccaatagatctcagctagaagagatcagtggggatagcagcctagtttttcatgttgagaacttcgatcatctaaaggcactagaaaggaaacttatctttcgtgtgtgtgctctccatgattgtaaaaggattacactactagacgttgtgtttgtgctggatcattcaggtagcataaaaaaacaatatcaagatcacatgattaacctaactatccatttggtgaagaaagcagatgttggcagggaccgagttcagtttggagccctcaaatactctgaccaacctaacatccttttctaccttaatacatactcgaacagatcagcaataattgagaatctgcggaagcgcagggacactggagggaacacctacactgccaaggctctcaagcacgcaaatgccctgtttacagaggaacatggcagccgcatcaagcaaaatgtgaagcagatgctgattgtcatcaccgatggggaatcccatgaccatgatcagctcaatgacacagcattggaactgagaaacaaaggcatcaccatctttgcagtgggtgtaggaaaggccaaccaaaaggaacttgagggtatggcagggaataaaaacaatactatctatgtagataattttgacaaactgaaagatgttttcacacttgttcaagaacgtatgtgtactgaagcaccagaggtctgtcatcttcaggaagctgacgtgattttcctttgcgatggctctgacagggtatctaattcagattttgtaaccatgacaactttcttgtcagacttaatcgataattttgacattcagtctcaaagaatgaaaattggtatggctcaatttggaagcaactaccagagtattattgagttgaaaaactctctgactaaaacccagtggaagactcaaattcagaatgtctccaagagcggtggatttccaagaattgactttgcccttaaaaaagtgagcaatatgtttaatctacatgctggtgggagaagaaatgctggtgtcccccaaactttggttgttatcacatctggagatcctcgctatgatgtggcagatgcagtaaaaaccctgaaggaccttggaatttgtgtcctggttttgggcataggagatgtttataaggaacatctcctgccaataacaggcaattctgaaaaaataatcacttttcaagactttgataaattaaagaatgtggatgtgaaaaaaagaatcatccgtgaaatctgccagagctgtgggaaaaccaattgctttatggacatagtggttgggtttgacatctccactcatgtgcaggggcagcctttgttccagggccacccccagctggaatcctacctcccaggcatcttagaagacatcagctctatcaagggggtgagctgtggggctggcacagaggcacaggtgagcttggcgtttaaggtgaacagtgaccaaggattccctgccaagttccaaatctatcagaaagcagtgtttgacagcttgctgcaagtcaacgtcagtgggccaactcatctgaacgcacagttcttgcggtctctttgggacacatttaaggataaatctgcatcccggggccaggtgctgcttattttttcagacggtctccagagtgaaagcaacataatgcttgaaaatcaatcagacaggctcagagaagcaggacttgatgctctgctggtagtgtcccttaacacaactgctcatcatgagttttctagctttgaatttggaaaaagattcgattacaggactcatctgactattggaatgagagaactgggcaaaaaactatcacagtacctgggaaatattgcagagaggacttgctgctgtacattctgcaaatgtccaggaattccaggacctcatgggacccgaggactacaagccatgaagggttctcaaggtctgaaaggcagcagaggacacaggggagaggatggaaaccctggagtacgaggagacacaggaccccaaggagacaaagggattgcaggatgtccaggggcgtggggtcagaagggactcaaaggattttctggacctaagggaggtcatggagacgatgggattgatggacttgatggggaagagggctgtcatggatttcctggaataaaaggagaaaaaggtgatccaggatctcagggcagcccaggttccagaggtgcccctgggcagtatggagagaagggcttcccaggggatccgggtaatccaggacaaaacaataacatcaaaggacaaaagggctccaaaggagaacaaggaagacaaggtagaagtggacagaaaggggtgcaaggcagtcctagttccagaggcagcaggggaagagaaggtcaaaggggactccgaggtgtctcaggagaaccaggaaatcctggacctacaggcacattgggagctgaaggattacaaggcccacaggggtcacagggaaatcctggcagaaaaggagaaaaaggaagccaggggcagaaaggacctcagggttctcctgggctaatgggagctaaagggagcactggaagacctggacttttggggaaaaaaggagagcctggacttcctggagatctagggccagtggggcaaactgggcagcgaggaagacagggagattctggcatcccaggctacggtcagatgggacgaaaaggagtaaagggcccaagaggattccctggagatgcggggcagaagggtgatattggtaatcctggaattcctgggggacctggacccaaaggatttaggggactagcactcactgtaggcttgaaaggtgaagagggatctcgaggactcccaggccctcctggacagagaggcattaaaggcatggcagggcagcctgtatattctcaatgtgatctgatccggtttttgcgggaacatagtctttgcagtctagaaaaatgtccagcatatccaacagagctagtatttgctctggacaattcctacgatgtcacagaagagagctttaataaaacacgggacatcatcacttccattgtcaatgaccttaacatcagggaaaataactgtcctgtgggagcaagagttgccatggtttcctataactcaggcaccagctatctcatccgctggtctgactacaataggaagaagcagctcctccagcagctttcccaaataaaatatcaagacaccacagagccccgagatgttggtaatgcaatgaggtttgtgacccgcaacgtgttcaagcggacgtatgcaggagccaacgtgaggagagttgctgtgttttttagcaatggtcaaacagccagtaggtcatccatcatcacggccaccatggagtttagtgccctggatatcagtccaacagtctttgcttttgatgagagagttttccttgaagcttttgggtttgacaacactggaacatttcaggtgattccagttcctccaaatggggaaaatcaaacattagaaagacttcggcgctgtgcactttgctatgataaatgttttccaaatgcttgcattcgagaggctttcttacctgaagattcatacatggatgtagtcttcctcatagacaattctcggaatatagcaaaggatgagtttaaggctgtgaaagccttggtgagctcagtgattgacaacttcaacattgcttcagaccctttaatctcagactctggtgataggattgctttgttgagctattctccttgggaaagttccaggagaaagatgggtacagtaaaaacagagtttgatttcatcacttatgacaaccaactcctaatgaagaatcacatccagacttccttccaacagctaaatggagaagcaacaattggtcgtgccctactgtggaccactgaaaatctttttccagaaacaccctatctaagaaaacacaaggtcatctttgtggtctcagctggagaaaattatgagagaaaagaatttgtaaaaatgatggctttgagggctaagtgtcaaggctacgtcatatttgtgatttctctgggctctacacgtaaggatgacatggaggagttagccagctacccacttgatcaacacctgatacagcttgggagaatacataaaccagatctgaattatattgcgaagttcttaaagccatttttatactcggtcaggcggggattcaatcagtacccaccaccgatgcttgaggatgcctgtagactcatcaatttaggaggagagaatattcaaaatgatggtttccaatttgttactgagctacaagaggattttttgggaggtaatggcttcattggccaagaattaaattctgggagagaatcaccttttgtaaagacggaagacaatggaagtgactatttggtttaccttccaagccaaatgtttgagccacaaaaattaatgatcaattatgaaaaagatcaaaaatctgcagaaattgcaagtctcacttctggacatgaaaattatggcagaaaagaagaaccagatcatacttatgaacctggagatgtctctcttcaagaatattacatggatgtggctttcctcatagatgcttcccaaagagtaggaagtgatgagtttaaggaagtaaaagcttttataacctcagtgcttgattactttcacattgcccccactccactgacctccaccttaggagacagggttgctgtcctgagctactctcctccaggctatatgcctaacactgaagaatgccctgtctacctggaatttgatttggttacttataacagtatacaccaaatgaaacatcatctccaagactctcaacagctcaatggagatgtttttattggccatgccttgcagtggacaattgacaatgtctttgtaggaacccccaatctgaggaaaaacaaagttatctttgtaatatctgctggcgaaaccaactctttagacaaagacgtcttaaggaatgtgtctctgagagccaagtgtcaaggctactccatatttgtgttttcctttggccctaaacacaatgacaaagaattagaagaattagccagccaccctctggatcatcacttggtccaacttggccgaacccacaagccagattggaactatatcatcaagtttgtcaagccatttgtccatttaatcagacgtgccatcaacaaatatcccaccgaagatatgaaagccacatgtgttaacatgacctctcccaacccagagaacggtggcacagaaaacactgtattatggtgaagatacaaggtcatcataggagaaaagaagatagctccactgacatgtataatcccatgtggttctaaccagaatgtataatcatctgttagaggtactgtggtaaatgacagggacttttcacaaaaacaattggctaatagcatgctaaatttgttctccatctcaaatcttgaggagaagaattttcggagtgaagacatcagtaagaagacctgacaaaccaggaatgatttcatttctcctgagaactggggaaaccgacctataagagttaacttttctttgaaagctctgcacagttcaggcatcaattttgatgatgtatctgcctgtaaaagattgtcattattttcaacacatctgtatctcagattggactcctctaaaagcatttggaattggaatttcctaggaatatcttctactaattcttaaaactggaaagccatgcccatgtcatcggttctggggtgaccctaacatttcatctagcagtgattgtcttctaaaacccacctgtcaggctgctatgacccatagttaatgctttctcttcaccaggacattgacaaaagaatggaattggtgaaaaagaaaaaagtgataagaggctaattttatgaaccatattttttgctgtaatcttttgtttaaattttagcagctttgctttgtgtatactgaatttttgcagcaaaagaattacggaaaagcacagatactctatatgaccagagatgttcttgggaattacaatgtagcaagagataatttctaaaataaaaacaagtctgacttgg

SEQ ID NO: 245624 - DNA, 7581 bp, Artificial Sequence
  derived and/or modified sequence
atgaagatcctgctgatcatcttcgtgctgatcatctggaccgagacactcgccgatcagtcacccggcccaggaccagtttacgcagacgtggtcttcctcgtggattccagcgaccacctgggcccaaaatcctttccatttgtgaaaacctttatcaacaaaatgatcaactccttgccgatcgaggcaaataaataccgggtagcccttgcccagtacagcgacgaattccattccgagttccacttgtctaccttcaaagggcggagtccaatgctgaatcatcttaaaaagaacttccagtttatcggcggtagtctgcagatcggcaaagccctgcaagaagctcatcggacctattttagcgctcctataaatggaagggatcggaaacaatttccccctatactagtggtactggcctcagcagagagcgaagatgaagttgaagaggccagcaaagcacttcagaaggatggagtcaaaataatcagtgttggagttcagaaagcctccgaagagaacttgaaggcaatggctacatcccactttcatttcaatcttcgcaccatccgagatctcagcaccttcagtcagaatatgacccagatcatcaaagacgtgaccaaatacaaggaaggcgcagtggatgccgacatgcaggtgcatttccccatcagttgtcagaaggattctttagctgatctggtgttcctggtcgatgagtccctgggcactggaggtaatttgaggcacttgcagactttcctcgagaacattacctcgtcaatggatgtgaaggagaattgcatgaggctgggtctcatgtcttattcaaatagcgcaaagacgataagctttctgaagagcagcaccactcagtccgaattccagcagcagatcaagaacctgtccatccaggtgggtaagtctaacaccggtgcagctatcgaccagatgcgccgcgacggcttctcggaatcttatggttcaaggcgagcccagggagtaccccaaatagcagttctggtgacccatagacctagcgatgacgaggttcatgatgcagcgctcaatctccgtttagaggacgtaaacgtgttcgccctatcaatccagggagctaacaacacacagctcgaggagattgtgagctaccctccagagcagacaatctcgaccctgaaatcgtatgccgatctcgaaacctactcaaccaaattcctgaaaaagctgcagaatgaaatctggagccagatatctacctatgcagagcagcgaaatcttgacaagacgggatgcgtggatactaaagaagcagacattcattttctgattgatgggagctctagcattcaggagaagcagttcgagcagatcaagaggttcatgctggaggtgacagaaatgttctccatcggcccagataaagttagagtgggggtggtgcaatatagtgacgatacagaggtcgagttttatattacagactacagtaacgacatcgacctgcgcaaagccatcttcaacattaaacagctgaccgggggaacatacacggggaaggctctcgactacatccttcagataatcaaaaacggcatgaaagaccggatgagcaaagtgccctgctatctcattgtgttgactgatgggatgtccacagatagagtagtagaaccggctaaaagacttagagccgagcagataactgtgcacgcagtgggtattggtgctgctaataaaattgaattgcaagagattgctggaaaggaagagcgcgtgtcatttggtcagaatttcgacgccctgaagtccatcaaaaacgaagtggttcgcgagatttgtgccgagaagggttgcgaagatatgaaggccgatataatgttcctggtggatagctcctggtcaattggcaatgagaatttcagaaagatgaaaatcttcatgaagaacttgctgaccaagatccaaatcggagcggacaaaacacaaattggcgtagtgcaatttagtgacaagacaaaagaagagttccagttaaacaggtactttactcaacaagagatatctgacgctatcgatagaatgagtctgatcaatgaaggcacgttaacaggcaaggccctaaactttgtcggacagtattttactcattctaaaggcgctcggctgggcgcaaagaagtttctgatcttaatcacggacggggtggcccaggatgacgttagggatccagctagaatcctccggggcaaagatgtaaccatattcagcgttggtgtttacaatgcaaaccgctcacaactggaagagatctccggcgacagctcactggtgttccatgttgaaaattttgaccatctgaaggcattagaaaggaaactaatttttcgcgtgtgcgcgcttcacgattgcaagcgcattaccttgctggacgtcgtctttgtgttggaccactctgggtctatcaagaaacaataccaggatcacatgattaatttgaccattcatttggtgaagaaggctgacgtcggcagggatcgagtccagtttggcgctctgaaatacagcgatcagccaaacatactgttttacctgaacacatatagcaataggtccgccatcattgagaatctacggaagagacgggacaccgggggcaacacttatactgctaaggccctgaaacacgccaacgccctgttcacagaggaacacgggagccggatcaagcagaatgtgaagcaaatgttgatagtgatcaccgacggagaatctcatgatcacgaccagctcaacgatacggctcttgagctgagaaacaaaggcatcaccatttttgccgttggggttggaaaagcaaaccagaaggagctggagggaatggccggaaataaaaacaacactatttacgtcgacaatttcgataagctaaaggacgtcttcacactggtccaggagcgtatgtgcaccgaagctcccgaagtttgccacctccaagaagccgacgtaattttcctgtgtgatgggtccgaccgcgtttcaaattctgactttgttaccatgactacttttctgagtgaccttattgataattttgatatccagtcccagcgcatgaaaatcgggatggcccagtttgggtctaactatcaatccatcatcgaactgaagaattccctgactaaaacccagtggaagacccagatccagaacgtgtctaagtcaggtgggtttccccgtattgatttcgccttaaagaaggtcagcaacatgttcaacttgcatgctggagggcggcggaatgcaggcgtgccccagacattggtggtaatcacttctggcgaccctcgctacgatgtggccgacgctgtgaagacactgaaagacctggggatttgcgttctcgtcctgggaatcggagatgtctacaaagaacatttgctgccaattaccggaaacagcgagaaaatcataacatttcaggacttcgataaactgaagaatgtggacgtcaagaagagaatcattagagagatatgtcaatcctgtggtaaaacaaattgcttcatggatattgtggtcggtttcgacatttccacacacgtacagggccagcctctattccaaggccacccacagctcgagtcctacttgcctggtatcctcgaagacatatctagcatcaaaggtgtttcgtgcggcgccggcactgaggcacaagttagtcttgcttttaaagtgaactctgatcagggcttccctgcaaagttccagatctaccagaaagcagtgttcgactccttgctgcaggtgaatgtctctggcccgactcatttgaatgcccagtttctgcgctctctgtgggatacattcaaagacaaatccgccagcaggggccaggtgttgctcatattttctgatggactgcaaagcgagtctaatatcatgcttgagaaccagtcggacaggcttagggaagctggcctcgacgctttattggtcgtctcccttaatacaaccgctcatcacgaattttcatcctttgagttcggaaagcggttcgactaccgtactcacctgactatcggaatgcgggagctggggaaaaagctgtcccagtatctagggaacatagctgagcggacctgttgttgcaccttctgcaagtgccccggcataccaggtccgcacggaacacggggactccaggccatgaagggttcccaaggcttgaaagggagcagggggcacaggggcgaagacggcaatcccggagtccggggagacactggccctcagggagacaaaggaatagccggctgccctggtgcgtggggacagaaagggctgaaaggtttttccggcccaaagggcggccacggggacgatggaatcgatgggctggacggggaggaaggatgtcacggatttcctgggatcaagggggagaaaggggatccagggtcacagggctcccccgggagccgcggcgcaccaggacagtacggtgagaaagggttccccggtgatcccggcaaccccggacagaacaataacataaagggccagaaaggatctaaaggagagcaggggcgccaagggcgctccggccaaaagggagtgcagggcagccccagttctagaggttcgaggggcagagagggccaacgtgggctgagaggggtgtctggtgagcctggcaaccccggccctacgggaaccctcggggctgaaggcctgcagggaccccagggcagtcaggggaaccctgggcgcaagggcgaaaagggatcccaggggcagaagggaccacaggggtctcccggtctgatgggtgccaaggggtccaccggccgtccaggtcttctcgggaagaagggcgaaccaggactgcccggcgacctcggcccagttggccaaacgggacagcgtggccgacagggtgacagcggaattcctgggtacggtcagatggggcggaagggagtgaagggacccagaggcttccctggtgatgctggtcagaaaggggacatcggcaaccctgggatcccggggggacccggcccgaaaggctttcggggtttagcattaaccgtcggcctgaagggcgaggagggttccaggggactgccagggccacccggacagagggggattaaggggatggccggccagcccgtctatagccagtgcgacctcatacgattcctgagagaacattccctgtgttcactggagaagtgcccagcatatcccactgagttagtattcgctctggataactcatacgacgttaccgaggaaagtttcaacaagacaagagatatcattacctctattgtaaacgacctgaatatcagggaaaataactgccccgtgggcgctagggtagccatggtgtcttataacagcggaacctcctaccttattagatggagcgactataatagaaagaagcaactgctccagcaactgagccagatcaagtatcaggatacaaccgagcccagggacgtggggaacgccatgaggtttgtcactcgtaatgtattcaagcggacttacgccggggctaatgtcagacgcgtcgcagtgtttttttccaacgggcagaccgcctcccggtccagcatcatcaccgcaaccatggagttcagcgccctggatatctccccaaccgtctttgcttttgatgagagagtgtttttggaggcattcggatttgacaacactggaacctttcaggtcatacccgtgccccctaatggcgagaaccaaacactggagaggctccgccgctgcgctctctgttacgacaaatgcttccctaacgcgtgcattcgggaagcttttctccctgaggactcctacatggacgttgtgttcctgattgacaactcccgtaacatagcaaaagatgagttcaaggccgtaaaggcgctggtgagctccgtgatcgacaacttcaatatagctagcgatccactgataagtgattccggcgacaggatcgccctcctctcgtactcaccctgggagtcttctcggagaaaaatgggcacagtcaagacagaatttgatttcattacatatgacaatcaactcctgatgaaaaaccacatccagacctcttttcagcaactgaacggagaagccacgattggccgcgcgctgctctggacaaccgagaatttattccctgaaacaccttatcttcggaagcacaaggtgatcttcgtcgtcagcgccggcgagaattatgagcgcaaagaatttgtgaaaatgatggcactgcgagccaagtgtcagggctatgttatttttgtgatcagtctgggaagtacccgcaaagatgatatggaggagctggcaagctatccgctggaccagcacctcattcagctcggtcgcattcacaagcccgacttaaactatatcgcgaaattcctgaagccatttctctactctgtacgccgaggatttaaccagtatccaccccccatgctggaggatgcgtgcaggctgattaaccttggcggggaaaacatccaaaatgatgggttccagttcgtcacagagctgcaggaggacttcttgggtggcaacgggttcataggccaggagttgaactccggcagagaatctcccttcgtaaaaaccgaggataatgggagtgactatttggtctatttacctagccaaatgttcgaacctcagaagctcatgatcaattatgagaaagaccagaagagcgccgagattgcatctttgacatccggccacgaaaactatggccgcaaagaggaacctgaccacacatatgagcccggggacgtctcactgcaagaatattatatggacgtcgccttcctaatagatgcaagccagcgggtgggctctgatgagtttaaggaagtcaaggccttcatcacatctgttctcgattatttccacatcgcgcccaccccactcactagcaccctcggcgaccgcgtggctgtgctgtcttactcacccccaggatacatgcccaataccgaggagtgccccgtgtacctggagtttgatctggtgacctacaacagcatccaccagatgaaacaccaccttcaggattcacaacaactgaatggcgatgtctttatcggccatgctctgcagtggacgatcgacaacgttttcgtcggcacccctaatctgagaaaaaataaggttattttcgtcatatcggccggggagaccaactcgctggataaggacgttttgagaaatgtatcacttcgtgctaagtgccaaggttactccattttcgtgttctcttttggcccaaaacacaacgacaaagagcttgaagaactggctagtcatccccttgatcatcacctggtccagctcggccgaacccacaaacccgactggaactatatcatcaagttcgtgaagccctttgtccaccttattagacgcgcaataaataagtatcccaccgaggatatgaaagccacttgcgttaacatgaccagtccgaatcccgagaatggtggcacagagaataccgtgctgtggtag

SEQ ID NO: 245625 - DNA, 7581 bp, Artificial Sequence
  derived and/or modified sequence
atgaaaattctgctaattatatttgtgctaataatctggaccgagaccctcgcggatcaaagtccgggaccaggccctgtttacgccgatgtcgttttcctcgtcgacagctcggaccacctgggcccaaagtcatttcctttcgtgaagacatttattaataaaatgatcaattcccttcccatagaggccaataagtaccgcgtcgcactggcccagtacagtgacgaatttcacagcgagtttcatctatcaacttttaaggggaggtctccgatgctgaaccatcttaaaaaaaacttccagtttatcggaggctctctgcagataggaaaagctcttcaagaggctcatagaacgtactttagcgcccctatcaacggacgagaccggaagcagtttccaccaattcttgtggtactggctagtgcggaatcagaagacgaggtggaagaggcctcaaaggccctccagaaggacggcgtaaagattatctccgtgggagtgcagaaggcttcagaagagaacttgaaggccatggctacatcccatttccattttaacttacgcaccatccgcgatctctcaacattttcacagaacatgacccagatcatcaaggatgtgacgaagtataaagagggtgctgtggatgccgatatgcaggtgcactttcctataagttgccagaaggactctctagcagatctagtgttcctcgttgacgaaagtctgggtaccggcggtaatctccggcacttacagaccttccttgagaacatcacttcaagtatggacgtgaaagaaaactgcatgcgactgggcctgatgagctatagtaatagcgcaaagactatttcttttctgaagtcctcaactactcagagcgagttccaacaacagatcaagaacttatccatacaggtggggaagagcaacaccggggcagcaattgatcagatgcggagagacggattctctgagagttatgggagtcgcagggcccaaggagtcccgcagattgccgtgcttgtgacccacagaccaagcgatgacgaggtgcacgatgcagcccttaatctccgtctggaagacgtgaacgtgttcgccctttcaatacagggtgcaaataatacccagctggaagagattgtatcatatcccccagaacagacaatctctactctgaagtcttacgcagatcttgaaacttactctacaaagttcttgaaaaaactccagaatgaaatttggagccagatttcgacgtatgcggagcagagaaatttagataaaactggctgcgtcgacactaaagaagccgatatccactttctgattgacggatcaagctccatccaggagaagcagtttgaacagattaagaggtttatgcttgaggtgaccgaaatgttcagcatcgggcctgacaaggtacgcgtgggggtggtgcagtactctgacgataccgaagtagaattctatattaccgactacagtaacgatatcgatctgaggaaggccatttttaacataaagcaactgaccggagggacctatacaggcaaggccctggactatatcctgcagataatcaagaacggaatgaaggaccgcatgagcaaagtcccctgttatctaatagttctgaccgatgggatgtccacagatcgcgtggtggagcccgctaaaagactcagggccgaacagattacagtgcatgccgtcggcataggcgcagctaataaaatcgagcttcaggaaatagccggaaaagaagagcgcgtgtcatttggccaaaactttgacgcacttaagtcgataaagaatgaggtcgtacgggagatttgtgccgagaagggttgcgaggacatgaaggccgacataatgttcctggtggatagctcctggtctatcggcaacgagaattttcggaaaatgaagatcttcatgaagaatctgttgacaaaaatacagatcggtgcagacaagactcagatcggcgtggtgcaattcagcgataagacaaaggaagagttccaactgaacagatacttcacgcagcaggagatcagcgatgccatcgatcgcatgagcctgatcaacgaaggcactctgacgggcaaagcccttaactttgtgggtcagtacttcacccactccaaaggggctaggctgggggctaagaagttcctcatcctgatcaccgatggcgttgcacaggacgatgtgagggaccccgcaagaatcttgagggggaaggacgtgactattttttcagttggagtgtacaatgccaaccgcagccagctggaggagatttcaggggactcttccttggtgttccacgttgaaaattttgaccacctcaaagctttagagcggaaactgatattccgcgtttgtgccctgcatgactgtaagaggattacactccttgatgtggtgttcgttctggaccactccggcagcattaagaagcagtaccaagatcacatgattaatcttactattcatctggtcaaaaaagccgacgtgggccgtgatcgggttcagttcggagctctgaagtattctgaccagccgaatatcctgttctacctcaatacgtactctaatagatctgcgatcatagagaaccttcggaaaagacgggatactggcggtaatacttacacagccaaagctttgaaacacgcaaacgctctcttcactgaagaacacggtagcagaattaagcaaaatgtaaaacagatgctcattgtgattactgacggcgagtcccacgatcatgaccagctgaacgacactgcactcgagttacggaataagggaattaccatctttgctgtgggggtgggtaaggcaaaccagaaagagcttgaaggcatggcgggaaataagaacaacacaatttatgtggacaattttgataaacttaaggatgttttcaccctggttcaggaacgtatgtgcaccgaggcccctgaggtgtgccatctgcaggaggctgatgtaattttcttgtgcgacgggtccgaccgagtctccaactcagattttgtgacaatgaccacattcctgtccgatcttatcgacaactttgatatacagagtcagcgaatgaagatcggcatggcacagttcgggagtaactatcagtccattatagagttgaaaaacagcctgacaaagacccagtggaaaacccaaatccaaaacgtatcaaagtccggtggattcccgagaatcgatttcgctctgaagaaagtgtccaatatgtttaatctccatgccggtggtcgacggaacgccggagttccccagacgctcgttgttattaccagtggcgacccacggtatgacgtggcggatgcggtgaaaaccctgaaggatctgggtatctgcgtcctcgtgctcggaatcggggacgtgtataaagaacatcttttacccatcacaggtaattcagagaagattattacttttcaggacttcgataagctgaagaacgtggatgtaaagaaaagaataatccgggaaatctgtcagagctgcggcaaaacaaactgcttcatggatatcgtggttggatttgacatctccacgcacgtccagggccagccgctgttccaggggcacccccagctcgaatcctacctgcctgggatcctggaggacatcagttcgatcaaaggtgtgtcgtgcggcgctggcacagaggctcaggtctcgctggcctttaaagtcaattctgaccaggggttccccgcaaagttccagatctaccaaaaggcagtgttcgattccctcttgcaggtaaacgtgtccggtcccacccatctaaacgcccagttcctgcgtagcctgtgggacaccttcaaagacaagagcgcctcacggggacaggtgctgctcatctttagcgatgggttgcagagcgaaagtaacatcatgttggagaaccagtccgatagattgcgtgaggcaggcctcgatgccctcctcgttgttagcttgaatacaactgctcatcacgagttctcctctttcgagtttggaaaaagattcgattatcgaacgcatctgaccatcggaatgagggaattgggtaaaaaactgtcacagtatctaggaaatatcgctgaaagaacttgttgctgcaccttctgcaagtgtcctggtattcccggtccccacgggaccagagggcttcaagcgatgaagggctctcagggcctaaagggctctcggggtcaccgcggtgaggacggtaatcctggcgttaggggagacacaggaccccagggcgacaagggcatagcaggatgcccgggtgcatggggacagaaaggtctgaaaggttttagcgggcctaaaggcggtcatggcgacgacggaatcgatggtttggacggcgaagaaggttgtcacggcttccctgggattaagggggagaagggagatcctggaagccaaggaagtcccggatcgcggggagcaccaggccagtatggtgaaaagggctttccaggggatccaggcaacccgggtcagaataataatatcaaaggccagaaggggagcaaaggggagcagggtcgacagggccgttcgggccaaaaaggtgtccaagggtccccttctagccgaggctctcggggaagagaaggacagagaggattacgtggagtgagcggagagccaggtaatcccggtccaactgggaccctgggcgcagagggactccagggtccacagggtagtcagggaaatcccggaagaaaaggcgagaagggttcccagggacagaaaggcccacagggttcccctggcttgatgggggctaagggctcaactggccgtccgggactgctgggtaagaagggcgagcccggtttaccaggggacttgggtcccgtgggacagacaggtcaacgaggcagacaaggtgattcgggtatacccggatacgggcagatgggcagaaagggagtaaagggcccaaggggcttccccggtgatgccggacagaaaggagatattggcaatccgggtatacctggcggacccggacccaaggggtttcgagggctggcactgacagttggcttaaaaggggaagaaggcagtagagggcttccaggcccacctggacaaaggggaatcaaaggtatggctgggcaacccgtgtatagccagtgtgatttaattcgcttcttgcgagaacatagtttgtgcagtctagaaaaatgccctgcctaccccacggagctcgtgttcgctttggataattcttatgatgtgaccgaggaaagcttcaataaaacgcgcgacatcataacctcgatagtcaacgacctgaatatccgggaaaacaactgtcccgtaggagcgagagttgctatggtatcatacaacagcgggacctcctacctcatacgctggtccgactataaccgcaagaagcagttactccagcagctgagccaaattaagtatcaagacactaccgaaccaagagacgttggcaacgccatgaggtttgttactagaaacgtttttaaaaggacatacgccggagcaaacgtcagaagagtagctgtgttcttttccaatgggcaaactgctagtagatctagtatcataaccgccaccatggaattttccgcactggacatttctcccactgtctttgcatttgacgagcgcgttttcctcgaggcctttggctttgataatacaggaaccttccaagtgatcccggtgcccccaaacggcgagaaccagacgttggagagattgagaagatgcgccctgtgctacgacaaatgctttcctaacgcatgtatccgtgaggcttttttgcctgaggattcctatatggacgtcgtctttcttatcgataactctagaaacatcgccaaggacgagttcaaggccgtcaaagccttggtgtcatcggttatcgacaactttaatattgcctccgatcctcttatttcggacagcggagatcggatcgcgttactgtcctatagcccctgggagtcatcgcgccgaaagatgggaaccgtgaagaccgaatttgatttcattacctacgacaatcagctcctcatgaagaaccacattcaaacttccttccagcagcttaatggcgaggctactatcggcagggccctcctgtggacaaccgaaaacttgttccctgaaacgccttaccttcgaaaacacaaagtcatattcgttgtcagtgccggagaaaactatgaaagaaaggagttcgtcaagatgatggctctacgggctaaatgtcaaggctatgtgatcttcgtcatctcgttggggtcaacgagaaaggacgacatggaggaactcgcaagttacccccttgatcagcacctcatacagttgggcagaatccacaagcctgacctgaattacattgccaagtttctaaaaccgttcctctattccgtgaggagaggattcaatcaatatcctccaccaatgttggaggacgcctgtcgcctgataaacttggggggagaaaatatccagaatgacggatttcagtttgtgactgagcttcaggaagatttcctgggaggcaacggatttatcggccaagagctgaatagcggcagggagtcccccttcgtgaaaaccgaagataatggaagcgattatctggtttatctgccctcccagatgtttgaaccacagaaacttatgatcaattacgagaaggatcagaaatcagccgagatcgcaagccttacgagtgggcatgagaattatggcaggaaagaggaaccagatcatacctacgagcctggcgacgttagtcttcaggaatactacatggacgtcgccttccttatcgatgcttctcaaagggttggcagcgacgagtttaaggaagtgaaggcattcattactagcgtgctcgactacttccacatcgcgccaacaccactcacatccacactgggagatcgcgtggccgtactgtcttactccccccctgggtacatgcctaacaccgaagagtgtcctgtgtacttagaatttgatttggtgacatacaatagcatccaccagatgaagcatcaccttcaggattctcagcaactcaatggggatgtttttattgggcatgccctgcagtggaccattgacaacgtgttcgtgggaacccctaatttgagaaagaataaagttatctttgtcataagcgccggagagacaaactccctggacaaggatgtgctgcggaatgtgtctttaagagccaagtgtcaagggtactccatctttgtgttcagtttcggccctaaacataacgataaagagctggaagagcttgccagccaccctctcgaccaccacttagtgcaactgggaagaacccacaagccagattggaactatattatcaagtttgtgaagccgtttgtgcacttgattcggagagccattaacaagtatcctacagaagatatgaaggccacctgtgtgaatatgaccagcccaaatcccgagaacgggggtaccgagaacacagtactgtggtac

SEQ ID NO: 245626 - DNA, 7581 bp, Artificial Sequence
  derived and/or modified sequence
atgaaaatactgctgatcatcttcgtgctaattatctggaccgaaactctagcagatcaaagccctggtcccggccccgtatacgccgatgtggtgttcctggtcgattccagcgatcatcttggcccaaagtcttttcccttcgtgaaaacattcatcaataagatgatcaactccctacctattgaggccaacaaatatcgtgtagcacttgcccagtacagcgatgaattccatagcgagtttcatctgtccacattcaaagggaggagccctatgctaaatcacctgaaaaaaaacttccagttcataggcggatcattgcaaattggcaaggccctacaggaggctcacagaacatacttcagcgccccaatcaatggcagggataggaagcagtttccacccatcttggttgtccttgccagtgcggaatctgaggatgaggtcgaggaagcttctaaggcattacagaaagatggcgtgaagatcatctccgtgggcgtgcagaaggcttctgaagaaaatttgaaggccatggcaacatcacatttccattttaacctgcgcacaatccgggacctgtctacgttctcccagaacatgacccagattatcaaggatgtgaccaagtataaggagggggccgttgacgcagacatgcaggtccatttccccattagctgccagaaagactcactggccgaccttgtttttctggtggatgaatcattgggaactgggggcaatctgagacacctgcagactttccttgagaatattacctcctctatggatgtgaaggagaattgcatgcggttgggcctgatgagttactccaactccgccaagacaatttccttcctgaagagctccaccacacaatcagagtttcagcagcagataaagaacctatcaatccaggtcgggaaaagcaatacgggtgctgccatcgaccaaatgcggagggatggcttctctgagagctatgggtcacgacgcgctcagggcgttcctcaaattgcggtgttagttacacacagacccagcgatgatgaagttcacgacgctgcattgaacctcagactggaggatgtaaatgtctttgctctctccatccagggcgccaacaatacccagttagaggagatcgtctcctatccacccgagcaaaccatatccaccctgaagtcatatgccgaccttgaaacctattccactaagttcttaaaaaagctgcagaatgaaatctggagccaaattagtacatacgctgaacaaagaaacctcgacaagacgggttgtgtcgataccaaagaggctgacatccattttctcattgatggctcgtcctctatccaggagaaacagtttgaacagattaaaagattcatgctggaggtgaccgaaatgttctcaatcggccctgacaaggtaagggtgggggtggtgcaatattctgatgacaccgaggttgaattttatatcacagattatagtaacgatattgacctccgtaaggctatcttcaacatcaagcagctgactggcggcacctacaccgggaaggctcttgattacatcctgcagatcatcaaaaacggaatgaaggacaggatgtctaaagtgccatgctacctgattgtgttaactgacggcatgagtaccgaccgcgtcgtcgagccggcaaaacgcctcagagctgagcagataaccgttcacgctgtggggattggtgctgcaaataagatagagctccaggaaatcgcgggtaaagaagaacgggtcagtttcggccagaattttgacgcactgaagagtattaagaatgaggtggtgagggaaatctgcgcagagaagggatgcgaggacatgaaggccgatatcatgttcctagtcgattcctcttggagcatcgggaacgagaatttccgaaagatgaagatatttatgaagaacctgttgaccaaaatccagataggggctgacaaaacccagattggcgtggtccagttttcggacaaaaccaaagaggaattccagctgaatcgctacttcacgcagcaggaaatctccgacgctattgatcggatgagtcttatcaatgagggcacgctgacaggtaaggctttgaatttcgtgggtcagtatttcacacattcaaagggagccagattaggggctaaaaagtttctgatactaatcacggacggggtggcccaggatgacgtaagagaccctgcccgcattctgcgaggaaaagacgttaccattttttccgtcggggtctacaacgctaacagatcccagctggaagagatatccggtgactcatctctggtcttccacgtcgaaaatttcgaccacctgaaggcgctggaacgcaaactgatttttagagtttgcgctctacatgattgtaagcggatcactctactggacgttgtatttgtgcttgatcactctgggtctatcaagaagcaataccaggaccacatgatcaatcttacgattcacctggttaagaaagccgatgtgggtcgtgaccgagtacagttcggggcccttaaatattctgaccagccaaatattctcttctatttgaacacatactccaatagatcagcaatcatagaaaacctgcggaaaagaagggacacaggcggcaacacatacaccgcgaaggccctcaagcatgctaatgccctgttcaccgaggagcacggtagtcgcatcaaacagaatgtaaaacagatgctgatcgtcatcaccgatggagagtcccatgatcatgaccagctgaatgacacggctttagagttgcgtaataaaggcataaccattttcgccgtgggtgtcggcaaagcgaatcaaaaagagctggaaggaatggcaggcaacaagaacaataccatctacgtcgacaacttcgacaaactgaaagacgtgtttactctggtacaggagaggatgtgtaccgaggccccggaagtgtgccacttgcaagaggccgatgttattttcctctgtgacggttccgacagggtctccaacagcgattttgtcactatgacaacctttcttagcgatctcatcgataatttcgatattcaaagccagaggatgaagatcggaatggcgcagtttgggtctaactatcagagcattattgaactgaaaaattctttgacaaaaacccaatggaagacacaaattcagaacgtttctaagtcaggagggttcccccgcattgatttcgccttaaaaaaggtgtctaacatgttcaacctccatgcggggggacggcgaaacgctggggtgccccagactctcgttgtcatcacttcaggcgacccacgctacgacgtagccgatgccgttaaaactctcaaagatctcggcatatgtgttctcgtgctgggcattggtgacgtttataaggagcaccttttgcccataaccggcaatagcgaaaagattatcacattccaggacttcgacaaactgaaaaatgtggacgttaaaaagcgaatcatacgagagatctgtcagtcttgtggcaaaaccaattgttttatggacatagtggtgggtttcgatatttctacgcatgtgcaagggcagcctctgttccagggccacccccagctggagagctacctccccggtatcctcgaagacatcagctcgattaaaggagtaagttgcggagcgggcactgaagcccaagtgagtttggcttttaaggtgaactctgatcagggattccccgccaagtttcagatttatcaaaaggccgtgtttgactcactcctgcaggtcaatgttagcggccctacccacctaaatgcccagttccttagatccctgtgggatactttcaaggacaaatctgcgagccgcggacaggtcctgttaattttctctgatggcctgcagtccgaaagtaatatcatgctcgaaaaccagagtgacagactgagagaagccggacttgacgcgctcctggttgtttcgctgaacactacggcccatcacgagttctcaagcttcgaattcggaaaaaggtttgactacagaacccatctgactattggaatgagggagctggggaaaaaactgtcccagtatttgggcaatatcgccgagaggacatgctgttgcactttttgtaaatgccctggcattcctggcccccatggaacgaggggattacaggcaatgaagggcagccagggactaaaggggagccggggccaccggggggaagatggaaaccccggcgtgagaggagatactggtccccagggggacaaaggaattgctggatgtcccggagcttgggggcaaaagggtctgaaagggttcagcgggccgaagggagggcacggtgatgatggaattgacgggctggacggcgaagaaggttgtcatggttttcccggcattaaaggggagaagggtgacccaggctctcagggaagcccaggatctagaggagcaccaggacaatacggggaaaaaggatttcctggggatccaggtaatccagggcagaacaacaatattaaggggcagaagggatcaaagggggagcagggtaggcagggccgttctgggcaaaaaggggtccaggggagcccttccagtagggggtcacgaggacgggagggccagcgtgggcttagaggagtctcgggggagccaggcaatcccggcccaactggtacactaggtgcagagggcctgcaggggcctcaggggagccaggggaatcccggtagaaagggagaaaagggctctcaagggcagaagggtccacagggcagccccgggttgatgggagccaagggtagcacaggaaggccggggctgcttggcaagaagggggaaccagggctccccggggacttgggtcccgtcggacagacgggtcaaaggggccgccagggagactcaggcatacccgggtatggccaaatgggaaggaagggggtaaaagggcccagaggattccctggagatgctggacaaaagggagatatcggaaatccaggcattccaggcggcccaggtcctaaaggtttcagaggtttggcacttactgtgggcttgaaaggagaggagggatcaagggggctccctggcccacccggacagagaggtataaagggtatggccgggcagcctgtttactctcagtgtgacctgattcgcttcctgcgcgagcattctctatgctcactggagaagtgccctgcctatcctactgaactagtcttcgcgctggacaatagctatgatgtcactgaggagtcgtttaataaaacacgcgatataattaccagcatcgtgaacgacctgaatataagagaaaacaattgtcccgtcggcgccagagtggcaatggtgagctacaacagtgggacatcctatctgattcgatggtctgattacaacaggaagaaacaattgctccagcagctgtcgcagataaaatatcaggacaccactgagcctcgagacgtcggtaacgcaatgaggtttgtgacacggaacgtttttaaacggacatacgctggagctaacgttaggagggttgcagtttttttttccaacggtcagactgcctctagaagtagcataatcactgctacaatggaattctctgccttggacattagccccacagtgttcgcgttcgacgaacgcgtattcctcgaggcgtttgggttcgataacacaggcacgttccaggtgatacctgttccaccaaatggcgagaaccagacgctggagagacttcgacggtgtgctctctgttatgataagtgctttccaaatgcctgcatccgcgaagcttttctgcctgaggacagctacatggatgttgtgttcctgattgataacagtcgaaacattgcaaaagacgagttcaaggcggttaaagctctagtttcctcagtgattgacaacttcaatatagccagcgatcctcttatttcagactccggcgaccgcatagcactcctaagttactcaccttgggaatcgagcagacgcaaaatgggaaccgtaaagacggagtttgacttcattacctatgacaaccaacttctgatgaagaaccatatccagacatcctttcagcagctgaacggtgaagccacaattggtcgggctcttttatggactacagaaaacctctttcctgaaaccccctacctccgaaaacacaaggtaattttcgttgtgtccgctggtgagaactatgagaggaaggagttcgtgaagatgatggcgctgcgagcgaagtgtcaaggttacgtgatatttgttatctctcttggctcaacacgtaaggacgatatggaggagctagcttcctatcccctagatcagcacttaattcagctgggccgcatccataagccagatcttaattatattgccaagttcctaaaacccttcctctacagtgtgcgtagagggtttaatcagtatccccccccaatgttagaagatgcgtgccgactcattaatttaggcggtgaaaacatccagaatgacggctttcagttcgttacagaactccaggaagactttttaggcggaaatggtttcataggccaggaattgaacagtggccgtgaatcaccgttcgtgaaaacagaggataatggtagtgattacctggtgtatctgccctctcaaatgtttgagccacagaagctgatgatcaattatgagaaggaccagaagtctgcagagattgcctctctcacctcggggcatgaaaactacggccggaaggaggagcccgatcatacctacgagcccggcgacgttagcctccaagagtactacatggacgtggctttcttaatcgacgcaagccagcgtgtcggatctgacgaattcaaggaggtgaaggctttcattacttctgttctggactatttccacattgcgccgaccccgctgacctctaccctcggagatcgcgtggcagtgcttagctactctcctcccggctacatgcccaatactgaagaatgtcccgtgtacctggagttcgatctggttacttataattctatccaccagatgaagcatcacttgcaggactctcagcagttaaatggcgacgtgttcattggccacgcactccagtggaccatcgacaatgtgttcgtaggcacgcctaacctgaggaaaaataaagtgatattcgtgataagcgcgggagagacgaattcactggataaggatgtgttgaggaatgtttccctccgggccaagtgtcaaggctatagcatcttcgttttctcatttggtcctaaacacaacgacaaggagctcgaggaactggcatctcatcctctggatcaccacctagtgcagctagggcggacccacaagccggattggaattacatcatcaagttcgtaaagccttttgtgcacctcatacgccgggcaattaacaaataccccaccgaagacatgaaagccacgtgcgtgaacatgactagcccaaaccctgagaacggaggcaccgagaacaccgtgctttggtag

SEQ ID NO: 245627 - DNA, 7581 bp, Artificial Sequence
  derived and/or modified sequence
atgaaaatactcctcattatcttcgttttgatcatctggaccgagactctcgcagatcaatctcctggcccgggacccgtatacgctgacgtggtgttcctcgtcgactcgagcgaccaccttggcccaaagagctttccctttgtgaaaacattcattaataaaatgataaatagtctgcctatagaagcaaacaaataccgagtcgcattggcccagtattctgatgagtttcactcggaattccatctctcaaccttcaaaggacgctcaccaatgcttaaccacttaaaaaagaactttcagttcatcggaggatctctgcaaattggcaaggctctccaggaagcacaccggacttacttttccgcacctattaacggacgcgaccgcaagcagttccctcctattcttgttgtcctggccagcgctgagagcgaggacgaggtggaagaagcaagcaaggctctccagaaggatggagtcaaaattatctcggtcggagtgcaaaaggctagcgaggagaatctaaaagctatggctacctctcattttcatttcaatctgagaacaattcgtgacctgtccacattcagccaaaacatgacgcagattattaaggacgtcacaaagtacaaggaaggagcggtggatgccgacatgcaggtgcactttccaatcagctgtcaaaaagattctcttgctgatctggtattcctcgtggatgagagcttaggaaccggcggcaacctgcgacacctgcagacttttttagaaaacataacgagttcaatggatgtgaaagagaattgcatgaggttaggcctgatgagttatagtaattcagcgaagacaatatcctttctgaaaagctcaacaacccaatcagagttccagcagcagataaaaaacttatctattcaggtcggaaagtctaatacgggcgcagcgatagatcagatgagacgagatggcttttctgaatcctatggcagcaggcgagcccagggggttccacagatagcagtcttggtgacacacagaccttcagatgacgaggtgcacgatgctgcattgaacttaagacttgaagacgtgaacgtgttcgctttatcgattcagggcgctaataacacacagcttgaggagattgtatcataccctcccgagcagacgatttcaactctcaaatcttacgctgatctggagacttacagcacaaaatttttaaagaagctgcagaacgagatctggtcccaaatttctacttacgccgaacagcggaatctagacaagaccgggtgtgtggatacgaaagaggcggacatacacttcctaatcgatgggtcatcctccattcaagaaaaacagttcgaacagatcaaaaggttcatgctggaggttactgaaatgttctctattggtccggataaggtcagggtgggtgtggtgcaatattctgatgataccgaggtcgaattctatattactgattacagtaacgacatcgatctacgcaaggccattttcaacataaaacaactcactggagggacatacacaggcaaggctcttgactacattctccagatcatcaagaacggaatgaaagaccgcatgagcaaggtgccttgttacctgattgtgctgaccgatggtatgagcactgacagggtggtagagccagcaaagcgactaagggctgaacagatcacagtgcacgccgtaggaatcggtgctgcgaataagatagagttgcaggaaatcgctggaaaggaggagagggtatcatttggacaaaattttgatgctctgaagtccattaagaacgaagtcgtccgggaaatttgtgccgagaaagggtgcgaagacatgaaagccgacattatgtttctcgttgactcctcttggtctattggaaacgaaaattttagaaaaatgaagatctttatgaaaaatctcctgacaaaaattcagattggagccgacaagacacagattggagtggtgcagtttagcgacaagactaaggaggagtttcagttgaatcgatacttcacccagcaggaaatctctgatgcaatcgaccgaatgtcgctgatcaatgaggggactctgaccggcaaggctttaaattttgttgggcagtattttacccattcgaaaggcgccagactgggcgcgaagaagttccttatcctgatcaccgatggcgtggcacaggatgatgttcgcgatccagcccgcatcctgagaggtaaagatgttaccatattctctgttggtgtatataatgccaaccgctcccagcttgaagaaatttcaggtgattccagtttagtttttcacgtagagaactttgaccatcttaaggcactagaaagaaaactgatttttagggtgtgtgccctgcatgactgtaaaaggatcactctactggatgtcgtctttgtccttgaccattccgggtccattaaaaaacaataccaagatcacatgataaacctaactatacatcttgtgaagaaagctgacgtcggccgcgatcgagttcagttcggagcactgaaatattcggatcaaccaaacatactgttctacttaaatacctattcgaacagatctgccatcatcgagaatctacgcaaaagaagagacacaggaggaaacacctacacagccaaagctctaaagcatgccaacgccctattcacagaggaacatggctcccgaatcaaacagaacgtgaagcaaatgctaattgtgataactgatggagagtctcatgatcatgatcagctgaacgataccgctctggaactgagaaacaagggcattactatatttgccgtcggcgtgggaaaagcaaatcagaaggagctggaagggatggccggtaataaaaacaatactatttatgttgacaattttgacaagttgaaagacgtcttcaccctggttcaagaacgcatgtgcactgaggcccccgaagtgtgccacctgcaggaggctgatgtaatctttctatgcgacggttccgacagggtctccaattccgatttcgtcaccatgactacatttctttcggatcttatcgacaactttgatatccagtcccagcggatgaagatcggcatggcccaatttggcagcaattaccaaagcataatcgaacttaagaacagcttgaccaaaacccaatggaaaacacagattcagaacgtgtcgaaatctggaggattccccagaatagatttcgccctcaaaaaggtgtcaaatatgtttaacttgcacgccggggggagacggaatgctggtgtgccccagactttggtagtgattaccagtggcgatcctcgatacgacgtggctgatgctgtgaagactctgaaggacctcggaatctgtgttctggtgcttggtatcggagatgtctataaggaacatctgttacctataacagggaactctgagaaaattattactttccaggatttcgacaagctgaaaaacgtggatgtgaaaaagagaattataagggaaatctgtcagagctgcggaaagacaaactgctttatggatatcgtggttggcttcgatatttctacccacgttcagggtcaaccattgttccaggggcaccctcaactggagtcttacctcccagggatactcgaggacataagcagtattaaaggggtgtcatgcggtgccggcaccgaggcccaagtttctttggcctttaaagtgaactccgatcagggattcccagcaaaattccaaatttaccagaaagcagtgtttgatagcctcctccaagttaacgtgtcgggccctacccacttaaatgctcaatttcttcgctctctgtgggacactttcaaagataaaagcgcttcccgcggccaggtcttgttgattttcagcgatgggctgcagtcggagtccaatatcatgctagaaaatcagtccgatagactacgggaagctggtttggacgccctgctggtagtcagcctgaatacaaccgcccatcatgagttctcctccttcgagtttggcaaacggtttgattatcgcacgcatttgacaattggtatgagagagttgggaaaaaagttgtcacaatacctcggaaatatcgctgaacgcacttgttgttgtactttctgtaagtgtcccggcatacccggaccccacggaaccagaggactgcaggctatgaagggatcacaggggctgaagggctcgcgcgggcacaggggggaagacgggaatcccggggtgaggggagatacggggcctcagggggataaagggattgccggctgcccgggggcatggggacagaaaggtctcaaaggatttagtggcccaaagggtgggcacggagacgacggaatagatggtttggatggagaagaggggtgccacggattcccaggaatcaagggggaaaaaggtgatccagggtcccaaggatcaccaggctccagaggggcaccagggcagtatggggaaaaagggttccccggagatcccggaaatccaggacagaacaataacatcaaggggcagaagggctctaaaggagaacaaggtaggcagggaaggagtggtcagaaaggggtgcaagggtccccaagcagcaggggttccaggggtcgtgaggggcagcgaggtttgagaggcgtcagcggagagcccggtaatcctggcccgaccggtaccttaggcgccgaagggctccagggtccgcaggggagccaaggcaacccagggagaaagggcgagaaaggctctcagggccagaaaggtccccagggctctcccgggcttatgggcgcaaagggatcaaccgggagacccggattgctagggaagaagggcgaaccaggactgccgggggatctgggacctgtaggacagacagggcagagaggacgacagggggatagtgggatccctgggtatggtcagatggggcgaaaaggtgtgaagggacccaggggttttcccggggatgccggtcagaagggggacatcggaaatcctggcatcccaggaggaccggggccaaaagggttcagagggcttgccctcactgtgggcttgaaaggtgaagaaggatcaaggggattgccaggccctcccggtcaacgcgggattaaaggcatggcaggacaaccagtttacagccagtgcgatctcattcgcttcttgcgagagcattcactgtgcagtcttgagaaatgtccagcctaccctaccgagctggttttcgcacttgacaatagctatgacgtgacggaggagagtttcaataaaaccagggatattattacctcaatagtgaacgatttgaatatcagagagaacaattgccctgtcggtgcacgcgttgcaatggtctcctacaattctggaaccagctatctaattcggtggtctgattacaaccggaaaaaacagttacttcagcagttgtctcagattaagtaccaggatactacagagccacgcgatgtcggcaatgccatgagatttgttactcggaatgtgttcaagcgcacttacgccggcgccaacgtccgacgagttgccgtctttttctcaaacggtcagaccgcttcacgcagttcaataattacagctaccatggaattctcagcacttgacattagcccgacagtctttgcgttcgatgagagggtcttcctcgaggcatttgggttcgacaatacaggcacctttcaggtaatacccgtgccccccaatggagaaaatcagacactcgaacgactgagacgctgtgccttatgttacgacaagtgtttccccaacgcatgcattcgcgaagcatttttacctgaagacagctacatggatgtagtctttctgatcgacaactcacgcaacatcgcaaaggacgagttcaaagctgtgaaagccttagtctcatctgttatcgataactttaatattgcgtctgacccgctgatttctgactccggtgataggatcgctttactctcctactcaccttgggagtcctcaagaagaaaaatgggaactgttaaaacagaatttgacttcattacatacgacaaccagcttctcatgaagaatcacattcagacctcttttcagcagcttaacggggaggcgacgataggtcgtgcgctattatggactactgaaaacctgttcccggagaccccctatctaagaaagcataaagtgatattcgtcgtttctgctggggaaaactacgagcgaaaagaattcgttaaaatgatggcgctgcgagcgaagtgtcaaggttacgtgatatttgttatctctcttggctcaacacgtaaggacgatatggaggagctagcttcctatcccctagatcagcacttaattcagctgggccgcatccataagccagatcttaattatattgccaagttcctaaaacccttcctctacagtgtgcgtagagggtttaatcagtatccccccccaatgttagaagatgcgtgccgactcattaatttaggcggtgaaaacatccagaatgacggctttcagttcgttacagaactccaggaagatttcctcgggggcaacggtttcatcggtcaagaactcaacagcggtagagaatctccatttgtgaagaccgaagataatgggtcagattatctagtttacttgccttcccaaatgttcgagccccagaagcttatgattaattatgagaaggaccagaaatctgccgaaattgccagtctaactagcggacacgagaactatggcaggaaagaggaacccgatcatacttacgaacccggagacgtcagcctccaggagtactatatggatgtagccttcttaattgacgcctcacagagggtgggttctgacgagttcaaggaggtcaaggctttcataacctctgttttggactatttccatatagccccgaccccattgacctccaccctaggtgacagagtcgctgttctgtcctattcccccccaggatatatgcccaataccgaagaatgccctgtttacctcgagttcgatctagtgacttacaattccattcatcagatgaaacaccacctgcaagattctcaacagttaaatggcgacgtgtttatcggccacgctttgcaatggacaatcgacaatgtctttgtgggtaccccaaatctgagaaagaataaagtgatatttgtcatcagcgctggcgaaaccaattcccttgacaaagatgttctccgaaatgtgtcattgagagcaaaatgccaaggatacagcatcttcgtgttttcatttggccccaagcacaacgacaaggagctagaagaactggcaagccatccacttgatcaccatctggtccaattaggacgcacacacaaacccgactggaattacatcattaagtttgtcaaaccattcgtgcatttgataaggagggccataaacaagtatcccactgaagacatgaaggcgacatgcgtgaacatgactagccctaaccctgagaatggaggaacggagaatactgtactgtggtag

SEQ ID NO: 245628 - RNA, 7581 nt, Artificial Sequence
  derived and/or modified sequence
augaaaauacugcugaucaucuucgugcuaauuaucuggaccgaaacucuagcagaucaaagcccuggucccggccccguauacgccgaugugguguuccuggucgauuccagcgaucaucuuggcccaaagucuuuucccuucgugaaaacauucaucaauaagaugaucaacucccuaccuauugaggccaacaaauaucguguagcacuugcccaguacagcgaugaauuccauagcgaguuucaucuguccacauucaaagggaggagcccuaugcuaaaucaccugaaaaaaaacuuccaguucauaggcggaucauugcaaauuggcaaggcccuacaggaggcucacagaacauacuucagcgccccaaucaauggcagggauaggaagcaguuuccacccaucuugguuguccuugccagugcggaaucugaggaugaggucgaggaagcuucuaaggcauuacagaaagauggcgugaagaucaucuccgugggcgugcagaaggcuucugaagaaaauuugaaggccauggcaacaucacauuuccauuuuaaccugcgcacaauccgggaccugucuacguucucccagaacaugacccagauuaucaaggaugugaccaaguauaaggagggggccguugacgcagacaugcagguccauuuccccauuagcugccagaaagacucacuggccgaccuuguuuuucugguggaugaaucauugggaacugggggcaaucugagacaccugcagacuuuccuugagaauauuaccuccucuauggaugugaaggagaauugcaugcgguugggccugaugaguuacuccaacuccgccaagacaauuuccuuccugaagagcuccaccacacaaucagaguuucagcagcagauaaagaaccuaucaauccaggucgggaaaagcaauacgggugcugccaucgaccaaaugcggagggauggcuucucugagagcuaugggucacgacgcgcucagggcguuccucaaauugcgguguuaguuacacacagacccagcgaugaugaaguucacgacgcugcauugaaccucagacuggaggauguaaaugucuuugcucucuccauccagggcgccaacaauacccaguuagaggagaucgucuccuauccacccgagcaaaccauauccacccugaagucauaugccgaccuugaaaccuauuccacuaaguucuuaaaaaagcugcagaaugaaaucuggagccaaauuaguacauacgcugaacaaagaaaccucgacaagacggguugugucgauaccaaagaggcugacauccauuuucucauugauggcucguccucuauccaggagaaacaguuugaacagauuaaaagauucaugcuggaggugaccgaaauguucucaaucggcccugacaagguaaggguggggguggugcaauauucugaugacaccgagguugaauuuuauaucacagauuauaguaacgauauugaccuccguaaggcuaucuucaacaucaagcagcugacuggcggcaccuacaccgggaaggcucuugauuacauccugcagaucaucaaaaacggaaugaaggacaggaugucuaaagugccaugcuaccugauuguguuaacugacggcaugaguaccgaccgcgucgucgagccggcaaaacgccucagagcugagcagauaaccguucacgcuguggggauuggugcugcaaauaagauagagcuccaggaaaucgcggguaaagaagaacgggucaguuucggccagaauuuugacgcacugaagaguauuaagaaugagguggugagggaaaucugcgcagagaagggaugcgaggacaugaaggccgauaucauguuccuagucgauuccucuuggagcaucgggaacgagaauuuccgaaagaugaagauauuuaugaagaaccuguugaccaaaauccagauaggggcugacaaaacccagauuggcgugguccaguuuucggacaaaaccaaagaggaauuccagcugaaucgcuacuucacgcagcaggaaaucuccgacgcuauugaucggaugagucuuaucaaugagggcacgcugacagguaaggcuuugaauuucgugggucaguauuucacacauucaaagggagccagauuaggggcuaaaaaguuucugauacuaaucacggacgggguggcccaggaugacguaagagacccugcccgcauucugcgaggaaaagacguuaccauuuuuuccgucggggucuacaacgcuaacagaucccagcuggaagagauauccggugacucaucucuggucuuccacgucgaaaauuucgaccaccugaaggcgcuggaacgcaaacugauuuuuagaguuugcgcucuacaugauuguaagcggaucacucuacuggacguuguauuugugcuugaucacucugggucuaucaagaagcaauaccaggaccacaugaucaaucuuacgauucaccugguuaagaaagccgaugugggucgugaccgaguacaguucggggcccuuaaauauucugaccagccaaauauucucuucuauuugaacacauacuccaauagaucagcaaucauagaaaaccugcggaaaagaagggacacaggcggcaacacauacaccgcgaaggcccucaagcaugcuaaugcccuguucaccgaggagcacgguagucgcaucaaacagaauguaaaacagaugcugaucgucaucaccgauggagagucccaugaucaugaccagcugaaugacacggcuuuagaguugcguaauaaaggcauaaccauuuucgccgugggugucggcaaagcgaaucaaaaagagcuggaaggaauggcaggcaacaagaacaauaccaucuacgucgacaacuucgacaaacugaaagacguguuuacucugguacaggagaggauguguaccgaggccccggaagugugccacuugcaagaggccgauguuauuuuccucugugacgguuccgacagggucuccaacagcgauuuugucacuaugacaaccuuucuuagcgaucucaucgauaauuucgauauucaaagccagaggaugaagaucggaauggcgcaguuugggucuaacuaucagagcauuauugaacugaaaaauucuuugacaaaaacccaauggaagacacaaauucagaacguuucuaagucaggaggguucccccgcauugauuucgccuuaaaaaaggugucuaacauguucaaccuccaugcggggggacggcgaaacgcuggggugccccagacucucguugucaucacuucaggcgacccacgcuacgacguagccgaugccguuaaaacucucaaagaucucggcauauguguucucgugcugggcauuggugacguuuauaaggagcaccuuuugcccauaaccggcaauagcgaaaagauuaucacauuccaggacuucgacaaacugaaaaauguggacguuaaaaagcgaaucauacgagagaucugucagucuuguggcaaaaccaauuguuuuauggacauagugguggguuucgauauuucuacgcaugugcaagggcagccucuguuccagggccacccccagcuggagagcuaccuccccgguauccucgaagacaucagcucgauuaaaggaguaaguugcggagcgggcacugaagcccaagugaguuuggcuuuuaaggugaacucugaucagggauuccccgccaaguuucagauuuaucaaaaggccguguuugacucacuccugcaggucaauguuagcggcccuacccaccuaaaugcccaguuccuuagaucccugugggauacuuucaaggacaaaucugcgagccgcggacagguccuguuaauuuucucugauggccugcaguccgaaaguaauaucaugcucgaaaaccagagugacagacugagagaagccggacuugacgcgcuccugguuguuucgcugaacacuacggcccaucacgaguucucaagcuucgaauucggaaaaagguuugacuacagaacccaucugacuauuggaaugagggagcuggggaaaaaacugucccaguauuugggcaauaucgccgagaggacaugcuguugcacuuuuuguaaaugcccuggcauuccuggcccccauggaacgaggggauuacaggcaaugaagggcagccagggacuaaaggggagccggggccaccggggggaagauggaaaccccggcgugagaggagauacugguccccagggggacaaaggaauugcuggaugucccggagcuugggggcaaaagggucugaaaggguucagcgggccgaagggagggcacggugaugauggaauugacgggcuggacggcgaagaagguugucaugguuuucccggcauuaaaggggagaagggugacccaggcucucagggaagcccaggaucuagaggagcaccaggacaauacggggaaaaaggauuuccuggggauccagguaauccagggcagaacaacaauauuaaggggcagaagggaucaaagggggagcaggguaggcagggccguucugggcaaaaagggguccaggggagcccuuccaguagggggucacgaggacgggagggccagcgugggcuuagaggagucucgggggagccaggcaaucccggcccaacugguacacuaggugcagagggccugcaggggccucaggggagccaggggaaucccgguagaaagggagaaaagggcucucaagggcagaaggguccacagggcagccccggguugaugggagccaaggguagcacaggaaggccggggcugcuuggcaagaagggggaaccagggcuccccggggacuugggucccgucggacagacgggucaaaggggccgccagggagacucaggcauacccggguauggccaaaugggaaggaaggggguaaaagggcccagaggauucccuggagaugcuggacaaaagggagauaucggaaauccaggcauuccaggcggcccagguccuaaagguuucagagguuuggcacuuacugugggcuugaaaggagaggagggaucaagggggcucccuggcccacccggacagagagguauaaaggguauggccgggcagccuguuuacucucagugugaccugauucgcuuccugcgcgagcauucucuaugcucacuggagaagugcccugccuauccuacugaacuagucuucgcgcuggacaauagcuaugaugucacugaggagucguuuaauaaaacacgcgauauaauuaccagcaucgugaacgaccugaauauaagagaaaacaauugucccgucggcgccagaguggcaauggugagcuacaacagugggacauccuaucugauucgauggucugauuacaacaggaagaaacaauugcuccagcagcugucgcagauaaaauaucaggacaccacugagccucgagacgucgguaacgcaaugagguuugugacacggaacguuuuuaaacggacauacgcuggagcuaacguuaggaggguugcaguuuuuuuuuccaacggucagacugccucuagaaguagcauaaucacugcuacaauggaauucucugccuuggacauuagccccacaguguucgcguucgacgaacgcguauuccucgaggcguuuggguucgauaacacaggcacguuccaggugauaccuguuccaccaaauggcgagaaccagacgcuggagagacuucgacggugugcucucuguuaugauaagugcuuuccaaaugccugcauccgcgaagcuuuucugccugaggacagcuacauggauguuguguuccugauugauaacagucgaaacauugcaaaagacgaguucaaggcgguuaaagcucuaguuuccucagugauugacaacuucaauauagccagcgauccucuuauuucagacuccggcgaccgcauagcacuccuaaguuacucaccuugggaaucgagcagacgcaaaaugggaaccguaaagacggaguuugacuucauuaccuaugacaaccaacuucugaugaagaaccauauccagacauccuuucagcagcugaacggugaagccacaauuggucgggcucuuuuauggacuacagaaaaccucuuuccugaaacccccuaccuccgaaaacacaagguaauuuucguuguguccgcuggugagaacuaugagaggaaggaguucgugaagaugauggcgcugcgagcgaagugucaagguuacgugauauuuguuaucucucuuggcucaacacguaaggacgauauggaggagcuagcuuccuauccccuagaucagcacuuaauucagcugggccgcauccauaagccagaucuuaauuauauugccaaguuccuaaaacccuuccucuacagugugcguagaggguuuaaucaguauccccccccaauguuagaagaugcgugccgacucauuaauuuaggcggugaaaacauccagaaugacggcuuucaguucguuacagaacuccaggaagacuuuuuaggcggaaaugguuucauaggccaggaauugaacaguggccgugaaucaccguucgugaaaacagaggauaaugguagugauuaccugguguaucugcccucucaaauguuugagccacagaagcugaugaucaauuaugagaaggaccagaagucugcagagauugccucucucaccucggggcaugaaaacuacggccggaaggaggagcccgaucauaccuacgagcccggcgacguuagccuccaagaguacuacauggacguggcuuucuuaaucgacgcaagccagcgugucggaucugacgaauucaaggaggugaaggcuuucauuacuucuguucuggacuauuuccacauugcgccgaccccgcugaccucuacccucggagaucgcguggcagugcuuagcuacucuccucccggcuacaugcccaauacugaagaaugucccguguaccuggaguucgaucugguuacuuauaauucuauccaccagaugaagcaucacuugcaggacucucagcaguuaaauggcgacguguucauuggccacgcacuccaguggaccaucgacaauguguucguaggcacgccuaaccugaggaaaaauaaagugauauucgugauaagcgcgggagagacgaauucacuggauaaggauguguugaggaauguuucccuccgggccaagugucaaggcuauagcaucuucguuuucucauuugguccuaaacacaacgacaaggagcucgaggaacuggcaucucauccucuggaucaccaccuagugcagcuagggcggacccacaagccggauuggaauuacaucaucaaguucguaaagccuuuugugcaccucauacgccgggcaauuaacaaauaccccaccgaagacaugaaagccacgugcgugaacaugacuagcccaaacccugagaacggaggcaccgagaacaccgugcuuugguag

SEQ ID NO: 245629 - RNA, 7581 nt, Artificial Sequence
  derived and/or modified sequence
augaaaauacuccucauuaucuucguuuugaucaucuggaccgagacucucgcagaucaaucuccuggcccgggacccguauacgcugacgugguguuccucgucgacucgagcgaccaccuuggcccaaagagcuuucccuuugugaaaacauucauuaauaaaaugauaaauagucugccuauagaagcaaacaaauaccgagucgcauuggcccaguauucugaugaguuucacucggaauuccaucucucaaccuucaaaggacgcucaccaaugcuuaaccacuuaaaaaagaacuuucaguucaucggaggaucucugcaaauuggcaaggcucuccaggaagcacaccggacuuacuuuuccgcaccuauuaacggacgcgaccgcaagcaguucccuccuauucuuguuguccuggccagcgcugagagcgaggacgagguggaagaagcaagcaaggcucuccagaaggauggagucaaaauuaucucggucggagugcaaaaggcuagcgaggagaaucuaaaagcuauggcuaccucucauuuucauuucaaucugagaacaauucgugaccuguccacauucagccaaaacaugacgcagauuauuaaggacgucacaaaguacaaggaaggagcgguggaugccgacaugcaggugcacuuuccaaucagcugucaaaaagauucucuugcugaucugguauuccucguggaugagagcuuaggaaccggcggcaaccugcgacaccugcagacuuuuuuagaaaacauaacgaguucaauggaugugaaagagaauugcaugagguuaggccugaugaguuauaguaauucagcgaagacaauauccuuucugaaaagcucaacaacccaaucagaguuccagcagcagauaaaaaacuuaucuauucaggucggaaagucuaauacgggcgcagcgauagaucagaugagacgagauggcuuuucugaauccuauggcagcaggcgagcccaggggguuccacagauagcagucuuggugacacacagaccuucagaugacgaggugcacgaugcugcauugaacuuaagacuugaagacgugaacguguucgcuuuaucgauucagggcgcuaauaacacacagcuugaggagauuguaucauacccucccgagcagacgauuucaacucucaaaucuuacgcugaucuggagacuuacagcacaaaauuuuuaaagaagcugcagaacgagaucuggucccaaauuucuacuuacgccgaacagcggaaucuagacaagaccggguguguggauacgaaagaggcggacauacacuuccuaaucgaugggucauccuccauucaagaaaaacaguucgaacagaucaaaagguucaugcuggagguuacugaaauguucucuauugguccggauaaggucaggguggguguggugcaauauucugaugauaccgaggucgaauucuauauuacugauuacaguaacgacaucgaucuacgcaaggccauuuucaacauaaaacaacucacuggagggacauacacaggcaaggcucuugacuacauucuccagaucaucaagaacggaaugaaagaccgcaugagcaaggugccuuguuaccugauugugcugaccgaugguaugagcacugacagggugguagagccagcaaagcgacuaagggcugaacagaucacagugcacgccguaggaaucggugcugcgaauaagauagaguugcaggaaaucgcuggaaaggaggagaggguaucauuuggacaaaauuuugaugcucugaaguccauuaagaacgaagucguccgggaaauuugugccgagaaagggugcgaagacaugaaagccgacauuauguuucucguugacuccucuuggucuauuggaaacgaaaauuuuagaaaaaugaagaucuuuaugaaaaaucuccugacaaaaauucagauuggagccgacaagacacagauuggaguggugcaguuuagcgacaagacuaaggaggaguuucaguugaaucgauacuucacccagcaggaaaucucugaugcaaucgaccgaaugucgcugaucaaugaggggacucugaccggcaaggcuuuaaauuuuguugggcaguauuuuacccauucgaaaggcgccagacugggcgcgaagaaguuccuuauccugaucaccgauggcguggcacaggaugauguucgcgauccagcccgcauccugagagguaaagauguuaccauauucucuguugguguauauaaugccaaccgcucccagcuugaagaaauuucaggugauuccaguuuaguuuuucacguagagaacuuugaccaucuuaaggcacuagaaagaaaacugauuuuuagggugugugcccugcaugacuguaaaaggaucacucuacuggaugucgucuuuguccuugaccauuccggguccauuaaaaaacaauaccaagaucacaugauaaaccuaacuauacaucuugugaagaaagcugacgucggccgcgaucgaguucaguucggagcacugaaauauucggaucaaccaaacauacuguucuacuuaaauaccuauucgaacagaucugccaucaucgagaaucuacgcaaaagaagagacacaggaggaaacaccuacacagccaaagcucuaaagcaugccaacgcccuauucacagaggaacauggcucccgaaucaaacagaacgugaagcaaaugcuaauugugauaacugauggagagucucaugaucaugaucagcugaacgauaccgcucuggaacugagaaacaagggcauuacuauauuugccgucggcgugggaaaagcaaaucagaaggagcuggaagggauggccgguaauaaaaacaauacuauuuauguugacaauuuugacaaguugaaagacgucuucacccugguucaagaacgcaugugcacugaggcccccgaagugugccaccugcaggaggcugauguaaucuuucuaugcgacgguuccgacagggucuccaauuccgauuucgucaccaugacuacauuucuuucggaucuuaucgacaacuuugauauccagucccagcggaugaagaucggcauggcccaauuuggcagcaauuaccaaagcauaaucgaacuuaagaacagcuugaccaaaacccaauggaaaacacagauucagaacgugucgaaaucuggaggauuccccagaauagauuucgcccucaaaaaggugucaaauauguuuaacuugcacgccggggggagacggaaugcuggugugccccagacuuugguagugauuaccaguggcgauccucgauacgacguggcugaugcugugaagacucugaaggaccucggaaucuguguucuggugcuugguaucggagaugucuauaaggaacaucuguuaccuauaacagggaacucugagaaaauuauuacuuuccaggauuucgacaagcugaaaaacguggaugugaaaaagagaauuauaagggaaaucugucagagcugcggaaagacaaacugcuuuauggauaucgugguuggcuucgauauuucuacccacguucagggucaaccauuguuccaggggcacccucaacuggagucuuaccucccagggauacucgaggacauaagcaguauuaaaggggugucaugcggugccggcaccgaggcccaaguuucuuuggccuuuaaagugaacuccgaucagggauucccagcaaaauuccaaauuuaccagaaagcaguguuugauagccuccuccaaguuaacgugucgggcccuacccacuuaaaugcucaauuucuucgcucucugugggacacuuucaaagauaaaagcgcuucccgcggccaggucuuguugauuuucagcgaugggcugcagucggaguccaauaucaugcuagaaaaucaguccgauagacuacgggaagcugguuuggacgcccugcugguagucagccugaauacaaccgcccaucaugaguucuccuccuucgaguuuggcaaacgguuugauuaucgcacgcauuugacaauugguaugagagaguugggaaaaaaguugucacaauaccucggaaauaucgcugaacgcacuuguuguuguacuuucuguaagugucccggcauacccggaccccacggaaccagaggacugcaggcuaugaagggaucacaggggcugaagggcucgcgcgggcacaggggggaagacgggaaucccggggugaggggagauacggggccucagggggauaaagggauugccggcugcccgggggcauggggacagaaaggucucaaaggauuuaguggcccaaagggugggcacggagacgacggaauagaugguuuggauggagaagaggggugccacggauucccaggaaucaagggggaaaaaggugauccagggucccaaggaucaccaggcuccagaggggcaccagggcaguauggggaaaaaggguuccccggagaucccggaaauccaggacagaacaauaacaucaaggggcagaagggcucuaaaggagaacaagguaggcagggaaggaguggucagaaaggggugcaaggguccccaagcagcagggguuccaggggucgugaggggcagcgagguuugagaggcgucagcggagagcccgguaauccuggcccgaccgguaccuuaggcgccgaagggcuccaggguccgcaggggagccaaggcaacccagggagaaagggcgagaaaggcucucagggccagaaagguccccagggcucucccgggcuuaugggcgcaaagggaucaaccgggagacccggauugcuagggaagaagggcgaaccaggacugccgggggaucugggaccuguaggacagacagggcagagaggacgacagggggauagugggaucccuggguauggucagauggggcgaaaaggugugaagggacccagggguuuucccggggaugccggucagaagggggacaucggaaauccuggcaucccaggaggaccggggccaaaaggguucagagggcuugcccucacugugggcuugaaaggugaagaaggaucaaggggauugccaggcccucccggucaacgcgggauuaaaggcauggcaggacaaccaguuuacagccagugcgaucucauucgcuucuugcgagagcauucacugugcagucuugagaaauguccagccuacccuaccgagcugguuuucgcacuugacaauagcuaugacgugacggaggagaguuucaauaaaaccagggauauuauuaccucaauagugaacgauuugaauaucagagagaacaauugcccugucggugcacgcguugcaauggucuccuacaauucuggaaccagcuaucuaauucgguggucugauuacaaccggaaaaaacaguuacuucagcaguugucucagauuaaguaccaggauacuacagagccacgcgaugucggcaaugccaugagauuuguuacucggaauguguucaagcgcacuuacgccggcgccaacguccgacgaguugccgucuuuuucucaaacggucagaccgcuucacgcaguucaauaauuacagcuaccauggaauucucagcacuugacauuagcccgacagucuuugcguucgaugagagggucuuccucgaggcauuuggguucgacaauacaggcaccuuucagguaauacccgugccccccaauggagaaaaucagacacucgaacgacugagacgcugugccuuauguuacgacaaguguuuccccaacgcaugcauucgcgaagcauuuuuaccugaagacagcuacauggauguagucuuucugaucgacaacucacgcaacaucgcaaaggacgaguucaaagcugugaaagccuuagucucaucuguuaucgauaacuuuaauauugcgucugacccgcugauuucugacuccggugauaggaucgcuuuacucuccuacucaccuugggaguccucaagaagaaaaaugggaacuguuaaaacagaauuugacuucauuacauacgacaaccagcuucucaugaagaaucacauucagaccucuuuucagcagcuuaacggggaggcgacgauaggucgugcgcuauuauggacuacugaaaaccuguucccggagacccccuaucuaagaaagcauaaagugauauucgucguuucugcuggggaaaacuacgagcgaaaagaauucguuaaaaugauggcgcugcgagcgaagugucaagguuacgugauauuuguuaucucucuuggcucaacacguaaggacgauauggaggagcuagcuuccuauccccuagaucagcacuuaauucagcugggccgcauccauaagccagaucuuaauuauauugccaaguuccuaaaacccuuccucuacagugugcguagaggguuuaaucaguauccccccccaauguuagaagaugcgugccgacucauuaauuuaggcggugaaaacauccagaaugacggcuuucaguucguuacagaacuccaggaagauuuccucgggggcaacgguuucaucggucaagaacucaacagcgguagagaaucuccauuugugaagaccgaagauaaugggucagauuaucuaguuuacuugccuucccaaauguucgagccccagaagcuuaugauuaauuaugagaaggaccagaaaucugccgaaauugccagucuaacuagcggacacgagaacuauggcaggaaagaggaacccgaucauacuuacgaacccggagacgucagccuccaggaguacuauauggauguagccuucuuaauugacgccucacagaggguggguucugacgaguucaaggaggucaaggcuuucauaaccucuguuuuggacuauuuccauauagccccgaccccauugaccuccacccuaggugacagagucgcuguucuguccuauucccccccaggauauaugcccaauaccgaagaaugcccuguuuaccucgaguucgaucuagugacuuacaauuccauucaucagaugaaacaccaccugcaagauucucaacaguuaaauggcgacguguuuaucggccacgcuuugcaauggacaaucgacaaugucuuuguggguaccccaaaucugagaaagaauaaagugauauuugucaucagcgcuggcgaaaccaauucccuugacaaagauguucuccgaaaugugucauugagagcaaaaugccaaggauacagcaucuucguguuuucauuuggccccaagcacaacgacaaggagcuagaagaacuggcaagccauccacuugaucaccaucugguccaauuaggacgcacacacaaacccgacuggaauuacaucauuaaguuugucaaaccauucgugcauuugauaaggagggccauaaacaaguaucccacugaagacaugaaggcgacaugcgugaacaugacuagcccuaacccugagaauggaggaacggagaauacuguacugugguag

SEQ ID NO: 245630 - protein, 468 aa, Artificial Sequence
  derived and/or modified sequence
MPEDGAGDGGEVPALIPDGEPLREEQRPLKQSLGSSLCRESHWKCLLLTLLIHACGAVVAWCRLATVPRLVLGPEAALARGAGGPPPTYPASPCSDGYLYIPLAFVSLLYLLYLAECWHCHVRSCQAPRTDAHTVLALIRRLQQAPPCVWWKATSYHYVRRTRQITRYRNGDAYTTTQVYHERADSRTARGEFDYSAHGVRDVSKELVGLAEHAATRLRFTKCFSFGSAEAEASYLTQRARFFSANEGLDDYLEAREGMHLKDVDFRESLMVFADPRSPPWYARAWVFWLVSAATLSWPLRVVAAYGTAHVHYQVEKLFGASSPPPGAVPSGPPLSRVATVDFTELEWHICSNRQLVPSYSEAVVMGAGSGAYLRGCQRCRRSVSSNSLPPARPSGPRLPFSRSRLSLGAGGRATPGVFRSLSGGPLGRRGEDTEPLESPPCYEDALYFPVLIVHGDSGCQGDGQGAL

SEQ ID NO: 245631 - DNA, 1407 bp, Artificial Sequence
  derived and/or modified sequence
atgcccgaggacggcgccggcgacggcggcgaggtgcccgccctgatccccgacggcgagcccctgagagaggagcagagacccctgaagcagagcctgggcagcagcctgtgcagagagagccactggaagtgcctgctgctgaccctgctgatccacgcctgcggcgccgtggtggcctggtgcagactggccaccgtgcccagactggtgctgggccccgaggccgccctggccagaggcgccggcggccccccccccacctaccccgccagcccctgcagcgacggctacctgtacatccccctggccttcgtgagcctgctgtacctgctgtacctggccgagtgctggcactgccacgtgagaagctgccaggcccccagaaccgacgcccacaccgtgctggccctgatcagaagactgcagcaggcccccccctgcgtgtggtggaaggccaccagctaccactacgtgagaagaaccagacagatcaccagatacagaaacggcgacgcctacaccaccacccaggtgtaccacgagagagccgacagcagaaccgccagaggcgagttcgactacagcgcccacggcgtgagagacgtgagcaaggagctggtgggcctggccgagcacgccgccaccagactgagattcaccaagtgcttcagcttcggcagcgccgaggccgaggccagctacctgacccagagagccagattcttcagcgccaacgagggcctggacgactacctggaggccagagagggcatgcacctgaaggacgtggacttcagagagagcctgatggtgttcgccgaccccagaagccccccctggtacgccagagcctgggtgttctggctggtgagcgccgccaccctgagctggcccctgagagtggtggccgcctacggcaccgcccacgtgcactaccaggtggagaagctgttcggcgccagcagccccccccccggcgccgtgcccagcggcccccccctgagcagagtggccaccgtggacttcaccgagctggagtggcacatctgcagcaacagacagctggtgcccagctacagcgaggccgtggtgatgggcgccggcagcggcgcctacctgagaggctgccagagatgcagaagaagcgtgagcagcaacagcctgccccccgccagacccagcggccccagactgcccttcagcagaagcagactgagcctgggcgccggcggcagagccacccccggcgtgttcagaagcctgagcggcggccccctgggcagaagaggcgaggacaccgagcccctggagagccccccctgctacgaggacgccctgtacttccccgtgctgatcgtgcacggcgacagcggctgccagggcgacggccagggcgccctgtag

SEQ ID NO: 245632 - DNA, 1407 bp, Artificial Sequence
  derived and/or modified sequence
atgcctgaggacggtgccggggacggaggtgaggttccagcccttatccctgacggcgaaccacttagagaagagcagcgtcctctgaaacagtccctaggctcgtctctgtgtagggagagtcactggaaatgtctcttgctgactctactgatccatgcctgcggagccgtcgtggcgtggtgcaggctcgccaccgtgccacgcctggtgttggggcctgaagctgcactggcccgaggagcgggcggacctccccctacatatccagcttcaccatgctctgatggttatctgtacattccgctggcttttgtctcccttctgtacctcctctatcttgccgagtgttggcattgccacgttagaagctgccaggcgccacggaccgatgctcacacagtgctagctttgattaggcggctgcagcaggctcccccctgtgtgtggtggaaggccacctcttaccattacgtgcgccgtaccagacagattactagatacaggaatggtgatgcgtatacaaccacccaagtgtatcacgagcgagctgatagtcgaaccgctcggggggagtttgactactctgcccatggcgtgcgcgatgtgtctaaggaactcgtaggacttgctgagcacgccgccacgcgcctgcgtttcactaaatgcttcagctttggatccgcggaggctgaagcttcctatctgacccagcgggcaagattttttagcgccaacgaaggattagacgactacctcgaggcccgcgaagggatgcatctcaaggatgtggattttcgcgaaagtctgatggtgttcgccgacccaaggtctcctccctggtacgcccgagcttgggttttttggctcgtatccgctgccactctgtcatggcctctccgagtggtggctgcctacggcaccgcacacgttcactaccaggtggagaagctgtttggtgcctcaagcccacccccaggtgcagtgccttctgggccgccgctctcaagggttgccactgttgatttcaccgaactcgagtggcacatctgttctaataggcagctcgtgccctcttactccgaagcggttgtgatgggtgcaggcagcggggcttacctacggggatgtcagaggtgcagacgcagcgtgtcttcaaattcacttccgcctgcaaggcctagcggacctcgcctgcccttcagccgctcaagactctcactgggtgcaggagggcgcgcaacaccaggggtcttccggagcctcagtggcggccctctgggacggcggggtgaggacactgagccgctggaatctcccccctgctacgaggacgccttgtacttcccagtcctgattgtgcatggcgactcaggatgccaaggggatgggcagggggctctttag

SEQ ID NO: 245633 - DNA, 1407 bp, Artificial Sequence
  derived and/or modified sequence
atgccagaagatggagctggagatggaggagaggtgcctgccctgatcccagatggagagcccctgcgggaggagcagaggcccctgaagcagagcctgggcagcagcctgtgccgggagagccactggaagtgcctgctgctgaccctgctgattcatgcctgtggggctgtggtggcctggtgccgcctggccaccgtgccccggctggtgctgggccctgaggccgccctggcccggggggccggcggccccccacccacctacccagccagcccctgcagtgatggctacctgtacatccccctggcctttgtgtccctgctgtacctgctgtacctggccgagtgctggcactgccacgtgcgcagctgccaggcccccaggacagatgcccacacagtgctggccctgatccggcggctgcagcaggccccaccctgtgtgtggtggaaggccaccagctaccactacgtgcggaggacccggcagatcacccgctacagaaatggagatgcctacaccaccacccaggtgtaccacgagagagctgacagcaggacagcccggggggagtttgactacagcgcccacggcgtgagagatgtgtccaaggagctggtgggcctggccgagcacgccgccacccggctgcgcttcaccaagtgcttctcctttggcagcgctgaggccgaggccagctacctgacccagagggcccgcttcttcagcgccaatgaaggcctggatgactacctggaggcccgggagggcatgcacctgaaggatgtggacttccgggagagcctgatggtgtttgctgaccccaggagccccccctggtacgcccgggcctgggtgttctggctggtgtctgctgccaccctgtcctggcccctgcgggtggtggccgcctacggcacagcccacgtgcactaccaggtggagaagctgtttggagccagcagccccccacctggagctgtgcccagcggcccccccctgagccgggtggccaccgtggacttcacagagctggagtggcacatctgcagcaaccggcagctggtgcccagctacagcgaggccgtggtgatgggcgccggcagcggggcctacctgcggggctgccagcgctgcagaagatctgtgagcagcaacagcctgcccccagcccggcccagcggcccccggctgcccttcagccgcagccggctgagcctgggcgctgggggccgggccaccccaggagtcttccgcagcctgagcggcggccccctgggcagaagaggagaggacacagagcccctggagagccccccctgctatgaagatgccctgtacttccctgtgctgattgtgcatggagacagcggctgccagggagatggccagggcgccctgtag

SEQ ID NO: 245634 - DNA, 1407 bp, Artificial Sequence
  derived and/or modified sequence
atgcccgaggacggcgccggcgacggcggcgaggtgcccgccctgataccagacggcgagccgcttcgcgaagagcaacgcccactgaagcaatctctcggctcttctctatgtcgtgaaagccattggaaatgcttactgcttacgctgctgattcacgcgtgtggggcggtagtagcctggtgtagactcgccaccgtgccacgcttggtgctgggtcccgaggcggccttggctcgaggagctggcgggccaccccccacctatcccgcgtccccttgctctgacggatacctttatatacctctggcctttgtaagtctgctgtacctcctgtacctggctgaatgctggcattgccatgtgcgaagctgtcaggcccccagaaccgatgcacacacggtgctggctttgatccgtaggctgcaacaagcacctccttgtgtctggtggaaggccacctcatatcattatgttaggagaacacgtcagattacgcgttatcggaacggtgacgcttatacaactacacaagtgtatcatgaaagagcagactccagaaccgcccgaggcgaatttgactattctgctcatggcgtgcgcgatgtcagcaaagagctcgtggggctggccgaacacgccgctaccaggctacgtttcaccaagtgtttctcgttcggtagcgccgaggcggaagccagttacctaacacagagagcgaggttcttttctgcaaacgagggcctggatgactacctagaggccagagaggggatgcacctgaaagatgttgactttagggagagcctcatggtcttcgccgacccccgctcgccaccttggtatgctcgcgcctgggtattttggctcgtctccgctgctacactctcttggccgctgagggtggtggccgcctatggtaccgcccatgtgcactatcaggtggagaaactcttcggcgcctcctcacccccgccaggggccgtgcctagtggacccccgttatcacgagtggcgacagttgacttcaccgaattggaatggcatatctgcagtaacaggcagctcgtcccttcatactccgaagccgtggtgatgggcgcgggctctggagcatacctgcggggttgtcagagatgtagaaggtcagtgtcttccaattctctgcccccggcgcgaccctcggggcctcgattaccatttagccgatcgcgcctcagcctcggtgccggcggtcgggcgacccccggcgtctttaggagcctgtcaggggggcccctgggcaggcgcggcgaagataccgagcctttggaatcgcctccatgctacgaggatgccctttactttcccgtgctgatagtgcatggagatagcggctgccaaggggatggccagggagctctatag

SEQ ID NO: 245635 - DNA, 1407 bp, Artificial Sequence
  derived and/or modified sequence
atgcccgaggatggtgccggagatggcggagaggttcctgccttgatccccgatggagaaccactaagggaggaacagcggccactgaaacagtcactgggcagtagcctttgcagggagtcacactggaaatgtctgctcctgactctgctgattcatgcctgcggggcagtcgttgcctggtgtcgcttggcaactgtgcctcgcctggtgctggggcctgaagcagctctggcccgaggggctggcggacccccacccacatatcctgcctcaccttgctctgacggatacctgtatatccccctggcattcgtttctctactgtaccttctgtacctagcagaatgttggcactgccatgtgcgatcttgccaggccccacggactgacgcgcataccgtcctggctctgattcgtcgtttgcagcaagcgcctccttgcgtgtggtggaaggccacatcataccactacgtgaggcgaacccgccagatcacaaggtataggaacggtgatgcgtatacgactactcaagtttaccacgagcgcgcagactctagaacagcaaggggtgaatttgactacagcgcccacggcgtgagggatgtgtccaaggaactcgtcggattggctgagcacgcagctactcgactgaggttcacgaaatgcttcagcttcggaagcgccgaggccgaagcttcctaccttacgcagcgtgctaggtttttctcggcaaatgagggtcttgacgactatttagaggcacgcgaggggatgcatctgaaggacgtggacttcagagagtctctgatggttttcgctgaccccaggagtccaccttggtacgctcgtgcctgggtgttttggttagtcagtgccgctactctgtcttggccacttcgggttgttgctgcttatggcactgcccatgtgcattaccaagtggagaaactctttggggcttcctctcctccgccaggagcagtgccctcggggccaccgctgtcccgggtggccaccgtggacttcaccgagctggagtggcatatctgcagcaaccgccagctcgtcccgtcttacagcgaggctgttgtgatgggagccggttcaggggcatacctgagaggatgccagcgctgccgtaggtccgtctcaagcaatagtctccccccagccaggccatctggacctcggctccctttctccagatcaaggctcagtttaggagctggcggaagagcgacaccaggcgttttccgatccctttcaggaggaccgttgggtagacggggtgaagatactgagccgcttgagtcgcccccttgctacgaggacgctctgtacttccctgttctgatcgtacatggtgatagtggctgtcagggggatggccaaggcgctctctag

SEQ ID NO: 245636 - DNA, 2562 bp, Artificial Sequence
  derived and/or modified sequence
gccgcgctcgggctcgagctccgcgcactccctccgcggccgctgagccgagcggacgcccccgggggccgcgtcgcagccctccgtgctcccccctatcatgcccggtgcccaggctggggccgcccaagcagccaggacaccatgcccgaggacggcgctggcgacggcggggaggtgcccgcgctcatcccggacggcgagccgctgcgggaagagcagcggcccctgaaacagtccctgggaagctccctgtgccgcgagtcgcactggaagtgcctgctcctcacgctgctcatccacgcctgcggggccgtggtggcctggtgtcgcctggccacagtgccgcggctggtcctggggcccgaggccgccttggcccggggagccgggggcccgccaccgacctacccggccagcccctgctccgatggctacctgtacatcccgctggccttcgtctccctcctctacctcctctacctggctgagtgctggcactgtcacgtgcggtcctgccaggcgccacgcaccgacgcccacacggtgctggcgctgatccgccggctgcagcaggcgccgccgtgcgtctggtggaaggccaccagctatcactacgtgcggcgcacacgccagatcacgcgctaccgcaacggcgacgcctacaccaccacgcaggtgtaccatgagcgcgctgacagccgcacggcccgcggcgagtttgactactcggcgcacggcgtccgcgacgtctccaaggagctggtggggctggcggagcacgcggccacgcggctgcgcttcaccaagtgcttcagcttcggcagcgcggaggccgaggcctcgtacctcacgcagcgggcgcgcttcttcagcgccaacgagggcctggacgactatctggaggcgcgcgagggcatgcacctgaaggacgtagacttccgcgagtcgctcatggtcttcgccgacccccgcagcccgccctggtacgcgcgcgcctgggtcttctggctcgtgtcggcggccacgctgtcgtggcccctgcgcgtcgtggccgcctatggcacggctcacgtgcactaccaggtggagaagctctttggcgccagctcgcccccgccgggggccgtgcccagcgggcccccgctgtcccgcgtggccacagtggacttcactgagctcgagtggcacatctgctccaaccggcagctggtgcccagctactcggaggccgtggtcatgggcgcgggctcgggcgcctacctcagaggctgccagcgctgccgccgctctgtcagcagcaactcgctgccccccgcccggcccagcgggccccgcctgcccttcagccgcagccgcctctcgctgggcgctggcggccgggccacgccaggggtcttccgcagcctgagcggggggccgctggggcgccgtggagaggacacggaacccctggagagcccgccctgctatgaggacgccctctacttcccggtgctcattgtccacggagacagcggctgccagggggatgggcagggtgctctctgagaccccccacggcccccagagtggccccctccccaccattccaccatgggcttagatgcccgagtgattgttgtccaaaacaggcgggaaaacagaccagccacacacaaggggcaggggtgagggtgggggtgggggtccttaaacagactaaaatgcagttacctgtggtcattttggaggaagtggaagcctaagaatcgcccccagcatggcttcatcccccaagatggccgatgatctggcctgaaggcctctcacaaagggcaggagaagaagcttccagaaaggctgggatggaggaggagtcctgcggccagctgttgcctgcagcagaggctgcctgtggacacttccctaccggggctgaggccatgctgggagcccccccagtgacgcagaagcacaaattggaggcttggggccatgcccagccaggttggcttccctggggctgaagagctggctgtggtggcaccatggccttggccctgctactcacccaacattcccatcctcccctgataggcccctcctccttgcctgccctctctcccgctgctcagggccagtcactccccccacatgcagctacccctacaacctggggttccttctcagggcctcacctggtccccacatcccctggcctctgctcctgcctcccaaagtccatgtctgcctccatcagccacacacacgcagggacgcccgttccttgccctcccggacttatctactcttcactttcctgatgatccatggggcccaggcctagagggcatccgaggggctgggccttggccacagcctcttggatgatgtccttgctccaccacgcaggcccttgcttctcccatcaacgagtcttggcccaggggacactgaccctcccccagggaggagagaggagttccttccctttcaacgagggcttccacgccctctaaggggtggcggggaagggaggaggctgagaagatgcagattaaataaaggtatggaatggaa

SEQ ID NO: 245637 - protein, 304 aa, Artificial Sequence
  derived and/or modified sequence
MLAVRKARRKLRMGTICSPNPSGTKTSSEVCNADWMASLPPHLHNLPLSNLAIPGSHDSFSYWVDEKSPVGPDQTQAIKRLARISLVKKLMKKWSVTQNLTFREQLEAGIRYFDLRVSSKPGDADQEIYFIHGLFGIKVWDGLMEIDSFLTQHPQEIIFLDFNHFYAMDETHHKCLVLRIQEAFGNKLCPACSVESLTLRTLWEKNCQVLIFYHCPFYKQYPFLWPGKKIPAPWANTTSVRKLILFLETTLSERASRGSFHVSQAILTPRVKTIARGLVGGLKNTLVHRLALIPVYPLRFSRRS

SEQ ID NO: 245638 - DNA, 915 bp, Artificial Sequence
  derived and/or modified sequence
atgctggccgtgagaaaggccagaagaaagctgagaatgggcaccatctgcagccccaaccccagcggcaccaagaccagcagcgaggtgtgcaacgccgactggatggccagcctgcccccccacctgcacaacctgcccctgagcaacctggccatccccggcagccacgacagcttcagctactgggtggacgagaagagccccgtgggccccgaccagacccaggccatcaagagactggccagaatcagcctggtgaagaagctgatgaagaagtggagcgtgacccagaacctgaccttcagagagcagctggaggccggcatcagatacttcgacctgagagtgagcagcaagcccggcgacgccgaccaggagatctacttcatccacggcctgttcggcatcaaggtgtgggacggcctgatggagatcgacagcttcctgacccagcacccccaggagatcatcttcctggacttcaaccacttctacgccatggacgagacccaccacaagtgcctggtgctgagaatccaggaggccttcggcaacaagctgtgccccgcctgcagcgtggagagcctgaccctgagaaccctgtgggagaagaactgccaggtgctgatcttctaccactgccccttctacaagcagtaccccttcctgtggcccggcaagaagatccccgccccctgggccaacaccaccagcgtgagaaagctgatcctgttcctggagaccaccctgagcgagagagccagcagaggcagcttccacgtgagccaggccatcctgacccccagagtgaagaccatcgccagaggcctggtgggcggcctgaagaacaccctggtgcacagactggccctgatccccgtgtaccccctgagattcagcagaagaagctag

SEQ ID NO: 245639 - DNA, 915 bp, Artificial Sequence
  derived and/or modified sequence
atgctggcagttcgcaaggcaaggcggaagttaaggatggggactatctgttcacctaatcccagtggtacaaaaacaagctccgaggtgtgtaatgccgactggatggcaagcctgccacctcatctccacaacctgccactttctaacctcgctattccaggttctcacgattcattctcctactgggtggacgagaaatccccagttggccccgaccagacacaagctatcaagagattggcccgcatatcactcgtgaaaaaattaatgaagaagtggtccgttacccagaatctgacatttagagagcagttagaagcgggtatccggtacttcgatctccgtgtaagttcaaagcccggtgatgcagaccaggagatttacttcatccacggcctgtttgggattaaagtttgggacggtctgatggagattgatagtttcctcactcagcacccacaggagatcattttcctcgactttaatcacttctacgcaatggatgaaactcatcacaaatgtctggtgcttaggatccaggaggcctttggtaacaagttgtgcccggcctgttctgtggaatccctcacgcttcgaaccttatgggagaaaaattgccaggtgttgatcttttaccattgccctttctataagcagtatcccttcctctggcctgggaaaaaaatccctgcaccttgggctaataccaccagtgtgcgcaagctcatcttgtttttagagaccacgctgtcagaacgagcctcaagaggctcatttcacgtctctcaggctattttaactcctcgtgttaaaacgatcgctcggggtctggtgggaggattgaagaatacccttgtacatcgactcgccctgatcccggtttaccctttgcgcttctctcgtcgtagttag

SEQ ID NO: 245640 - DNA, 915 bp, Artificial Sequence
  derived and/or modified sequence
atgctggccgtgaggaaggcccggaggaagctgaggatgggcaccatctgcagccccaaccccagcggcaccaagaccagcagcgaggtgtgcaatgctgactggatggccagcctgcccccccacctgcacaacctgcccctgagcaacctggccatccctggcagccatgacagcttctcctactgggtggatgagaagagccctgtgggccctgaccagacccaggccatcaagaggctggcccgcatcagcctggtgaagaagctgatgaagaagtggagcgtgacccagaacctgaccttccgggagcagctggaggccggcatccgctactttgacctgcgggtgagcagcaagccaggagatgctgaccaggagatctacttcatccacggcctgtttggcatcaaggtgtgggatggcctgatggagattgacagcttcctgacccagcacccccaggagatcatcttcctggacttcaaccacttctacgccatggatgagacccaccacaagtgcctggtgctgcgcatccaggaggccttcggcaacaagctgtgcccagcctgcagcgtggagagcctgaccctgcggaccctgtgggagaagaactgccaggtgctgatcttctaccactgccccttctacaagcagtaccccttcctgtggccaggcaagaagatcccagccccctgggccaacaccacctctgtgaggaagctgatcctcttcctggagaccaccctgtctgagcgggccagccggggcagcttccacgtgtcccaggccatcctgaccccccgggtgaagaccatcgcccggggcctggtgggcggcctgaagaacaccctggtgcaccggctggccctgatccctgtgtaccccctgcgcttcagccgccgctcctag

SEQ ID NO: 245641 - DNA, 915 bp, Artificial Sequence
  derived and/or modified sequence
atgctggccgtgcggaaggcccggcggaagctgcggatgggcaccatatgttcccctaatcccagcggtacgaaaaccagtagtgaagtctgcaatgcggactggatggcttctttgcccccgcacctccacaatcttccgctgtctaacctcgccatccctgggtctcacgactcatttagctactgggttgacgaaaagtctccagttgggccagaccagacccaggccatcaaacgactggccaggatttcactggtaaagaaactgatgaagaaatggtcagtcactcagaatctgacctttagggagcagctcgaagcaggcatcaggtattttgatctgagggtgtcatccaaacctggcgacgccgaccaggaaatctacttcatccacgggttgtttggcatcaaagtctgggacggactgatggagatcgactcatttttgacacagcatccacaagagatcatttttctggattttaaccatttctacgcaatggacgagacccaccacaagtgcctggtactgcgaattcaggaggctttcggcaataagctctgccccgcctgtagtgttgagagtcttaccctccgcacactctgggagaaaaactgccaggtcctcatcttctaccactgccctttttataaacagtacccgtttctgtggcccggcaaaaagatcccggctccctgggctaacaccacctctgtcaggaaacttattcttttcctcgaaaccacgcttagcgagagagcttccaggggctcgttccacgtgagccaggctattctcacgccccgagttaagaccattgcccgtggtctggttggtgggctcaagaacacactggtgcaccgtctcgcactgatacctgtctaccccctacgcttctccagacggtcttag

SEQ ID NO: 245642 - DNA, 2063 bp, Artificial Sequence
  derived and/or modified sequence
gctgggagtcctggtgccgccggctgcacttctgtgtgtctttcaggaagccacagggcagggggcgtctgtgcagagaagcgggggagtgagtagcaggcaggcccagcttgtgtaccagcccagtgacatatatagaaacataaatcaggctagagccggcgcgcccgggcgcgcacctgtgtatggacccgcaggcatgtctgtacactgggtgggcacctgtcttgtgagtggctccgggtgtggctgctcctcggactttcagtttatgtaagatttatctctaggggcctaccttcccccatctccagaggggaacataagaagtttaacggagctgggactgagcagattaagggagtggagcggaggctgggccggagagagtggggactgtgagtgctagtgggtaaggatccatctgtttgccccgtcccccagccagaaaggcattttggaaagactggcgtggcaagcgtcgccctgaaacgtccacagagcccaagaagtgatgatcactgagtgagtggcactgggctgagactggccagtttgttaacaacagggatgctagcagttaggaaggccaggaggaaactcaggatggggaccatctgctcccccaaccccagcgggacaaagacatcatcggaggtctgcaatgccgactggatggcctcgctcccccctcacctccacaacctccccctttccaatctggcaatcccaggctcacatgattcattcagctactgggtggatgaaaagtccccagtggggcctgaccaaacccaagctatcaaacgcctcgccaggatctccttggtgaagaagctaatgaagaagtggtctgtgactcagaacctgacatttcgagaacagctggaagctgggatccgctactttgacctgcgtgtgtcttccaaaccaggggatgccgaccaggagatctacttcatccatgggctttttggcatcaaggtctgggatgggctgatggaaattgactcgtttcttacacagcacccccaggagattatcttcctggatttcaaccacttctatgccatggatgagacccatcacaaatgcctggttctgcggatccaggaggcctttggaaacaagctgtgcccagcctgcagtgtggaaagtttgacgctgcgaactctgtgggagaagaactgccaggttcttattttctaccactgtcccttctacaagcagtaccccttcctgtggccaggaaagaagattccagcgccctgggcaaacaccacaagtgtgcgcaaactaatcctcttcttggagaccactctgagtgagcgggcctcacggggctccttccatgtctcccaagcgatcctcacccccagagtgaagaccattgcccggggcttggttgggggcctcaagaacacgctggttcataggctggcactgatcccagtttatcctttgagattcagcagaagatcctgatggaggaggaggataccaagagagaggtgcccaaggaagatggagttggtgatgtgcaacatttcggtgagaactttattgtcagaggttttcagtacatatttacaagttcttactccatcatacatattgggaatgagctggcattttcaagcatatacccaggagtccagcaatcattggggaagagagcctgaggctggcaatccttgcccagaactttggtcacctgcttgttcacaggccaccatatcttacttcactgaagtcatatgctgaggttttatttagtccagatgctgaaggatgggaagacccaagcagctggtgtggaggtctttcccagtgactcatcagtcattcagaaatcaaagcctgcacaagaaagggtgggatgggatgtatagagaaagacaccaagcctttagactccagcagagtagctgatattgacatatctgaggagggaggaggctccaatacgactactcccaattcacagggtttgtggttctggatgaaatctttgcaaagggtttccctggcactcaaacagaataaataggcttataaagtgt

SEQ ID NO: 245643 - DNA, 915 bp, Artificial Sequence
  derived and/or modified sequence
atgttagccgtcaggaaagccaggaggaagctccgcatgggtaccatatgttcccccaacccatcagggacgaagactagcagcgaagtttgtaacgctgactggatggcgtccctcccccctcacctacataatctgccactaagtaatctggcaattccaggcagccatgatagttttagctactgggtcgacgagaaatcgcccgtggggcctgaccaaactcaggcgatcaagaggctggccaggatcagcttagtgaagaagctcatgaagaaatggtcagtgacccagaatttaacattccgcgaacagctggaagcgggtatccgatatttcgacttgagggtctcctcaaaacccggtgatgcagaccaggagatctatttcatacatggcttgtttggtattaaagtttgggatgggctgatggagatagactccttcctaacccaacatccccaggagattatttttttagattttaatcacttttatgctatggacgagacacaccataagtgtcttgtgctgaggattcaggaagcctttggtaataagctatgtcccgcttgctcagtggaatcactaaccctccggactctgtgggaaaaaaactgtcaagtattgatcttttatcattgccccttttataaacagtatcccttcctgtggcctggcaagaagattcccgctccctgggctaacactacatccgttagaaaactgatcctgtttctggagaccaccctctcagagcgggcttctcgaggttctttccatgtttcccaagccatcctgacccccagggtgaaaacaattgccaggggccttgttgggggactgaaaaatacactcgtacaccgactcgccttgatcccggtgtaccctctccgtttcagccgcaggagttag

SEQ ID NO: 245644 - protein, 550 aa, Artificial Sequence
  derived and/or modified sequence
MAFNDLLQQVGGVGRFQQIQVTLVVLPLLLMASHNTLQNFTAAIPTHHCRPPADANLSKNGGLEVWLPRDRQGQPESCLRFTSPQWGLPFLNGTEANGTGATEPCTDGWIYDNSTFPSTIVTEWDLVCSHRALRQLAQSLYMVGVLLGAMVFGYLADRLGRRKVLILNYLQTAVSGTCAAFAPNFPIYCAFRLLSGMALAGISLNCMTLNVEWMPIHTRACVGTLIGYVYSLGQFLLAGVAYAVPHWRHLQLLVSAPFFAFFIYSWFFIESARWHSSSGRLDLTLRALQRVARINGKREEGAKLSMEVLRASLQKELTMGKGQASAMELLRCPTLRHLFLCLSMLWFATSFAYYGLVMDLQGFGVSIYLIQVIFGAVDLPAKLVGFLVINSLGRRPAQMAALLLAGICILLNGVIPQDQSIVRTSLAVLGKGCLAASFNCIFLYTGELYPTMIRQTGMGMGSTMARVGSIVSPLVSMTAELYPSMPLFIYGAVPVAASAVTVLLPETLGQPLPDTVQDLESRKGKQTRQQQEHQKYMVPLQASAQEKNGL

SEQ ID NO: 245645 - protein, 529 aa, Artificial Sequence
  derived and/or modified sequence
MAFNDLLLLMASHNTLQNFTAAIPTHHCRPPADANLSKNGGLEVWLPRDRQGQPESCLRFTSPQWGLPFLNGTEANGTGATEPCTDGWIYDNSTFPSTIVTEWDLVCSHRALRQLAQSLYMVGVLLGAMVFGYLADRLGRRKVLILNYLQTAVSGTCAAFAPNFPIYCAFRLLSGMALAGISLNCMTLNVEWMPIHTRACVGTLIGYVYSLGQFLLAGVAYAVPHWRHLQLLVSAPFFAFFIYSWFFIESARWHSSSGRLDLTLRALQRVARINGKREEGAKLSMEVLRASLQKELTMGKGQASAMELLRCPTLRHLFLCLSMLWFATSFAYYGLVMDLQGFGVSIYLIQVIFGAVDLPAKLVGFLVINSLGRRPAQMAALLLAGICILLNGVIPQDQSIVRTSLAVLGKGCLAASFNCIFLYTGELYPTMIRQTGMGMGSTMARVGSIVSPLVSMTAELYPSMPLFIYGAVPVAASAVTVLLPETLGQPLPDTVQDLESRKGKQTRQQQEHQKYMVPLQASAQEKNGL

SEQ ID NO: 245646 - DNA, 1653 bp, Artificial Sequence
  derived and/or modified sequence
atggcattcaatgacctgctgcagcaggttggaggcgtcggaaggttccaacagattcaggttactctggtggtgctgccactactgctgatggcctcacataacacgttacaaaattttaccgctgcgatcccgacccaccattgtcgccctcccgcagatgcgaacctgtcaaagaacggtggcctcgaggtttggcttcccagagaccgtcaagggcaaccagagagctgcctgaggtttacgtctccgcaatggggcctgccatttttgaacgggaccgaggcaaatggtaccggtgccaccgagccgtgtactgacggctggatttatgacaattccacgttcccctctactattgttacggagtgggacctggtctgttcccacagggctttacggcagcttgctcaatctctctatatggtcggtgtgctgctgggtgcaatggtttttggctacctggcagatcgtcttgggagacgcaaagtgctgattctcaactacctgcagaccgccgtgtccggtacttgcgctgccttcgccccaaacttcccgatttactgcgcctttagactgctgagcgggatggctctggccggcattagtttgaactgcatgacccttaatgtggaatggatgccgattcataccagagcttgtgttgggacgttgatcggctatgtatacagtttagggcagttcctgctggcgggagtcgcttatgccgtgccacactggcgccacctgcaactgctcgtaagcgcaccgtttttcgcatttttcatatatagttggttcttcattgagagtgcacgctggcactccagtagcgggcgtttggacctgaccttacgggcactgcaaagagtggcccgcattaatggcaaacgggaggaaggcgcaaaattgtccatggaggtgctgagagcttctctgcaaaaggagctgaccatgggaaaaggtcaagcatcggcgatggagctgcttagatgtcctactctgagacacctgttcctgtgtttatccatgttatggttcgccacctccttcgcatactacggcttggtgatggatctccagggattcggtgtctctatatacctgattcaagtgatctttggggctgtggacctgccggccaagctcgtagggttcctggtaataaactccctgggtagacgccctgcccagatggcagcccttctgctggcggggatctgtatactgcttaatggcgttatcccacaggatcagtccattgtgcgtacttctctggctgttctggggaagggctgtttggctgcaagctttaactgtatcttcctatacactggtgaattatatcctaccatgatacggcagaccggcatgggcatgggaagcaccatggcgcgcgttggcagcatagtctctcccctggtctctatgacggcagagctctacccatccatgcccctgtttatttatggtgccgtgcccgttgccgcctctgccgttaccgtgctgctgcctgagactctcgggcagcctctacccgatacagtccaggacttggagtcaagaaaaggaaaacaaacccgccaacagcaggagcaccagaagtatatggtgcccctgcaggcttccgcacaggagaagaacgggctgtag

SEQ ID NO: 245647 - DNA, 1590 bp, Artificial Sequence
  derived and/or modified sequence
atggctttcaatgatcttctgctcctcatggcctcacataataccttgcaaaacttcaccgcagctatcccaacccatcattgccgtcccccagctgatgctaacttatcaaagaacggtggcctcgaagtatggctgccacgcgacagacaagggcaacctgagtcctgcctgaggttcacttccccccaatgggggcttccctttctgaacggaactgaggccaatggcacaggagcaaccgagccctgcactgatggatggatctacgacaattcaacattcccgagcaccattgtcacagaatgggacttggtctgctctcacagggcattgcggcagctggcgcagagcctgtacatggtgggtgtgctcctgggagccatggtgttcggctatctcgcagatagattaggacgacgaaaggtcctgatcttaaactatttgcaaaccgcggtaagtggcacctgcgccgcttttgctcctaattttcccatctattgtgctttccgcttactcagcggcatggctctggccggcattagtctgaattgtatgactctgaatgtagaatggatgcccattcatacacgcgcttgtgtgggtactctaattgggtatgtctactcattaggccagtttcttctagcaggagtggcgtatgcagtcccacattggagacacctgcagctactagtttcggctccattctttgctttttttatctactcttggttctttattgagagcgcacgctggcattcctcttcaggaaggctggatctcacattgagggctctccagcgtgtggctagaataaatggaaaacgggaagagggcgccaagctgagcatggaggtgttgagagcttctctacagaaggagctaaccatgggcaaaggacaggcctcagcaatggaactgcttaggtgccctacacttagacatctcttcttatgcctgtctatgctttggtttgccaccagcttcgcttattacggactcgtgatggatcttcagggcttcggtgtttctatctatcttatacaggtcatcttcggtgccgttgaccttccagcaaagctggtcggctttctggtgattaacagcctgggcaggcgaccagcccagatggctgccttgctgctagccggaatttgcatactcttgaatggggtcattccacaggaccagagcatcgtccggaccagcctagccgtactgggcaaaggttgtctagccgcgagtttcaattgtattttcctgtacacaggcgagctctaccccacaatgatcaggcagaccggtatgggtatgggatcaacaatggccagggtgggttccattgtttcaccgttggtctccatgaccgcagaactttacccctctatgccactgtttatctacggtgccgtgcccgtggccgcaagtgccgtgacagtcctgctcccagagaccctgggccaaccgttgcccgataccgtgcaggatctcgaatctcggaagggaaagcagacaagacagcagcaggagcaccagaagtacatggtgccgctccaagcaagcgcacaggagaaaaacggcttatag

SEQ ID NO: 245648 - DNA, 1653 bp, Artificial Sequence
  derived and/or modified sequence
atggccttcaatgacctgctgcagcaggtgggcggcgtgggccgcttccagcagatccaggtgaccctggtggtgctgcccctgctgctgatggccagccacaacaccctgcagaacttcaccgctgccatccccacccaccactgccggcccccagcagatgccaacctgagcaagaatggaggcctggaggtgtggctgccccgggaccggcagggccagcctgagagctgcctgcgcttcaccagcccccagtggggcctgcccttcctgaatggaacagaggccaatggaactggagccacagagccctgcacagatggctggatctatgacaacagcaccttccccagcaccatcgtgacagagtgggacctggtgtgcagccaccgggccctgcggcagctggcccagagcctgtacatggtgggcgtgctgctgggcgccatggtgtttggctacctggccgaccggctgggccgcaggaaggtgctgatcctgaactacctgcagacagctgtgtctggcacctgtgccgcctttgcccccaacttccccatctactgtgccttccggctgctgagcggcatggccctggccggcatcagcctgaactgcatgaccctgaatgtggagtggatgcccatccacacccgggcctgtgtgggcaccctcatcggctacgtgtacagcctgggccagttcctgctggccggcgtggcctatgctgtgccccactggaggcacctgcagctgctggtgtctgcccccttctttgccttcttcatctacagctggttcttcattgaaagtgcccgctggcacagcagcagcggccgcctggacctgaccctgcgggccctgcagagggtggcccgcatcaatggcaagcgggaggagggcgccaagctgtccatggaggtgctgcgggccagcctgcagaaggagctgaccatgggcaagggccaggccagcgccatggagctgctgcgctgccccaccctgcggcacctgttcctgtgcctgtccatgctgtggtttgccaccagctttgcctactacggcctggtgatggacctgcagggctttggagtgtccatctacctgatccaggtgatctttggagctgtggacctgcctgccaagctggtgggcttcctggtgatcaacagcctgggccggcggcctgcccagatggccgccctgctgctggccggcatctgcatcctgctgaatggagtcatcccccaggaccagagcatcgtgaggaccagcctggccgtgctgggcaagggctgcctggccgccagcttcaactgcatcttcctgtacacaggagagctgtaccccaccatgatccggcagacaggcatgggcatgggcagcaccatggcccgggtgggcagcatcgtgagccccctggtgtccatgacagctgagctgtaccccagcatgcccctcttcatctacggggctgtgcctgtggccgccagcgctgtgacagtgctgctgcctgagaccctgggccagcccctgcctgacacagtgcaggacctggagagcaggaagggcaagcagacccggcagcagcaggagcaccagaagtacatggtgcccctgcaggccagcgcccaggagaagaatggcctgtag

SEQ ID NO: 245649 - DNA, 1590 bp, Artificial Sequence
  derived and/or modified sequence
atggccttcaatgacctgctgctgctgatggccagccacaacaccctgcagaacttcaccgctgccatccccacccaccactgccggcccccagcagatgccaacctgagcaagaatggaggcctggaggtgtggctgccccgggaccggcagggccagcctgagagctgcctgcgcttcaccagcccccagtggggcctgcccttcctgaatggaacagaggccaacggcaccggggccacagagccctgcacagatggctggatctatgacaacagcaccttccccagcaccatcgtgacagagtgggacctggtgtgcagccaccgggccctgcggcagctggcccagagcctgtacatggtgggcgtgctgctgggcgccatggtgtttggctacctggccgaccggctgggccgcaggaaggtgctgatcctgaactacctgcagacagctgtgtctggcacctgtgccgcctttgcccccaacttccccatctactgtgccttccggctgctgagcggcatggccctggccggcatcagcctgaactgcatgaccctgaatgtggagtggatgcccatccacacccgggcctgtgtgggcaccctgattggctacgtgtacagcctgggccagttcctgctggccggcgtggcctatgctgtgccccactggaggcacctgcagctgctggtgtctgcccccttctttgccttcttcatctacagctggttcttcatcgagagcgcccgctggcacagcagcagcggccgcctggacctgaccctgcgggccctgcagagggtggcccgcatcaacgggaagcgggaggagggcgccaagctgtccatggaggtgctgcgggccagcctgcagaaggagctgaccatgggcaagggccaggccagcgccatggagctgctgcgctgccccaccctgcggcacctgttcctgtgcctgtccatgctgtggtttgccaccagctttgcctactacggcctggtgatggacctgcagggcttcggcgtgtccatctacctgatccaggtgatctttggagctgtggacctgcctgccaagctggtgggcttcctggtgatcaacagcctgggcagaagacctgcccagatggccgccctgctgctggccggcatctgcatcctgctgaatggagtcatcccccaggaccagagcatcgtgaggaccagcctggccgtgctgggcaagggctgcctggccgccagcttcaactgcatcttcctgtacaccggggagctgtaccccaccatgatccggcagacaggcatgggcatgggcagcaccatggcccgggtgggcagcatcgtgagccccctggtgtccatgacagctgagctgtaccccagcatgcccctcttcatctatggagctgtgcctgtggccgccagcgctgtgacagtgctgctgcctgagaccctgggccagcccctgcctgacacagtgcaggacctggagagcaggaagggcaagcagacccggcagcagcaggagcaccagaagtacatggtgcccctgcaggccagcgcccaggagaagaatggcctgtag

SEQ ID NO: 245650 - DNA, 1653 bp, Artificial Sequence
  derived and/or modified sequence
atggccttcaacgacctgctgcagcaggtgggcggcgtgggccggtttcaacaaatacaggtgacacttgtggtcctgcctctgctcctgatggcttctcataatactcttcagaatttcaccgccgctatacccacgcatcattgccgacctcctgctgacgccaacctgtccaagaatggtggactggaggtatggctaccccgcgaccgccagggtcagcccgagagctgccttagattcacgtcgccacagtggggccttccctttctgaacggaactgaggccaatggcaccggtgctaccgagccttgtacagacggttggatctatgacaactctactttcccctcaaccatcgtgactgagtgggatctcgtgtgtagtcaccgggcactgcgtcagctcgcccagagcctgtatatggtgggagtgttacttggggccatggtcttcgggtaccttgcagataggctggggcgaaggaaagtgctcatacttaattatctgcagaccgccgtgtctggcacttgtgcggctttcgcacccaatttccccatctactgcgccttccgactccttagcggcatggcattagcaggaatctcccttaactgcatgacccttaacgtagaatggatgccaatccacaccagagcctgtgtgggaacccttattggatatgtgtactccctcggtcagttcttgcttgccggcgtagcctacgccgtccctcattggcgccacctgcagctcctcgtgagcgcccctttcttcgcattttttatttattcctggtttttcatcgaaagtgcccgatggcactcttcgtcaggccgactcgacttgacacttagggcattgcagagagtggcccgaataaatggcaagagggaagagggggccaaactgtctatggaagtactgcgggcctctttgcagaaagaattaacaatgggtaaaggccaagcatcagcgatggaactacttaggtgcccaacacttcggcatctctttttgtgtctgtctatgctgtggttcgccacctcattcgcttactacgggctggtgatggacctgcagggattcggagtgagcatctaccttatccaagtgatatttggggcggttgacctgcccgccaaactcgttggattccttgttatcaatagcctgggtcgcagacctgcacaaatggctgcacttctgttagctgggatctgcatcttgctcaacggcgtaataccacaggatcagagcattgtgcgaacgtccctggcagtgctggggaaagggtgtttggccgcctcttttaattgcatttttctttatacgggtgaactataccctactatgatcagacaaacaggaatgggcatggggtctacaatggctcgggtgggtagcatagtcagcccactggtttcgatgacagctgaactgtatccttctatgcccctgtttatctacggcgccgtgcccgtagctgcctcagccgtgactgttctgctgcctgagaccttggggcaaccgcttcccgacacagtccaagacctcgagagccggaaagggaaacagacaagacagcagcaggaacatcagaagtatatggtgcccttgcaggctagtgcccaggagaaaaatggtttgtag

SEQ ID NO: 245651 - DNA, 1590 bp, Artificial Sequence
  derived and/or modified sequence
atggccttcaacgacctgctgctgctgatggccagccacaacaccctacagaactttactgctgccataccaacccatcactgtaggcctccagccgatgcaaatctgtccaagaacgggggcctggaagtgtggctccctagagacaggcaggggcaacccgagtcatgcttgcgctttacttcgccccagtggggtcttccatttctcaacggaaccgaagcaaatgggactggcgcaacagaaccttgtaccgatgggtggatttacgacaattccactttcccctccaccatagtgactgagtgggacctggtgtgctcacaccgggccctgcgccagctcgcccaatctctctacatggttggggtgctgttgggtgctatggtttttggatacttggctgacagactcggaagaaggaaggtgctaatactaaattacctacaaaccgccgtatcaggcacctgtgctgctttcgcacctaactttcccatctactgtgcctttaggttactgagtgggatggccctggcaggcatatcccttaattgcatgaccctcaatgtagagtggatgcccatacacacccgagcatgcgtggggacactgatcggctatgtctacagcttgggtcagtttctcctggcaggggtcgcgtacgccgtaccccactggcgacacctgcagctcctggtctctgcacctttctttgcattctttatctactcttggttttttattgaaagtgcaaggtggcacagttctagtggccgtctagatctgacccttagggctctgcagcgagtggcacgtattaacgggaagcgggaagagggcgctaagcttagcatggaggtgctgcgcgccagtctccagaaggagctcaccatgggtaaaggccaggccagcgcgatggaactgttgagatgtcccacactgaggcacctcttcctgtgtttatcaatgctgtggtttgccacctcttttgcctactacgggcttgtgatggaccttcagggtttcggcgtcagtatatacctgattcaagtcatctttggtgccgtcgacctgcctgccaaattggtagggttcctcgttattaattccctaggaagacgccccgctcaaatggccgctctgcttttagcgggaatatgcattttactgaatggcgtcattccacaggaccagtcaatagtgcggacttccctagcagtcctaggcaaggggtgcctggcagcttctttcaactgtatattcctttacaccggcgagctgtaccccaccatgatccgccagacaggcatgggcatgggatccaccatggcacgagtgggatccatagtgtccccactggttagcatgacagctgaactctatccgtccatgcctctttttatttacggggccgttcccgtcgcggctagcgccgtgacagtgctgctccctgaaaccctgggtcaaccactgcctgacactgtccaagacttggaatcaaggaaaggtaagcaaacgcggcaacagcaagagcaccagaaatacatggtgcctttacaggcttccgcccaagagaagaatggactgtag

SEQ ID NO: 245652 - DNA, 1653 bp, Artificial Sequence
  derived and/or modified sequence
atggctttcaacgacctcctgcagcaggtgggaggggtgggaaggttccagcaaatccaggtaaccctcgtcgtattaccccttctgctgatggccagccacaatacattacagaattttaccgccgcaataccaacccatcactgccgacctcccgcagacgccaatctgagcaagaacggcggactcgaagtgtggctgcctcgggacaggcaggggcaaccggaatcttgtttgcgcttcacttccccacagtgggggctcccgttcttaaatggcacagaggcgaacggcacaggagcgaccgaaccttgcaccgacggctggatctatgacaacagtacgtttccgagcaccattgtaacagaatgggatctcgtgtgcagccacagggccttacgccaattggcgcagagcctctatatggtcggggtcctgctgggggctatggtgtttggatatctggccgacaggctaggtcgtagaaaggttctgatcctcaactatttacaaactgctgtgagtggcacctgtgccgcattcgcaccaaacttccccatctactgcgcatttaggctgctcagcgggatggcgctggcgggaatctcccttaactgcatgacattgaatgtggaatggatgcctatccacacgagagcttgcgtggggaccctcatagggtacgtgtattccctcggtcagttcctacttgccggtgtggcctacgcggtgccccactggcgacacctccagctgctggtgagtgctccatttttcgcatttttcatatattcctggttcttcatcgaatcagcaaggtggcactcatcctcagggcgacttgatttgaccctgagggctctacaaagggttgctaggatcaacggaaaaagagaagaaggggctaagctttctatggaagtcttgcgggcttccctgcaaaaggagcttacaatgggaaagggacaggcttccgctatggagctattgaggtgtcctaccttgagacacctgtttctgtgcctgtctatgttatggtttgccaccagcttcgcatattatgggctggttatggacttgcagggattcggtgtgtccatttaccttattcaagtgatttttggcgctgtggatctcccggcaaagcttgtgggtttcctggtgatcaattctctaggcagaagaccggctcagatggccgctttgctactcgcagggatatgtattctcctgaacggcgtcattccacaggatcagtccattgtgaggacttcacttgcagtcctaggcaagggctgtttggccgcaagctttaattgtatatttttatatacaggggagttgtaccccaccatgatccgccagaccggcatgggcatgggcagtaccatggcccgtgtggggagtatagtgagccctctggtctcaatgaccgccgagctgtatcctagcatgccactatttatatacggagcagtgccagtggcagccagcgccgtgactgtgctcctaccggaaacactggggcaacccctccctgacacagtgcaggacctggagtccagaaaggggaagcagactagacaacagcaagaacatcagaaatatatggtgcccttgcaggcatcggcgcaagagaagaacggtctgtag

SEQ ID NO: 245653 - DNA, 1590 bp, Artificial Sequence
  derived and/or modified sequence
atggcctttaacgacctactgttgctgatggcctctcataacacactgcagaatttcactgcagctatccccacacatcattgtaggcctcctgccgatgccaatctcagcaaaaatggtgggctcgaagtttggctgcctcgggatcggcaaggccagcctgaatcttgtctgagatttactagtccccagtggggactcccctttctgaacggcacagaagctaatggcaccggtgccactgagccgtgcacagacggatggatctacgataatagtacattcccttccaccattgtcactgaatgggaccttgtctgttcacatcgggcactccgccagttggctcaatctttatacatggtgggcgtgctcctcggcgctatggtctttgggtatctcgctgacagactcggccgtagaaaggtcttaatccttaattatcttcagaccgccgtctcaggtacatgtgcggctttcgcgccaaattttcctatctactgcgcctttagactcctctctggaatggcactggccggtattagcctgaactgtatgacactcaacgtcgagtggatgccaattcatacacgtgcttgcgtaggcaccttgatcgggtatgtgtatagtctaggccagtttctgctggcaggcgtagcttacgctgtgccacactggaggcaccttcagctcttagtctcagctccattctttgcattctttatttactcttggttcttcattgaaagtgccagatggcattccagttctggcaggctggacctaacgctgcgcgctctccagcgggtcgctcgtatcaatggcaagcgtgaggaaggggctaaactgtcgatggaggttctacgggcttccctgcagaaagaactgaccatggggaaaggacaggcatccgccatggaactgctgcgctgtcccacactgcggcacctgttcttgtgcttgtccatgctctggtttgctaccagcttcgcttattatggcctcgtgatggacttgcagggctttggggtaagcatctacctgatacaggtgatctttggagcagtggatctgccggctaaacttgtgggattcctggttattaactccctcggaaggagaccagcccagatggctgcactgttacttgctggcatttgcatactgctgaacggtgtgataccgcaagatcaatcaatcgtgcgaacgtctctggcggtgctggggaagggttgcctcgctgctagcttcaactgcatctttctttacacaggcgagctctacccaacgatgatcagacagaccgggatgggaatgggctcaaccatggccagagtcgggtctatcgtgtccccactggtgagtatgacggctgaactgtaccctagcatgcccttattcatatacggcgcagtcccggttgcggcaagcgcagtgactgttttgctgccagagacactcggacaacctctgcccgacaccgtgcaagatttagagtcaaggaaggggaagcagactcgacaacagcaggagcaccaaaaatacatggtacccttgcaggcctctgcgcaggagaagaacggtttgtag

SEQ ID NO: 245654 - DNA, 2143 bp, Artificial Sequence
  derived and/or modified sequence
caagggtcaggtctccagcagaccctgaaagctgagctgccctgacccccaaagtgaggagaagctgcaagggaaaagggagggacagatcagggagaccggggaagaaggaggagcagccaaggaggctgctgtccccccacagagcagctcggactcagctcccggagcaacccagctgcggaggcaacggcagtgctgctcctccagcgaaggacagcaggcaggcagacagacagaggtcctgggactggaaggcctcagcccccagccactgggctgggcctggcccaatggcctttaatgacctcctgcagcaggtggggggtgtcggccgcttccagcagatccaggtcaccctggtggtcctccccctgctcctgatggcttctcacaacaccctgcagaacttcactgctgccatccctacccaccactgccgcccgcctgccgatgccaacctcagcaagaacggggggctggaggtctggctgccccgggacaggcaggggcagcctgagtcctgcctccgcttcacctccccgcagtggggactgccctttctcaatggcacagaagccaatggcacaggggccacagagccctgcaccgatggctggatctatgacaacagcaccttcccatctaccatcgtgactgagtgggaccttgtgtgctctcacagggccctacgccagctggcccagtccttgtacatggtgggggtgctgctcggagccatggtgttcggctaccttgcagacaggctaggccgccggaaggtactcatcttgaactacctgcagacagctgtgtcagggacctgcgcagccttcgcacccaacttccccatctactgcgccttccggctcctctcgggcatggctctggctggcatctccctcaactgcatgacactgaatgtggagtggatgcccattcacacacgggcctgcgtgggcaccttgattggctatgtctacagcctgggccagttcctcctggctggtgtggcctacgctgtgccccactggcgccacctgcagctactggtctctgcgcctttttttgccttcttcatctactcctggttcttcattgagtcggcccgctggcactcctcctccgggaggctggacctcaccctgagggccctgcagagagtcgcccggatcaatgggaagcgggaagaaggagccaaattgagtatggaggtactccgggccagtctgcagaaggagctgaccatgggcaaaggccaggcatcggccatggagctgctgcgctgccccaccctccgccacctcttcctctgcctctccatgctgtggtttgccactagctttgcatactatgggctggtcatggacctgcagggctttggagtcagcatctacctaatccaggtgatctttggtgctgtggacctgcctgccaagcttgtgggcttccttgtcatcaactccctgggtcgccggcctgcccagatggctgcactgctgctggcaggcatctgcatcctgctcaatggggtgataccccaggaccagtccattgtccgaacctctcttgctgtgctggggaagggttgtctggctgcctccttcaactgcatcttcctgtatactggggaactgtatcccacaatgatccggcagacaggcatgggaatgggcagcaccatggcccgagtgggcagcatcgtgagcccactggtgagcatgactgccgagctctacccctccatgcctctcttcatctacggtgctgttcctgtggccgccagcgctgtcactgtcctcctgccagagaccctgggccagccactgccagacacggtgcaggacctggagagcaggaaagggaaacagacgcgacagcaacaagagcaccagaagtatatggtcccactgcaggcctcagcacaagagaagaatggactctgaggactgagaaggggccttacagaaccctaaagggagggaaggtcctacaggtctccggccacccacacaaggaggaggaagaggaaatggtgacccaagtgtgggggttgtggttcaggaaagcatcttcccaggggtccacctccctttataaaccccaccagaaccacatcattaaaaggtttgactgcgcacca

SEQ ID NO: 245655 - DNA, 2093 bp, Artificial Sequence
  derived and/or modified sequence
aaaaactgcccatgcaagggtcaggtctccagcagaccctgaaagctgagctgccctgacccccaaagtgaggagaagctgcaagggaaaagggagggacagatcagggagaccggggaagaaggaggagcagccaaggaggctgctgtccccccacagagcagctcggactcagctcccggagcaacccagctgcggaggcaacggcagtgctgctcctccagcgaaggacagcaggcaggcagacagacagaggtcctgggactggaaggcctcagcccccagccactgggctgggcctggcccaatggcctttaatgacctcctgctcctgatggcttctcacaacaccctgcagaacttcactgctgccatccctacccaccactgccgcccgcctgccgatgccaacctcagcaagaacggggggctggaggtctggctgccccgggacaggcaggggcagcctgagtcctgcctccgcttcacctccccgcagtggggactgccctttctcaatggcacagaagccaatggcacaggggccacagagccctgcaccgatggctggatctatgacaacagcaccttcccatctaccatcgtgactgagtgggaccttgtgtgctctcacagggccctacgccagctggcccagtccttgtacatggtgggggtgctgctcggagccatggtgttcggctaccttgcagacaggctaggccgccggaaggtactcatcttgaactacctgcagacagctgtgtcagggacctgcgcagccttcgcacccaacttccccatctactgcgccttccggctcctctcgggcatggctctggctggcatctccctcaactgcatgacactgaatgtggagtggatgcccattcacacacgggcctgcgtgggcaccttgattggctatgtctacagcctgggccagttcctcctggctggtgtggcctacgctgtgccccactggcgccacctgcagctactggtctctgcgcctttttttgccttcttcatctactcctggttcttcattgagtcggcccgctggcactcctcctccgggaggctggacctcaccctgagggccctgcagagagtcgcccggatcaatgggaagcgggaagaaggagccaaattgagtatggaggtactccgggccagtctgcagaaggagctgaccatgggcaaaggccaggcatcggccatggagctgctgcgctgccccaccctccgccacctcttcctctgcctctccatgctgtggtttgccactagctttgcatactatgggctggtcatggacctgcagggctttggagtcagcatctacctaatccaggtgatctttggtgctgtggacctgcctgccaagcttgtgggcttccttgtcatcaactccctgggtcgccggcctgcccagatggctgcactgctgctggcaggcatctgcatcctgctcaatggggtgataccccaggaccagtccattgtccgaacctctcttgctgtgctggggaagggttgtctggctgcctccttcaactgcatcttcctgtatactggggaactgtatcccacaatgatccggcagacaggcatgggaatgggcagcaccatggcccgagtgggcagcatcgtgagcccactggtgagcatgactgccgagctctacccctccatgcctctcttcatctacggtgctgttcctgtggccgccagcgctgtcactgtcctcctgccagagaccctgggccagccactgccagacacggtgcaggacctggagagcaggaaagggaaacagacgcgacagcaacaagagcaccagaagtatatggtcccactgcaggcctcagcacaagagaagaatggactctgaggactgagaaggggccttacagaaccctaaagggagggaaggtcctacaggtctccggccacccacacaaggaggaggaagaggaaatggtgacccaagtgtgggggttgtggttcaggaaagcatcttcccaggggtccacctccctttataaaccccaccagaaccacatcattaaaaggtttgactgcgcacc

SEQ ID NO: 245656 - DNA, 1653 bp, Artificial Sequence
  derived and/or modified sequence
atggccttcaacgacctgctgcagcaggtgggcggcgtgggcagattccagcagatccaggtgaccctggtggtgctgcccctgctgctgatggccagccacaacaccctgcagaacttcaccgccgccatccccacccaccactgcagaccccccgccgacgccaacctgagcaagaacggcggcctggaggtgtggctgcccagagacagacagggccagcccgagagctgcctgagattcaccagcccccagtggggcctgcccttcctgaacggcaccgaggccaacggcaccggcgccaccgagccctgcaccgacggctggatctacgacaacagcaccttccccagcaccatcgtgaccgagtgggacctggtgtgcagccacagagccctgagacagctggcccagagcctgtacatggtgggcgtgctgctgggcgccatggtgttcggctacctggccgacagactgggcagaagaaaggtgctgatcctgaactacctgcagaccgccgtgagcggcacctgcgccgccttcgcccccaacttccccatctactgcgccttcagactgctgagcggcatggccctggccggcatcagcctgaactgcatgaccctgaacgtggagtggatgcccatccacaccagagcctgcgtgggcaccctgatcggctacgtgtacagcctgggccagttcctgctggccggcgtggcctacgccgtgccccactggagacacctgcagctgctggtgagcgcccccttcttcgccttcttcatctacagctggttcttcatcgagagcgccagatggcacagcagcagcggcagactggacctgaccctgagagccctgcagagagtggccagaatcaacggcaagagagaggagggcgccaagctgagcatggaggtgctgagagccagcctgcagaaggagctgaccatgggcaagggccaggccagcgccatggagctgctgagatgccccaccctgagacacctgttcctgtgcctgagcatgctgtggttcgccaccagcttcgcctactacggcctggtgatggacctgcagggcttcggcgtgagcatctacctgatccaggtgatcttcggcgccgtggacctgcccgccaagctggtgggcttcctggtgatcaacagcctgggcagaagacccgcccagatggccgccctgctgctggccggcatctgcatcctgctgaacggcgtgatcccccaggaccagagcatcgtgagaaccagcctggccgtgctgggcaagggctgcctggccgccagcttcaactgcatcttcctgtacaccggcgagctgtaccccaccatgatcagacagaccggcatgggcatgggcagcaccatggccagagtgggcagcatcgtgagccccctggtgagcatgaccgccgagctgtaccccagcatgcccctgttcatctacggcgccgtgcccgtggccgccagcgccgtgaccgtgctgctgcccgagaccctgggccagcccctgcccgacaccgtgcaggacctggagagcagaaagggcaagcagaccagacagcagcaggagcaccagaagtacatggtgcccctgcaggccagcgcccaggagaagaacggcctgtag

SEQ ID NO: 245657 - DNA, 1590 bp, Artificial Sequence
  derived and/or modified sequence
atggccttcaacgacctgctgctgctgatggccagccacaacaccctgcagaacttcaccgccgccatccccacccaccactgcagaccccccgccgacgccaacctgagcaagaacggcggcctggaggtgtggctgcccagagacagacagggccagcccgagagctgcctgagattcaccagcccccagtggggcctgcccttcctgaacggcaccgaggccaacggcaccggcgccaccgagccctgcaccgacggctggatctacgacaacagcaccttccccagcaccatcgtgaccgagtgggacctggtgtgcagccacagagccctgagacagctggcccagagcctgtacatggtgggcgtgctgctgggcgccatggtgttcggctacctggccgacagactgggcagaagaaaggtgctgatcctgaactacctgcagaccgccgtgagcggcacctgcgccgccttcgcccccaacttccccatctactgcgccttcagactgctgagcggcatggccctggccggcatcagcctgaactgcatgaccctgaacgtggagtggatgcccatccacaccagagcctgcgtgggcaccctgatcggctacgtgtacagcctgggccagttcctgctggccggcgtggcctacgccgtgccccactggagacacctgcagctgctggtgagcgcccccttcttcgccttcttcatctacagctggttcttcatcgagagcgccagatggcacagcagcagcggcagactggacctgaccctgagagccctgcagagagtggccagaatcaacggcaagagagaggagggcgccaagctgagcatggaggtgctgagagccagcctgcagaaggagctgaccatgggcaagggccaggccagcgccatggagctgctgagatgccccaccctgagacacctgttcctgtgcctgagcatgctgtggttcgccaccagcttcgcctactacggcctggtgatggacctgcagggcttcggcgtgagcatctacctgatccaggtgatcttcggcgccgtggacctgcccgccaagctggtgggcttcctggtgatcaacagcctgggcagaagacccgcccagatggccgccctgctgctggccggcatctgcatcctgctgaacggcgtgatcccccaggaccagagcatcgtgagaaccagcctggccgtgctgggcaagggctgcctggccgccagcttcaactgcatcttcctgtacaccggcgagctgtaccccaccatgatcagacagaccggcatgggcatgggcagcaccatggccagagtgggcagcatcgtgagccccctggtgagcatgaccgccgagctgtaccccagcatgcccctgttcatctacggcgccgtgcccgtggccgccagcgccgtgaccgtgctgctgcccgagaccctgggccagcccctgcccgacaccgtgcaggacctggagagcagaaagggcaagcagaccagacagcagcaggagcaccagaagtacatggtgcccctgcaggccagcgcccaggagaagaacggcctgtag

SEQ ID NO: 245658 - protein, 506 aa, Artificial Sequence
  derived and/or modified sequence
MAFNDLLQQVGGVGRFQQIQVTLVVLPLLLMASHNTLQNFTAAIPTHHCRPPADANLSKNGGLEVWLPRDRQGQPESCLRFTSPQWGLPFLNGTEANGTGATEPCTDGWIYDNSTFPSTIVTEWDLVCSHRALRQLAQSLYMVGVLLGAMVFGYLADRLGRRKVLILNYLQTAVSGTCAAFAPNFPIYCAFRLLSGMALAGISLNCMTLNVEWMPIHTRACVGTLIGYVYSLGQFLLAGVAYAVPHWRHLQLLVSAPFFAFFIYSWFFIESARWHSSSGRLDLTLRALQRVARINGKREEGAKLSMEVLRASLQKELTMGKGQASAMELLRCPTLRHLFLCLSMLWFATSFAYYGLVMDLQGFGVSIYLIQVIFGAVDLPAKLVGFLVINSLGRRPAQMAALLLAGICILLNGVIPQDQSIVRTSLAVLGKGCLAASFNCIFLYTGELYPTMIRAVTVLLPETLGQPLPDTVQDLESRKGKQTRQQQEHQKYMVPLQASAQEKNGL

SEQ ID NO: 245659 - DNA, 1521 bp, Artificial Sequence
  derived and/or modified sequence
atggcattcaacgacttgttgcagcaggtcggcggcgtgggcaggttccagcaaatccaggtcaccctcgtggtcttgccattgctgttgatggcgagccataacacccttcaaaattttacagccgccattccaacccatcactgccgtcctcctgccgatgcgaacctaagtaaaaatggaggtctggaggtttggctcccccgtgacagacagggacagcccgagtcctgtctgcgcttcacttcaccccagtggggattaccctttcttaacgggactgaggccaatggcaccggtgctactgaaccatgcaccgatgggtggatttacgacaacagcactttcccctcgaccatcgtcactgagtgggatctggtgtgttcgcatagagctttgcggcaacttgcgcagagcttatacatggtcggcgtactgcttggtgccatggtcttcggctatctggccgaccggcttgggaggagaaaggtcctgatcctgaattacctgcagaccgctgtgtcaggcacctgtgccgctttcgcacctaattttcctatctattgtgcgttcaggctgctcagtggcatggccctggccggaatctccttgaactgcatgaccttgaacgtggagtggatgccaattcacacccgcgcttgtgtagggactcttatcggctacgtttactccctcggacagttcctgctggcaggtgtagcttatgctgtgccacattggcgccaccttcagcttttagtgtcagcacccttctttgctttcttcatttacagctggttcttcatagaaagcgctaggtggcatagtagttccgggaggctcgacttaactttacgggctttgcagcgggtggccaggataaacggaaaaagggaagagggggctaagctctctatggaggtgctcagggcctctctccagaaagaactgactatggggaaaggacaagcttccgctatggagctgctgcgctgtcccaccctgcgccatctgtttttatgcttatcgatgctatggttcgccacctcctttgcttattatggtttagtaatggacctgcagggatttggtgtgtccatttacttgattcaggttattttcggggccgtggacctccctgccaaactggtcggctttctagtaatcaactccttgggacggcgaccagcccaaatggccgctcttcttctggccgggatttgcatattgttaaacggtgtaatcccacaggaccaatctatcgtacgcaccagtctcgcagtgctgggaaaaggctgcttagccgccagcttcaactgcatttttctgtacaccggagagctttatcctactatgatccgtgcagtgacagtactcttgcccgagacccttgggcagccccttcctgataccgttcaggacctggaaagcaggaaagggaaacagacccggcagcagcaggagcaccagaaatatatggtgcccctgcaggcgtccgcacaggaaaagaacggcttgtag

SEQ ID NO: 245660 - DNA, 1521 bp, Artificial Sequence
  derived and/or modified sequence
atggccttcaatgacctgctgcagcaggtgggcggcgtgggccgcttccagcagatccaggtgaccctggtggtgctgcccctgctgctgatggccagccacaacaccctgcagaacttcaccgctgccatccccacccaccactgccggcccccagcagatgccaacctgagcaagaatggaggcctggaggtgtggctgccccgggaccggcagggccagcctgagagctgcctgcgcttcaccagcccccagtggggcctgcccttcctgaatggaacagaggccaatggaactggagccacagagccctgcacagatggctggatctatgacaacagcaccttccccagcaccatcgtgacagagtgggacctggtgtgcagccaccgggccctgcggcagctggcccagagcctgtacatggtgggcgtgctgctgggcgccatggtgtttggctacctggccgaccggctgggccgcaggaaggtgctgatcctgaactacctgcagacagctgtgtctggcacctgtgccgcctttgcccccaacttccccatctactgtgccttccggctgctgagcggcatggccctggccggcatcagcctgaactgcatgaccctgaatgtggagtggatgcccatccacacccgggcctgtgtgggcaccctcatcggctacgtgtacagcctgggccagttcctgctggccggcgtggcctatgctgtgccccactggaggcacctgcagctgctggtgtctgcccccttctttgccttcttcatctacagctggttcttcattgaaagtgcccgctggcacagcagcagcggccgcctggacctgaccctgcgggccctgcagagggtggcccgcatcaatggcaagcgggaggagggcgccaagctgtccatggaggtgctgcgggccagcctgcagaaggagctgaccatgggcaagggccaggccagcgccatggagctgctgcgctgccccaccctgcggcacctgttcctgtgcctgtccatgctgtggtttgccaccagctttgcctactacggcctggtgatggacctgcagggctttggagtgtccatctacctgatccaggtgatctttggagctgtggacctgcctgccaagctggtgggcttcctggtgatcaacagcctgggccggcggcctgcccagatggccgccctgctgctggccggcatctgcatcctgctgaatggagtcatcccccaggaccagagcatcgtgaggaccagcctggccgtgctgggcaagggctgcctggccgccagcttcaactgcatcttcctgtacacaggagagctgtaccccaccatgatccgggctgtgacagtgctgctgcctgagaccctgggccagcccctgcctgacacagtgcaggacctggagagcaggaagggcaagcagacccggcagcagcaggagcaccagaagtacatggtgcccctgcaggccagcgcccaggagaagaatggcctgtag

SEQ ID NO: 245661 - DNA, 1521 bp, Artificial Sequence
  derived and/or modified sequence
atggccttcaacgacctgctgcagcaggtgggcggcgtgggccggttccagcaaattcaagtgaccttagtggtgctgccgttgttgctcatggcctctcacaatacgctgcagaacttcacagcggctataccaacccatcattgtcgccctcccgctgatgctaacctctcaaagaatggtggcctggaggtctggctccccagggatcgtcagggccagcccgagtcctgtctcaggttcacgagcccacaatgggggctcccatttctgaacggcaccgaagccaacggcactggagcaaccgaaccctgtaccgatgggtggatctatgataactctaccttcccctcaaccattgtgaccgagtgggatctagtttgttcccacagagccctgcgtcagctggcccagagcctttacatggtgggcgttttgctgggtgccatggtgttcgggtacttggcagataggctgggcaggagaaaggtacttattttgaattacctacagacagctgtgagcggcacatgcgcagcgttcgcccccaattttccaatctactgtgccttcagacttctcagcggaatggctctcgcagggataagtctcaattgtatgacactgaatgtggagtggatgcccattcatacacgagcctgcgtcgggactctgattgggtacgtgtactctttgggacaattcctgttggctggggttgcttacgcggtccctcactggcgacacttgcagcttttggtgagtgcccctttctttgccttctttatttatagctggtttttcattgagtccgcaaggtggcactcttcttccggacgtttagatctcacactccgggctttgcagcgcgtagccagaattaacggtaaaagggaagaaggcgcaaagctgtcaatggaagttctgagggcatccctgcagaaagaacttactatgggaaaaggccaggcaagtgcaatggaattgctgaggtgccccaccctccgccatctattcctctgtctaagcatgttgtggttcgcaactagctttgcatactacgggttggtcatggatctgcaagggtttggcgttagtatttacctcatccaggtcatatttggggccgttgaccttcctgctaaattggttggattcctggtgatcaactccttggggagacggcctgcccagatggctgcactcctgcttgcgggcatctgcattctcctgaatggagtgatccctcaggaccagtctatagtcagaacttcacttgccgtgctcggtaagggttgtctcgctgccagtttcaattgtattttcctgtataccggtgagttgtaccccaccatgatccgcgccgttacagtattactgccagagacactcggacagcccctgcctgacacagtgcaggatctggagagcaggaaaggcaagcagaccaggcagcagcaggagcatcagaaatacatggtgcctctccaagcaagcgcgcaggagaagaatggactgtag

SEQ ID NO: 245662 - DNA, 1521 bp, Artificial Sequence
  derived and/or modified sequence
atggctttcaatgatctgcttcagcaggtgggaggcgtaggcaggttccagcagattcaagtgactttagttgtcctccccttactgctgatggcatctcacaataccctgcagaatttcacagctgcaattcccacacatcactgcaggcccccagctgacgctaacctctctaagaatgggggacttgaagtgtggttaccaagggatagacagggacaacccgagtcttgccttcggttcaccagtccccagtggggactgcccttcctcaacggcacagaggcaaatggcactggcgctacggagccatgtaccgatggatggatttacgataatagtacattcccttccacaattgtgacagaatgggacctggtgtgtagccaccgggctttgagacagctcgctcaaagcctctacatggtgggggttctccttggggcaatggtgttcggatatctggccgaccggcttggaagaaggaaggtactgattctcaattaccttcagactgccgtgtccggcacctgtgccgcattcgcccctaacttcccaatctactgcgcgtttcggcttttatctgggatggctcttgccggtattagtcttaattgtatgactctgaatgtcgagtggatgcccatccatacgagagcatgtgtcggcacactgattggctacgtgtatagcctcggtcagttcctgctagctggcgtggcctatgctgtgccacattggcgccacctgcagctgcttgtgtccgcacccttttttgcatttttcatctattcctggttttttattgagtctgctagatggcacagctccagcggcaggctggacctcactctccgcgcactgcagcgggtggcccgaataaatgggaaaagagaagagggcgctaaactcagtatggaggtgctgcgggcatccctgcagaaagagttaactatggggaaagggcaagcaagcgctatggagctgctgcggtgccctaccctgcgacatctgttcctttgcctgagcatgctttggtttgccacatcgtttgcatattacgggttagtcatggacctacagggcttcggcgtctccatatatttgatccaggtgattttcggggctgtcgatctgcctgcaaagcttgttggattcctggttattaattcgctgggcagacgccctgcccagatggctgccttactactcgctggcatctgcatcctcttgaacggcgttatcccacaggaccagagcattgtgaggacttcattggcagtgttgggcaaaggatgcctggcggctagcttcaactgtatttttctctacactggcgagctctacccaacaatgattcgcgctgtgaccgtgctgctgcccgagactctcggccagccgctccctgataccgtccaggacctcgagtcaagaaaagggaagcagacaagacaacagcaggagcaccagaaatatatggtacctttgcaagcaagcgcccaggagaaaaacggcctttag

SEQ ID NO: 245663 - DNA, 1521 bp, Artificial Sequence
  derived and/or modified sequence
atggcctttaatgacctcctgcagcaggtggggggtgtcggccgcttccagcagatccaggtcaccctggtggtcctccccctgctcctgatggcttctcacaacaccctgcagaacttcactgctgccatccctacccaccactgccgcccgcctgccgatgccaacctcagcaagaacggggggctggaggtctggctgccccgggacaggcaggggcagcctgagtcctgcctccgcttcacctccccgcagtggggactgccctttctcaatggcacagaagccaatggcacaggggccacagagccctgcaccgatggctggatctatgacaacagcaccttcccatctaccatcgtgactgagtgggaccttgtgtgctctcacagggccctacgccagctggcccagtccttgtacatggtgggggtgctgctcggagccatggtgttcggctaccttgcagacaggctaggccgccggaaggtactcatcttgaactacctgcagacagctgtgtcagggacctgcgcagccttcgcacccaacttccccatctactgcgccttccggctcctctcgggcatggctctggctggcatctccctcaactgcatgacactgaatgtggagtggatgcccattcacacacgggcctgcgtgggcaccttgattggctatgtctacagcctgggccagttcctcctggctggtgtggcctacgctgtgccccactggcgccacctgcagctactggtctctgcgcctttttttgccttcttcatctactcctggttcttcattgagtcggcccgctggcactcctcctccgggaggctggacctcaccctgagggccctgcagagagtcgcccggatcaatgggaagcgggaagaaggagccaaattgagtatggaggtactccgggccagtctgcagaaggagctgaccatgggcaaaggccaggcatcggccatggagctgctgcgctgccccaccctccgccacctcttcctctgcctctccatgctgtggtttgccactagctttgcatactatgggctggtcatggacctgcagggctttggagtcagcatctacctaatccaggtgatctttggtgctgtggacctgcctgccaagcttgtgggcttccttgtcatcaactccctgggtcgccggcctgcccagatggctgcactgctgctggcaggcatctgcatcctgctcaatggggtgataccccaggaccagtccattgtccgaacctctcttgctgtgctggggaagggttgtctggctgcctccttcaactgcatcttcctgtatactggggaactgtatcccacaatgatccgcgctgtcactgtcctcctgccagagaccctgggccagccactgccagacacggtgcaggacctggagagcaggaaagggaaacagacgcgacagcaacaagagcaccagaagtatatggtcccactgcaggcctcagcacaagagaagaatggactctga

SEQ ID NO: 245664 - DNA, 1521 bp, Artificial Sequence
  derived and/or modified sequence
atggccttcaacgacctgctgcagcaggtgggcggcgtgggcagattccagcagatccaggtgaccctggtggtgctgcccctgctgctgatggccagccacaacaccctgcagaacttcaccgccgccatccccacccaccactgcagaccccccgccgacgccaacctgagcaagaacggcggcctggaggtgtggctgcccagagacagacagggccagcccgagagctgcctgagattcaccagcccccagtggggcctgcccttcctgaacggcaccgaggccaacggcaccggcgccaccgagccctgcaccgacggctggatctacgacaacagcaccttccccagcaccatcgtgaccgagtgggacctggtgtgcagccacagagccctgagacagctggcccagagcctgtacatggtgggcgtgctgctgggcgccatggtgttcggctacctggccgacagactgggcagaagaaaggtgctgatcctgaactacctgcagaccgccgtgagcggcacctgcgccgccttcgcccccaacttccccatctactgcgccttcagactgctgagcggcatggccctggccggcatcagcctgaactgcatgaccctgaacgtggagtggatgcccatccacaccagagcctgcgtgggcaccctgatcggctacgtgtacagcctgggccagttcctgctggccggcgtggcctacgccgtgccccactggagacacctgcagctgctggtgagcgcccccttcttcgccttcttcatctacagctggttcttcatcgagagcgccagatggcacagcagcagcggcagactggacctgaccctgagagccctgcagagagtggccagaatcaacggcaagagagaggagggcgccaagctgagcatggaggtgctgagagccagcctgcagaaggagctgaccatgggcaagggccaggccagcgccatggagctgctgagatgccccaccctgagacacctgttcctgtgcctgagcatgctgtggttcgccaccagcttcgcctactacggcctggtgatggacctgcagggcttcggcgtgagcatctacctgatccaggtgatcttcggcgccgtggacctgcccgccaagctggtgggcttcctggtgatcaacagcctgggcagaagacccgcccagatggccgccctgctgctggccggcatctgcatcctgctgaacggcgtgatcccccaggaccagagcatcgtgagaaccagcctggccgtgctgggcaagggctgcctggccgccagcttcaactgcatcttcctgtacaccggcgagctgtaccccaccatgatcagagccgtgaccgtgctgctgcccgagaccctgggccagcccctgcccgacaccgtgcaggacctggagagcagaaagggcaagcagaccagacagcagcaggagcaccagaagtacatggtgcccctgcaggccagcgcccaggagaagaacggcctgtag

SEQ ID NO: 245665 - protein, 519 aa, Artificial Sequence
  derived and/or modified sequence
MAFNDLLQQVGGVGRFQQIQVTLVVLPLLLMASHNTLQNFTAAIPTHHCRPPADANLSKNGGLEVWLPRDRQGQPESCLRFTSPQWGLPFLNGTEANGTGATEPCTDGWIYDNSTFPSTIVTEWDLVCSHRALRQLAQSLYMVGVLLGAMVFGYLADRLGRRKVLILNYLQTAVSGTCAAFAPNFPIYCAFRLLSGMALAGISLNCMTLNVEWMPIHTRACVGTLIGYVYSLGQFLLAGVAYAVPHWRHLQLLVSAPFFAFFIYSWFFIESARWHSSSGRLDLTLRALQRVARINGKREEGAKLSMEVLRASLQKELTMGKGQASAMELLRCPTLRHLFLCLSMLWFATSFAYYGLVMDLQGFGVSIYLIQVIFGAVDLPAKLVGFLVINSLGRRPAQMAALLLAGICILLNGVIPQDQSIVRTSLAVLGKGCLAASFNCIFLYTGELYPTMIRAVTVLLPETLGQPLPDTVQDLESRWAPTQKEAGIYPRKGKQTRQQQEHQKYMVPLQASAQEKNGL

SEQ ID NO: 245666 - DNA, 1560 bp, Artificial Sequence
  derived and/or modified sequence
atggccttcaacgatctgctacaacaggtgggcggggttgggcggtttcaacaaattcaagttacattggttgtgttacccctgctcctgatggcctcccataacacactgcagaattttacagcagccattcccacccatcactgtcgccctcctgcagatgccaatctgagcaaaaatggaggactggaagtctggctgccaagggaccggcagggtcaaccggagtcctgtctgaggttcaccagtcctcagtggggtcttccttttctcaatggaactgaagccaatgggacaggagctactgagccttgtactgatggatggatttacgacaacagtacatttccatccacaatagttaccgagtgggatctggtgtgcagccacagggccctcagacagctcgcccaaagcctttatatggtcggcgtcctgcttggcgctatggtatttgggtatctcgccgaccgactgggaaggaggaaagtactcattctgaactatcttcagacagcagtgtcaggcacgtgcgctgcctttgctcccaacttcccaatttattgcgcattccgtctactgtctgggatggccctggccgggatatccctgaactgtatgacgttaaacgtggaatggatgcctatccacacacgcgcatgcgtggggactctgataggctacgtgtactctctgggccaattcttgttagccggagtggcttatgccgttccacactggcgtcatttgcagctgctggtctccgcgccattcttcgccttcttcatatactcttggttctttattgaatccgcgcgctggcattcttccagtggccgcctagacttaactctgcgggcccttcagcgcgtggcccgcatcaatggcaaaagggaagagggggctaaactatcgatggaggttttgcgggcttccttgcagaaagaactgacaatgggtaagggccaggcctcagctatggaactcctgaggtgccctacactccgccacctgtttctgtgcttgtctatgttgtggtttgcaactagctttgcttactacggcctggtgatggacctccagggctttggcgtgtcaatttacctgatccaagtgatctttggcgcagtggacctgcctgccaagttggttgggtttctggttatcaatagcctgggacgtcgtcctgctcagatggccgctctactgctggcagggatatgtattctgctgaacggtgttattccgcaggaccagagcatagtcaggacaagtctagccgtcttgggcaaagggtgcctggccgcaagtttcaactgtattttcctttacacaggtgaactctacccaaccatgatccgcgcggtcaccgtgctgctgcctgaaacgcttggtcaacctcttcccgatactgtccaggacttggaaagtaggtgggctccgacccaaaaagaagccggcatttatccacgcaagggcaagcagacaaggcagcaacaagagcatcagaagtatatggtgccgctccaagccagcgctcaggagaaaaacgggctctag

SEQ ID NO: 245667 - DNA, 1560 bp, Artificial Sequence
  derived and/or modified sequence
atggccttcaatgacctgctgcagcaggtgggcggcgtgggccgcttccagcagatccaggtgaccctggtggtgctgcccctgctgctgatggccagccacaacaccctgcagaacttcaccgctgccatccccacccaccactgccggcccccagcagatgccaacctgagcaagaatggaggcctggaggtgtggctgccccgggaccggcagggccagcctgagagctgcctgcgcttcaccagcccccagtggggcctgcccttcctgaatggaacagaggccaatggaactggagccacagagccctgcacagatggctggatctatgacaacagcaccttccccagcaccatcgtgacagagtgggacctggtgtgcagccaccgggccctgcggcagctggcccagagcctgtacatggtgggcgtgctgctgggcgccatggtgtttggctacctggccgaccggctgggccgcaggaaggtgctgatcctgaactacctgcagacagctgtgtctggcacctgtgccgcctttgcccccaacttccccatctactgtgccttccggctgctgagcggcatggccctggccggcatcagcctgaactgcatgaccctgaatgtggagtggatgcccatccacacccgggcctgtgtgggcaccctcatcggctacgtgtacagcctgggccagttcctgctggccggcgtggcctatgctgtgccccactggaggcacctgcagctgctggtgtctgcccccttctttgccttcttcatctacagctggttcttcattgaaagtgcccgctggcacagcagcagcggccgcctggacctgaccctgcgggccctgcagagggtggcccgcatcaatggcaagcgggaggagggcgccaagctgtccatggaggtgctgcgggccagcctgcagaaggagctgaccatgggcaagggccaggccagcgccatggagctgctgcgctgccccaccctgcggcacctgttcctgtgcctgtccatgctgtggtttgccaccagctttgcctactacggcctggtgatggacctgcagggctttggagtgtccatctacctgatccaggtgatctttggagctgtggacctgcctgccaagctggtgggcttcctggtgatcaacagcctgggccggcggcctgcccagatggccgccctgctgctggccggcatctgcatcctgctgaatggagtcatcccccaggaccagagcatcgtgaggaccagcctggccgtgctgggcaagggctgcctggccgccagcttcaactgcatcttcctgtacacaggagagctgtaccccaccatgatccgggctgtgacagtgctgctgcctgagaccctgggccagcccctgcctgacacagtgcaggacctggagagccgctgggcccccacccagaaggaggccggcatctaccccaggaagggcaagcagacccggcagcagcaggagcaccagaagtacatggtgcccctgcaggccagcgcccaggagaagaatggcctgtag

SEQ ID NO: 245668 - DNA, 1560 bp, Artificial Sequence
  derived and/or modified sequence
atggccttcaacgacctgctgcagcaggtgggcggcgtgggccggttccagcagattcaagtcactctggtggttctgcctttacttctgatggcaagtcacaatactctacagaacttcactgcagccattcccactcaccattgtcgcccacccgctgatgctaatctctcaaagaacgggggcttggaagtctggcttcctagagaccgccagggacagccggaatcctgtctgagattcacctcccctcagtggggtttaccctttttgaacggaactgaagccaatggaactggcgctactgaaccgtgcacagatgggtggatctacgacaattccactttcccctccacaatagtgactgagtgggatctggtgtgtagccaccgcgctctgcgtcagttggctcagtccttatatatggtgggggtgctccttggagctatggtgttcggatatctggctgacaggttaggccgacggaaagtcctcattctgaactacctccagaccgcagtgtcgggaacgtgcgcagccttcgctcccaacttccctatatattgtgcattccgtcttttgtcgggcatggctttagccggaattagcttgaactgtatgacactcaatgtcgagtggatgcctatacacactcgtgcatgtgtgggcactcttatcggctacgtgtatagtctgggacaattcctgctggccggagtggcctacgcagtgcctcactggagacacctccagttgctggtgagcgccccattttttgcattttttatctactcatggttcttcatcgaatcagcccgctggcacagcagttccggcagattggatcttacacttcgggccctccagagggtcgcgaggataaacggcaaaagggaagagggagctaagctaagcatggaggtgctgcgtgcttccttacagaaggagctgactatgggaaagggccaagcaagcgccatggaacttctcaggtgcccgaccctgcgtcatctgtttttgtgtctttctatgctgtggtttgctacaagtttcgcatactatggtctggtgatggacctacaagggtttggagtgagcatctatctgatccaggttatttttggagctgtggacctgcccgctaaacttgtcggatttctggtgatcaattcactggggagacgcccagctcaaatggccgccttgcttctggcgggcatttgcatcctcctgaatggcgttatcccacaggaccagagcattgtgcgtacgtcgctcgcggtgcttggcaagggctgtttagccgcaagtttcaattgcattttcttgtataccggcgaactatatcctaccatgattagggcagtcacagtgcttctgcctgagaccctggggcagcccttgcccgatactgttcaggatctggagtctcgctgggctcccacacaaaaagaggcgggaatttatccccgtaaaggaaagcaaacgcgccagcagcaagagcaccagaagtacatggtacccctgcaggcaagcgctcaagaaaaaaacggcctgtag

SEQ ID NO: 245669 - DNA, 1560 bp, Artificial Sequence
  derived and/or modified sequence
atggcatttaacgacctcctgcaacaagtcggaggagtgggtcggtttcagcagatacaggtgacactggtcgttctgcctctcctgctgatggcttctcacaacactctgcaaaacttcactgcggcaatccccacccaccattgtcgaccccctgccgatgcgaatttaagcaagaatggcggtttagaagtgtggcttccacgcgaccgccagggccagcctgaaagttgcttgcgctttacttcaccacaatggggtctgccctttctgaatggtactgaggcaaatggaactggcgctaccgagccatgcactgatggctggatttacgataatagcacattcccttcgactattgttaccgagtgggatcttgtgtgtagtcatcgggctctgaggcagttggcccagtcactttacatggtcggcgtcttattaggagctatggtgtttggctaccttgccgacagactgggcagaagaaaagtgcttatcttgaattatcttcaaacggccgtgagcggcacatgcgctgcatttgccccaaattttcctatttattgcgcttttcgcctgctgtccggaatggcactggctggtatctcactgaactgcatgactctgaatgtggagtggatgcccattcacacaagggcctgcgtgggtactctgataggatacgtgtatagcttggggcagttcttactggctggtgtcgcatatgccgtgcctcactggcgtcacctgcaactgttagtgtcagccccttttttcgcattctttatctactcatggtttttcattgaatccgcgagatggcactcctcctccggtagactagacttgactctgcgtgccttgcaacgggttgctcgaatcaacggcaagcgagaggagggcgcaaaactttctatggaggtgttgcgggcttccttgcagaaggagctgacgatggggaaagggcaggcgtccgcaatggagctgctgagatgcccaacactgcgtcatctgtttctctgcctgtcaatgctgtggtttgcaacatccttcgcctactacggcttggttatggacctgcagggattcggagtgtccatctacttaatccaggtaatattcggggctgtcgacctgccagcaaagcttgttgggttcctcgtgattaactcccttggacgtagacccgcacaaatggccgctctgctgttggctggcatttgtattctgctcaatggcgtcattcctcaggaccagtccattgtcagaacatcgcttgcagttttgggtaaaggatgtcttgcagcctcctttaattgcattttcctctacaccggggagctgtatccaacaatgattcgagcagtgaccgtgttactcccagagactctcgggcaaccactgcctgacacagtgcaggacctagagtcgcgctgggcccctacccagaaggaagcaggtatttaccctaggaaagggaagcagaccaggcaacagcaggagcatcaaaagtatatggtccccctccaggcctccgcacaggaaaagaatggcctttag

SEQ ID NO: 245670 - DNA, 1560 bp, Artificial Sequence
  derived and/or modified sequence
atggcctttaatgacctcctgcagcaggtggggggtgtcggccgcttccagcagatccaggtcaccctggtggtcctccccctgctcctgatggcttctcacaacaccctgcagaacttcactgctgccatccctacccaccactgccgcccgcctgccgatgccaacctcagcaagaacggggggctggaggtctggctgccccgggacaggcaggggcagcctgagtcctgcctccgcttcacctccccgcagtggggactgccctttctcaatggcacagaagccaatggcacaggggccacagagccctgcaccgatggctggatctatgacaacagcaccttcccatctaccatcgtgactgagtgggaccttgtgtgctctcacagggccctacgccagctggcccagtccttgtacatggtgggggtgctgctcggagccatggtgttcggctaccttgcagacaggctaggccgccggaaggtactcatcttgaactacctgcagacagctgtgtcagggacctgcgcagccttcgcacccaacttccccatctactgcgccttccggctcctctcgggcatggctctggctggcatctccctcaactgcatgacactgaatgtggagtggatgcccattcacacacgggcctgcgtgggcaccttgattggctatgtctacagcctgggccagttcctcctggctggtgtggcctacgctgtgccccactggcgccacctgcagctactggtctctgcgcctttttttgccttcttcatctactcctggttcttcattgagtcggcccgctggcactcctcctccgggaggctggacctcaccctgagggccctgcagagagtcgcccggatcaatgggaagcgggaagaaggagccaaattgagtatggaggtactccgggccagtctgcagaaggagctgaccatgggcaaaggccaggcatcggccatggagctgctgcgctgccccaccctccgccacctcttcctctgcctctccatgctgtggtttgccactagctttgcatactatgggctggtcatggacctgcagggctttggagtcagcatctacctaatccaggtgatctttggtgctgtggacctgcctgccaagcttgtgggcttccttgtcatcaactccctgggtcgccggcctgcccagatggctgcactgctgctggcaggcatctgcatcctgctcaatggggtgataccccaggaccagtccattgtccgaacctctcttgctgtgctggggaagggttgtctggctgcctccttcaactgcatcttcctgtatactggggaactgtatcccacaatgatccgcgctgtcactgtcctcctgccagagaccctgggccagccactgccagacacggtgcaggacctggagagcaggtgggcccccactcagaaagaagcagggatatatcccaggaaagggaaacagacgcgacagcaacaagagcaccagaagtatatggtcccactgcaggcctcagcacaagagaagaatggactctga

SEQ ID NO: 245671 - DNA, 1560 bp, Artificial Sequence
  derived and/or modified sequence
atggccttcaacgacctgctgcagcaggtgggcggcgtgggcagattccagcagatccaggtgaccctggtggtgctgcccctgctgctgatggccagccacaacaccctgcagaacttcaccgccgccatccccacccaccactgcagaccccccgccgacgccaacctgagcaagaacggcggcctggaggtgtggctgcccagagacagacagggccagcccgagagctgcctgagattcaccagcccccagtggggcctgcccttcctgaacggcaccgaggccaacggcaccggcgccaccgagccctgcaccgacggctggatctacgacaacagcaccttccccagcaccatcgtgaccgagtgggacctggtgtgcagccacagagccctgagacagctggcccagagcctgtacatggtgggcgtgctgctgggcgccatggtgttcggctacctggccgacagactgggcagaagaaaggtgctgatcctgaactacctgcagaccgccgtgagcggcacctgcgccgccttcgcccccaacttccccatctactgcgccttcagactgctgagcggcatggccctggccggcatcagcctgaactgcatgaccctgaacgtggagtggatgcccatccacaccagagcctgcgtgggcaccctgatcggctacgtgtacagcctgggccagttcctgctggccggcgtggcctacgccgtgccccactggagacacctgcagctgctggtgagcgcccccttcttcgccttcttcatctacagctggttcttcatcgagagcgccagatggcacagcagcagcggcagactggacctgaccctgagagccctgcagagagtggccagaatcaacggcaagagagaggagggcgccaagctgagcatggaggtgctgagagccagcctgcagaaggagctgaccatgggcaagggccaggccagcgccatggagctgctgagatgccccaccctgagacacctgttcctgtgcctgagcatgctgtggttcgccaccagcttcgcctactacggcctggtgatggacctgcagggcttcggcgtgagcatctacctgatccaggtgatcttcggcgccgtggacctgcccgccaagctggtgggcttcctggtgatcaacagcctgggcagaagacccgcccagatggccgccctgctgctggccggcatctgcatcctgctgaacggcgtgatcccccaggaccagagcatcgtgagaaccagcctggccgtgctgggcaagggctgcctggccgccagcttcaactgcatcttcctgtacaccggcgagctgtaccccaccatgatcagagccgtgaccgtgctgctgcccgagaccctgggccagcccctgcccgacaccgtgcaggacctggagagcagatgggcccccacccagaaggaggccggcatctaccccagaaagggcaagcagaccagacagcagcaggagcaccagaagtacatggtgcccctgcaggccagcgcccaggagaagaacggcctgtag

SEQ ID NO: 245672 - protein, 405 aa, Artificial Sequence
  derived and/or modified sequence
MAAHLLPICALFLTLLDMAQGFRGPLLPNRPFTTVWNANTQWCLERHGVDVDVSVFDVVANPGQTFRGPDMTIFYSSQLGTYPYYTPTGEPVFGGLPQNASLIAHLARTFQDILAAIPAPDFSGLAVIDWEAWRPRWAFNWDTKDIYRQRSRALVQAQHPDWPAPQVEAVAQDQFQGAARAWMAGTLQLGRALRPRGLWGFYGFPDCYNYDFLSPNYTGQCPSGIRAQNDQLGWLWGQSRALYPSIYMPAVLEGTGKSQMYVQHRVAEAFRVAVAAGDPNLPVLPYVQIFYDTTNHFLPLESCQAIKEYMDTTLGPFILNVTSGALLCSQALCSGHGRCVRRTSHPKALLLLNPASFSIQLTPGGGPLSLRGALSLEDQAQMAVEFKCRCYPGWQAPWCERKSMW

SEQ ID NO: 245673 - DNA, 1218 bp, Artificial Sequence
  derived and/or modified sequence
atggcggcccacctcctcccaatatgtgccctgtttttgaccctactcgacatggcacagggctttagggggccactgctgccaaataggccgtttactacagtatggaacgccaatactcagtggtgtctggagcgccatggcgttgacgtggatgttagcgtgttcgacgtggtagctaaccccggccagaccttcaggggtcccgatatgacaatattctatagttcccagctcggcacctacccttactatacgcctaccggtgagcccgtctttggcggccttccccagaacgccagtttaatcgcgcacttagcccggacgttccaggacatcttggcagcaatccccgcaccggacttcagcggtctggcagttattgactgggaggcctggcgcccacgctgggctttcaattgggacacgaaggacatataccggcagcgatctcgagcactggttcaagcccagcaccctgactggccggccccacaggtggaagccgtggcccaggaccaatttcagggagccgcccgcgcgtggatggccggcactctgcagcttgggagggccctccggccgaggggcttgtggggcttttacggctttcctgactgttacaactatgactttctatctccaaactacacaggacagtgcccgagtggaattcgcgcccaaaatgaccagctgggatggctctgggggcagagccgagccctttatcccagcatctacatgcctgcggtcctggaggggaccggaaagagccaaatgtatgtccagcaccgtgtagcggaagcttttagggtcgccgtggctgcgggcgacccaaaccttccagttcttccatatgtacagatcttctacgatactaccaaccacttccttccactggagtcatgtcaggctataaaggagtatatggacactacacttggccccttcatcttgaacgtgaccagcggagcactcctgtgctcacaggctttgtgctccggacacgggagatgtgtccgcaggacctcccatcccaaagccctattactgctgaacccagcgtccttttccatccagctgacacccggcggcggaccactcagcctcaggggggccctgtccttggaggatcaggcacagatggctgtcgagtttaaatgtagatgctaccccgggtggcaggccccttggtgcgaacgtaagagcatgtggtag

SEQ ID NO: 245674 - DNA, 312 bp, Artificial Sequence
  derived and/or modified sequence
atggctgcccatctactgcccatctgtgccttgtttctgactctgctggatatggcccagggctttcgaggccctctgctgcctaaccggcctttcactactgtctggaacgctaatacacagtggtgccttgagaggcatggagtcgatgtcgacgtcagcgtattcgatgtggtggccaatcccgggcagacgtttcggggacccgatatgaccattttctatagctcccaactcggcacctacccctactacactccaactggggagcctgttttcgggggactcccccagaacgccagtctcatctag

SEQ ID NO: 245675 - DNA, 210 bp, Artificial Sequence
  derived and/or modified sequence
atggctgcccacctgcttccaatctgtgccctctttctgactcttctggacatggcccagggcttccgggggcccctgctccccaatcgcccatttacaaccgtctggaatgccaatactcaatggtgccttgagagacatggggtggatgttgacgtttctgtcttcgatgtggtagctaatccggggcaaactttccgaggaccctag

SEQ ID NO: 245676 - DNA, 1522 bp, Artificial Sequence
  derived and/or modified sequence
cttcctccaggagtctctggtgcagctggggtggaatctggccaggccctgcttaggcccccatcctggggtcaggaaatttggaggataaggcccttcagccccaaggttgtcctcgaccagtcccgtgccatggcagcccacctgcttcccatctgcgccctcttcctgaccttactcgatatggcccaaggctttaggggccccttgctacccaaccggcccttcaccaccgtctggaatgcaaacacccagtggtgcctggagaggcacggtgtggacgtggatgtcagtgtcttcgatgtggtagccaacccagggcagaccttccgcggccctgacatgacaattttctatagctcccagctgggcacctacccctactacacgcccactggggagcctgtgtttggtggtctgccccagaatgccagcctgattgcccacctggcccgcacattccaggacatcctggctgccatacctgctcctgacttctcagggctggcagtcatcgactgggaggcatggcgcccacgctgggccttcaactgggacaccaaggacatttaccggcagcgctcacgggcactggtacaggcacagcaccctgattggccagctcctcaggtggaggcagtagcccaggaccagttccagggagctgcacgggcctggatggcaggcaccctccagctggggcgggcactgcgtcctcgcggcctctggggcttctatggcttccctgactgctacaactatgactttctaagccccaactacaccggccagtgcccatcaggcatccgtgcccaaaatgaccagctagggtggctgtggggccagagccgtgccctctatcccagcatctacatgcccgcagtgctggagggcacagggaagtcacagatgtatgtgcaacaccgtgtggccgaggcattccgtgtggctgtggctgctggtgaccccaatctgccggtgctgccctatgtccagatcttctatgacacgacaaaccactttctgcccctggaatcatgtcaggccatcaaggagtatatggacactacactggggcccttcatcctgaacgtgaccagtggggcccttctctgcagtcaagccctgtgctccggccatggccgctgtgtccgccgcaccagccaccccaaagccctcctcctccttaaccctgccagtttctccatccagctcacgcctggtggtgggcccctgagcctgcggggtgccctctcacttgaagatcaggcacagatggctgtggagttcaaatgtcgatgctaccctggctggcaggcaccgtggtgtgagcggaagagcatgtggtgattggccacacactgagttgcacatattgagaacctaatgcactctgggtctggccagggcttcctcaaatacatgcacagtcatacaagtcatggtcacagtaaagagtacactcagccactgtcacaggcatattccctgcacacacatgcatacttacagactggaatag

SEQ ID NO: 245677 - DNA, 567 bp, Artificial Sequence
  derived and/or modified sequence
ccttcctccaggagtctctggtgcagctggggtggaatctggccaggccctgcttaggcccccatcctggggtcaggaaatttggaggataaggcccttcagccccaaggtcaatgtttaacagaaaccagagcagcggtggattaatgcgcaagggctcagccccccagccctgagcagtgggggaatcggagactttgcaacctgttctcagctctgcctcccctggccaggttgtcctcgaccagtcccgtgccatggcagcccacctgcttcccatctgcgccctcttcctgaccttactcgatatggcccaaggctttaggggccccttgctacccaaccggcccttcaccaccgtctggaatgcaaacacccagtggtgcctggagaggcacggtgtggacgtggatgtcagtgtcttcgatgtggtagccaacccagggcagaccttccgcggccctgacatgacaattttctatagctcccagctgggcacctacccctactacacgcccactggggagcctgtgtttggtggtctgccccagaatgccagcctgattg

SEQ ID NO: 245678 - DNA, 561 bp, Artificial Sequence
  derived and/or modified sequence
tttttgtatttttagtagagaaggggtttcaccatgttagccgggatggtctcgatctcctgacctcgtgatctgccacctcggcttcccaaagtgctaggattataggcgtgagcctccgcacctggcatgcctggccatattttaaaatattttttttaaggaggaaaagatccacgaaagtaaagtgcctagggcccatcaatgtcagatgcagccacgtggacaaagaacactccctgagcacaagacacgaaagaacccggtctccagtgtcacaaacaggcctgcccagcagggtctgcccctgcccacctcctccagcctaggttgtcctcgaccagtcccgtgccatggcagcccacctgcttcccatctgcgccctcttcctgaccttactcgatatggcccaaggctttaggggccccttgctacccaaccggcccttcaccaccgtctggaatgcaaacacccagtggtgcctggagaggcacggtgtggacgtggatgtcagtgtcttcgatgtggtagccaacccagggcagaccttccgcggccctg

SEQ ID NO: 245679 - DNA, 1218 bp, Artificial Sequence
  derived and/or modified sequence
atggccgcccacctgctgcccatctgtgccctcttcctgaccctgctggacatggcccagggcttccggggccccctgctgcccaaccggcccttcaccaccgtgtggaatgccaacacccagtggtgcctggagagacatggagtggatgtggatgtgtctgtgtttgatgtggtggccaaccctggccagaccttccggggccctgacatgaccatcttctacagcagccagctgggcacctacccctactacacccccaccggggagcctgtgtttggaggcctgccccagaatgccagcctgattgcccacctggcccggaccttccaggacatcctggccgccatcccagccccagacttcagcggcctggccgtcatcgactgggaggcctggaggccccgctgggccttcaactgggacaccaaggacatctaccggcagaggagccgggccctggtgcaggcccagcacccagactggccagccccccaggtggaggccgtggcccaggaccagttccagggcgccgcccgggcctggatggccggcaccctgcagctgggccgggccctgcggccccggggcctgtggggcttctacggcttcccagactgctacaactatgacttcctgagccccaactacacaggccagtgccccagcggcatccgggcccagaatgaccagctgggctggctgtggggccagagccgggccctgtaccccagcatctacatgcctgctgtgctggagggcaccgggaagagccagatgtatgtgcagcaccgggtggccgaggccttccgggtggccgtggccgccggggaccccaacctgcctgtgctgccctacgtgcagatcttctatgacaccaccaaccacttcctgcccctggagagctgccaggccatcaaggagtacatggacaccaccctgggccccttcatcctgaatgtgaccagcggggccctgctgtgcagccaggccctgtgcagcggccacggccgctgtgtgcggaggaccagccaccccaaggccctgctgctgctgaacccagccagcttcagcatccagctgaccccaggcggcggccccctgagcctgcggggggccctgagcctggaggaccaggcccagatggctgtggagttcaagtgccgctgctacccaggctggcaggccccctggtgtgagaggaagtccatgtggtag

SEQ ID NO: 245680 - DNA, 312 bp, Artificial Sequence
  derived and/or modified sequence
atggccgcccacctgctgcccatctgtgccctcttcctgaccctgctggacatggcccagggcttccggggccccctgctgcccaaccggcccttcaccaccgtgtggaatgccaacacccagtggtgcctggagagacatggagtggatgtggatgtgtctgtgtttgatgtggtggccaaccctggccagaccttccggggccctgacatgaccatcttctacagcagccagctgggcacctacccctactacacccccaccggggagcctgtgtttggaggcctgccccagaatgccagcctcatctag

SEQ ID NO: 245681 - DNA, 210 bp, Artificial Sequence
  derived and/or modified sequence
atggccgcccacctgctgcccatctgtgccctcttcctgaccctgctggacatggcccagggcttccggggccccctgctgcccaaccggcccttcaccaccgtgtggaatgccaacacccagtggtgcctggagagacatggagtggatgtggatgtgtctgtgtttgatgtggtggccaaccctggccagaccttccggggcccctag

SEQ ID NO: 245682 - DNA, 1218 bp, Artificial Sequence
  derived and/or modified sequence
atggccgcccacctgctgcccatctgcgccctgttcctgaccctgctagatatggcccagggcttccggggacctctgctgcctaataggccctttacgactgtttggaacgctaatacgcagtggtgcctagagcgccatggggtcgatgtggatgtgtccgtgttcgacgtggtagccaaccctggccagacgtttaggggtcccgatatgacgattttctatagctctcaactgggaacatatccttactacaccccaaccggagaacccgtttttggcggcttaccgcagaacgcatcgctaatcgcccatctggcacgcacgtttcaggatatcctggctgccatccccgccccagatttctccggcctagcggttattgattgggaagcctggagaccaaggtgggccttcaattgggacacaaaggacatctatcggcagagatcgcgcgctttagtgcaagcacagcaccccgactggccagcacctcaggtagaggctgttgcccaggaccaatttcagggagctgcacgtgcctggatggccggaaccctccaattgggcagggccctgcgccctcgcggattatggggattctatggctttcctgactgctacaattatgatttcctaagtcctaactatacaggtcaatgcccctccggaattcgggcccaaaatgatcagcttggctggctatggggccagagcagagctctgtatccgtcaatctacatgcccgccgtgctggagggaacaggaaagtctcagatgtacgtccagcatagggtcgccgaggccttccgggttgctgtggctgctggagaccctaatcttcccgttctaccttatgtccagatcttttatgacacaacaaaccacttcttgccactggagagctgtcaagcaattaaagagtatatggacactaccctcgggcctttcatattaaacgttacctccggagcactgctgtgctcccaggcattgtgctcgggacacggcagatgcgtaagacgaacatcccatcccaaggcccttctcctgctaaatccagccagctttagcatccagcttacgccaggtggaggcccacttagtctgagaggtgccctctcgctcgaggaccaggcccagatggctgtagaattcaagtgcaggtgctatcccggatggcaggccccttggtgtgagagaaaatccatgtggtag

SEQ ID NO: 245683 - DNA, 312 bp, Artificial Sequence
  derived and/or modified sequence
atggccgcccacctgctgcccatctgcgccctgttcctgaccctgcttgacatggcacagggatttagaggacctctgcttcccaaccgcccttttacaaccgtgtggaacgccaacacccagtggtgcctcgagcggcatggggttgacgtggatgtcagtgtgttcgacgtggtcgccaaccctgggcaaacatttcgcggtcccgatatgactatcttctattcaagtcagctgggtacatacccctattatactcctactggggagccagtgtttggtggtttgcctcagaacgcctcactaatctag

SEQ ID NO: 245684 - DNA, 210 bp, Artificial Sequence
  derived and/or modified sequence
atggccgcccacctgctgcccatctgcgccctgttcctgaccctgctggacatggcccaaggtttcagagggccattactgccaaataggccattcacgacggtgtggaatgcaaacactcagtggtgtctcgagagacatggggtggacgtggatgtgagtgtattcgatgtggtagctaaccctggacaaacattccggggaccatag

SEQ ID NO: 245685 - DNA, 1218 bp, Artificial Sequence
  derived and/or modified sequence
atggcagcccatctcctgccaatttgtgccctgttcctcacccttctggatatggcccagggcttcaggggtccgttgctgccaaaccgcccatttacaaccgtatggaacgccaacactcaatggtgccttgagaggcacggggtggatgtggacgtaagtgtcttcgacgtcgtagcaaatccgggacagacatttcgtggacccgatatgaccatcttttacagttcccagctagggacatacccctactatactcctacaggtgaaccagtgttcgggggtcttcctcagaacgcttccctgatcgcccatttggcaaggacttttcaagacatattggcagcaatacctgctcctgactttagcggactagccgtgatcgattgggaggcttggcgccctcgatgggcatttaactgggataccaaggatatatacaggcaacgttcacgggctctcgtgcaggctcagcacccagactggccagcgcctcaagtcgaagctgtagcacaggatcagtttcagggggcagccagagcatggatggccggaacattgcaattgggtagggcactcaggcctcgtggactctgggggttctatggctttccagattgttacaattacgactttctgagccctaactatactggccagtgtccttctggaatccgcgcacaaaacgaccagctcggttggttgtggggtcagagtagagcactatacccttcgatctacatgccagctgtgctcgagggcacaggtaaaagccagatgtacgtgcagcatcgggtggcagaggcattcagagtcgccgttgccgctggcgaccccaatcttcccgtccttccatatgtacagatcttctacgatactacaaaccattttctgccactcgagagctgccaagctattaaggagtatatggataccacgttgggtccattcattttgaatgtcacaagtggagctctgttgtgtagccaggccctctgtagtggtcacggtcgctgtgtgcgcaggacaagccaccctaaggcactgcttttgctgaatcccgcttccttcagcatccaacttactcctgggggaggcccactgtccctgcggggtgcactgagtctcgaggatcaggcgcagatggccgtcgagtttaagtgcaggtgttatccaggctggcaggccccatggtgcgagcgcaagagcatgtggtag

SEQ ID NO: 245686 - DNA, 312 bp, Artificial Sequence
  derived and/or modified sequence
atggctgcccatctgctgcctatctgcgccctttttctgacactcctggacatggcacagggctttagggggccacttctacctaaccgccctttcaccaccgtctggaacgccaacacccagtggtgtctagaacggcacggtgtggatgtggatgtgagcgtctttgatgtagtggctaaccctggccagactttccgagggccagatatgactatcttttactctagtcagctgggaacttacccttactatactcccaccggagagccagtgtttggcggactgccacagaatgctagtctcatatag

SEQ ID NO: 245687 - DNA, 210 bp, Artificial Sequence
  derived and/or modified sequence
atggctgcgcacctcctgccaatttgcgcgctctttcttaccctgctggatatggcgcaaggatttaggggtcccctgcttcccaatagaccatttacaacagtctggaatgccaacactcagtggtgtctagagagacacggggtcgacgtggacgtttccgtcttcgacgtggtcgcaaacccgggtcagacgttcagaggaccctag

SEQ ID NO: 245688 - DNA, 1218 bp, Artificial Sequence
  derived and/or modified sequence
atggccgcccacctgctgcccatctgcgccctgttcctgaccctgctggacatggcccagggcttcagaggccccctgctgcccaacagacccttcaccaccgtgtggaacgccaacacccagtggtgcctggagagacacggcgtggacgtggacgtgagcgtgttcgacgtggtggccaaccccggccagaccttcagaggccccgacatgaccatcttctacagcagccagctgggcacctacccctactacacccccaccggcgagcccgtgttcggcggcctgccccagaacgccagcctgatcgcccacctggccagaaccttccaggacatcctggccgccatccccgcccccgacttcagcggcctggccgtgatcgactgggaggcctggagacccagatgggccttcaactgggacaccaaggacatctacagacagagaagcagagccctggtgcaggcccagcaccccgactggcccgccccccaggtggaggccgtggcccaggaccagttccagggcgccgccagagcctggatggccggcaccctgcagctgggcagagccctgagacccagaggcctgtggggcttctacggcttccccgactgctacaactacgacttcctgagccccaactacaccggccagtgccccagcggcatcagagcccagaacgaccagctgggctggctgtggggccagagcagagccctgtaccccagcatctacatgcccgccgtgctggagggcaccggcaagagccagatgtacgtgcagcacagagtggccgaggccttcagagtggccgtggccgccggcgaccccaacctgcccgtgctgccctacgtgcagatcttctacgacaccaccaaccacttcctgcccctggagagctgccaggccatcaaggagtacatggacaccaccctgggccccttcatcctgaacgtgaccagcggcgccctgctgtgcagccaggccctgtgcagcggccacggcagatgcgtgagaagaaccagccaccccaaggccctgctgctgctgaaccccgccagcttcagcatccagctgacccccggcggcggccccctgagcctgagaggcgccctgagcctggaggaccaggcccagatggccgtggagttcaagtgcagatgctaccccggctggcaggccccctggtgcgagagaaagagcatgtggtag

SEQ ID NO: 245689 - DNA, 312 bp, Artificial Sequence
  derived and/or modified sequence
atggccgcccacctgctgcccatctgcgccctgttcctgaccctgctggacatggcccagggcttcagaggccccctgctgcccaacagacccttcaccaccgtgtggaacgccaacacccagtggtgcctggagagacacggcgtggacgtggacgtgagcgtgttcgacgtggtggccaaccccggccagaccttcagaggccccgacatgaccatcttctacagcagccagctgggcacctacccctactacacccccaccggcgagcccgtgttcggcggcctgccccagaacgccagcctgatctag

SEQ ID NO: 245690 - DNA, 210 bp, Artificial Sequence
  derived and/or modified sequence
atggccgcccacctgctgcccatctgcgccctgttcctgaccctgctggacatggcccagggcttcagaggccccctgctgcccaacagacccttcaccaccgtgtggaacgccaacacccagtggtgcctggagagacacggcgtggacgtggacgtgagcgtgttcgacgtggtggccaaccccggccagaccttcagaggcccctag

SEQ ID NO: 245691 - DNA, 762 bp, Artificial Sequence
  derived and/or modified sequence
atggccggcactttgcagctgggtagggccttacggcctcgcggcctctggggattctatggattcccggactgttataattatgacttcttaagccctaactacaccggtcaatgcccctcagggataagagctcagaatgaccagctaggatggctttgggggcagtctcgggctctttacccgagtatctatatgcccgccgtgttagaaggcactggcaagtcccagatgtacgtacagcacagggtggccgaggccttcagagtagcagttgctgctggcgacccgaaccttcccgttctgccctacgtgcagatcttctatgacaccaccaatcactttctgccacttgacgagcttgagcacagcctgggtgagtccgctgcccagggggccgcgggggttgttctctgggtgtcctgggagaatacacgcactaaggaaagctgtcaggccattaaagaatatatggataccactttgggcccattcatccttaacgtgaccagcggcgccctgctttgcagtcaggccctgtgctctggacatggtcgatgtgtcagaagaactagtcaccccaaagcccttttgctgctgaatccggcttccttctccatccagctgacgcctgggggtggccctttaagcctgcgcggcgcattgagtcttgaagatcaagcccagatggccgtcgagttcaaatgccggtgttaccctggctggcaggcaccctggtgtgaacgaaagagcatgtggtag

SEQ ID NO: 245692 - DNA, 666 bp, Artificial Sequence
  derived and/or modified sequence
cttcctccaggagtctctggtgcagctggggtggaatctggccaggccctgcttaggcccccatcctggggtcaggaaatttggaggataaggcccttcagccccaagtgctggagggcacagggaagtcacagatgtatgtgcaacaccgtgtggccgaggcattccgtgtggctgtggctgctggtgaccccaatctgccggtgctgccctatgtccagatcttctatgacacgacaaaccactttctgcccctggatgagctggagcacagcctgggggagagtgcggcccagggggcagctggagtggtgctctgggtgagctgggaaaatacaagaaccaaggaatcatgtcaggccatcaaggagtatatggacactacactggggcccttcatcctgaacgtgaccagtggggcccttctctgcagtcaagccctgtgctccggccatggccgctgtgtccgccgcaccagccaccccaaagccctcctcctccttaaccctgccagtttctccatccagctcacgcctggtggtgggcccctgagcctgcggggtgccctctcacttgaagatcaggcacagatggctgtggagttcaaatgtcgatgctaccctggctggcaggcaccgtggtgtgagcggaagagcatgtggtgat

SEQ ID NO: 245693 - DNA, 762 bp, Artificial Sequence
  derived and/or modified sequence
atggccggcaccctgcagctgggccgggccctgcggccccggggcctgtggggcttctacggcttcccagactgctacaactatgacttcctgagccccaactacacaggccagtgccccagcggcatccgggcccagaatgaccagctgggctggctgtggggccagagccgggccctgtaccccagcatctacatgcctgctgtgctggagggcaccgggaagagccagatgtatgtgcagcaccgggtggccgaggccttccgggtggccgtggccgccggggaccccaacctgcctgtgctgccctacgtgcagatcttctatgacaccaccaaccacttcctgcccctggatgagctggagcacagcctgggggagagcgctgcccagggcgccgccggcgtggtgctgtgggtgtcctgggagaacaccaggaccaaggagagctgccaggccatcaaggagtacatggacaccaccctgggccccttcatcctgaatgtgaccagcggggccctgctgtgcagccaggccctgtgcagcggccacggccgctgtgtgcggaggaccagccaccccaaggccctgctgctgctgaacccagccagcttcagcatccagctgaccccaggcggcggccccctgagcctgcggggggccctgagcctggaggaccaggcccagatggctgtggagttcaagtgccgctgctacccaggctggcaggccccctggtgtgagaggaagtccatgtggtag

SEQ ID NO: 245694 - DNA, 762 bp, Artificial Sequence
  derived and/or modified sequence
atggccggcaccctgcagctgggccgggccctgcggccccggggcctgtggggattttatgggttcccggactgctataattatgactttctcagtcccaactacaccgggcagtgcccctccggcatcagggctcagaacgaccagctggggtggttgtggggtcaatcccgcgctctgtacccatccatctatatgccagctgtgctggagggtaccggtaagagccagatgtacgtgcagcaccgagttgccgaagcattccgtgtagccgtggctgcaggggacccaaatctgcctgttcttccatatgtacaaattttctatgatactactaaccactttctccccttagacgagctggaacactctttgggggaaagcgctgcacagggagccgccggcgttgtgttgtgggtgagctgggagaatactaggaccaaggagtcatgtcaggccatcaaggaatacatggacaccaccctgggccccttcatcttaaatgtaacatctggagccctcctgtgctctcaagcgctgtgctccgggcatggaaggtgcgtccgtagaacttcccatcccaaggcattgctgctgctgaacccagcgagcttctccatccagcttaccccgggtgggggcccactcagtctgcgtggggcgctgtccctggaggaccaggcacagatggcagtcgaattcaagtgtcgatgctatccaggctggcaggccccgtggtgtgagaggaaatctatgtggtag

SEQ ID NO: 245695 - DNA, 762 bp, Artificial Sequence
  derived and/or modified sequence
atggccggtacattgcaactcggtagagcactgcggccacgcggactgtggggcttttacgggtttcctgactgttacaattatgattttttgagcccaaattataccggacagtgtccttctggcatccgggctcagaacgaccagctggggtggctctggggacagagccgtgccttatacccctctatttatatgccagcagtgctggagggtactggaaaatctcagatgtacgtgcaacatagagtagctgaagcctttcgggttgcagtggctgccggagacccaaatttaccagtgctgccatatgtacagatcttttatgacaccaccaatcacttcctacccctggatgaactggagcattcactcggagaaagcgccgcacagggcgctgccggagtcgttctttgggtatcttgggaaaacacccgcacgaaggaaagctgtcaggccattaaggagtatatggatacgaccctggggccattcatcctaaacgtgacttctggagccttgctttgtagccaggcactgtgtagtggccatggccgatgcgttcgcaggacaagccatcccaaagctttgcttctgcttaacccggcaagtttttccatccagctgacacctggtgggggacctctgtcactgcggggagcgctttccttggaggaccaggcccagatggccgtggagttcaaatgtcgctgttatcccggttggcaggcgccatggtgcgagcggaaaagtatgtggtag

SEQ ID NO: 245696 - DNA, 762 bp, Artificial Sequence
  derived and/or modified sequence
atggccggcaccctgcagctgggcagagccctgagacccagaggcctgtggggcttctacggcttccccgactgctacaactacgacttcctgagccccaactacaccggccagtgccccagcggcatcagagcccagaacgaccagctgggctggctgtggggccagagcagagccctgtaccccagcatctacatgcccgccgtgctggagggcaccggcaagagccagatgtacgtgcagcacagagtggccgaggccttcagagtggccgtggccgccggcgaccccaacctgcccgtgctgccctacgtgcagatcttctacgacaccaccaaccacttcctgcccctggacgagctggagcacagcctgggcgagagcgccgcccagggcgccgccggcgtggtgctgtgggtgagctgggagaacaccagaaccaaggagagctgccaggccatcaaggagtacatggacaccaccctgggccccttcatcctgaacgtgaccagcggcgccctgctgtgcagccaggccctgtgcagcggccacggcagatgcgtgagaagaaccagccaccccaaggccctgctgctgctgaaccccgccagcttcagcatccagctgacccccggcggcggccccctgagcctgagaggcgccctgagcctggaggaccaggcccagatggccgtggagttcaagtgcagatgctaccccggctggcaggccccctggtgcgagagaaagagcatgtggtag

SEQ ID NO: 245697 - protein, 176 aa, Artificial Sequence
  derived and/or modified sequence
MYVQHRVAEAFRVAVAAGDPNLPVLPYVQIFYDTTNHFLPLDELEHSLGESAAQGAAGVVLWVSWENTRTKESCQAIKEYMDTTLGPFILNVTSGALLCSQALCSGHGRCVRRTSHPKALLLLNPASFSIQLTPGGGPLSLRGALSLEDQAQMAVEFKCRCYPGWQAPWCERKSMW

SEQ ID NO: 245698 - DNA, 531 bp, Artificial Sequence
  derived and/or modified sequence
atgtatgtccaacaccgcgtggccgaagcttttagagttgctgttgctgccggagatcctaacctgccagtgcttccatacgttcaaatcttctatgatactactaaccacttccttccacttgacgagctggagcattcgttgggcgagtctgctgctcagggtgcagcaggcgtggtgctatgggtttcctgggagaatactcggaccaaagagtcctgtcaggccatcaaggaatacatggacactacccttggcccttttatccttaatgttacgtcaggggctctgttgtgctcccaggcactgtgttccggacacggaaggtgtgtgcgacgcacatcacatccaaaggccttgttgctgcttaatcctgcatccttcagtatccagttgaccccaggcggaggtcccctgagcctcaggggggccctgtctctggaggaccaggcgcaaatggcagtcgaatttaaatgtagatgctatccaggatggcaagccccgtggtgcgagcgcaagtcaatgtggtag

SEQ ID NO: 245699 - DNA, 531 bp, Artificial Sequence
  derived and/or modified sequence
atgtatgtgcagcaccgggtggccgaggccttccgggtggccgtggccgccggggaccccaacctgcctgtgctgccctacgtgcagatcttctatgacaccaccaaccacttcctgcccctggatgagctggagcacagcctgggggagagcgctgcccagggcgctgctggggtggtgctgtgggtgtcctgggagaacaccaggaccaaggagagctgccaggccatcaaggagtacatggacaccaccctgggccccttcatcctgaatgtgaccagcggggccctgctgtgcagccaggccctgtgcagcggccacggccgctgtgtgcggaggaccagccaccccaaggccctgctgctgctgaacccagccagcttcagcatccagctgacccctgggggcggccccctgagcctgcggggggccctgagcctggaggaccaggcccagatggctgtggagttcaagtgccgctgctacccaggctggcaggccccctggtgtgagaggaagtccatgtggtag

SEQ ID NO: 245700 - DNA, 531 bp, Artificial Sequence
  derived and/or modified sequence
atgtacgtgcagcaccgggtggccgaggccttccgggtggccgtggctgcaggggacccaaatctaccagtgctgccatatgtccaaatcttttatgatacaaccaaccacttcctgcctttggacgagctggagcatagcctaggcgaatcagcggcgcagggggccgccggcgtcgtcctgtgggtctcttgggagaatacaagaacaaaggagtcttgtcaagcgatcaaggaatacatggataccacattagggccctttatcctcaatgttacttcaggcgccctcctttgtagccaggctctatgctctgggcacgggagatgtgtaagacgcacttctcaccccaaagccctgctcctgctgaacccagcgtcattttccatccagttgacgccgggaggcggtccattgtctttgagaggcgccctcagcttagaagaccaggctcagatggcagtggagtttaaatgtaggtgttaccccggctggcaagccccttggtgtgagagaaagtctatgtggtag

SEQ ID NO: 245701 - DNA, 531 bp, Artificial Sequence
  derived and/or modified sequence
atgtatgtccagcaccgcgttgctgaggcctttagggtcgccgtggcggctggagaccctaatttacccgtgctcccttacgtccagattttctacgatacgaccaatcatttcctaccacttgacgagctggagcactccctgggggagagcgcagcgcagggcgcagcgggagtggtgttgtgggtcagttgggagaataccaggaccaaagagtcctgccaagcaattaaagagtatatggacacaaccctggggcctttcattttgaacgtgacatccggcgctctgctatgcagccaggccctgtgcagcggacacgggaggtgtgtgcgacgcactagccaccccaaagccttgctcctcttgaaccccgcatccttttcaatccagctgacgccagggggaggcccattatctcttcgaggagctttgtcactcgaggaccaggcccagatggccgtagagttcaagtgtaggtgctaccccggttggcaggcaccgtggtgcgaaaggaaaagtatgtggtag

SEQ ID NO: 245702 - DNA, 531 bp, Artificial Sequence
  derived and/or modified sequence
atgtacgtgcagcacagagtggccgaggccttcagagtggccgtggccgccggcgaccccaacctgcccgtgctgccctacgtgcagatcttctacgacaccaccaaccacttcctgcccctggacgagctggagcacagcctgggcgagagcgccgcccagggcgccgccggcgtggtgctgtgggtgagctgggagaacaccagaaccaaggagagctgccaggccatcaaggagtacatggacaccaccctgggccccttcatcctgaacgtgaccagcggcgccctgctgtgcagccaggccctgtgcagcggccacggcagatgcgtgagaagaaccagccaccccaaggccctgctgctgctgaaccccgccagcttcagcatccagctgacccccggcggcggccccctgagcctgagaggcgccctgagcctggaggaccaggcccagatggccgtggagttcaagtgcagatgctaccccggctggcaggccccctggtgcgagagaaagagcatgtggtag

SEQ ID NO: 245703 - protein, 548 aa, Artificial Sequence
  derived and/or modified sequence
MGFEELLEQVGGFGPFQLRNVALLALPRVLLPLHFLLPIFLAAVPAHRCALPGAPANFSHQDVWLEAHLPREPDGTLSSCLRFAYPQALPNTTLGEERQSRGELEDEPATVPCSQGWEYDHSEFSSTIATESQWDLVCEQKGLNRAASTFFFAGVLVGAVAFGYLSDRFGRRRLLLVAYVSTLVLGLASAASVSYVMFAITRTLTGSALAGFTIIVMPLELEWLDVEHRTVAGVLSSTFWTGGVMLLALVGYLIRDWRWLLLAVTLPCAPGILSLWWVPESARWLLTQGHVKEAHRYLLHCARLNGRPVCEDSFSQEAVSKVAAGERVVRRPSYLDLFRTPRLRHISLCCVVVWFGVNFSYYGLSLDVSGLGLNVYQTQLLFGAVELPSKLLVYLSVRYAGRRLTQAGTLLGTALAFGTRLLVSSDMKSWSTVLAVMGKAFSEAAFTTAYLFTSELYPTVLRQTGMGLTALVGRLGGSLAPLAALLDGVWLSLPKLTYGGIALLAAGTALLLPETRQAQLPETIQDVERKSAPTSLQEEEMPMKQVQN

SEQ ID NO: 245704 - DNA, 1647 bp, Artificial Sequence
  derived and/or modified sequence
atggggtttgaagaactccttgagcaggtgggcgggtttgggcccttccaacttaggaacgtggctctcctggcactaccacgcgtcttgcttcctctgcatttcctgttacctatcttcttagctgccgtaccggcacaccgctgcgccttgcccggcgcgcctgccaacttctctcatcaggacgtatggcttgaagcacacctcccacgagagcctgatggcacgctgtcgagttgcctgaggttcgcgtacccccaagctctgccaaataccacattaggcgaggaaagacagtcaaggggggagttggaggatgagccagcaaccgttccttgttctcaaggatgggagtatgatcactcggaattcagctctaccatcgcaacagagtcccagtgggacttagtgtgcgagcagaagggcttgaaccgcgccgccagcactttcttctttgcgggtgtgctagtcggcgctgttgcattcggatacctgtcagataggtttggcaggagaagacttctcttagtcgcgtacgtcagcacccttgtcctgggcctagcatcagccgcctcggtgtcatacgtgatgtttgccattactagaactcttacaggttctgcattagcaggcttcaccattattgtgatgccactggaactggaatggctggacgttgagcatcggacggtggccggcgttctctctagcacattttggacaggtggggtgatgctcttggcactggtggggtacctgattcgcgattggcgttggttattgctggccgttacattgccatgcgcaccagggattttgagcctatggtgggttcccgaatctgcacgctggctgttgacgcaagggcacgtgaaggaagctcatcggtatttgcttcattgcgccagactgaacggccgcccagtctgcgaagattctttttcccaggaggctgtctcaaaggtggccgcaggggagcgggtcgtgagacgcccatcgtacctggacctgtttcggacccctaggctcaggcacattagcctgtgctgtgtcgtcgtgtggtttggtgtgaacttctcgtattacggattgtcactggatgtgagtggcctgggccttaacgtgtaccagacccagttactgttcggcgccgtggagctgccgagcaaactacttgtctatctctccgtcaggtacgcaggacgccggctgactcaagcgggaacattattggggacagctctggcttttgggaccaggctgcttgtttctagcgacatgaaatcctggtcaactgttctggcggtgatggggaaggcctttagcgaagcagctttcaccacagcctacctgttcacgagcgagctttaccccactgtgttgcgccaaactggcatggggttgaccgccttagtaggcaggcttggagggagcctggccccgctggccgccctgctggatggcgtgtggttgtcattgcctaaattaacatacggcggcattgcactactcgcagctggtacggctctcctcctgcccgagacacgacaggcacagttgccagagacgatccaggatgtggaaagaaaatctgctcccacttctttacaggaggaggagatgcccatgaagcaggtgcaaaattag

SEQ ID NO: 245705 - DNA, 1647 bp, Artificial Sequence
  derived and/or modified sequence
atgggctttgaggagctgctggagcaggtgggcggcttcggccccttccagctgagaaatgtggccctgctggccctgccccgggtgctgctgcccctgcacttcctgctgcccatcttcctggccgctgtgcctgcccaccgctgtgccctgcccggggccccagccaacttcagccaccaggatgtgtggctggaggcccacctgccccgggagccagatggcaccctgagcagctgcctgcgctttgcctacccccaggccctgcccaacaccaccctgggggaggagcggcagagcagaggagagctggaggatgagcccgccaccgtgccctgcagccagggctgggagtatgaccacagcgagttcagcagcaccatcgccacagagagccagtgggacctggtgtgtgagcagaagggcctgaacagagctgccagcaccttcttctttgctggggtgctggtgggcgctgtggccttcggctacctgagtgacagatttggaagaagaaggctgctgctggtggcctacgtgtccaccctggtgctgggcctggccagcgctgcctctgtgtcctatgtgatgtttgccatcaccaggaccctgactggaagtgccctggccggcttcaccatcatcgtgatgcccctggagctggagtggctggatgtggagcacaggacagtggccggcgtgctgagcagcaccttctggacaggaggagtgatgctgctggccctggtgggctacctgatccgggactggcgctggctgctgctggccgtgaccctgccctgtgcccctggcatcctgagcctgtggtgggtgcctgagagcgcccgctggctgctgacccagggccacgtgaaggaggcccaccgctacctgctgcactgtgcccggctgaatggccggcctgtgtgtgaagattccttcagccaggaggccgtgtccaaggtggccgccggggagcgggtggtgcggcggcccagctacctggacctcttccgcaccccccggctgcggcacatcagcctgtgctgcgtggtggtgtggtttggagtgaacttctcctactacggcctgagcctggatgtgtctggcctgggcctgaatgtgtaccagacccagctgctgtttggagctgtggagctgcccagcaagctgctggtgtacctgtctgtgcgctatgccggccggcggctgacccaggccggcaccctgctgggcacagccctggccttcggcacccggctgctggtgtccagtgacatgaagtcctggagcacagtgctggccgtgatgggcaaggccttcagcgaggccgccttcaccacagcctacctgttcaccagcgagctgtaccccaccgtgctgcggcagacaggcatgggcctgacagccctggtgggccgcctgggcggcagcctggcccccctggccgccctgctggatggagtgtggctgagcctgcccaagctgacctacggcggcatcgccctgctggccgccggcacagccctgctgctgcctgagacccggcaggcccagctgcctgagaccatccaggatgtggagaggaagagcgcccccaccagcctgcaggaggaggagatgcccatgaagcaggtgcagaactag

SEQ ID NO: 245706 - DNA, 1647 bp, Artificial Sequence
  derived and/or modified sequence
atgggcttcgaggagctgctggagcaggtgggcggcttcggcccctttcagctgaggaacgtggccctgttagctctgcctagggtgcttctgcccttgcactttctgctgccaattttcctggccgcagtccccgcccacaggtgcgctctgcccggtgcacccgctaatttttcacaccaggatgtgtggcttgaggctcacctcccccgcgagcctgatggaactctctcaagctgcctgcgatttgcctacccccaggccttgcctaatacgacattgggggaggaaagacagagcaggggagaactggaagacgagcccgccactgtcccatgcagccagggttgggagtacgaccatagtgagttcagttccaccatcgcgaccgaatcacagtgggacctggtgtgcgagcagaaagggctgaaccgggctgcctcaaccttttttttcgctggcgttcttgtgggagcggttgctttcgggtatctaagcgatcgctttggccggcgccgactgctgttagtcgcctatgtgtctacgctcgtattaggcctcgcgagtgctgcgtctgtctcatacgttatgtttgcaatcacccggaccctcacgggcagcgcacttgctggcttcacaattatcgtgatgcctctagaactggagtggctggacgtagagcacagaacagtagctggtgtgctgtcctcaactttctggaccggtggagtcatgttgctggccttggtaggttatctgatcagggattggagatggcttttactcgcggtgacactgccatgtgctcctgggatactgtccctgtggtgggtgccagaaagtgcccgctggcttctcacccaaggccatgtgaaggaggcccaccggtatcttcttcactgcgcacggctgaatgggcgccccgtttgcgaggattcctttagccaggaggcagtgtccaaggtggctgccggagaaagggtagtgcgacgcccatcgtaccttgatttgtttaggacgccaagactccgtcatatctcactgtgctgtgtcgtcgtctggtttggagttaatttctcttattatggactaagcctggatgtaagtgggcttggtctaaacgtgtatcagactcaactgctgttcggcgctgtggagttgcccagtaaactgctcgtatacctcagtgtaaggtacgccggacgcagactgacacaggcgggcacgctcctgggtaccgcactggcgtttggcactaggctgctggttagctcggatatgaagtcatggtctacagttctggcagttatgggtaaggccttcagcgaggcagcatttaccaccgcctatctctttacaagtgagttgtaccccaccgtacttagacagaccgggatgggccttaccgctttggtcgggcgcctaggtggaagtctcgctcccctggcagctctgctggacggcgtgtggctctcgctccctaaactcacctatgggggaatcgcattactggcggctggtacggcactgctgttgcccgagacccgccaggcccagctgcctgaaactatacaggacgttgagcggaagagcgcccccacttccctgcaggaagaagagatgcccatgaagcaggtccagaactag

SEQ ID NO: 245707 - DNA, 1647 bp, Artificial Sequence
  derived and/or modified sequence
atgggctttgaagaactcctggagcaggtcggagggtttggcccattccagctgcgcaacgtcgcactcctcgccctgcctcgggtgctgctccccctgcatttccttctgccgatttttcttgccgctgtgcccgctcatcgatgcgcccttccaggcgcaccagcgaatttttcccaccaggacgtatggctggaggctcatcttccacgcgagcctgatggcacactgagtagttgcttgcgctttgcctacccacaggcactgccaaacacgacactcggcgaggaacggcagtcgcggggtgagctggaggatgaaccagcaaccgtgccctgtagtcagggctgggaatatgaccattctgaattctcaagtactatagctacagaatcacagtgggaccttgtctgcgagcaaaagggactgaaccgtgcagccagcaccttcttttttgcgggagtgctggtaggcgcagtggcctttgggtatctttccgacagattcgggaggcgtagactgctgctggtggcatacgtaagtacactggtgctcggattagcgagtgctgccagcgtaagctacgtgatgtttgccataacaagaactcttactggaagcgcactcgccggtttcacaatcattgttatgcccttagaactggaatggttggacgtggagcaccggacggtggccggtgttctctcctctacattctggactggaggggtcatgctcctggctttagtagggtatcttattagggattggcggtggctgcttttggctgttacgctcccatgcgcaccagggatcttaagcttgtggtgggtaccggaatccgccagatggctgttgacacaagggcacgtgaaggaggcgcacagatacctactccactgtgcgaggctgaacggtaggcccgtgtgcgaggatagcttttctcaggaggctgtaagtaaggtcgctgctggcgaaagagtcgttcggagaccttcctacctcgacctgtttagaacgcctcgccttcggcacatctctctttgctgcgtggtggtgtggtttggggtgaacttctcctactatggactgagcctcgacgtatctgggctgggattgaacgtgtatcagacgcaattattgtttggagctgtcgagctgccttccaagctattagtgtacctttccgtccgctacgctggcagaagattgacacaagccggaacgttgctgggcactgcattggcctttggaactagactcttggtctcctcagacatgaaaagctggtcaaccgtgctcgctgtgatgggtaaggcattttcagaggccgctttcaccacagcttatctatttacctccgagctttaccccacagtgctgaggcagaccggcatggggctgaccgccctggtgggtcgcctgggtgggagtctggcgcctctagcagctttgctcgatggggtctggctgtcattgcccaaactgacctatggaggcatagccctgcttgcagccggtaccgcacttctgctgcccgagaccagacaggctcagctccctgagaccatccaggatgtggagcgtaaatccgcacccaccagcttacaggaggaggagatgcctatgaaacaagttcagaactag

SEQ ID NO: 245708 - DNA, 2555 bp, Artificial Sequence
  derived and/or modified sequence
ccacctccagagtccaagggtctatgtggtgggcagtttgagctggctggatactagagggaggctgcacctgaagcatttggtgggtgagcagcatgggctttgaggagctgctggagcaggtgggcggctttgggcccttccaactgcggaatgtggcactgctggccctgccccgagtgctgctaccactgcacttcctcctgcccatcttcctggctgccgtgcctgcccaccgatgtgccctgccgggtgcccctgccaacttcagccatcaggatgtgtggctggaggcccatcttccccgggagcctgatggcacgctcagctcctgcctccgctttgcctatccccaggctctccccaacaccacgttgggggaagaaaggcagagccgtggggagctggaggatgaacctgccacagtgccctgctctcagggctgggagtacgaccactcagaattctcctctaccattgcaactgagtcccagtgggatctggtgtgtgagcagaaaggtctgaacagagctgcgtccactttcttcttcgccggtgtgctggtgggggctgtggcctttggatatctgtccgacaggtttgggcggcggcgtctgctgctggtagcctacgtgagtaccctggtgctgggcctggcatctgcagcctccgtcagctatgtaatgtttgccatcacccgcacccttactggctcagccctggctggttttaccatcatcgtgatgccactggagctggagtggctggatgtggagcaccgcaccgtggctggagtcctgagcagcaccttctggacagggggcgtgatgctgctggcactggttgggtacctgatacgggactggcgatggcttctgctagctgtcaccctgccttgtgccccaggcatcctcagcctctggtgggtgcctgagtctgcacgctggcttctgacccaaggccatgtgaaagaggcccacaggtacttgctccactgtgccaggctcaatgggcggccagtgtgtgaggacagcttcagccaggaggctgtgagcaaagtggccgccggggaacgggtggtccgaagaccttcatacctagacctgttccgcacaccacggctccgacacatctcactgtgctgcgtggtggtgtggttcggagtgaacttctcctattacggcctgagtctggatgtgtcggggctggggctgaacgtgtaccagacacagctgttgttcggggctgtggaactgccctccaagctgctggtctacttgtcggtgcgctacgcaggacgccgcctcacgcaagctgggacactgctgggcacggccctggcgttcggcactagactgctagtgtcctccgatatgaagtcctggagcactgtcctggcagtgatggggaaagctttttctgaagctgccttcaccactgcctacctgttcacttcagagttgtaccctacggtgctcagacagacagggatggggctgactgcactggtgggccggctggggggctctttggccccactggcggccttgctggatggagtgtggctgtcactgcccaagcttacttatggggggatcgccctgctggctgccggcaccgccctcctgctgccagagacgaggcaggcacagctgccagagaccatccaggacgtggagagaaagagtgccccaaccagtcttcaggaggaagagatgcccatgaagcaggtccagaactaagtgggagtggaggcaggccctccacagaagctctgcagcaggggctgggagagcagaagggcaggccctgcaactcaggctgggagtatcgaaccctctgcctagggccggagttgctgccagtacccgctccctctgctcatccatccttgattatttggcttctaggaacagttgacttcccagaatgcagtgggctgctgggcacccctctcacggttggggaggattctgtaaataaaggtgccccttgggttggggcagtggtgacgagctgtgggaagagccctggataggaagccactgagtctgccctgggctctgataaaaccttcaccattaacttgctgtgtgaccttgggcatgtggctttccctctctgggcctcagtctgttcatctcccaaatggataatgaagcctcttgggaggccctaccataggatctgttgccatgctcaaatgagttactgaataaggtgcttctgcttcttctagagatggtgctaaagaaaggactagcatatgagacttctggtaccaatggggctggtgggcatgctgtccactgtgtggtgctaggactgccaatgccaggcccaagggacaaaaagaacagagctttttgttctcatggctggccctgctacctccgaggcaccctgcagggcaatgcatgtcatcccaacccccacactccccatcctccaacccactggtctcatgcccaaagaagagttgaaggcatgggagccaacattttattgaagaagccacagaggctgaaattcaataaacacaagttttatgagta

SEQ ID NO: 245709 - DNA, 1647 bp, Artificial Sequence
  derived and/or modified sequence
atgggcttcgaggagctgctggagcaggtgggcggcttcggccccttccagctgagaaacgtggccctgctggccctgcccagagtgctgctgcccctgcacttcctgctgcccatcttcctggccgccgtgcccgcccacagatgcgccctgcccggcgcccccgccaacttcagccaccaggacgtgtggctggaggcccacctgcccagagagcccgacggcaccctgagcagctgcctgagattcgcctacccccaggccctgcccaacaccaccctgggcgaggagagacagagcagaggcgagctggaggacgagcccgccaccgtgccctgcagccagggctgggagtacgaccacagcgagttcagcagcaccatcgccaccgagagccagtgggacctggtgtgcgagcagaagggcctgaacagagccgccagcaccttcttcttcgccggcgtgctggtgggcgccgtggccttcggctacctgagcgacagattcggcagaagaagactgctgctggtggcctacgtgagcaccctggtgctgggcctggccagcgccgccagcgtgagctacgtgatgttcgccatcaccagaaccctgaccggcagcgccctggccggcttcaccatcatcgtgatgcccctggagctggagtggctggacgtggagcacagaaccgtggccggcgtgctgagcagcaccttctggaccggcggcgtgatgctgctggccctggtgggctacctgatcagagactggagatggctgctgctggccgtgaccctgccctgcgcccccggcatcctgagcctgtggtgggtgcccgagagcgccagatggctgctgacccagggccacgtgaaggaggcccacagatacctgctgcactgcgccagactgaacggcagacccgtgtgcgaggacagcttcagccaggaggccgtgagcaaggtggccgccggcgagagagtggtgagaagacccagctacctggacctgttcagaacccccagactgagacacatcagcctgtgctgcgtggtggtgtggttcggcgtgaacttcagctactacggcctgagcctggacgtgagcggcctgggcctgaacgtgtaccagacccagctgctgttcggcgccgtggagctgcccagcaagctgctggtgtacctgagcgtgagatacgccggcagaagactgacccaggccggcaccctgctgggcaccgccctggccttcggcaccagactgctggtgagcagcgacatgaagagctggagcaccgtgctggccgtgatgggcaaggccttcagcgaggccgccttcaccaccgcctacctgttcaccagcgagctgtaccccaccgtgctgagacagaccggcatgggcctgaccgccctggtgggcagactgggcggcagcctggcccccctggccgccctgctggacggcgtgtggctgagcctgcccaagctgacctacggcggcatcgccctgctggccgccggcaccgccctgctgctgcccgagaccagacaggcccagctgcccgagaccatccaggacgtggagagaaagagcgcccccaccagcctgcaggaggaggagatgcccatgaagcaggtgcagaactag

SEQ ID NO: 245710 - protein, 42 aa, Artificial Sequence
  derived and/or modified sequence
GLNNKCAYFRGQCRRKCPQRDIFFGFCRNHDQCCLSSLHTRH

SEQ ID NO: 245711 - protein, 47 aa, Artificial Sequence
  derived and/or modified sequence
SFEPQKCWKNNVGHCRRRCLDTERYILLCRNKLSCCISIISHEYTRR

SEQ ID NO: 245712 - protein, 137 aa, Artificial Sequence
  derived and/or modified sequence
SFEPQKCWKNNIGHCRRRCLDTERYILLCRNKLSCCISIIISHEYTRRPAFPVIHLEDITFDYSDVDSFTGSPVSMLNDLITFDTTKFGETITPETNTPETTMPPSETTSSKTTMPPSETATSETMPPPSQTALTHN

SEQ ID NO: 245713 - protein, 136 aa, Artificial Sequence
  derived and/or modified sequence
SFEPQKCWKNNIGYCRRRCLDTERYILLCRNKLSCCISIIISYEYTRRPPFRVIHLEDITFDYSDMGSFTGSPVSKLSDLVTFDIRRETMTPKTNTPETTMPPSETTTSKTTMPSSKTTTSKTTMPPPSQMALTHN

SEQ ID NO: 245714 - protein, 126 aa, Artificial Sequence
  derived and/or modified sequence
SFEPPKCWKNNIGHCRRRCLDTERYILVCRNKLSCCISIIISHEYTRRPAFPVIHPEDITFDYSDVDSFTGSPVSMLNDLITFDTTKFGETMTPETNTPETTMPPSKTTTSKTTMPPPSQTALTHN

SEQ ID NO: 245715 - protein, 137 aa, Artificial Sequence
  derived and/or modified sequence
SFEPQKCWKNNIGHCRRRCLDTERCILLCRNKLSCCIYIIISHEYTQRPAFPMIHLEDITFDYSDVDSFTGSPVSMLNDLITFDTTKFGETMTPETNTPETTVPPSETTTPETTMPPSETATSETMPPPSQTALTHN

SEQ ID NO: 245716 - protein, 137 aa, Artificial Sequence
  derived and/or modified sequence
SFEPQKCWKNNIGHCRRRCLDTERYILLCRNKLSCCISLIISQEYTRRPAFPVIHLEDITFDYSDVDSFTGSPVSMLNDLITFDTTKFGETMTPETNTPETTMPPPETTTPETTMPPSETATSETMPPPSQRALTHN

SEQ ID NO: 245717 - protein, 156 aa, Artificial Sequence
  derived and/or modified sequence
MNILMLTFIICGLLTRVTKGSFEPQKCWKNNVGHCRRRCLDTERYILLCRNKLSCCISIISHEYTRRPAFPVIHLEDITLDYSDVDSFTGSPVSMLNDLITFDTTKFGETMTPETNTPETTMPPSEATTPETTMPPSETATSETMPPPSQTALTHN

SEQ ID NO: 245718 - DNA, 471 bp, Artificial Sequence
  derived and/or modified sequence
atgaatattctcatgctgacctttatcatttgtgggttgctgacacgggtcacgaaaggatcctttgagccccagaaatgctggaagaacaatgtaggccactgccgcagacggtgtcttgacactgaacggtatattctgctgtgcaggaacaaattgtcatgctgtatctccatcatatcccatgagtatacaaggaggcccgcttttcccgtcattcatctggaggacattaccttggattactccgatgtcgacagtttcaccggtagccccgtgtcgatgttgaacgacctaataacatttgacaccactaagttcggcgaaactatgacaccagaaacgaatacccccgaaaccactatgcccccatcagaagctacaactccagaaacaaccatgcccccatctgagaccgcaaccagcgaaacaatgccacctccaagccaaacggctctgacccacaattag

SEQ ID NO: 245719 - DNA, 471 bp, Artificial Sequence
  derived and/or modified sequence
atgaacattcttatgctgacctttatcatctgtggcctcctaacccgcgttacaaaagggagcttcgagcctcagaaatgttggaagaataatgtcggacattgccgaagaagatgcctggacaccgagcgctatatcctgctgtgtagaaacaaactgagttgctgtatttctatcatctctcacgagtacacaagacgaccggcctttccggtgattcatctggaggacatcaccctcgactatagtgacgttgattcttttaccggtagccccgtttccatgctgaacgacctcattacattcgatacgaccaagtttggcgagaccatgacaccagagactaacacccctgaaacaacaatgccaccttctgaggcaactacccccgagacgaccatgccaccatccgagactgctacctcagagacaatgcccccccccagtcagacggccctgacacacaactag

SEQ ID NO: 245720 - DNA, 471 bp, Artificial Sequence
  derived and/or modified sequence
atgaacattcttatgctgacctttatcatctgtggcctcctaacccgcgttacaaaagggagcttcgagcctcagaaatgttggaagaataatgtcggacattgccgaagaagatgcctggacaccgagcgctatatcctgctgtgtagaaacaaactgagttgctgtatttctatcatctctcacgagtacacaagacgaccggcctttccggtgattcatctggaggacatcaccctcgactatagtgacgttgattcttttaccggtagccccgtttccatgctgaacgacctcattacctttgacacaacaaagttcggcgaaaccatgacccccgagacaaacactccagagacaaccatgccaccaagcgaagcaaccacacccgaaaccaccatgccacctagtgagacagcaaccagtgaaactatgcctccaccatctcaaacagcactgacacataattag

SEQ ID NO: 245721 - DNA, 471 bp, Artificial Sequence
  derived and/or modified sequence
atgaacatcctgatgctgaccttcatcatctgcggcctgctgaccagagtgaccaagggcagcttcgagccccagaagtgctggaagaacaacgtgggccactgcagaagaagatgcctggacaccgagagatacatcctgctgtgcagaaacaagctgagctgctgcatcagcatcatcagccacgagtacaccagaagacccgccttccccgtgatccacctggaggacatcaccctggactacagcgacgtggacagcttcaccggcagccccgtgagcatgctgaacgacctgatcaccttcgacaccaccaagttcggcgagaccatgacccccgagaccaacacccccgagaccaccatgccccccagcgaggccaccacccccgagaccaccatgccccccagcgagaccgccaccagcgagaccatgcccccccccagccagaccgccctgacccacaactag

SEQ ID NO: 245722 - DNA, 471 bp, Artificial Sequence
  derived and/or modified sequence
atgaacatcttaatgctgaccttcatcatctgtggcttactgacacgcgtgactaaagggtccttcgagcctcagaagtgctggaaaaacaacgttggccattgccgaaggcgctgcctggacactgaacggtacatactgttgtgccgaaacaaactctcttgttgtatatcgattatctcccatgagtatacgcgccggcccgctttcccagtgatacacctagaggatattactcttgattactcagacgtggattcctttaccggttcacccgtgtccatgctgaacgacctcatcacattcgacacaaccaaatttggggaaacgatgacccccgagactaatacacccgagactaccatgccccccagtgaggccacaacgccggagaccacaatgccacctagtgagaccgcgacttccgaaactatgccaccaccatctcagaccgccctgacccacaattag

SEQ ID NO: 245723 - DNA, 471 bp, Artificial Sequence
  derived and/or modified sequence
atgaacatcctgatgctgaccttcatcatctgtggcctgctgaccagggtgaccaagggcagctttgagccccagaagtgctggaagaacaacgtgggccactgcagaagacgctgcctggacacagagcgctacatcctgctgtgcaggaacaagctgagctgctgcatcagcatcatcagccatgagtacacccggcggcctgccttccctgtgatccacctggaggacatcaccctggactacagtgatgtggacagcttcaccggcagccctgtgtccatgctgaatgacctgatcacctttgacaccaccaagtttggagagaccatgaccccagagaccaacaccccagagaccaccatgcctccttctgaggccaccaccccagagaccaccatgcctccttctgaaacagccaccagcgagaccatgcccccacccagccagacagccctgacccacaactag

SEQ ID NO: 245724 - DNA, 587 bp, Artificial Sequence
  derived and/or modified sequence
atgaatatcctgatgctgaccttcattatctgtgggttgctaactcgggtgaccaaaggtagctttgaaccccaaaaatgttggaagaataatgtaggacattgcagaagacgatgtttagatactgaaaggtacatacttctttgtaggaacaagctatcatgctgcatttctataatatcacatgaatatactcgacgaccagcatttcctgtgattcacctagaggatataacattggattatagtgatgtggactcttttactggttccccagtatctatgttgaatgatctgataacatttgacacaactaaatttggagaaaccatgacacctgagaccaatactcctgagactactatgccaccatctgaggccactactcccgagactactatgccaccatctgagactgctacttccgagactatgccaccaccttctcagacagctcttactcataattaattaacatttacttctggtatggaacaactagaaatactgctggaaataatatccaaagagctgattctaccaatccaatttcaccaggaaaattccatcagggattggatgaccat

SEQ ID NO: 245725 - DNA, 471 bp, Artificial Sequence
  derived and/or modified sequence
atgaacatcctgatgctgaccttcatcatctgcggcctgctgaccagggtgacgaagggatctttcgagcctcaaaaatgttggaagaacaacgtggggcactgtcggcgacggtgtcttgacacagaaaggtacatactgctctgcaggaacaagctcagctgctgtatatcaattatctcccacgagtacaccagacgacccgcgtttcccgtgatacatttggaggacatcaccttggactacagcgacgttgattcttttacaggcagccctgtgtcaatgctgaatgacctgattacctttgatacgaccaagtttggcgaaactatgactccggaaacaaacactccagagactacgatgcccccttcagaggcaaccacaccagagacaacaatgcccccaagcgagaccgctacgagcgaaaccatgccgcccccaagccagaccgcactaacacacaactag

SEQ ID NO: 245726 - RNA, 471 nt, Artificial Sequence
  derived and/or modified sequence
augaacauucuuaugcugaccuuuaucaucuguggccuccuaacccgcguuacaaaagggagcuucgagccucagaaauguuggaagaauaaugucggacauugccgaagaagaugccuggacaccgagcgcuauauccugcuguguagaaacaaacugaguugcuguauuucuaucaucucucacgaguacacaagacgaccggccuuuccggugauucaucuggaggacaucacccucgacuauagugacguugauucuuuuaccgguagccccguuuccaugcugaacgaccucauuacauucgauacgaccaaguuuggcgagaccaugacaccagagacuaacaccccugaaacaacaaugccaccuucugaggcaacuacccccgagacgaccaugccaccauccgagacugcuaccucagagacaaugcccccccccagucagacggcccugacacacaacuag

SEQ ID NO: 245727 - RNA, 471 nt, Artificial Sequence
  derived and/or modified sequence
augaacauucuuaugcugaccuuuaucaucuguggccuccuaacccgcguuacaaaagggagcuucgagccucagaaauguuggaagaauaaugucggacauugccgaagaagaugccuggacaccgagcgcuauauccugcuguguagaaacaaacugaguugcuguauuucuaucaucucucacgaguacacaagacgaccggccuuuccggugauucaucuggaggacaucacccucgacuauagugacguugauucuuuuaccgguagccccguuuccaugcugaacgaccucauuaccuuugacacaacaaaguucggcgaaaccaugacccccgagacaaacacuccagagacaaccaugccaccaagcgaagcaaccacacccgaaaccaccaugccaccuagugagacagcaaccagugaaacuaugccuccaccaucucaaacagcacugacacauaauuag

SEQ ID NO: 245728 - protein, 802 aa, Artificial Sequence
  derived and/or modified sequence
MAATRAGPRAREIFTSLEYGPVPESHACALAWLDTQDRCLGHYVNGKWLKPEHRNSVPCQDPITGENLASCLQAQAEDVAAAVEAARMAFKGWSAHPGVVRAQHLTRLAEVIQKHQRLLWTLESLVTGRAVREVRDGDVQLAQQLLHYHAIQASTQEEALAGWEPMGVIGLILPPTFSFLEMMWRICPALAVGCTVVALVPPASPAPLLLAQLAGELGPFPGILNVLSGPASLVPILASQPGIRKVAFCGAPEEGRALRRSLAGECAELGLALGTESLLLLTDTADVDSAVEGVVDAAWSDRGPGGLRLLIQESVWDEAMRRLQERMGRLRSGRGLDGAVDMGARGAAACDLVQRFVREAQSQGAQVFQAGDVPSERPFYPPTLVSNLPPASPCAQVEVPWPVVVASPFRTAKEALLVANGTPRGGSASVWSERLGQALELGYGLQVGTVWINAHGLRDPSVPTGGCKESGCSWHGGPDGLYEYLRPSGTPARLSCLSKNLNYDTFGLAVPSTLPAGPEIGPSPAPPYGLFVGGRFQAPGARSSRPIRDSSGNLHGYVAEGGAKDIRGAVEAAHQAFPGWAGQSPGARAALLWALAAALERRKSTLASRLERQGAELKAAEAEVELSARRLRAWGARVQAQGHTLQVAGLRGPVLRLREPLGVLAVVCPDEWPLLAFVSLLAPALAYGNTVVMVPSAACPLLALEVCQDMATVFPAGLANVVTGDRDHLTRCLALHQDVQAMWYFGSAQGSQFVEWASAGNLKPVWASRGCPRAWDQEAEGAGPELGLRVARTKALWLPMGD

SEQ ID NO: 245729 - protein, 637 aa, Artificial Sequence
  derived and/or modified sequence
MGVIGLILPPTFSFLEMMWRICPALAVGCTVVALVPPASPAPLLLAQLAGELGPFPGILNVLSGPASLVPILASQPGIRKVAFCGAPEEGRALRRSLAGECAELGLALGTESLLLLTDTADVDSAVEGVVDAAWSDRGPGGLRLLIQESVWDEAMRRLQERMGRLRSGRGLDGAVDMGARGAAACDLVQRFVREAQSQGAQVFQAGDVPSERPFYPPTLVSNLPPASPCAQVEVPWPVVVASPFRTAKEALLVANGTPRGGSASVWSERLGQALELGYGLQVGTVWINAHGLRDPSVPTGGCKESGCSWHGGPDGLYEYLRPSGTPARLSCLSKNLNYDTFGLAVPSTLPAGPEIGPSPAPPYGLFVGGRFQAPGARSSRPIRDSSGNLHGYVAEGGAKDIRGAVEAAHQAFPGWAGQSPGARAALLWALAAALERRKSTLASRLERQGAELKAAEAEVELSARRLRAWGARVQAQGHTLQVAGLRGPVLRLREPLGVLAVVCPDEWPLLAFVSLLAPALAYGNTVVMVPSAACPLLALEVCQDMATVFPAGLANVVTGDRDHLTRCLALHQDVQAMWYFGSAQGSQFVEWASAGNLKPVWASRGCPRAWDQEAEGAGPELGLRVARTKALWLPMGD

SEQ ID NO: 245730 - protein, 639 aa, Artificial Sequence
  derived and/or modified sequence
MRTGVIGLILPPTFSFLEMMWRICPALAVGCTVVALVPPASPAPLLLAQLAGELGPFPGILNVLSGPASLVPILASQPGIRKVAFCGAPEEGRALRRSLAGECAELGLALGTESLLLLTDTADVDSAVEGVVDAAWSDRGPGGLRLLIQESVWDEAMRRLQERMGRLRSGRGLDGAVDMGARGAAACDLVQRFVREAQSQGAQVFQAGDVPSERPFYPPTLVSNLPPASPCAQVEVPWPVVVASPFRTAKEALLVANGTPRGGSASVWSERLGQALELGYGLQVGTVWINAHGLRDPSVPTGGCKESGCSWHGGPDGLYEYLRPSGTPARLSCLSKNLNYDTFGLAVPSTLPAGPEIGPSPAPPYGLFVGGRFQAPGARSSRPIRDSSGNLHGYVAEGGAKDIRGAVEAAHQAFPGWAGQSPGARAALLWALAAALERRKSTLASRLERQGAELKAAEAEVELSARRLRAWGARVQAQGHTLQVAGLRGPVLRLREPLGVLAVVCPDEWPLLAFVSLLAPALAYGNTVVMVPSAACPLLALEVCQDMATVFPAGLANVVTGDRDHLTRCLALHQDVQAMWYFGSAQGSQFVEWASAGNLKPVWASRGCPRAWDQEAEGAGPELGLRVARTKALWLPMGD

SEQ ID NO: 245731 - DNA, 2409 bp, Artificial Sequence
  derived and/or modified sequence
atggccgcaactcgggctggaccccgggcccgcgagattttcacttccttggagtatggacccgttcccgagagccatgcctgcgcactagcgtggctcgatacccaggataggtgcctgggccactacgtgaacggaaagtggcttaagccagaacatagaaacagtgtgccctgccaggaccccatcaccggggagaatcttgcttcatgcttacaggctcaggcggaagacgtcgctgccgccgttgaagccgccagaatggctttcaaaggctggtcagcccatcctggcgttgtcagggctcagcacttgacacgcctcgcagaagtaatccagaagcaccagcggctgctgtggacccttgaatctttagtgacgggccgagccgtgcgggaggttcgggacggggatgtccagttggcgcagcagctgctccactaccacgccatccaggcaagcacacaggaagaagctttggccgggtgggagccgatgggtgttattggtctcatccttccccctacttttagctttctagagatgatgtggagaatttgccctgccctggccgtggggtgcaccgtcgtggcactggttcccccagcctcgccagcgccccttctgttggcccaattggctggggagttggggccttttcctggtatactaaatgtcttaagcggacccgcgagtctggtgccaatcctcgccagtcagcccggtatcaggaaagtggccttctgcggcgcccctgaggaagggagagctcttcggcggtcccttgctggcgaatgcgctgagctggggctcgctctgggcacagaatcactgctccttttgaccgacactgccgacgttgactccgccgtggagggcgtggttgatgcagcgtggtcagatcggggcccgggcgggcttagacttttgatccaggaatcagtgtgggatgaagccatgaggaggctgcaggaacgtatgggtcggctgcgctcaggacggggtctagacggggccgtggatatgggcgctcgcggcgcagcagcctgtgacctagttcaacggttcgttcgggaagcccagtcccagggtgctcaggtcttccaggccggggatgtgcctagcgaaagaccattttatccacctactcttgtgagcaatctccctccagccagcccttgcgcccaggtggaggttccttggcccgttgtcgtagctagtcccttcaggaccgccaaagaggctctgcttgtggccaacggcacaccccgcggggggtcagcaagtgtctggtctgagcgattaggtcaagctttggagttaggttacgggttgcaggtcgggacagtttggattaacgcccacgggctgcgggatccttctgtccccactggcggttgtaaagaatctggctgttcctggcatggcgggcccgacgggctgtatgaatatctgcgaccctccggcacacctgctcgtttgtcttgcctgagcaaaaatctgaactacgacaccttcgggctcgccgttccttccaccctccctgcaggcccagaaattggacctagccccgcaccaccctatggtctgtttgtgggagggcgtttccaggcgcccggggccagaagctcgcggccaattagagattcttcaggtaatctgcatggctacgttgcagaaggcggggcaaaggacattcgcggagccgtggaggcggctcaccaggcattcccagggtgggccggccagtcacctggagcacgggccgccctgttgtgggctctggcagcagccctggaacgccgcaagtccacgctcgctagcaggctggagcggcaaggggctgagctgaaggctgctgaagctgaagttgaactcagtgctagacggctcagagcgtggggggctagagtacaagcccaaggccatacacttcaggtggcggggctgagaggccccgtgctgcgcttgcgagagcctctaggagtattagcagtcgtgtgccctgacgagtggccgttgttagcctttgtgtccctgctcgccccggctttggcctatggcaacaccgtggtcatggtgcctagcgccgcttgtccgcttctcgctttagaagtgtgtcaagacatggccaccgtcttccccgccggcctggcaaatgtcgtgactggagacagggatcacctcactcggtgtttagcactccaccaggatgttcaggcaatgtggtatttcgggagtgcccagggatcccaattcgtggagtgggcttccgccggaaatctgaagcccgtatgggcaagtagaggatgtccccgcgcatgggaccaggaggcagagggcgcagggcccgagctgggcctgagagtcgcccgcactaaggccctttggttgcctatgggcgattag

SEQ ID NO: 245732 - DNA, 1914 bp, Artificial Sequence
  derived and/or modified sequence
atgggggtaattgggctgatactgcctccgacattttcttttcttgaaatgatgtggaggatctgcccagctcttgcagtaggatgtaccgtggtggccctcgtgccaccagcatcccccgcacctcttctgttggcgcaattggctggggagctggggccattccccgggattctgaatgttctgagcggcccagcttctcttgtgccaatattggcttctcagcccggcataaggaaggtggcgttctgcggcgcacctgaggagggccgggcattgcggaggagtctggcaggcgaatgtgcggagttgggcttggccttgggtacagaaagcttactccttcttacagacaccgcagatgtcgactccgcggtggagggggtggtggacgctgcctggagtgacagaggcccaggtggactgcgcctgctcattcaggaaagtgtgtgggacgaggccatgagaaggttgcaggagcgcatgggtcgcctccgctcaggtcgcggcttggacggggctgttgacatgggcgctcggggagccgccgcatgcgacctggtgcaaagattcgtgcgcgaggctcagtcacagggcgcccaggtgttccaggccggtgatgtcccaagcgagcgcccgttttacccaccaacactggtgagtaaccttcctcctgcatcaccctgtgcccaagtcgaggtgccttggccagtggtggtcgcaagcccttttcgtaccgctaaggaagccctcctggtggccaatggcaccccaagaggtggcagcgcatctgtttggtcagaaagactgggccaagcactggaacttgggtacggactccaagtggggactgtctggataaatgcccacggcctaagagatccttccgtgccgacaggcggttgcaaagaatctgggtgttcctggcatgggggcccagatggactgtatgagtacttgcgcccaagtggcactcctgcccgtctcagttgtctgagcaaaaaccttaactacgacacgttcggactagccgttcccagcacactgccagcaggacctgaaataggacccagtccggccccgccttacgggctctttgttggcggccgattccaagcaccaggagctaggagcagccgacccataagagatagcagcggcaacctacatggctacgtggcggaggggggagcaaaagacattagaggtgctgtagaagctgcacaccaggcctttccaggctgggctgggcagtcacctggggcaagagccgccctgctttgggctttagctgccgccttggaacggcgaaaatctacactggcctctagattggagcgccagggagctgagctcaaggctgccgaagccgaagtcgagctcagcgcccggagacttagagcatggggtgctcgagtgcaggctcagggccacacattgcaggttgcgggactccgcgggccggtcttacgtctcagggagcctctgggcgtacttgcagtggtgtgtccagatgagtggcctttgctcgcatttgtctctttgttggctccagccttggcctacggcaacaccgtcgtgatggtaccctctgccgcctgcccgctccttgcactggaagtgtgccaggacatggcaacggtcttccccgccggtttggcaaatgtcgtgaccggggacagagatcatcttacaaggtgcctggccctccaccaagacgttcaagcaatgtggtacttcggttctgctcagggatcgcagttcgtcgagtgggcatctgcaggaaaccttaaaccagtgtgggcttctaggggatgcccacgggcatgggaccaggaggcggagggggctgggccagagctgggactccgcgtcgctcgaaccaaggctttgtggctgccaatgggagattag

SEQ ID NO: 245733 - DNA, 1920 bp, Artificial Sequence
  derived and/or modified sequence
atgagaaccggagtgatcggtctcatattacctcccacctttagtttcttggagatgatgtggcgcatctgccctgccctggcagtcggctgcactgtcgtcgccctggtgccccctgctagcccagcccccctgctactggctcagctcgccggggagctcggcccattcccaggcatcctaaatgtcctgagcggcccagcttcgttggttcctatccttgcctcacagcccggaattaggaaggtcgccttctgcggcgccccagaagagggccgtgccctgcggcggtctctggcgggagagtgcgccgagttggggctcgccctcggcaccgaaagcctcctcttactcaccgacacagctgatgtggattctgcagtggagggggttgttgacgcggcttggtcggaccgcgggcccggaggcctgcgactgcttatccaggaaagcgtgtgggatgaggcgatgcgcagattgcaggagcggatgggccgtttaagatctggccggggcctagatggggccgttgatatgggcgccaggggcgctgccgcttgcgacttggttcagcggttcgttcgagaagctcagagtcagggggcccaggtgttccaggcaggggacgtgccgtcggaacgtcctttctacccccccacattagtatcaaatttacctcctgcgagcccatgcgctcaggtagaggttccgtggcccgttgtcgtggcgtcccccttccgcaccgcaaaggaggctctgctggtcgcgaatggcaccccaagaggtggcagtgcctctgtctggtctgagcggttagggcaggcacttgagctcggctatgggctccaggtgggaacagtatggataaacgctcatgggttgcgcgatccctcggtgccaaccgggggatgtaaagagtcaggctgttcgtggcacggaggcccggacggtctctacgaatacctccgcccctctggtacacccgctagactgagttgcctgagcaaaaatctgaactacgacactttcggattagccgtgccctctactttgccagctggacctgagatcggcccttcgccagcgcccccatacggattgttcgttggcggccgattccaggctcctggtgcccggagttcgcgaccaatccgggatagctctgggaatctgcacggctatgtggccgagggcggagctaaggatatcaggggtgccgtggaagcagcacaccaagcattccctggttgggctggccagtctccaggcgcccgcgctgccctgctctgggcccttgccgctgccctggagagaaggaagtccaccctggctagtaggctcgagagacagggcgccgagttaaaagcagccgaggcagaggtggagctcagcgctaggcgcctaagggcctggggagcgcgggtccaggcacaggggcataccctgcaggttgctggactgcgcgggccagtcttaaggcttagagaaccactcggcgtcctggcagtggtgtgtccggacgaatggcccctcttggcgtttgtgagcctccttgcccccgctctcgcttacggaaatactgttgtgatggttccaagcgcggcttgccctctgctcgcgctggaggtgtgtcaggacatggctacggtgtttccagctggcctggccaacgtcgtaaccggagacagggatcacttaacccggtgtctggccctccatcaggacgtgcaggccatgtggtactttggctccgctcagggcagccaatttgtggagtgggcaagcgctggaaatctgaagccagtatgggcatcacggggttgtcctcgcgcatgggaccaggaggccgagggggccggccctgagctggggctgcgagttgctaggaccaaggccctctggctgccaatgggcgactag

SEQ ID NO: 245734 - DNA, 2409 bp, Artificial Sequence
  derived and/or modified sequence
atggccgccacccgggccggcccccgggcccgggagatcttcaccagcctggagtatggccctgtgcctgagagccacgcctgtgccctggcctggctggacacccaggaccgctgcctgggccactacgtgaatggcaagtggctgaagccagagcacaggaacagcgtgccctgccaggaccccatcaccggggagaacctggccagctgcctgcaggcccaggctgaagatgtggccgctgctgtggaggccgccaggatggccttcaagggctggagcgcccaccctggggtggtgcgggcccagcacctgacccggctggccgaggtgatccagaagcaccagaggctgctgtggaccctggagagcctggtgacaggccgggctgtgcgggaggtgagagatggagatgtgcagctggcccagcagctgctgcactaccacgccatccaggccagcacccaggaggaggccctggccggctgggagcccatgggcgtgattggcctcatcctgccccccaccttctccttcctggagatgatgtggaggatctgcccagccctggccgtgggctgcaccgtggtggccctggtgcccccagccagccctgcccccctgctgctggcccagctggccggggagctgggccccttccctggcatcctgaatgtgctgagcggccctgccagcctggtgcccatcctggccagccagcccggcatcaggaaggtggccttctgtggggcccctgaggagggccgggccctgcggcgcagcctggccggagaatgtgccgagctgggcctggccctgggcacagagagcctgctgctgctgacagacacagcagatgtggacagcgctgtggagggcgtggtggatgctgcctggagcgaccggggccctgggggcctgcggctgctgatccaggagagcgtgtgggatgaggccatgaggcggctgcaggagaggatgggccgcctgcggagcggccggggcctggatggagctgtggacatgggcgcccggggagctgctgcctgtgacctggtgcagagatttgtgcgggaggcccagagccagggcgcccaggtgttccaggccggagatgtgcccagcgagcggcccttctacccacccaccctggtgagcaacctgcccccagccagcccctgtgcccaggtggaggtgccctggcctgtggtggtggccagccccttcagaacagccaaggaggccctgctggtggccaacggcaccccccggggcggcagcgcctctgtgtggagcgagcggctgggccaggccctggagctgggctacggcctgcaggtgggcaccgtgtggatcaatgcccacggcctgcgggaccccagcgtgcccaccggcggctgcaaggagagcggctgctcctggcatggaggcccagatggcctgtatgagtacctgcggcccagcggcaccccagcccggctgagctgcctgagcaagaacctgaactatgacaccttcggcctggccgtgcccagcaccctgcctgctggccctgagatcggccccagccctgccccaccctacggcctgtttgtgggcggccgcttccaggcccctggggcccggagcagccggcccatccgggacagcagcggcaacctgcacggctacgtggccgagggcggggccaaggacatcagaggagctgtggaggccgcccaccaggccttccctggctgggccggccagagccctggggcccgggccgccctgctgtgggccctggccgccgccctggagaggaggaagagcaccctggccagccggctggagcggcagggcgctgagctgaaggctgctgaggccgaggtggagctgagcgcccggcggctgcgggcctggggcgcccgggtgcaggcccagggccacaccctgcaggtggccggcctgcggggccctgtgctgcggctgcgggagcccctgggcgtgctggccgtggtgtgcccagatgagtggcccctgctggcctttgtgtccctgctggccccagccctggcctacggcaacacagtggtgatggtgcccagcgctgcctgccccctgctggccctggaggtgtgccaggacatggccaccgtcttccctgctggcctggccaacgtggtgactggagaccgggaccacctgacccgctgcctggccctgcaccaggatgtgcaggccatgtggtactttggaagtgcccagggcagccagtttgtggagtgggccagcgctggcaacctgaagcctgtgtgggccagccggggctgcccccgggcctgggaccaggaggccgagggcgccggccctgagctgggcctgcgggtggcccggaccaaggccctgtggctgcccatgggagactag

SEQ ID NO: 245735 - DNA, 1914 bp, Artificial Sequence
  derived and/or modified sequence
atgggcgtcatcggcctcatcctgccccccaccttctccttcctggagatgatgtggaggatctgcccagccctggccgtgggctgcaccgtggtggccctggtgcccccagccagccctgcccccctgctgctggcccagctggccggggagctgggccccttccctggcatcctgaatgtgctgagcggccctgccagcctggtgcccatcctggccagccagcccggcatcaggaaggtggccttctgtggggcccctgaggagggccgggccctgcggcgcagcctggccggggagtgtgccgagctgggcctggccctgggcacagagagcctgctgctgctgacagacacagcagatgtggacagcgctgtggagggcgtggtggatgctgcctggagcgaccggggccctgggggcctgcggctgctgatccaggagagcgtgtgggatgaggccatgaggcggctgcaggagaggatgggccgcctgcggagcggccggggcctggatggagctgtggacatgggcgcccggggagctgctgcctgtgacctggtgcagagatttgtgcgggaggcccagagccagggcgcccaggtgttccaggccggagatgtgcccagcgagcggcccttctacccacccaccctggtgagcaacctgcccccagccagcccctgtgcccaggtggaggtgccctggcctgtggtggtggccagccccttcagaacagccaaggaggccctgctggtggccaacggcaccccccggggcggcagcgcctctgtgtggagcgagcggctgggccaggccctggagctgggctacggcctgcaggtgggcaccgtgtggatcaatgcccacggcctgcgggaccccagcgtgcccactggaggctgcaaggagagcggctgctcctggcacggcggcccagatggcctgtatgagtacctgcggcccagcggcaccccagcccggctgagctgcctgagcaagaacctgaactatgacaccttcggcctggccgtgcccagcaccctgcctgctggccctgagatcggccccagccctgccccaccctacggcctgtttgtgggcggccgcttccaggcccctggggcccggagcagccggcccatccgggacagcagcggcaacctgcacggctacgtggccgagggcggggccaaggacatcagaggagctgtggaggccgcccaccaggccttccctggctgggccggccagagccctggggcccgggccgccctgctgtgggccctggccgccgccctggagaggaggaagagcaccctggccagccggctggagcggcagggcgctgagctgaaggctgctgaggccgaggtggagctgagcgcccggcggctgcgggcctggggcgcccgggtgcaggcccagggccacaccctgcaggtggccggcctgcggggccctgtgctgcggctgcgggagcccctgggcgtgctggccgtggtgtgcccagatgagtggcccctgctggcctttgtgtccctgctggccccagccctggcctacggcaacacagtggtgatggtgcccagcgctgcctgccccctgctggccctggaggtgtgccaggacatggccaccgtcttccctgctggcctggccaacgtggtgactggagaccgggaccacctgacccgctgcctggccctgcaccaggatgtgcaggccatgtggtacttcggcagcgcccagggcagccagtttgtggagtgggccagcgctggcaacctgaagcctgtgtgggccagccggggctgcccccgggcctgggaccaggaggccgagggcgccggccctgagctgggcctgcgggtggcccggaccaaggccctgtggctgcccatgggagactag

SEQ ID NO: 245736 - DNA, 1920 bp, Artificial Sequence
  derived and/or modified sequence
atgaggactggagtcatcggcctcatcctgccccccaccttctccttcctggagatgatgtggaggatctgcccagccctggccgtgggctgcaccgtggtggccctggtgcccccagccagccctgcccccctgctgctggcccagctggccggggagctgggccccttccctggcatcctgaatgtgctgagcggccctgccagcctggtgcccatcctggccagccagcccggcatcaggaaggtggccttctgtggggcccctgaggagggccgggccctgcggcgcagcctggccggggagtgtgccgagctgggcctggccctgggcacagagagcctgctgctgctgacagacacagcagatgtggacagcgctgtggagggcgtggtggatgctgcctggagcgaccggggccctgggggcctgcggctgctgatccaggagagcgtgtgggatgaggccatgaggcggctgcaggagaggatgggccgcctgcggagcggccggggcctggatggagctgtggacatgggcgcccggggagctgctgcctgtgacctggtgcagagatttgtgcgggaggcccagagccagggcgcccaggtgttccaggccggagatgtgcccagcgagcggcccttctacccacccaccctggtgagcaacctgcccccagccagcccctgtgcccaggtggaggtgccctggcctgtggtggtggccagccccttcagaacagccaaggaggccctgctggtggccaacggcaccccccggggcggcagcgcctctgtgtggagcgagcggctgggccaggccctggagctgggctacggcctgcaggtgggcaccgtgtggatcaatgcccacggcctgcgggaccccagcgtgcccactggaggctgcaaggagagcggctgctcctggcacggcggcccagatggcctgtatgagtacctgcggcccagcggcaccccagcccggctgagctgcctgagcaagaacctgaactatgacaccttcggcctggccgtgcccagcaccctgcctgctggccctgagatcggccccagccctgccccaccctacggcctgtttgtgggcggccgcttccaggcccctggggcccggagcagccggcccatccgggacagcagcggcaacctgcacggctacgtggccgagggcggggccaaggacatcagaggagctgtggaggccgcccaccaggccttccctggctgggccggccagagccctggggcccgggccgccctgctgtgggccctggccgccgccctggagaggaggaagagcaccctggccagccggctggagcggcagggcgctgagctgaaggctgctgaggccgaggtggagctgagcgcccggcggctgcgggcctggggcgcccgggtgcaggcccagggccacaccctgcaggtggccggcctgcggggccctgtgctgcggctgcgggagcccctgggcgtgctggccgtggtgtgcccagatgagtggcccctgctggcctttgtgtccctgctggccccagccctggcctacggcaacacagtggtgatggtgcccagcgctgcctgccccctgctggccctggaggtgtgccaggacatggccaccgtcttccctgctggcctggccaacgtggtgactggagaccgggaccacctgacccgctgcctggccctgcaccaggatgtgcaggccatgtggtacttcggcagcgcccagggcagccagtttgtggagtgggccagcgctggcaacctgaagcctgtgtgggccagccggggctgcccccgggcctgggaccaggaggccgagggcgccggccctgagctgggcctgcgggtggcccggaccaaggccctgtggctgcccatgggagactag

SEQ ID NO: 245737 - DNA, 3105 bp, Artificial Sequence
  derived and/or modified sequence
attcccattagccccgcccctttgggctggaaccggaggtgtcgctcttcggacctcaaggttccccttaacacagagcgccccgcagtcttcgcggaaagcgttcggggtaggcgatggctgcgacgcgtgcagggccccgcgcccgcgagatcttcacctcgctggagtacggaccggtgccggagagccacgcatgcgcactggcctggctggacacccaggaccggtgcttgggccactatgtgaatgggaagtggttaaagcctgaacacagaaattcagtgccttgccaggatcccatcacaggagagaacttggccagttgcctgcaggcacaggccgaggatgtggctgcagccgtggaggcagccaggatggcatttaagggctggagtgcgcaccccggcgtcgtccgggcccagcacctgaccaggctggccgaggtgatccagaagcaccagcggctgctgtggaccctggaatccctggtgactgggcgggctgttcgagaggttcgagacggggacgtccagctggcccagcagctgctccactaccatgcaatccaggcatccacccaggaggaggcactggcaggctgggagcccatgggagtaattggcctcatcctgccacccacattctccttccttgagatgatgtggaggatttgccctgccctggctgtgggctgcaccgtggtggccctcgtgcccccggcctccccggcgcccctcctcctggcccagctggcgggggagctgggccccttcccgggaatcctgaatgtcctcagtggccctgcgtccctggtgcccatcctggcctcccagcctggaatccggaaggtggccttctgcggagccccggaggaagggcgtgcccttcgacggagcctggcgggagagtgtgcggagctgggcctggcgctggggacggagtcgctgctgctgctgacggacacggcggacgtagactcggccgtggagggtgtcgtggacgccgcctggtccgaccgcggcccgggtggcctcaggctcctcatccaggagtctgtgtgggatgaagccatgagacggctgcaggagcggatggggcggcttcggagtggccgagggctggatggggccgtggacatgggggcccggggggctgccgcatgtgacctggtccagcgctttgtgcgtgaggcccagagccagggtgcacaggtgttccaggctggtgatgtgccttcggaacgcccattctatcccccaaccttggtctccaacctgcccccagcctccccatgtgcccaggtggaggtgccgtggcctgtggtcgtggcctcccccttccgcacagccaaggaggcactgttggtggccaacgggacgccccgcgggggcagcgccagtgtgtggagcgagaggctggggcaggcgctggagctgggctatgggctccaggtgggcactgtctggatcaacgcccacggcctcagagacccttcggtgcccacaggcggctgcaaggagagtgggtgttcctggcacgggggcccagacgggctgtatgagtatctgcggccctcagggacccctgcccggctgtcctgcctctccaagaacctgaactatgacacctttggcctcgctgttccctcaaccctgccggctgggcctgaaatagggcccagcccagcacccccctatgggctcttcgttgggggccgtttccaggctcctggggcccgaagctccaggcccatccgggattcgtctggcaacctccatggctacgtggctgagggtggagccaaggacatccgaggtgctgtggaggccgctcaccaggctttccctggctgggcgggccagtccccaggagcccgggcagccctgctgtgggccctggcggctgcactggagcgccggaagtctaccctggcctcgaggctggagaggcagggagcggagctcaaggctgcggaggcggaggtggagctgagcgcaagacgacttcgggcgtggggggcccgggtgcaggcccaaggccacaccctgcaggtagccgggctgagaggccctgtgctgcgcctgcgggagccgctgggtgtgctggctgtggtgtgtccggacgagtggcccctgcttgccttcgtgtccctgctggctcccgccctggcctacggcaacactgtggtcatggtgcccagtgcggcctgtcctctgctggccctggaggtctgccaggacatggccaccgtgttcccagcaggcctggccaacgtggtgacaggagaccgggaccatctgacccgctgcctggccttgcaccaagacgtccaggccatgtggtatttcggatcagcccagggttcccagtttgtcgagtgggcctcggcaggaaacctcaaaccggtgtgggcgagcaggggctgcccgcgggcctgggaccaggaggccgagggggcaggcccagagctggggctgcgagtggcgcggaccaaggccctgtggctgcctatgggggactgatgcctgagcgccacctactgcattttggacacctcacaccaaggggagatgcaccccacagacacctgggactttccccttctggttcctgtgtctcccaataaactctctgaccaaccctagctgtgcttctgcgagaagaaagggtgtagcaacttctggcagatatgaggcttttttcttttttttttttttttttgagacaacgtctggctctgtcacccaggctggagcgcagtggcacaatctcggcccactgcagcctcgacctctggggctcaagggatcctcatgcctcagcctcatatgtagctggggccacagacatgcaccaccacacctggctcgaggccattttagttctgaggttgagcagctcaggagccggctccagcacggtgctgtgtttgtgaaacagagaaaggggacccccgaggaccccagacagggccttaggactctcatatcttcttgtcttctccatctggtggctcttgctctctggttttctctaccttttcatggccccagaatccatatgcagtaaaggaactctctggaataaaattaaagtcctcct

SEQ ID NO: 245738 - DNA, 2343 bp, Artificial Sequence
  derived and/or modified sequence
acagagcgccccgcagtcttcgcggaaagcgttcggggtaggcgatggctgcgacgcgtgcagggccccgcgcccgcgagatcttcacctcgctggagtacggaccggtgccggagagccacgcatgcgcactggctggccgaggtgatccagaagcaccagcggctgctgtggaccctggaatccctggtgactgggcgggctgttcgagaggttcgagacggggacgtccagctggcccagcagctgctccactaccatgcaatccaggcatccacccaggaggaggcactggcaggctgggagcccatgggagtaattggcctcatcctgccacccacattctccttccttgagatgatgtggaggatttgccctgccctggctgtgggctgcaccgtggtggccctcgtgcccccggcctccccggcgcccctcctcctggcccagctggcgggggagctgggccccttcccgggaatcctgaatgtcctcagtggccctgcgtccctggtgcccatcctggcctcccagcctggaatccggaaggtggccttctgcggagccccggaggaagggcgtgcccttcgacggagcctggcgggagagtgtgcggagctgggcctggcgctggggacggagtcgctgctgctgctgacggacacggcggacgtagactcggccgtggagggtgtcgtggacgccgcctggtccgaccgcggcccgggtggcctcaggctcctcatccaggagtctgtgtgggatgaagccatgagacggctgcaggagcggatggggcggcttcggagtggccgagggctggatggggccgtggacatgggggcccggggggctgccgcatgtgacctggtccagcgctttgtgcgtgaggcccagagccagggtgcacaggtgttccaggctggtgatgtgccttcggaacgcccattctatcccccaaccttggtctccaacctgcccccagcctccccatgtgcccaggtggaggtgccgtggcctgtggtcgtggcctcccccttccgcacagccaaggaggcactgttggtggccaacgggacgccccgcgggggcagcgccagtgtgtggagcgagaggctggggcaggcgctggagctgggctatgggctccaggtgggcactgtctggatcaacgcccacggcctcagagacccttcggtgcccacaggcggctgcaaggagagtgggtgttcctggcacgggggcccagacgggctgtatgagtatctgcggccctcagggacccctgcccggctgtcctgcctctccaagaacctgaactatgacacctttggcctcgctgttccctcaaccctgccggctgggcctgaaatagggcccagcccagcacccccctatgggctcttcgttgggggccgtttccaggctcctggggcccgaagctccaggcccatccgggattcgtctggcaacctccatggctacgtggctgagggtggagccaaggacatccgaggtgctgtggaggccgctcaccaggctttccctggctgggcgggccagtccccaggagcccgggcagccctgctgtgggccctggcggctgcactggagcgccggaagtctaccctggcctcgaggctggagaggcagggagcggagctcaaggctgcggaggcggaggtggagctgagcgcaagacgacttcgggcgtggggggcccgggtgcaggcccaaggccacaccctgcaggtagccgggctgagaggccctgtgctgcgcctgcgggagccgctgggtgtgctggctgtggtgtgtccggacgagtggcccctgcttgccttcgtgtccctgctggctcccgccctggcctacggcaacactgtggtcatggtgcccagtgcggcctgtcctctgctggccctggaggtctgccaggacatggccaccgtgttcccagcaggcctggccaacgtggtgacaggagaccgggaccatctgacccgctgcctggccttgcaccaagacgtccaggccatgtggtatttcggatcagcccagggttcccagtttgtcgagtgggcctcggcaggaaacctcaaaccggtgtgggcgagcaggggctgcccgcgggcctgggaccaggaggccgagggggcaggcccagagctggggctgcgagtggcgcggaccaaggccctgtggctgcctatgggggactgatgcctgagcgccacctactgcattttggacacctcacaccaaggggagatgcaccccacagacacctgggactttccccttctggttcctgtgtctcccaataaactctctgaccaaccc

SEQ ID NO: 245739 - DNA, 2174 bp, Artificial Sequence
  derived and/or modified sequence
agccccgcccctttgggctggaaccggaggtgtcgctcttcggacctcaaggttccccttaacacagagcgccccgcagtcttcgcggaaagcgttcggggtaggcgatggctgcgacgcgtgcagggccccgcgcccgcgagatcttcacctcgctggagtacggaccggtgccggagagccacgcatgcgcactggagtaattggcctcatcctgccacccacattctccttccttgagatgatgtggaggatttgccctgccctggctgtgggctgcaccgtggtggccctcgtgcccccggcctccccggcgcccctcctcctggcccagctggcgggggagctgggccccttcccgggaatcctgaatgtcctcagtggccctgcgtccctggtgcccatcctggcctcccagcctggaatccggaaggtggccttctgcggagccccggaggaagggcgtgcccttcgacggagcctggcgggagagtgtgcggagctgggcctggcgctggggacggagtcgctgctgctgctgacggacacggcggacgtagactcggccgtggagggtgtcgtggacgccgcctggtccgaccgcggcccgggtggcctcaggctcctcatccaggagtctgtgtgggatgaagccatgagacggctgcaggagcggatggggcggcttcggagtggccgagggctggatggggccgtggacatgggggcccggggggctgccgcatgtgacctggtccagcgctttgtgcgtgaggcccagagccagggtgcacaggtgttccaggctggtgatgtgccttcggaacgcccattctatcccccaaccttggtctccaacctgcccccagcctccccatgtgcccaggtggaggtgccgtggcctgtggtcgtggcctcccccttccgcacagccaaggaggcactgttggtggccaacgggacgccccgcgggggcagcgccagtgtgtggagcgagaggctggggcaggcgctggagctgggctatgggctccaggtgggcactgtctggatcaacgcccacggcctcagagacccttcggtgcccacaggcggctgcaaggagagtgggtgttcctggcacgggggcccagacgggctgtatgagtatctgcggccctcagggacccctgcccggctgtcctgcctctccaagaacctgaactatgacacctttggcctcgctgttccctcaaccctgccggctgggcctgaaatagggcccagcccagcacccccctatgggctcttcgttgggggccgtttccaggctcctggggcccgaagctccaggcccatccgggattcgtctggcaacctccatggctacgtggctgagggtggagccaaggacatccgaggtgctgtggaggccgctcaccaggctttccctggctgggcgggccagtccccaggagcccgggcagccctgctgtgggccctggcggctgcactggagcgccggaagtctaccctggcctcgaggctggagaggcagggagcggagctcaaggctgcggaggcggaggtggagctgagcgcaagacgacttcgggcgtggggggcccgggtgcaggcccaaggccacaccctgcaggtagccgggctgagaggccctgtgctgcgcctgcgggagccgctgggtgtgctggctgtggtgtgtccggacgagtggcccctgcttgccttcgtgtccctgctggctcccgccctggcctacggcaacactgtggtcatggtgcccagtgcggcctgtcctctgctggccctggaggtctgccaggacatggccaccgtgttcccagcaggcctggccaacgtggtgacaggagaccgggaccatctgacccgctgcctggccttgcaccaagacgtccaggccatgtggtatttcggatcagcccagggttcccagtttgtcgagtgggcctcggcaggaaacctcaaaccggtgtgggcgagcaggggctgcccgcgggcctgggaccaggaggccgagggggcaggcccagagctggggctgcgagtggcgcggaccaaggccctgtggctgcctatgggggactgatgcctgagcgccacctactgcattttggacacctcacaccaaggggagatgcaccccacagacacct

SEQ ID NO: 245740 - DNA, 2409 bp, Artificial Sequence
  derived and/or modified sequence
atggccgccacccgggccggcccccgggcccgggagatcttcaccagcctcgagtacggccccgtgcctgagtcgcacgcctgcgcccttgcttggctggatacccaggatcgctgtctggggcattatgtgaatggcaaatggcttaagccagaacaccgtaacagcgtaccttgccaggatcccatcactggggagaacctcgcctcatgcctccaagcacaggctgaggacgtggctgcggcagtggaagccgctcgcatggctttcaaaggttggagcgcccacccaggcgtggtgagggcccagcacctgacccgcctggcagaagtgattcagaagcaccagcggcttttgtggactctcgagagcctcgtgaccggtcgggccgttagagaagtgagggatggagacgtgcagctggcccaacaactgctccattaccacgccatccaggctagtactcaggaagaggcccttgccggctgggagccaatgggagtcattgggcttatattgccaccgacattctctttcttagaaatgatgtggcgtatatgccccgcgttagccgttgggtgcacagtagttgccctggttccccctgcatctccagcccctttattactggctcagctggccggcgagctggggccttttcccggcatcctgaacgtgctcagcggtcccgcttcactggtaccaattctcgcctctcagcccggcattcggaaggtggccttctgtggcgcgcccgaagaggggcgggcattacgacggtccctggccggggaatgcgcagaacttggcctggcactaggtaccgagtcactcctgctcctgacagataccgcagacgtggactccgccgttgaaggcgtcgtagatgctgcctggagtgaccgcggtcccggcgggttacggttgctcattcaggagtctgtttgggatgaggccatgcggcgcctgcaggaaagaatgggcaggcttcgttccggcagaggcctggacggagctgtagatatgggagctcgcggggctgccgcgtgtgacctggtgcagcgatttgtgagagaagctcagagccagggcgctcaggtgttccaggcgggggacgtgccaagcgagcgccctttctaccctccaacactggtaagcaacctcccacctgcctctccatgcgctcaggtcgaggtaccttggcctgttgtcgtagcttccccttttaggacggctaaggaggctctgttagtagctaacgggacacccaggggcggaagtgcctctgtgtggtccgaacggctaggccaggctctggagctgggctacggattacaggttgggacagtgtggatcaacgcccatggcctgcgagatccaagtgtgcctacaggaggctgtaaggaatcaggctgctcatggcatgggggcccggacggcctgtacgagtaccttcgccctagcgggaccccggcacgcctcagttgcctcagcaaaaacctgaattacgacacatttggacttgccgttccaagcacgctgcctgccggaccagagattggaccgtccccggctcccccatacggcctctttgttggggggaggtttcaggctcctggtgcccgatcctcgcgacccatcagggacagcagtggcaatctccatggctacgtcgccgaagggggtgcgaaagacatccggggggcagttgaggctgcccatcaggctttcccaggctgggccgggcagtcccccggtgcccgggctgcgctgttgtgggcattggctgccgctctggaacgcagaaaatcaaccctggcatctaggctggaacgacagggagcagagctgaaggccgcagaagctgaagttgagttgtcggctagacgtctgcgggcatggggtgccagagtccaagcccagggacacacactacaggtggctggtcttcgcggcccagtgctgaggctacgcgagcctcttggcgtgctggcagtggtgtgccctgatgagtggccactccttgccttcgtgtccctgctcgccccagccttggcatatggaaataccgtggtaatggtccctagcgccgcctgtcccctgctggccctggaagtttgtcaggatatggcgactgtgttccccgccgggctggcgaatgtggtgacgggcgacagggaccatttgaccagatgcctggccctgcaccaggatgtgcaggcgatgtggtacttcggatcagcgcagggcagccaatttgttgagtgggcgagtgcagggaatttgaagcctgtttgggcttcacggggctgccccagagcttgggatcaggaggcagaaggtgccgggcccgagctgggcctcagagtggccagaacaaaagctttatggcttccaatgggcgattag

SEQ ID NO: 245741 - DNA, 1914 bp, Artificial Sequence
  derived and/or modified sequence
atgggcgtgatcggcctgatcctgccccccaccttcagcttcctggaaatgatgtggaggatatgccccgcgctggcagtcggctgtacagtagtcgctctggtaccacccgcctccccagcccctttattactggcccagttggcaggtgagctcgggccttttcccggtatcctgaatgttctcagcggccccgcttctcttgtgcctatattggcatcacagcccggcatcaggaaagtggcattttgcggagcacctgaggaggggcgggctcttaggcgtagcctggctggagagtgtgccgaactgggccttgccttaggtactgagtctctgcttttactgactgacacagctgacgtggacagcgcagtagagggagtagtagatgccgcctggtccgacaggggccctgggggactcaggctgctgattcaggagtctgtgtgggacgaggccatgaggcgcctgcaggagcgaatgggacgattgcgctctgggcgtggcttagacggggccgttgatatgggagccagaggagcagctgcctgtgacctggttcaacgtttcgttcgcgaagcccaaagtcagggcgcacaggtgtttcaagccggggatgtgccatcagaaagacccttttacccacctacgctcgtgagtaacctgcctcccgcctctccctgcgcgcaggtcgaggtgccatggcccgtggtagttgcttctccctttagaaccgccaaggaagcgctactggtggctaacggcacaccgcgaggcggctcagcatccgtgtggagcgagcggcttggccaggcactggaacttggatatgggctccaggtcgggactgtatggattaacgctcacggactgcgcgatccgagtgtcccgactgggggctgtaaggagtcagggtgttcatggcacggtggccctgatggtctgtatgaatatctgagaccttctgggacaccagcgcggcttagttgtctcagtaaaaacctgaactatgacacgttcggccttgctgtgccttcgaccctccccgccggtcctgaaatcgggcccagcccagccccaccatatggactttttgtaggagggcgatttcaagccccgggtgcccggtcatccaggcctattcgggatagcagcgggaacttacacgggtacgtcgctgagggaggcgcaaaagatattcggggagcagtggaggcagcccaccaggcttttcccgggtgggccgggcagtcgccgggtgccagggctgcacttctgtgggccttggcggctgcactcgagcgccgcaagtctaccttagcctccaggttggagcgtcagggggcagaactcaaggctgcagaagcagaagtcgaactcagtgcccgacgccttcgcgcctggggtgctagagtgcaagcccagggacacacgctacaggttgccggccttcgcggccccgtgctgcggctaagagaacctcttggagttttggcagtggtctgtccagatgagtggccactccttgccttcgtaagcctcctggccccggcgcttgcatatggcaacactgttgtgatggtaccaagcgctgcttgcccgctattagctctggaggtgtgccaggacatggctactgtttttccagctggactggctaacgtggtgacgggtgatagagaccatctgactaggtgccttgccctgcaccaggatgttcaggccatgtggtattttgggtccgcacagggatcccagttcgtggaatgggcgagcgccggcaacctcaagcctgtgtgggcttcgcgaggttgtccacgagcgtgggaccaggaagccgagggcgcaggccccgaattgggactgagagtagctcgcactaaggctttgtggctgcctatgggcgattag

SEQ ID NO: 245742 - DNA, 1920 bp, Artificial Sequence
  derived and/or modified sequence
atgcggaccggcgtgatcggcctgatcctgccccccaccttcagctttttagagatgatgtggcggatctgccccgccttggccgtcggatgcactgtggtggcactggtccctccagcttctccagcccctctgctgcttgcacagctggctggcgaattggggccctttcccggcatcctgaatgtcctgagcggcccagccagtttggtgccaattttggcttctcaaccaggaatcaggaaagtcgctttttgtggggcacccgaagaaggtcgggcgctgcgtcgctctcttgccggcgagtgcgctgaactgggcctcgcgctgggaaccgagagtctgctgctgttgaccgacaccgcagacgtggacagtgctgtcgagggcgtagtagacgccgcctggtcggacagaggtcctggcggactgcgacttctgatccaagagagcgtgtgggatgaggctatgcgacgtctccaggagcggatgggaagacttcggtctggtcggggactggatggcgcggtggacatgggagccaggggcgctgccgcttgtgatttggtccagcgcttcgtacgtgaagcacaaagtcagggagctcaggtcttccaggctggcgacgtgccatcagagcggccattttatcctcctactttggtctccaatctgcctccagcctctccttgtgctcaggtggaggtaccgtggcctgtagtcgtcgcatcaccctttaggacagctaaggaagccctgttggttgcgaacgggaccccacggggaggcagcgcatctgtgtggtctgagagactgggacaagcccttgaacttggttacggcctgcaggttggaacagtgtggattaatgctcatgggctccgtgacccatctgtaccaaccggaggttgtaaggaaagcgggtgtagttggcatgggggacccgacgggctatatgaatacctgcgtccttctggcactccagccaggctctcatgtcttagcaagaacctaaactatgacacctttgggcttgccgtgccgagtacattgcccgctgggccagaaatcggtccgtccccagcccctccgtacggattattcgttggcggcaggttccaggcaccgggggcccggagctcacgacccatccgggatagctctggaaaccttcacggctatgtcgctgaggggggggccaaagatatccggggagccgtagaggccgcacaccaggcttttccaggctgggctggccagtcaccaggggcacgcgccgctctgctctgggccctggccgccgccttggaacggcgcaaatctaccctggcctcccggctcgaaagacagggggcagagcttaaagctgcggaagccgaggttgagttatcagctcggcggcttcgcgcctggggcgccagagttcaggcccagggtcacaccctacaggtggccgggcttagaggccctgtgctgcgactgagggaaccgcttggcgtgctcgctgttgtttgcccggatgaatggccattgcttgcattcgttagcctgctggcacccgcactcgcatatggcaatacagtggtgatggtgccatctgctgcgtgccctctcctggccctcgaagtgtgtcaggatatggcaacagtctttcccgctgggttagcaaatgtggtgacaggtgacagagatcacctgacccgctgtctggcactgcaccaggacgttcaagcaatgtggtatttcgggagcgcccaaggatcccagtttgtcgaatgggctagcgccggaaatctaaaaccagtgtgggcctcacgggggtgccctcgcgcttgggatcaggaggctgaaggggccggccccgaacttggcctccgggtagcccgcaccaaggccttgtggctcccaatgggcgattag

SEQ ID NO: 245743 - DNA, 2409 bp, Artificial Sequence
  derived and/or modified sequence
atggccgcaacacgggctggacccagagccagagagattttcacatccttagagtatgggcctgtgccagaaagccacgcatgcgctttagcttggctcgatacccaggaccgctgtctcgggcattacgttaacggcaaatggctgaagcctgagcacaggaactccgtaccttgccaggacccaatcaccggcgaaaacttggcgagctgtttgcaggcccaggcggaggatgtggccgctgccgtcgaagcggctcgtatggcctttaaagggtggtccgctcatcccggtgtggtgcgcgctcagcacctgacccgcctggccgaggtcatacagaagcaccagcgcctcctatggaccctcgagagcctggttacaggcagggcggtgcgggaagtgcgggacggggatgtgcagttggcacagcagcttctgcattaccatgccatccaggcaagcactcaagaagaagccctggctgggtgggagccaatgggagtgattgggctcatcctcccccctactttctcctttcttgaaatgatgtggagaatttgtcccgctcttgccgtgggctgtacagtcgtggccttggtcccacctgcctcacccgctcccttgctcttagcccagttagcaggggagttgggcccattccccggaatactgaatgtattgagcggaccagcttctctggtccccatattggcttcccagcctggcatccggaaggtggctttctgtggtgctcctgaggagggcagggctctccgacggagtctggctggcgagtgtgcggagttggggctcgccctgggcaccgaatcgctcctactgctgacagatacagctgacgtcgatagtgcagtggaaggtgtcgtggacgctgcctggtctgaccgaggtcccggtgggctcagactgctcatccaggagagcgtctgggatgaggctatgaggagactacaggagcggatgggccgtttaagaagcggaagggggttggatggggctgtggacatgggggctcgtggagctgctgcgtgcgatctggtgcagcgattcgtgagggaggcccagtcacagggggctcaggttttccaggccggagacgtgccaagtgaaagaccattctacccacccacactggtttctaatcttcctcctgctagcccctgcgcgcaggtggaggtgccatggcccgtcgtggtggcatcaccgttccgcactgctaaggaggcattgctcgtcgccaacgggacgcctcgcggaggatctgcgagcgtctggagtgaacgcttgggtcaagcactggaactcggctacggtctacaagtgggtacagtttggatcaatgcacacggactgcgggatcctagtgtccctacgggcggatgtaaagagtctggatgttcatggcacggtggtccagacggactctatgaatacttgagacctagcgggacacccgcaaggttatcttgtttatcgaaaaatctgaattatgacacatttggtctggccgtccccagcactctgcccgcaggacccgaaattggaccctctccagccccaccatacgggctgtttgtcggcggaaggttccaggcgccaggtgcccgatcctcaagacctatccgcgattctagtggcaacttgcacggatatgtagcagaaggcggagctaaagacattaggggcgctgttgaagccgctcaccaggcattccctggctgggcgggacagtcccctggggcacgggcagcgctgctttgggctctcgcagctgcactcgaacgtcgaaagagtactctagccagcaggctggaaaggcaaggggctgagctgaaagcagccgaggccgaagtcgagctatctgctcgcagacttcgtgcctggggagccagagttcaggcccagggccacacattgcaagttgccggactcagggggcctgtactcaggctacgtgaacctctaggcgtgctggccgtagtatgccccgatgagtggccgctactggcatttgtgtccctcctggccccagctctggcttatggtaacacagtcgttatggtccccagtgcagcctgcccactgctggcattggaggtgtgccaggatatggcaaccgtgttcccggcaggacttgctaatgtggtcaccggagaccgggatcatctcaccagatgtctggctctgcaccaggatgtacaggccatgtggtactttggttccgcccagggcagtcagttcgtcgaatgggcgtctgccggaaacctgaagcccgtttgggctagtcgcggatgtccgagggcctgggaccaggaggcggagggtgcaggtccagagttgggcttacgagttgccaggacgaaggctctgtggctccccatgggagactag

SEQ ID NO: 245744 - DNA, 1914 bp, Artificial Sequence
  derived and/or modified sequence
atgggggtgatcggcctcatccttccccctacattctcgttccttgagatgatgtggcgcatctgtccagctctggccgtcggctgtaccgtcgtcgccctggtgccaccagcctcaccagcccctcttctgctcgctcagctagcaggcgaactggggcctttccctgggatcctcaatgtactctcaggccctgccagtctagtccctattttagcaagtcagccaggcattagaaaggtggcattttgcggagctcctgaggaggggcgtgctcttcggaggagcctagcgggagaatgtgctgagttaggcctggccctcgggactgagagtctattactgctgactgacacagcagacgtagactctgcagttgaaggggtggttgatgccgcttggagcgacaggggcccaggaggactgcgtctcctcattcaggagtccgtatgggacgaggccatgcggagacttcaggagagaatggggagactgaggagtggacgcggtctcgacggggctgtagatatgggggctagaggagccgctgcatgtgatttggttcaacgcttcgtgcgcgaggctcaaagccagggggcacaggtatttcaggctggggacgtgccatctgaaagacctttttatccacccaccctagtgtccaacctgccgccagctagcccttgcgctcaggttgaggtgccctggcccgtagtggtggcatccccctttcgaaccgccaaagaggctctcctggtggctaatggcaccccgagagggggatcggcaagcgtatggtccgagcgactcggccaggccctggaactgggctacggattacaagtcggtacagtgtggatcaacgctcatgggttgcgtgatccatccgtccctacgggtggatgcaaggaatctgggtgtagttggcacggagggccagatgggttgtatgagtatcttcgtccatcagggacccccgcaaggctcagctgcctgtcaaagaacctgaattatgatacctttgggctcgcagtccctagcacactacccgcagggcctgagataggtccttcgcccgctcctccctatggcctgttcgtgggtggccgattccaggcgccaggggctaggtcatctcggcctatccgggattctagcgggaatctgcacggttacgtggctgaggggggagcgaaagacattagaggtgccgtggaagcagcccatcaagccttcccgggatgggccggtcaatcgccaggggcacgggcagccttactgtgggcccttgctgctgccctggagcgcaggaagagcacgctggcctctaggctagagagacaaggagcggagctcaaagcggctgaagctgaggtggagctgtccgcccgtagattgcgggcatggggagcacgggtccaggcacagggtcacactttacaggtggccggattacggggacccgtgctgagactccgcgagcctctcggggtacttgcagtggtgtgcccagatgaatggcctctcctggcctttgtctcactgcttgcacctgctctggcttacggcaataccgtggtaatggttccctcagctgcttgtcccctcctcgctctcgaggtgtgtcaggacatggctacggtattccccgctggtttagcaaacgtagtcacaggcgacagagaccaccttactcggtgtctcgcgctccatcaagatgttcaggcaatgtggtattttgggtcggcccagggcagccaattcgtggagtgggcttcagctggaaatcttaagccggtctgggccagccgaggttgtccacgtgcctgggatcaggaggctgagggggctggtcccgaacttggccttcgcgttgctagaacaaaagctctttggctgcctatgggagattag

SEQ ID NO: 245745 - DNA, 1920 bp, Artificial Sequence
  derived and/or modified sequence
atgagaactggtgttattgggcttatcctccctcctaccttttctttcctggagatgatgtggagaatctgcccagcccttgcagtgggttgtaccgtagttgctctggtgcccccagctagtcccgcaccgttacttctcgcgcaactggccggagaactggggccttttcctggaatcctgaacgtattgtccggccctgcctctcttgtgcctatcctggcttcccagcctggcatacgtaaagttgcattttgtggggcaccggaagaagggcgagcattgcggcgatctcttgccggagagtgcgcagagctgggcttagccctggggacagagagtctcttgcttctgacagacaccgccgacgtcgatagtgctgttgaaggcgtagtggatgctgcttggtcggatcggggacctggaggactccgcctgctgatccaggaatccgtatgggacgaagctatgcgaaggctccaagaaaggatgggacgcttgcggagtgggcgtggtttagatggtgcagtggatatgggggctcggggtgccgcagcgtgcgacctggtccagcggttcgtccgagaggcccaaagccagggggcacaagttttccaggctggagatgtaccaagtgaaagaccattttaccccccaaccctcgtctctaatctaccacctgcctctccatgcgcacaagtcgaggtgccgtggcctgtcgttgtcgcttcccccttccgaaccgccaaggaggccctcctggtagcgaacgggacaccacgtggaggcagtgcatctgtctggagtgagagactcggccaggctctcgaactggggtatggcctacaggttggcacggtgtggatcaatgcacacgggctacgggatccttcggtgcccactggcggatgcaaggagagtggttgctcatggcacgggggtccggatggtctatacgaatacttgagaccctcaggcacaccggctagactcagctgtctgagcaagaacctgaactatgacaccttcggcctcgccgtgccatcgaccctgcccgctggacctgagatcggcccatctccagcaccgccatacggactgtttgtaggaggccgtttccaggcaccaggcgctcggagcagccggccaatcagagactcatcagggaatctgcacgggtatgtggctgagggcggagctaaagacatccgaggggcagtggaggccgcacatcaggcatttcctggatgggcagggcagtccccgggagcccgagcggctttactttgggcgttggcagccgctttagagcgccgtaagtccacgctggcctctcgtctggagcggcaaggtgccgaactcaaggccgcagaagccgaagtcgaactttcagctcgtagactacgtgcatggggagccagagtacaagctcagggccacacgttgcaggtcgctggattacgagggccagtcctccggctcagagagcctctgggagtgcttgcggtggtctgtccagacgagtggccacttctggcctttgtgagtctgctggcccctgcacttgcatacgggaacacagtggtcatggtccccagtgctgcatgtccgctgctcgcactggaggtctgtcaggacatggccacagtgttccctgctggcctcgctaacgttgtgacgggagatcgcgaccacttgaccaggtgcttagccctccaccaggacgttcaggcaatgtggtatttcgggtccgcccagggcagccagttcgtcgagtgggcatccgcaggtaacctaaagccagtctgggcatccagaggatgcccccgtgcatgggatcaggaggcagagggcgcaggcccagagcttgggctcagggtcgccaggaccaaggctttgtggctgcccatgggggactag

SEQ ID NO: 245746 - DNA, 2409 bp, Artificial Sequence
  derived and/or modified sequence
atggccgccaccagagccggccccagagccagagagatcttcaccagcctggagtacggccccgtgcccgagagccacgcctgcgccctggcctggctggacacccaggacagatgcctgggccactacgtgaacggcaagtggctgaagcccgagcacagaaacagcgtgccctgccaggaccccatcaccggcgagaacctggccagctgcctgcaggcccaggccgaggacgtggccgccgccgtggaggccgccagaatggccttcaagggctggagcgcccaccccggcgtggtgagagcccagcacctgaccagactggccgaggtgatccagaagcaccagagactgctgtggaccctggagagcctggtgaccggcagagccgtgagagaggtgagagacggcgacgtgcagctggcccagcagctgctgcactaccacgccatccaggccagcacccaggaggaggccctggccggctgggagcccatgggcgtgatcggcctgatcctgccccccaccttcagcttcctggagatgatgtggagaatctgccccgccctggccgtgggctgcaccgtggtggccctggtgccccccgccagccccgcccccctgctgctggcccagctggccggcgagctgggccccttccccggcatcctgaacgtgctgagcggccccgccagcctggtgcccatcctggccagccagcccggcatcagaaaggtggccttctgcggcgcccccgaggagggcagagccctgagaagaagcctggccggcgagtgcgccgagctgggcctggccctgggcaccgagagcctgctgctgctgaccgacaccgccgacgtggacagcgccgtggagggcgtggtggacgccgcctggagcgacagaggccccggcggcctgagactgctgatccaggagagcgtgtgggacgaggccatgagaagactgcaggagagaatgggcagactgagaagcggcagaggcctggacggcgccgtggacatgggcgccagaggcgccgccgcctgcgacctggtgcagagattcgtgagagaggcccagagccagggcgcccaggtgttccaggccggcgacgtgcccagcgagagacccttctacccccccaccctggtgagcaacctgccccccgccagcccctgcgcccaggtggaggtgccctggcccgtggtggtggccagccccttcagaaccgccaaggaggccctgctggtggccaacggcacccccagaggcggcagcgccagcgtgtggagcgagagactgggccaggccctggagctgggctacggcctgcaggtgggcaccgtgtggatcaacgcccacggcctgagagaccccagcgtgcccaccggcggctgcaaggagagcggctgcagctggcacggcggccccgacggcctgtacgagtacctgagacccagcggcacccccgccagactgagctgcctgagcaagaacctgaactacgacaccttcggcctggccgtgcccagcaccctgcccgccggccccgagatcggccccagccccgcccccccctacggcctgttcgtgggcggcagattccaggcccccggcgccagaagcagcagacccatcagagacagcagcggcaacctgcacggctacgtggccgagggcggcgccaaggacatcagaggcgccgtggaggccgcccaccaggccttccccggctgggccggccagagccccggcgccagagccgccctgctgtgggccctggccgccgccctggagagaagaaagagcaccctggccagcagactggagagacagggcgccgagctgaaggccgccgaggccgaggtggagctgagcgccagaagactgagagcctggggcgccagagtgcaggcccagggccacaccctgcaggtggccggcctgagaggccccgtgctgagactgagagagcccctgggcgtgctggccgtggtgtgccccgacgagtggcccctgctggccttcgtgagcctgctggcccccgccctggcctacggcaacaccgtggtgatggtgcccagcgccgcctgccccctgctggccctggaggtgtgccaggacatggccaccgtgttccccgccggcctggccaacgtggtgaccggcgacagagaccacctgaccagatgcctggccctgcaccaggacgtgcaggccatgtggtacttcggcagcgcccagggcagccagttcgtggagtgggccagcgccggcaacctgaagcccgtgtgggccagcagaggctgccccagagcctgggaccaggaggccgagggcgccggccccgagctgggcctgagagtggccagaaccaaggccctgtggctgcccatgggcgactag

SEQ ID NO: 245747 - DNA, 1914 bp, Artificial Sequence
  derived and/or modified sequence
atgggcgtgatcggcctgatcctgccccccaccttcagcttcctggagatgatgtggagaatctgccccgccctggccgtgggctgcaccgtggtggccctggtgccccccgccagccccgcccccctgctgctggcccagctggccggcgagctgggccccttccccggcatcctgaacgtgctgagcggccccgccagcctggtgcccatcctggccagccagcccggcatcagaaaggtggccttctgcggcgcccccgaggagggcagagccctgagaagaagcctggccggcgagtgcgccgagctgggcctggccctgggcaccgagagcctgctgctgctgaccgacaccgccgacgtggacagcgccgtggagggcgtggtggacgccgcctggagcgacagaggccccggcggcctgagactgctgatccaggagagcgtgtgggacgaggccatgagaagactgcaggagagaatgggcagactgagaagcggcagaggcctggacggcgccgtggacatgggcgccagaggcgccgccgcctgcgacctggtgcagagattcgtgagagaggcccagagccagggcgcccaggtgttccaggccggcgacgtgcccagcgagagacccttctacccccccaccctggtgagcaacctgccccccgccagcccctgcgcccaggtggaggtgccctggcccgtggtggtggccagccccttcagaaccgccaaggaggccctgctggtggccaacggcacccccagaggcggcagcgccagcgtgtggagcgagagactgggccaggccctggagctgggctacggcctgcaggtgggcaccgtgtggatcaacgcccacggcctgagagaccccagcgtgcccaccggcggctgcaaggagagcggctgcagctggcacggcggccccgacggcctgtacgagtacctgagacccagcggcacccccgccagactgagctgcctgagcaagaacctgaactacgacaccttcggcctggccgtgcccagcaccctgcccgccggccccgagatcggccccagccccgcccccccctacggcctgttcgtgggcggcagattccaggcccccggcgccagaagcagcagacccatcagagacagcagcggcaacctgcacggctacgtggccgagggcggcgccaaggacatcagaggcgccgtggaggccgcccaccaggccttccccggctgggccggccagagccccggcgccagagccgccctgctgtgggccctggccgccgccctggagagaagaaagagcaccctggccagcagactggagagacagggcgccgagctgaaggccgccgaggccgaggtggagctgagcgccagaagactgagagcctggggcgccagagtgcaggcccagggccacaccctgcaggtggccggcctgagaggccccgtgctgagactgagagagcccctgggcgtgctggccgtggtgtgccccgacgagtggcccctgctggccttcgtgagcctgctggcccccgccctggcctacggcaacaccgtggtgatggtgcccagcgccgcctgccccctgctggccctggaggtgtgccaggacatggccaccgtgttccccgccggcctggccaacgtggtgaccggcgacagagaccacctgaccagatgcctggccctgcaccaggacgtgcaggccatgtggtacttcggcagcgcccagggcagccagttcgtggagtgggccagcgccggcaacctgaagcccgtgtgggccagcagaggctgccccagagcctgggaccaggaggccgagggcgccggccccgagctgggcctgagagtggccagaaccaaggccctgtggctgcccatgggcgactag

SEQ ID NO: 245748 - DNA, 1920 bp, Artificial Sequence
  derived and/or modified sequence
atgagaaccggcgtgatcggcctgatcctgccccccaccttcagcttcctggagatgatgtggagaatctgccccgccctggccgtgggctgcaccgtggtggccctggtgccccccgccagccccgcccccctgctgctggcccagctggccggcgagctgggccccttccccggcatcctgaacgtgctgagcggccccgccagcctggtgcccatcctggccagccagcccggcatcagaaaggtggccttctgcggcgcccccgaggagggcagagccctgagaagaagcctggccggcgagtgcgccgagctgggcctggccctgggcaccgagagcctgctgctgctgaccgacaccgccgacgtggacagcgccgtggagggcgtggtggacgccgcctggagcgacagaggccccggcggcctgagactgctgatccaggagagcgtgtgggacgaggccatgagaagactgcaggagagaatgggcagactgagaagcggcagaggcctggacggcgccgtggacatgggcgccagaggcgccgccgcctgcgacctggtgcagagattcgtgagagaggcccagagccagggcgcccaggtgttccaggccggcgacgtgcccagcgagagacccttctacccccccaccctggtgagcaacctgccccccgccagcccctgcgcccaggtggaggtgccctggcccgtggtggtggccagccccttcagaaccgccaaggaggccctgctggtggccaacggcacccccagaggcggcagcgccagcgtgtggagcgagagactgggccaggccctggagctgggctacggcctgcaggtgggcaccgtgtggatcaacgcccacggcctgagagaccccagcgtgcccaccggcggctgcaaggagagcggctgcagctggcacggcggccccgacggcctgtacgagtacctgagacccagcggcacccccgccagactgagctgcctgagcaagaacctgaactacgacaccttcggcctggccgtgcccagcaccctgcccgccggccccgagatcggccccagccccgcccccccctacggcctgttcgtgggcggcagattccaggcccccggcgccagaagcagcagacccatcagagacagcagcggcaacctgcacggctacgtggccgagggcggcgccaaggacatcagaggcgccgtggaggccgcccaccaggccttccccggctgggccggccagagccccggcgccagagccgccctgctgtgggccctggccgccgccctggagagaagaaagagcaccctggccagcagactggagagacagggcgccgagctgaaggccgccgaggccgaggtggagctgagcgccagaagactgagagcctggggcgccagagtgcaggcccagggccacaccctgcaggtggccggcctgagaggccccgtgctgagactgagagagcccctgggcgtgctggccgtggtgtgccccgacgagtggcccctgctggccttcgtgagcctgctggcccccgccctggcctacggcaacaccgtggtgatggtgcccagcgccgcctgccccctgctggccctggaggtgtgccaggacatggccaccgtgttccccgccggcctggccaacgtggtgaccggcgacagagaccacctgaccagatgcctggccctgcaccaggacgtgcaggccatgtggtacttcggcagcgcccagggcagccagttcgtggagtgggccagcgccggcaacctgaagcccgtgtgggccagcagaggctgccccagagcctgggaccaggaggccgagggcgccggccccgagctgggcctgagagtggccagaaccaaggccctgtggctgcccatgggcgactag

SEQ ID NO: 245749 - protein, 232 aa, Artificial Sequence
  derived and/or modified sequence
MANYYEVLGVQASASPEDIKKAYRKLALRWHPDKNPDNKEEAEKKFKLVSEAYEVLSDSKKRSLYDRAGCDSWRAGGGASTPYHSPFDTGYTFRNPEDIFREFFGGLDPFSFEFWDSPFNSDRGGRGHGLRGAFSAGFGEFPAFMEAFSSFNMLGCSGGSHTTFSSTSFGGSSSGSSGFKSVMSSTEMINGHKVTTKRIVENGQERVEVEEDGQLKSVTVNGKEQLKWMDSK

SEQ ID NO: 245750 - DNA, 699 bp, Artificial Sequence
  derived and/or modified sequence
atggccaactactacgaggtgctgggcgtgcaggccagcgccagccccgaggacatcaagaaggcctacagaaagctggccctgagatggcaccccgacaagaaccccgacaacaaggaggaggccgagaagaagttcaagctggtgagcgaggcctacgaggtgctgagcgacagcaagaagagaagcctgtacgacagagccggctgcgacagctggagagccggcggcggcgccagcaccccctaccacagccccttcgacaccggctacaccttcagaaaccccgaggacatcttcagagagttcttcggcggcctggaccccttcagcttcgagttctgggacagccccttcaacagcgacagaggcggcagaggccacggcctgagaggcgccttcagcgccggcttcggcgagttccccgccttcatggaggccttcagcagcttcaacatgctgggctgcagcggcggcagccacaccaccttcagcagcaccagcttcggcggcagcagcagcggcagcagcggcttcaagagcgtgatgagcagcaccgagatgatcaacggccacaaggtgaccaccaagagaatcgtggagaacggccaggagagagtggaggtggaggaggacggccagctgaagagcgtgaccgtgaacggcaaggagcagctgaagtggatggacagcaagtag

SEQ ID NO: 245751 - DNA, 699 bp, Artificial Sequence
  derived and/or modified sequence
atggcaaactactatgaggtcttaggtgtccaggcctcggcctctcccgaggacatcaagaaggcgtaccgtaagctcgcactgagatggcatcccgataaaaaccccgacaacaaggaggaagctgagaaaaagttcaagctcgtgtccgaagcctacgaggtcctttcggattcaaagaagaggagcctttatgaccgcgccggatgtgatagctggcgggccgggggtggagcctccaccccgtaccatagtccctttgacaccgggtacaccttccgcaacccagaagatattttccgagagttcttcggaggcctcgaccccttttcatttgagttttgggattctcctttcaacagcgaccgcggaggacgggggcacggactgcggggtgcttttagcgccggattcggggagttccccgcctttatggaagccttttcttcttttaacatgctggggtgctcgggagggtcccatacaacctttagttccaccagctttggaggatcctcctcagggtcctcaggatttaagtcggtgatgtctagcaccgaaatgattaacggacacaaggtaaccacaaagcggatagtcgaaaacgggcaggagcgggttgaggtagaagaagacggacagctcaaaagcgtgaccgttaacggtaaggagcagctgaagtggatggactccaaatag

SEQ ID NO: 245752 - DNA, 699 bp, Artificial Sequence
  derived and/or modified sequence
atggccaattattatgaggtcctgggcgtacaggcttcagcatctcccgaagacattaagaaggcctatagaaaactggctctccggtggcacccagacaagaatcctgacaacaaagaagaggcggagaagaagttcaagctggtcagtgaggcctacgaagtgctgtccgactccaagaaaaggtcgctctatgatagggcaggctgcgacagctggcgcgccggtgggggggcatcaactccttaccactcaccgttcgacacgggctatacctttcgtaatcccgaggacatcttccgggagttcttcggcgggctagaccctttttcattcgagttctgggactccccatttaactccgaccggggtggtagaggccacggacttcgtggtgcgtttagtgcgggcttcggggaatttcctgcatttatggaggctttcagctccttcaacatgctgggatgcagtggcggcagtcatacgactttctcaagcacgagctttggagggagctcatcaggctccagcgggttcaaaagcgtgatgagctcaaccgaaatgattaacggccataaagtgactactaaacgtattgtggagaacggccaggaacgcgtggaggtggaagaggatgggcagcttaagtcagtcaccgtgaatggcaaggagcagttgaaatggatggactcaaaatag

SEQ ID NO: 245753 - DNA, 2465 bp, Artificial Sequence
  derived and/or modified sequence
acaccgcctttgccatcaccaccgtcattgccccctctactaccaccaccatcaccaccaccgggtctgcctcagccagacccaccactgcctctaattagactgccaccatcatcactgccaccaccactgcccctccaatgccttcctgatgtcaccatctgctttctctctgctatcctcacacccaactccatcaaaaccaccaccttcatctgagccgccatcaccctcacagtacacagccctcaaatgtgtaccaaggaggaggacatttactacacgctgcaccctgaacagtctgggaccagcggtcagggaacaaggaatcgagatgctcacctgcagctcccaggtgagcggctctctagagcttgcctgggagctgctgaggagctcacggtattccaggaagctccccatccatgcctcagcctgtggctcagaagcagggtcttcgcagaagattgccccgagctgttgcaaagctcaccattgtcacctgcctgcaacggcctctcttttccactctccaaatcccttgtattggcaggctctagtctggaattataccggtgatgggattctggaaaatccctcagatttctccaggatgcaaggagaccatggaagaggaacaagcctgcaagggacagcaggtgctaactgctaaccgagacatagtgacaaaaatccagccacagagataaagaatcaggttcatctgtagctacatccagtggagaagttctgctcttcaactcctctgctaagccacatgtgtcagcaggtgtagaattgagtggaacacttctttggatttgctgtccgctgcagccttggccctggtttcacatcccctccctcactgactcgctgtgtgaccttgagcactgtgtgtctctgagcctggttcatccaagagtttaccgacggccctcgtgtgccagccactgtcctagacagggacagactttcccgcctttgtggagcttaccccggaagacctggccagataatgggcacaaaaaaagcaggctcttgtccccaccccagcctgcctgaaccccaccttggcctcctcttgcctcagctgctgcccagccatcggccgagtggacatacccaggacgcccttgcccgcctcccccaccacggccacagacctttgtcactcaccaaggctggaatcccgtggctgatcctgcctctgccctttggctcccgggactcagcccacaccacctgggtcacagagcatcccattcccacacaccgttgtggccacctcaccagcaggggcaggcccatatgcccaggtttgcctggtgaggagctgggggcgggggtatgccccgccccgggagctgacgtcataaaaggagctctggagggcagcccactctggcctggccccacagcggcagtgtccctcccctccccccactcctctcagtgggggcccctccagtccctgagaattggtactacgaaaaggtgaactcctgggcagaatcttgcctagagcttgcggagtccagccaggcccctgctgaagggccccagaccaccggccacttctcccccgtccatctgaccagctgggcccctgcgcccacctggcctccacgttccctctcctctcacccacacccctggccatggctaactactacgaagtgctgggcgtgcaggccagcgcttccccggaggacatcaagaaagcctaccgcaagctggcccttcgttggcaccccgacaagaaccctgacaataaggaggaggcggagaagaagttcaagctggtgtctgaggcctatgaggttctgtctgactccaagaaacgctccctgtatgaccgtgctggctgtgacagctggcgggctggtggcggggccagcacgccctaccacagccccttcgacaccggctacaccttccgtaaccctgaggacatcttccgggagttttttggtggcctggaccctttctcctttgagttctgggacagcccattcaatagtgaccgtggtggccggggccatggcctgaggggggccttctcggcaggctttggagaatttccggccttcatggaggccttctcatccttcaacatgctgggctgcagcgggggcagccacaccaccttctcatccacctccttcgggggctccagttctggcagctcggggttcaagtcggtgatgtcgtccaccgagatgatcaatggccacaaggtcaccaccaagcgcatcgtggagaacgggcaggagcgcgtggaggtggaggaagacgggcagctcaagtcggtgactgtgaacggcaaggagcagctcaaatggatggacagcaagtaggcgctggccacccggccctgccttcccaccaccaccaccgtgcatggggcagcaaacacgtggggccgcagacatagcctgatggttaataaatgtgccaagtga

SEQ ID NO: 245754 - DNA, 3365 bp, Artificial Sequence
  derived and/or modified sequence
acacgctgcaccctgaacagtctgggaccagcggtcagggaacaaggaatcgagatgctcacctgcagctcccaggtgagcggctctctagagcttgcctgggagctgctgaggagctcacggtattccaggaagctccccatccatgcctcagcctgtggctcagaagcagggtcttcgcagaagattgccccgagctgttgcaaagctcaccattgtcacctgcctgcaacggcctctcttttccactctccaaatcccttgtattggcaggctctagtctggaattataccggtgatgggattctggaaaatccctcagatttctccaggatgcaaggagaccatggaagaggttggtgtaatgccaagttagcaacagaaaatacagagccccacacctcagtgccatcaccatcgccatcggcactcacaccagcatgtccaccactgtgtccttctcacccctcggcacccccctctaccattgcctcttccacaaccaccctcaccaccatcctccattaatagcacaattcctgcctcctatcccatcaccaccacgggtgtccccggcaccagcagcaccaacactgctcccagcagagccatcgttaccagccccgctgtcagtcccatcttgagcatctggcatatgttggagaactgctcactccctcttccccatgggaatctcaggcctctcttcctattgccctgagatttgcagaaccttcctgaaggaaacattctttgccccatggatactggccttgaccatgggatgcagcaagactgccacacatcatggcccaacagaagctttcagaggcagcccaagttcctgctgtctctgagtggcactgtcatgagagaggggtgtgcaggtcagagctgattctccagcctgggacccacagtgagaagctatgggaggtggggccctggcagctgcctgtaggcaccagtgagtgaagtggggggaactagatgtttgtcgtgagccactgagaggtggaagctgtcactgtggtatagccgaacaagatacaacctctgctacctccaccaccttcaccttcatcatcaccattactgtcaccactgccaaccacaccaatggctcactaggagccattcccatcacctcctcatcatacctgcaccatcactgccaaccacaacaaaggctcgctgttaccatctcctctggcatgaccatcaccaccaccactaccatcatcaattactctcaagcacaagccttgctgctgtcaccaccagcatcaccatcatcatgatcaactccaccatcacccataattactctccccctcacacccaccatgaccattacctccacatcaacactgctcccatggtcacctctactatataatgacaccttatccatctccatggacacccaccgtgcctctccccaccagcaacacagtcaacagcagtgcctctcccactgccaccgccatcatggagaactgtgcagggcaagcatctttctcccgccccaggaacaagcctgcaagggacagcaggtgctaactgctaaccgagacatagtgacaaaaatccagccacagagataaagaatcaggttcatctgtagctacatccagtggagaagttctgctcttcaactcctctgctaagccacatgtgtcagcaggtgtagaattgagtggaacacttctttggatttgctgtccgctgcagccttggccctggtttcacatcccctccctcactgactcgctgtgtgaccttgagcactgtgtgtctctgagcctggttcatccaagagtttaccgacggccctcgtgtgccagccactgtcctagacagggacagactttcccgcctttgtggagcttaccccggaagacctggccagataatgggcacaaaaaaagcaggctcttgtccccaccccagcctgcctgaaccccaccttggcctcctcttgcctcagctgctgcccagccatcggccgagtggacatacccaggacgcccttgcccgcctcccccaccacggccacagacctttgtcactcaccaaggctggaatcccgtggctgatcctgcctctgccctttggctcccgggactcagcccacaccacctgggtcacagagcatcccattcccacacaccgttgtggccacctcaccagcaggggcaggcccatatgcccaggtttgcctggtgaggagctgggggcgggggtatgccccgccccgggagctgacgtcataaaaggagctctggagggcagcccactctggcctggccccacagcggcagtgtccctcccctccccccactcctctcagtgggggcccctccagtccctgagaattggtactacgaaaaggtgaactcctgggcagaatcttgcctagagcttgcggagtccagccaggcccctgctgaagggccccagaccaccggccacttctcccccgtccatctgaccagctgggcccctgcgcccacctggcctccacgttccctctcctctcacccacacccctggccatggctaactactacgaagtgctgggcgtgcaggccagcgcttccccggaggacatcaagaaagcctaccgcaagctggcccttcgttggcaccccgacaagaaccctgacaataaggaggaggcggagaagaagttcaagctggtgtctgaggcctatgaggttctgtctgactccaagaaacgctccctgtatgaccgtgctggctgtgacagctggcgggctggtggcggggccagcacgccctaccacagccccttcgacaccggctacaccttccgtaaccctgaggacatcttccgggagttttttggtggcctggaccctttctcctttgagttctgggacagcccattcaatagtgaccgtggtggccggggccatggcctgaggggggccttctcggcaggctttggagaatttccggccttcatggaggccttctcatccttcaacatgctgggctgcagcgggggcagccacaccaccttctcatccacctccttcgggggctccagttctggcagctcggggttcaagtcggtgatgtcgtccaccgagatgatcaatggccacaaggtcaccaccaagcgcatcgtggagaacgggcaggagcgcgtggaggtggaggaagacgggcagctcaagtcggtgactgtgaacggcaaggagcagctcaaatggatggacagcaagtaggcgctggccacccggccctgccttcccaccaccaccaccgtgcatggggcagcaaacacgtggggccgcagacatagcctgatggttaataaatgtgccaagtgagtt

SEQ ID NO: 245755 - DNA, 699 bp, Artificial Sequence
  derived and/or modified sequence
atggccaactactatgaggtgctgggcgtgcaggccagcgccagccctgaggacatcaagaaggcctacaggaagctggccctgcgctggcacccagacaagaacccagacaacaaggaggaggccgagaagaagttcaagctggtgtctgaggcctatgaggtgctgagtgacagcaagaagaggagcctgtatgaccgggccggctgtgacagctggagggctgggggcggggccagcaccccctaccacagcccctttgacaccggctacaccttcaggaaccctgaggacatcttccgggagttcttcggcggcctggaccccttctcctttgagttctgggacagccccttcaacagcgaccggggcggccggggccacggcctgcggggggccttctctgctggctttggagagttccctgccttcatggaggccttcagcagcttcaacatgctgggctgcagcggcggcagccacaccaccttcagcagcaccagctttggaggcagcagcagcggcagcagcggcttcaagtctgtgatgagcagcacagagatgatcaatggccacaaggtgaccaccaagagaattgtggagaatggccaggagcgggtggaggtggaggaggatggccagctgaagtctgtgacagtgaatggcaaggagcagctgaagtggatggacagcaagtag

SEQ ID NO: 245756 - DNA, 699 bp, Artificial Sequence
  derived and/or modified sequence
atggccaactactacgaggtgctgggcgtgcaggccagcgccagccctgaggacatcaaaaaggcttaccggaaacttgccctaaggtggcatcccgataaaaatccggacaataaagaagaggctgagaaaaagttcaagctggtcagcgaggcttacgaggtgttgagcgattcgaaaaaacgcagcctgtacgaccgcgctggttgcgacagttggagggccggcggtggtgcctcaacgccttaccactctcctttcgacacgggctatacattccggaatccagaggacatattcagggaatttttcggcggactggatcccttcagcttcgaattctgggatagtccctttaattcggatcgcggcgggagaggacacggcttgcggggagctttttctgccggctttggggaattccctgcttttatggaagctttctccagctttaatatgctgggctgcagcggaggatcacacaccacatttagctctacatcctttggcggaagtagctccggatcctccggttttaagtcagtcatgtcttcaaccgaaatgataaatggacacaaggtgacaaccaaacgtatagtggaaaacggacaggaaagagtggaggtcgaggaagatggtcagctgaagtccgttacagtcaacggtaaagaacagttaaagtggatggacagtaaatag

SEQ ID NO: 245757 - DNA, 699 bp, Artificial Sequence
  derived and/or modified sequence
atggccaactactacgaggtgctgggcgtgcaggccagcgccagccctgaggacataaaaaaggcgtataggaaactcgctctcaggtggcaccccgataaaaatccagacaacaaggaggaagcagagaagaaatttaagcttgtatcagaagcatacgaggtactcagtgatagcaagaaacgaagtctgtatgatcgtgccggctgtgactcctggcgcgccggaggaggggctagtacaccttatcattctccctttgacactggctataccttccgaaaccccgaagacatttttcgtgagttttttggagggttggacccttttagttttgagttctgggatagtccatttaacagcgatcgaggaggacgggggcacgggttgcggggcgcatttagtgccgggttcggtgaatttccagctttcatggaggcattttctagtttcaacatgttgggctgttctggcggcagccacacaacgttcagttctacttcttttggggggtcaagtagcggctcatctgggtttaaaagtgtgatgagttccacagaaatgattaatggacataaggttaccactaagagaatcgtagagaacgggcaagagagggttgaagttgaggaagacgggcagctcaagagcgtgactgtcaacggaaaagaacagttaaaatggatggattccaaatag

SEQ ID NO: 245758 - DNA, 699 bp, Artificial Sequence
  derived and/or modified sequence
atggctaattactatgaggtcctgggtgtccaggcaagcgcgagcccagaagatattaaaaaggcatatagaaaactcgctttgcgttggcatcctgacaaaaatcctgataataaggaagaagcagagaagaaatttaagctggtgtccgaggcttacgaggtcctgtcagattctaaaaagcggtccctttatgatcgggcaggttgtgatagttggcgcgctggcggtggcgcatcgaccccataccattcaccctttgatactggctatacgtttcggaatcctgaggacatcttccgcgagtttttcggagggctggatcccttctccttcgagttctgggacagtccctttaatagcgatcgtggcggtagaggacatgggctgcgcggtgccttcagcgctgggttcggcgaatttcccgctttcatggaggcctttagcagtttcaatatgctcgggtgttccgggggtagtcacacaacattctcaagcacttcctttggcggatctagttcggggtccagcggctttaagtccgttatgtcctcaacagaaatgattaatggccacaaagtcacgaccaagagaatagttgaaaatggacaggagcgggtagaagtagaggaagatggtcagcttaagtctgttactgttaacgggaaggagcagctcaaatggatggacagcaagtag

SEQ ID NO: 245759 - DNA, 699 bp, Artificial Sequence
  derived and/or modified sequence
atggctaattattacgaagttcttggagttcaggcttctgcatcccctgaagatatcaagaaggcgtatcgtaagcttgcccttcgctggcacccagacaagaatccggacaataaggaggaagccgaaaaaaaattcaagctggtgtccgaggcatacgaggtgttaagcgatagcaaaaaaagatcgctatacgatcgtgccggttgcgatagttggcgcgctggtggaggagccagcactccttaccactccccatttgacaccggatacacattccggaatcctgaggatatctttcgagaatttttcggcggactggatcccttttcatttgagttctgggacagcccgttcaactctgatcggggtggccgtggccatgggcttcgaggggcatttagtgcaggcttcggggaattccctgccttcatggaagctttctcatctttcaacatgctgggatgctcgggcggttcacataccaccttctcttctacctccttcgggggatctagctctggatcttctggcttcaagtctgtgatgtcaagtactgagatgatcaatggtcataaggttactactaagaggatcgtggagaacgggcaggagcgcgtggaggtggaggaagatggccagctaaagtccgttacagtaaatggcaaagagcaactgaagtggatggattccaagtag

SEQ ID NO: 245760 - protein, 237 aa, Artificial Sequence
  derived and/or modified sequence
MDNGDWGYMMTDPVTLNVGGHLYTTSLTTLTRYPDSMLGAMFGGDFPTARDPQGNYFIDRDGPLFRYVLNFLRTSELTLPLDFKEFDLLRKEADFYQIEPLIQCLNDPKPLYPMDTFEEVVELSSTRKLSKYSNPVAVIITQLTITTKVHSLLEGISNYFTKWNKHMMDTRDCQVSFTFGPCDYHQEVSLRVHLMEYITKQGFTIRNTRVHHMSERANENTVEHNWTFCRLARKTDD

SEQ ID NO: 245761 - DNA, 714 bp, Artificial Sequence
  derived and/or modified sequence
atggacaacggcgactggggctacatgatgaccgaccccgtgaccctgaacgtgggcggccacctgtacaccaccagcctgaccaccctgaccagataccccgacagcatgctgggcgccatgttcggcggcgacttccccaccgccagagacccccagggcaactacttcatcgacagagacggccccctgttcagatacgtgctgaacttcctgagaaccagcgagctgaccctgcccctggacttcaaggagttcgacctgctgagaaaggaggccgacttctaccagatcgagcccctgatccagtgcctgaacgaccccaagcccctgtaccccatggacaccttcgaggaggtggtggagctgagcagcaccagaaagctgagcaagtacagcaaccccgtggccgtgatcatcacccagctgaccatcaccaccaaggtgcacagcctgctggagggcatcagcaactacttcaccaagtggaacaagcacatgatggacaccagagactgccaggtgagcttcaccttcggcccctgcgactaccaccaggaggtgagcctgagagtgcacctgatggagtacatcaccaagcagggcttcaccatcagaaacaccagagtgcaccacatgagcgagagagccaacgagaacaccgtggagcacaactggaccttctgcagactggccagaaagaccgacgactag

SEQ ID NO: 245762 - DNA, 30 bp, Artificial Sequence
  derived and/or modified sequence
atggacaacggcgactggggctacatgtag

SEQ ID NO: 245763 - DNA, 714 bp, Artificial Sequence
  derived and/or modified sequence
atggataacggagattgggggtacatgatgactgaccccgtcactctgaatgttgggggccatctctacaccactagtctcacaactctgactagataccctgactcaatgctgggagccatgttcgggggtgatttcccaacggccagggacccccagggaaactatttcatcgacagggatggacctttgtttaggtacgtgctgaattttctgcggacttccgagctgaccctccctctggatttcaaagagttcgatctgctccgaaaggaagcagacttttaccagatcgaacccctgattcagtgcttgaacgatcctaagccactgtacccgatggacacatttgaagaggtggtggagttatcctccacccggaagctgagtaagtatagcaaccccgttgccgtgataattacacagcttacgatcactacaaaggtccactctctgcttgagggaattagcaactacttcactaagtggaacaaacacatgatggacaccagggactgccaggtatcttttactttcggaccatgcgattatcaccaagaagtcagcctgcgggttcacctgatggagtacataaccaaacaggggttcacgatccggaacacacgggtgcaccacatgagtgagcgggcaaacgagaacaccgttgagcacaattggactttctgtcgcctggcaagaaagactgacgattag

SEQ ID NO: 245764 - DNA, 714 bp, Artificial Sequence
  derived and/or modified sequence
atggacaatggcgactggggatatatgatgactgatcccgtgacacttaatgttggagggcatctttataccaccagccttaccaccctcactcgttacccagattctatgctgggagccatgtttggaggagattttccgacagcccgcgacccccaagggaactacttcatcgaccgggacgggcctctcttcagatatgttttgaacttcttgaggacttctgaattgaccctgccactggactttaaggagttcgacctcctacggaaggaggctgacttctaccagatcgaacctctgattcaatgtctgaacgaccccaagcctctgtaccctatggatactttcgaggaagtagtggagctatcctctacacgcaaactgtcaaaatactcaaaccccgtggccgttatcatcacacagctcaccatcaccactaaggtccacagccttctcgaaggcatctccaactattttacaaaatggaataaacatatgatggacacacgggactgccaagtgtctttcacattcgggccctgcgactaccaccaggaggtttcattacgcgttcacctcatggagtacatcacaaagcaaggcttcacgatccgcaacactagggtccatcatatgagcgagagggccaatgagaatactgtagagcacaactggacgttttgccggctggctaggaagacagatgattag

SEQ ID NO: 245765 - DNA, 30 bp, Artificial Sequence
  derived and/or modified sequence
atggacaatggcgattggggatacatgtag

SEQ ID NO: 245766 - DNA, 714 bp, Artificial Sequence
  derived and/or modified sequence
atggacaacggtgattgggggtatatgatgactgatcccgtgacactaaacgtgggcggccacctctataccacctcattgactaccctgactcgataccccgattcaatgctcggagcgatgttcggcggggacttcccgaccgctagggacccccaggggaattattttatcgatcgcgacggaccattattccggtacgtgctgaattttcttcgcactagtgagcttacccttccactggacttcaaggaatttgatctgctgcggaaggaagcagatttttaccagatcgaaccattaattcagtgcttaaatgatccgaaaccactctatcccatggatactttcgaggaagttgtcgaattatcctcgactcgaaaactttccaagtactctaaccctgtggctgtaatcattactcaactaacaatcactactaaagtgcacagcttgctggaggggatctccaattatttcacgaaatggaataaacatatgatggacacccgcgactgtcaggtgtcgttcaccttcggaccatgtgactaccatcaggaggtcagcttacgcgtgcacttgatggagtacatcaccaaacaggggttcaccatacgaaacacaagggtgcaccatatgtcggaaagggctaacgagaacaccgtggaacacaattggaccttctgtaggctggcaaggaagacggatgattag

SEQ ID NO: 245767 - DNA, 714 bp, Artificial Sequence
  derived and/or modified sequence
atggacaatggagactggggctacatgatgacagatcctgtgaccctgaatgtgggcggccacctgtacaccaccagcctgaccaccctgacccgctacccagacagcatgctgggcgccatgtttggaggagacttccccacagcccgggacccccagggcaactacttcatcgacagagatggccccctcttccgctacgtgctgaacttcctgcggaccagcgagctgaccctgcccctggacttcaaggagtttgacctgctgaggaaggaggccgacttctaccagatcgagcccctcatccagtgcctgaatgaccccaagcccctgtaccccatggacacctttgaggaggtggtggagctgagcagcaccaggaagctgagcaagtacagcaaccctgtggccgtcatcatcacccagctgaccatcaccaccaaggtgcacagcctgctggagggcatcagcaactacttcaccaagtggaacaagcacatgatggacacccgggactgccaggtgtccttcaccttcggcccctgtgactaccaccaggaggtgtccctgcgggtgcacctgatggagtacatcaccaagcagggcttcaccatccggaacaccagggtgcaccacatgtctgagcgggccaatgaaaatacagtggagcacaactggaccttctgccgcctggccaggaagacagatgactag

SEQ ID NO: 245768 - DNA, 30 bp, Artificial Sequence
  derived and/or modified sequence
atggacaatggagactggggctacatgtag

SEQ ID NO: 245769 - DNA, 714 bp, Artificial Sequence
  derived and/or modified sequence
atggacaacggcgactggggctacatgatgaccgaccccgtgaccctcaatgttggtggccacctttacacaaccagcttgacaaccctgactaggtacccagactccatgttaggcgccatgttcggtggggatttccctactgccagagatccacagggcaattactttatcgacagggacggtcccttgtttcggtacgtgctaaacttccttaggacttcagaactcacactccccctggactttaaagaattcgacttgttacgtaaagaagccgacttttaccagatcgaacccttaatccagtgcctcaatgaccctaaaccgctgtatcctatggacacgttcgaggaggtggttgagctgagttctacaagaaaactgtctaagtattccaatccggtcgctgtcatcatcacccagctgacaattacgacgaaggtgcactcactattagagggtatctctaattacttcacaaaatggaataagcacatgatggacacgcgggactgccaagtgtctttcacctttggcccatgtgattaccaccaggaggtcagccttcgggtgcaccttatggagtatataaccaaacagggatttacaatcaggaatacgagggttcatcacatgagcgaacgcgctaatgagaacacagtcgagcataactggaccttttgccggttggcccggaagaccgatgactag

SEQ ID NO: 245770 - DNA, 714 bp, Artificial Sequence
  derived and/or modified sequence
atggacaacggcgactggggctacatgatgaccgaccccgtgaccctcaacgtgggtgggcatctgtacactactagcctcactacactgactcgctatcctgacagcatgctgggggcaatgttcggcggggactttcccaccgctcgtgatcctcagggaaactacttcattgatcgagatggcccacttttccggtatgtgctcaacttcttgcggacatccgagctgacattgccattggattttaaagagttcgacctcctgcgaaaggaagccgatttctaccagatcgagccactaattcagtgcttgaacgaccccaagcccctctaccccatggatacctttgaggaagttgtggagctgagtagtacacgtaaactgagcaaatatagtaatccggtggccgtcatcatcacccagttgactattacaactaaagttcatagcttgctggaaggaatttctaactacttcactaagtggaacaaacacatgatggatacccgagactgtcaggtgagctttactttcggtccctgtgactatcatcaggaagtgagccttcgggtgcacctgatggagtacattactaagcagggatttactatccgaaataccagagtgcaccacatgagcgagcgtgcaaacgagaacaccgtggagcacaactggaccttttgccggctggcaaggaaaacggatgactag

SEQ ID NO: 245771 - DNA, 714 bp, Artificial Sequence
  derived and/or modified sequence
atggacaacggcgactggggctacatgatgaccgaccccgtgaccctgaacgtgggtggccacctgtacactacgtccttgaccaccctaacccggtatcccgattcgatgctgggcgccatgttcggcggcgacttccctactgctagggacccacagggcaattacttcatcgatcgtgacggtccactgttccggtatgttctcaacttcctgagaacctccgaattgactctgccacttgatttcaaggagtttgacctgctgcggaaagaagccgacttctaccaaatagagcccttaatccagtgcttaaacgaccccaaaccattatatcccatggatactttcgaagaagtcgttgagctgtcatcaaccaggaaactgagcaagtatagcaatcccgtcgcggttatcatcacacagctgaccatcacaacaaaggtgcactcgttattggaagggatttccaattactttacaaaatggaataagcacatgatggacactagggactgtcaggtcagtttcacattcgggccatgtgattatcaccaggaggtgtcattgagggtgcatctgatggagtatattactaaacagggcttcacgatccgaaatactcgcgtgcaccatatgtcagaaagagcgaatgagaacaccgtcgagcacaactggacattctgcagattggcccgcaaaaccgacgattag

SEQ ID NO: 245772 - DNA, 2425 bp, Artificial Sequence
  derived and/or modified sequence
tgtacaaagagaaatacatcattatttaaaagcatcatcttttttttttatattgtaagataaataccattctgatgtatttctcttggaaagggatgctggtatcctgggaggtttatgatttttgatgtttttactcaggtgattggcttgtatagctgaaatgctgatgaaaaggagttttcccttctccctttttcttttcttttctttttttttttttttttgagatggagtctcgcactgttgcaggggctggtgtgcagtggcacagtctcggctcactgcaacctccgcctctcgggttcaagtgatgctcctgcctcagcctcctgaatagctaggattacaggtgcccaccaccacgcccagctaattttttgtatttttagtagagatggggtttcactatgttgggcagtctggtcttgaactcctgacctggtgatcctcctgcctcagcctcccaaagtgctgggattataggcatgagccactgcgcccagcctgtccctttttcttaaatgacctttttggtgaggaccattataggtttgtaccaggataaggttgtagagttaatcataatattctcttatataaattctaaaaattgatgttctaagaagagaggtagaatttgaatgactgggttacttcctagactcttcctccttctcttaagtacagtatagttctttctctgaaaatcttcagtctcttagttccagatgggttctctatggtaagaatacaggacatgtagaaggccctaggggaatgctttcttccccagatctttgccctgtagtaggtttcagctgagcaaggacgagtagtttttctggtgtttggcctcctctgttgggtggaaaaagactttcttctctattttcctagttatatatgctatcatatgtctgtttttctcctcttgaagtttccctgaaacctgggctcttgaagacgcatcactggagcagatggataatggagactggggctatatgatgactgacccagtcacattaaatgtaggtggacacttgtatacaacgtctctcaccacattgacgcgttacccggattccatgcttggagctatgtttgggggggacttccccacagctcgagaccctcaaggcaattactttattgatcgagatggacctcttttccgatatgtcctcaacttcttaagaacttcagaattgaccttaccgttggattttaaggaatttgatctgcttcggaaagaagcagatttttaccagattgagcccttgattcagtgtctcaatgatcctaagcctttgtatcccatggatacttttgaagaagttgtggagctgtctagtactcggaagctttctaagtactccaacccagtggctgtcatcataacgcaactaaccatcaccactaaggtccattccttactagaaggcatctcaaattattttaccaagtggaataagcacatgatggacaccagagactgccaggtttcctttacttttggaccctgtgattatcaccaggaagtttctcttagggtccacctgatggaatacattacaaaacaaggtttcacgatccgcaacacccgggtgcatcacatgagtgagcgggccaatgaaaacacagtggagcacaactggactttctgtaggctagcccggaagacagacgactgatctccgaccctgccacaggttcctggaaagactctccaggaaatggaagatactgatttttttttttaaatcacagtgtgagatattttttttcttttaaatagttgtatttatttgaaggcagtgaggaccagaaggaagttttgtgctttggcagactcctccatgttttgttcccttccccctgagtatgcatgtgcctgttcagagtctccagataccttttttataaaaagaagtctgaaaatcattatggtatataatctacccttaacagagcttttcttattacagtgctaaaatgatttctgataaaatggtccctaactcaactagaaggctaaaaatacaagaatgaaagaataagcagagtactcatgatgcctttgagaaaaatcaaaacatcatgtagggtgacctagtttccaaaccaataaataagtagtattgtaatattaaaggaaaactgttccaatcatttaaaagtacttattaagtactgctttttacagttatgacaactgtttctttctatgcatataaatcaaggaaccaaatatctgtagccatggaaatgtctgactagaaatatttatattgaattctgaatacaaaatgtccctgtggtagaaaacttactctttatgcctggtgcagtataattcccaagtgtactgtctaccagaaaaaaaaaacaaaactaataaaaaatgaaatatgaaaattaa

SEQ ID NO: 245773 - DNA, 1533 bp, Artificial Sequence
  derived and/or modified sequence
gctctccggccgcgggcatctcccggcccggccgcagcagccgccgccgccgcgcatttccctgaaacctgggctcttgaagacgcatcactggagcagatggataatggagactggggctatatgatgactgacccagtcacattaaatgtaggtggacacttgtatacaacgtctctcaccacattgacgcgttacccggattccatgcttggagctatgtttgggggggacttccccacagctcgagaccctcaaggcaattactttattgatcgagatggacctcttttccgatatgtcctcaacttcttaagaacttcagaattgaccttaccgttggattttaaggaatttgatctgcttcggaaagaagcagatttttaccagattgagcccttgattcagtgtctcaatgatcctaagcctttgtatcccatggatacttttgaagaagttgtggagctgtctagtactcggaagctttctaagtactccaacccagtggctgtcatcataacgcaactaaccatcaccactaaggtccattccttactagaaggcatctcaaattattttaccaagtggaataagcacatgatggacaccagagactgccaggtttcctttacttttggaccctgtgattatcaccaggaagtttctcttagggtccacctgatggaatacattacaaaacaaggtttcacgatccgcaacacccgggtgcatcacatgagtgagcgggccaatgaaaacacagtggagcacaactggactttctgtaggctagcccggaagacagacgactgatctccgaccctgccacaggttcctggaaagactctccaggaaatggaagatactgatttttttttttaaatcacagtgtgagatattttttttcttttaaatagttgtatttatttgaaggcagtgaggaccagaaggaagttttgtgctttggcagactcctccatgttttgttcccttccccctgagtatgcatgtgcctgttcagagtctccagataccttttttataaaaagaagtctgaaaatcattatggtatataatctacccttaacagagcttttcttattacagtgctaaaatgatttctgataaaatggtccctaactcaactagaaggctaaaaatacaagaatgaaagaataagcagagtactcatgatgcctttgagaaaaatcaaaacatcatgtagggtgacctagtttccaaaccaataaataagtagtattgtaatattaaaggaaaactgttccaatcatttaaaagtacttattaagtactgctttttacagttatgacaactgtttctttctatgcatataaatcaaggaaccaaatatctgtagccatggaaatgtctgactagaaatatttatattgaattctgaatacaaaatgtccctgtggtagaaaacttactctttatgcctggtgcagtataattcccaagtgtactgtctaccagaaaaaaaaaacaaaactaataaaaaatgaaatatg

SEQ ID NO: 245774 - DNA, 1759 bp, Artificial Sequence
  derived and/or modified sequence
ccggccgcgggcatctcccggcccggccgcagcagccgccgccgccgcgcaaccacatggttgagaaaggagaaagagaaaatgattacttgtagagaaaaatccatttctgcagtggtatggttaaggataatctaaccataatcacattatccttgtatgcctggctacttatgctggcctgtatgtgaatgttaaccccaaagactcctttagatgtcgctgaactagttactataaaaagtatttcgctttcaaactcccacatttcaagaagagcaaaactcaatacaaggcaattttgaagtttccctgaaacctgggctcttgaagacgcatcactggagcagatggataatggagactggggctatatgatgactgacccagtcacattaaatgtaggtggacacttgtatacaacgtctctcaccacattgacgcgttacccggattccatgcttggagctatgtttgggggggacttccccacagctcgagaccctcaaggcaattactttattgatcgagatggacctcttttccgatatgtcctcaacttcttaagaacttcagaattgaccttaccgttggattttaaggaatttgatctgcttcggaaagaagcagatttttaccagattgagcccttgattcagtgtctcaatgatcctaagcctttgtatcccatggatacttttgaagaagttgtggagctgtctagtactcggaagctttctaagtactccaacccagtggctgtcatcataacgcaactaaccatcaccactaaggtccattccttactagaaggcatctcaaattattttaccaagtggaataagcacatgatggacaccagagactgccaggtttcctttacttttggaccctgtgattatcaccaggaagtttctcttagggtccacctgatggaatacattacaaaacaaggtttcacgatccgcaacacccgggtgcatcacatgagtgagcgggccaatgaaaacacagtggagcacaactggactttctgtaggctagcccggaagacagacgactgatctccgaccctgccacaggttcctggaaagactctccaggaaatggaagatactgatttttttttttaaatcacagtgtgagatattttttttcttttaaatagttgtatttatttgaaggcagtgaggaccagaaggaagttttgtgctttggcagactcctccatgttttgttcccttccccctgagtatgcatgtgcctgttcagagtctccagataccttttttataaaaagaagtctgaaaatcattatggtatataatctacccttaacagagcttttcttattacagtgctaaaatgatttctgataaaatggtccctaactcaactagaaggctaaaaatacaagaatgaaagaataagcagagtactcatgatgcctttgagaaaaatcaaaacatcatgtagggtgacctagtttccaaaccaataaataagtagtattgtaatattaaaggaaaactgttccaatcatttaaaagtacttattaagtactgctttttacagttatgacaactgtttctttctatgcatataaatcaaggaaccaaatatctgtagccatggaaatgtctgactagaaatatttatattgaattctgaatacaaaatgtccctgtggtagaaaacttactctttatgcctggtgcagtataattcccaagtgtactgtctaccagaaaaaaaaaa

SEQ ID NO: 245775 - DNA, 714 bp, Artificial Sequence
  derived and/or modified sequence
atggataatggcgactgggggtacatgatgactgaccccgtgacactcaatgtcggcggacacttatacacaacgagcctcacaacactgacacggtacccagatagcatgttgggggcaatgtttggcggagattttccgacggcaagggacccacagggtaattacttcattgatcgagacggccctctctttcgctacgttctcaactttctccgcaccagcgagctgacactgcctttggattttaaggagtttgacttgcttaggaaagaggctgacttctaccagatcgaacctttgattcagtgcctcaatgacccgaagcctctttatcctatggacaccttcgaagaggttgtggagctctcttccacccggaagctctccaagtatagcaaccccgtggccgtcatcatcactcaactgactatcaccactaaagttcattctcttcttgaaggaatcagtaattacttcaccaaatggaacaaacatatgatggacactagggattgccaagtatcctttacctttgggccatgcgactaccatcaggaagtcagcctcagagtccacctcatggaatacataactaagcaagggtttaccatacggaacacacgagtccaccacatgtcagaacgggcaaatgagaacactgttgagcacaactggactttttgccgccttgcacgcaagaccgacgactag

SEQ ID NO: 245776 - DNA, 714 bp, Artificial Sequence
  derived and/or modified sequence
atggataacggggattgggggtacatgatgaccgaccctgtgactctcaacgtgggcggtcacctatacaccacgagtttgaccaccctcactaggtatcccgattctatgttgggggcaatgtttggcggagatttccctacagcaagagacccacagggcaactacttcatagaccgtgacgggcctttgtttaggtacgtactgaactttctcaggacatcggagctcacccttccactcgattttaaagagtttgacctattgcggaaagaagccgacttctaccagatcgaaccactgatccagtgtctcaacgatccaaaacccctgtaccctatggatacgttcgaagaggttgtagagctgagctccacccgcaaactgtccaaatatagcaatcccgtggccgtgattattacacagcttacaatcactacgaaggtacactctctgctcgagggcatttccaattatttcacaaagtggaataaacacatgatggacacacgcgactgtcaggtgagctttaccttcgggccttgcgactaccaccaagaagtgtccctacgagtgcatctaatggagtacatcacaaaacaggggttcaccattcgtaatactcgagtccatcatatgtctgaacgagctaatgagaacactgtcgagcacaattggacattttgccggctggctcggaaaaccgacgactag

SEQ ID NO: 245777 - DNA, 30 bp, Artificial Sequence
  derived and/or modified sequence
atggataacggtgattggggctatatgtag

SEQ ID NO: 245778 - DNA, 714 bp, Artificial Sequence
  derived and/or modified sequence
atggacaatggcgactggggctacatgatgacggacccagtgactttgaacgtgggcggacacctgtacaccacctccttgacgactcttaccaggtatccagactcaatgctgggtgccatgtttggaggcgactttccaactgctcgtgacccacagggaaactacttcattgatcgtgacggtcccctcttcaggtatgttctaaattttctgaggacaagtgaattgactcttccccttgacttcaaagaattcgaccttttgagaaaagaggccgacttctaccagatcgaacccctgatccagtgcctcaacgaccccaagccactctaccccatggacactttcgaggaggtcgtggagttgtcttccacccgcaagttatccaagtattccaacccggtcgcggtcatcattacccaactgacgattactaccaaagtgcattcactactggaggggatctcgaactattttactaagtggaataagcatatgatggatacacgagactgccaggtttccttcaccttcggcccatgtgattaccaccaggaggtgtccctgcgggtccatctgatggagtatatcaccaagcagggattcaccattcgcaataccagagtgcaccacatgagcgaacgtgctaatgaaaacacagtcgagcacaactggactttttgcagactggctagaaagactgacgactag

SEQ ID NO: 245779 - DNA, 2613 bp, Artificial Sequence
  derived and/or modified sequence
atggagggtgccggccctaggggcgcaggacccgcacgccggaggggagctggcggacctccctcccccctgctgccgagtttgttactgctattgctactgtggatgttgccagacaccgttgccccacaggagttgaacccgcgcggacgcaacgtgtgtagggcccctggttcacaggtgcctacctgttgtgcagggtggagacagcagggagatgagtgtggaatcgccgtgtgcgagggtaactctacttgttctgaaaacgaagtttgcgtgagaccaggagagtgtaggtgccggcacggctattttggggcgaactgcgacaccaagtgtccacggcagttttggggccctgattgcaaagagttatgttcttgtcacccccatggccagtgtgaggacgtgactggccagtgtacttgccatgccagacgttggggagccagatgcgaacatgcttgtcagtgtcagcatggcacctgccatccccgcagcggggcatgccggtgtgagccaggttggtggggcgcccagtgcgcttccgcgtgttactgcagcgccacttctcgctgcgatcctcaaactggcgcttgtttgtgccacgccggctggtggggaagaagctgtaataatcaatgtgcatgcaatagctctccatgtgagcagcagagtggccgttgccagtgtcgagaacgtacgttcggcgcccgttgcgaccgctactgtcagtgcttccgcgggcggtgccacccagtagatggcacttgcgcgtgcgagccagggtacagaggtaaatattgccgggagccctgtccagctggcttttatgggctcggttgtcgtcgacggtgcggccaatgtaaaggtcagcaaccctgtaccgtcgccgagggccgatgccttacttgcgaaccaggctggaacggcactaaatgtgatcaaccttgtgctacaggattttatggagaagggtgctcgcatcggtgccccccatgtagagatggccatgcatgcaaccatgtcactgggaagtgcacgagatgtaatgccgggtggattggggacagatgcgagaccaagtgctctaacggtacttatggcgaggattgtgcatttgtgtgcgctgactgcggatcaggacactgcgatttccaatctgggcggtgtttgtgcagcccaggagtacacggcccccactgcaacgtaacgtgtcctcccggacttcacggggccgactgtgctcaagcatgttcttgccacgaggacacatgcgaccccgttacgggcgcttgccatttagaaactaaccaacgtaaaggggtgatgggggcaggggccctgctcgtcctactggtgtgcctcctgcttagcctgctcggttgctgctgcgcttgtcgtggtaaagaccccacacgaaggccgcggccacgccgcgaattgtcccttggacgcaagaaggccccacacaggctatgcggccggttttcaagaatatctatgaaactgcctcgcattccactgagacgccagaaactccccaaggtagtcgtggcgcaccacgacctggacaatactcttaactgcagctttcttgagccacccagcggcttggaacagccgtcaccatcttggagctcgcgggcatccttttcaagcttcgacaccacagatgagggcccggtctactgcgtgccccatgaggaggcccctgctgagagcagagacccagaagtccccactgtgcctgccgaagctcccgcaccctcaccagtgcctctcactacacctgcatctgctgaagaggccatcccgctcccagcttccagtgactcggagagaagcgcctcttctgtcgagggcccagggggcgcactttacgccagggtcgcacgacgcgaggccagaccggccagagcccgtggcgagatcggcggtctgagcctttccccaagtcccgagagaaggaaacctccacctccagatccggcaacaaagccaaaagtgtcctggattcacggcaagcacagtgcagccgccgccggtagagcacccagccctcccccacccgggtccgaggcagcgccctctccatcaaaacgcaagcgaacccccagcgacaagtcagctcacacagtggagcacggtagtccacggacccgcgatcccactccccgcccgcccgggctgccagaagaggccaccgcccttgcagctccatctccaccaagagccagggcacgggccgcccctaggcctttaggcgctcatggaagacgccggtctccagcaaagcgagctgaggctgctagcatgcttgccgccgacgtaaggggtaaaacccgcagtctgggccgtgcagaggtggctcttggggctcaaggtccgagagaaaaaccagcacctccgcagaaggccaaaagatcggtcccacccgcttctcccgcaagggcccctccggccaccgaaactccaggaccagagaaggctgctacggatctgcctgcaccggaaacaccccgaaaaaagactcctattcagaaacctccgcgaaaaaagagtcgcgaagccgccggtgagctcgggcgtgccggagctcctaccctttag

SEQ ID NO: 245780 - DNA, 2613 bp, Artificial Sequence
  derived and/or modified sequence
atggagggcgccggccccagaggagctggccctgcccggaggagaggagctgggggcccccccagccccctgctgcccagcctgctgctgctgctgctgctgtggatgctgcctgacacagtggccccccaggagctgaacccccggggcagaaatgtgtgccgggcccctggcagccaggtgcccacctgctgtgccggctggaggcagcagggagatgaatgtggcattgctgtgtgtgagggcaacagcacctgcagtgaaaatgaggtgtgtgtgcggcctggagaatgtcgctgccgccacggctactttggagccaactgtgacaccaagtgcccccggcagttctggggccctgactgcaaggagctgtgcagctgccacccccacggccagtgtgaagatgtgacaggccagtgcacctgccacgcccggcgctggggcgcccgctgtgagcacgcctgccagtgccagcacggcacctgccaccccaggtctggggcctgccgctgtgagcccggctggtggggcgcccagtgtgccagcgcctgctactgcagcgccaccagccgctgtgacccccagacaggagcctgcctgtgccacgccggctggtggggccgcagctgcaacaaccagtgtgcctgcaacagcagcccctgtgagcagcagagcggccgctgccagtgccgggagaggaccttcggggcccgctgtgaccgctactgccagtgcttccggggccgctgccaccctgtggatggcacctgtgcctgtgagcccggctaccggggcaagtactgccgggagccctgcccagctggcttctacggcctgggctgcagaagaagatgtggccagtgcaagggccagcagccctgcaccgtggccgagggccgctgcctgacctgtgagcccggctggaatggcaccaagtgtgaccagccctgtgccaccggcttctatggagagggctgcagccaccgctgccccccctgcagagatggccacgcctgcaaccacgtgacaggcaagtgcacccgctgcaatgccggctggattggagacagatgtgagaccaagtgcagcaatggcacctacggggaggactgtgcctttgtgtgtgccgactgtggcagcggccactgtgacttccagagcggccgctgcctgtgcagccctggggtgcacggcccccactgcaatgtgacctgccccccaggcctgcatggagctgactgtgcccaggcctgcagctgccacgaggacacctgtgaccctgtgactggagcctgccacctggagaccaaccagaggaaaggagtgatgggcgctggggccctgctggtgctgctggtgtgcctgctgctgagcctgctgggctgctgctgtgcctgccggggcaaggaccccacccggcggccccggccccggcgggagctgagcctgggcaggaagaaggccccccaccggctgtgtggccgcttcagccgcatctccatgaagctgccccgcatccccctgcggcggcagaagctgcccaaggtggtggtggcccaccacgacctggacaacaccctgaactgcagcttcctggagcccccatctggcctggagcagcccagccccagctggagcagccgggccagcttcagcagctttgacaccacagatgagggccctgtgtactgtgtgccccatgaggaggccccagctgagagccgggaccctgaggtgcccaccgtgcctgctgaggccccagcccccagccctgtgcccctgaccaccccagccagcgctgaggaggccatccccctgcctgccagcagtgacagcgagaggtctgccagctctgtggagggccctggaggagccctgtatgcccgggtggcccggcgggaggcccggcctgcccgggcccggggggagattggaggcctgagcctgagccccagccctgagaggaggaagcccccacctccagaccctgccaccaagcccaaggtgtcctggatccacggcaagcacagcgctgctgctgctggccgggcccccagccccccacctcctggcagcgaggccgcccccagccccagcaagaggaagaggacccccagcgacaagagcgcccacacagtggagcacggcagccccaggacccgggaccccaccccccggcccccaggcctgcctgaggaggccacagccctggccgcccccagccccccccgggcccgggcccgggccgccccccggcccctgggcgcccacggcagaagaagaagccctgccaagagagctgaggccgcctccatgctggccgcagatgtgcggggcaagaccaggagcctgggccgggcagaggtggccctgggcgcccagggcccccgggagaagccagccccaccccagaaggccaagaggtctgtgcccccagccagccctgcccgggcccccccagccacagagaccccaggccctgagaaggccgccacagacctgcctgcccctgagacccccaggaagaagacccccatccagaagccacccaggaagaagagccgggaggccgccggggagctgggccgggccggggcccccaccctgtag

SEQ ID NO: 245781 - DNA, 2613 bp, Artificial Sequence
  derived and/or modified sequence
atggagggcgccggcccccggggcgccggccccgcccggcggcggggggccggtggccccccgagtccactgcttccttcattgctcctcttgctcctactctggatgttgcccgatacagtcgccccacaggagctgaaccccagaggcagaaacgtatgccgggcgcctggatcccaggtgcccacatgttgcgccgggtggagacaacagggtgatgagtgcggaattgctgtttgtgaaggtaattccacctgctcggagaatgaagtgtgtgtccgccccggggaatgcagatgcaggcacggttattttggggcgaattgtgacacgaaatgtcctcgacagttttgggggccagactgtaaggaactgtgtagctgtcacccccacggacagtgcgaggatgtgacaggccagtgcacttgtcacgcacggaggtggggggcaaggtgcgaacacgcctgccaatgccagcacgggacttgtcatccacggtcaggcgcttgccgatgtgagccaggatggtggggagcgcaatgtgcatcagcctgctattgctccgccacttccagatgcgatcctcagaccggcgcatgcctatgccacgcaggatggtggggacgaagttgcaataatcaatgcgcttgtaactcttcgccatgcgagcaacaatccggtagatgccagtgtcgcgagcgtacattcggagccagatgcgacagatattgccagtgctttcgaggccgctgtcaccccgttgatgggacttgcgcgtgcgagcctggttaccgcgggaagtattgcagggagccctgccctgctggcttctacggcctcggctgtcgtcgccgatgtggccagtgcaagggacaacagccctgcaccgtcgccgagggaaggtgcctaacctgcgaacccggttggaacggtaccaagtgtgatcagccttgtgcgaccgggttttacggggagggctgcagccatagatgtcccccttgcagggacggacacgcctgtaaccacgtgacgggcaagtgcacaaggtgcaacgccggctggattggtgatcgctgcgaaaccaagtgctcaaatggcacatacggggaagactgcgcctttgtatgtgccgattgcggatcgggccactgtgactttcagagtggacggtgcctttgctctccgggggtacatgggccccactgcaatgtgacttgtccccccggcctacacggtgcagattgtgctcaggcttgttcatgccacgaggacacctgcgatccagttacaggggcctgccacttggaaactaatcaacggaagggcgtaatgggcgccggtgccctgctggtgctgctggtatgcctgttgctttccctgttagggtgttgctgtgcttgtagaggcaaggatcccactcggcgacctcgccccagaagagaactcagcttagggcgcaagaaagcacctcacaggctgtgtggaagatttagtagaatttccatgaaattacctagaatacctctgcgccgacaaaagctacctaaggtggtcgtcgcccatcatgacttggataatactcttaactgttctttcctggaaccacctagcggtctggagcagccctcgccatcttggtccagtcgggcatctttctcttcctttgacacaaccgatgaggggccggtgtattgtgtcccccacgaagaagcccctgcagagagcagggaccccgaggtgcctacagtgccagctgaagcccccgcaccgagccccgtgccgcttaccacacctgccagcgccgaggaggcaatccctctgcctgcaagcagcgatagcgaacggagtgcctcatccgttgaaggaccaggaggggcattgtacgccagggtggccaggcgagaggcaagacccgctcgagcacggggagagattggagggctgagcctgtctccaagtccggagcggcggaaaccgccacccccagatccggccacgaaacccaaagtaagttggatccatgggaagcactctgccgctgcagccggccgcgccccatctcctcccccacctggctctgaggccgccccatcaccaagtaagcgtaagcgcactccttccgataagtctgcgcatactgtcgaacacggatctcccaggacacgtgatcctaccccccggcccccaggccttcccgaggaggccactgcattagcggccccgtccccaccacgagcaagggcccgtgcagccccccgccccctaggcgcccacggacggcggcgatctccagctaagcgggccgaggcagcttctatgctggctgccgacgtgcggggcaaaacacgcagccttgggcgtgctgaggttgctctgggagcccagggcccaagggaaaaaccggcaccaccccagaaggccaagaggtcagtccccccagcgtcgcctgccagggcacctccagccaccgaaaccccgggccccgagaaggcggctacggatctgcctgctccggagactccccgcaaaaaaacacctatacagaagcctcctcggaagaaatcaagagaagctgccggagagcttgggcgggctggcgctcctactctctag

SEQ ID NO: 245782 - DNA, 2613 bp, Artificial Sequence
  derived and/or modified sequence
atggagggagccggacctcggggagcgggtcccgctcgcagacgaggagcgggtggcccaccctccccactcctgcctagtctgctgttattgctgctcctgtggatgctgcctgacactgtggcaccccaagaactgaatccgagaggcagaaacgtttgcagggcccctggctcccaagttcccacctgttgcgccggatggcggcaacagggggacgagtgtggcatagcggtgtgtgaggggaacagcacttgcagtgagaatgaagtttgcgttagacccggtgaatgcaggtgtcggcatggctattttggcgctaattgcgatacaaagtgtccgagacagttttggggcccagattgtaaggaactgtgcagctgtcacccacatggacagtgtgaggatgtgactgggcaatgtacttgccacgcgagaaggtggggggcacgatgtgaacatgcctgccagtgccagcacgggacatgccatccccgtagtggcgcttgcaggtgcgagccaggatggtggggagcgcagtgtgcaagcgcctgctactgttccgcgacatcacggtgtgatccccagacaggcgcatgtctctgccatgcgggatggtggggccgtagctgcaataatcaatgcgcctgcaactcgagtccctgtgaacagcagagtggacgatgtcagtgtagagaacgaacttttggcgcacgatgcgaccgatattgccagtgcttcagaggcagatgccacccagtagatggaacctgtgcatgtgagcctgggtacaggggtaagtactgtcgtgaaccatgtcctgcaggcttttacggacttggttgtaggaggagatgcggccagtgtaaaggccagcagccatgcactgttgccgagggacgctgtctgacttgcgagcctgggtggaacgggaccaagtgcgaccagccttgcgccaccggcttttacggagagggctgcagccatcgatgcccaccttgtcgcgatgggcacgcctgtaaccacgtaacaggcaaatgcacgaggtgtaacgcaggctggataggtgatcgctgcgaaaccaagtgctccaacgggacctacggcgaggactgtgccttcgtgtgcgccgattgcggttctgggcattgtgacttccagtccggaagatgtctttgctccccaggcgttcacgggccacattgtaacgttacctgcccccctgggttgcatggggcagattgcgcacaggcgtgcagttgtcacgaggacacttgcgacccagtcaccggggcttgccacctggagacaaatcagaggaaaggtgtgatgggcgctggcgctctcctcgtcctgctggtgtgcttgttactgtccttactcgggtgctgttgcgcctgcagaggaaaagatccaaccaggagacccaggcccaggagggagctcagcttgggtagaaaaaaggcccctcaccggctgtgcggacgcttttcccgtataagtatgaaactccccagaatacccctgcggagacagaaacttcccaaagtcgtcgtggcacatcatgacctggacaacacgctcaattgttcctttctcgaacctccttccggcctcgagcagcccagtccttcatggtcatcccgggctagcttctcttccttcgatactactgacgaaggccctgtatattgtgtacctcacgaggaagcccctgccgagagtagggatcccgaagtccctacagtgccggcagaggcgcctgcgccatcccccgtccctctcacaacgcccgcttccgccgaagaagcaattccccttcccgctagcagcgacagtgagaggtctgcctcctccgtcgaagggccaggcggagcactgtatgcaagggtcgccagacgggaggccaggcccgctagagcgagaggcgaaatcggcggactctctctgtcaccgtcacctgagcgtcgtaagcctcctcccccagacccagcgactaagccaaaggtgtcttggatccatggcaaacactccgccgctgctgctggcagggcaccatctcctccccctcccggaagcgaggctgcgcctagcccaagcaaaagaaagcgcacacccagcgacaagtccgctcatacggtggaacatgggagccccaggacccgggatcccacaccacgtcctccaggtctgcccgaggaggccaccgcccttgctgctccatcacctcctcgcgcacgtgcacgggcagcacctagacccctaggcgctcatggcagacgcaggagccctgctaaacgggcagaggccgctagcatgctggccgcagatgtaagggggaaaacacgatctttgggccgtgccgaggtcgctctgggagctcagggacccagggagaagcctgctcctccacaaaaggccaagaggtcagtgccacccgctagtcccgctcgagcgccaccagccacagagacccctgggcctgagaaagctgcaactgacctgcccgctccagagacacctcggaaaaaaaccccgatccaaaaacctcctcgcaagaagtcacgggaagcggcaggagaactgggaagggccggtgctccgactctttag

SEQ ID NO: 245783 - DNA, 3278 bp, Artificial Sequence
  derived and/or modified sequence
ggcgcccctcctgccgccccccgcccggcctcgcactccgcttccggccgctctcgctgcggccgcacccgcgcccgtgcccgccccgcgcctgccccgcgcctcatggagggcgcagggccccggggggccgggccggcgcggcgccggggagccggggggccgccgtcaccgctgctgccgtcgctgctgctgctgctgctgctctggatgctgccggacaccgtggcgcctcaggaactgaaccctcgcggccgcaacgtgtgccgtgctcccggctcccaggtgcccacgtgctgcgctggctggaggcagcaaggggacgagtgtgggattgcggtgtgcgaaggcaactccacgtgctcagagaacgaggtgtgcgtgaggcctggcgagtgccgctgccgccacggctacttcggtgccaactgcgacaccaagtgcccgcgccagttctggggccccgactgcaaggagctgtgtagctgccacccacacgggcagtgcgaggacgtgacaggccagtgtacttgtcacgcgcggcgctggggcgcgcgctgcgagcatgcgtgccagtgccagcacggcacgtgccacccgcggagcggcgcgtgccgctgtgagcccggctggtggggcgcgcagtgcgccagcgcgtgctactgcagcgccacgtcgcgctgcgacccacagaccggcgcctgcctgtgccacgcaggctggtggggccgcagctgcaacaaccagtgcgcctgcaactcgtctccctgcgagcagcagagcggccgctgtcagtgccgcgagcgtacgttcggcgcgcgctgcgatcgctactgccagtgcttccgcggccgctgccaccctgtggacggcacgtgtgcctgcgagccgggctaccgcggcaagtactgtcgcgagccgtgccccgccggcttctacggcttgggctgtcgccgccggtgtggccagtgcaagggccagcagccgtgcacggtggccgagggccgctgcttgacgtgcgagcccggctggaacggaaccaagtgcgaccagccttgcgccaccggtttctatggcgagggctgcagccaccgctgtccgccatgccgcgacgggcatgcctgtaaccatgtcaccggcaagtgtacgcgctgcaacgcgggctggatcggcgaccggtgcgagaccaagtgtagcaatggcacttacggcgaggactgcgccttcgtgtgcgccgactgcggcagcggacactgcgacttccagtcggggcgctgcctgtgcagccctggcgtccacgggccccactgtaacgtgacgtgcccgcccggactccacggcgcggactgtgctcaggcctgcagctgccacgaggacacgtgcgacccggtcactggtgcctgccacctagaaaccaaccagcgcaagggcgtgatgggcgcgggcgcgctgctcgtcctgctcgtctgcctgctgctctcgctgctcggctgctgctgcgcttgccgcggcaaggaccctacgcgccgaccccgcccccgcagggagctttcgcttgggaggaagaaggcgccgcaccgactatgcgggcgcttcagtcgcatcagcatgaagctgccccggatcccgctccggaggcagaaactacccaaagtcgtagtggcccaccacgacctggataacacactcaactgcagcttcctggagccaccctcagggctggagcagccctcaccatcctggtcctctcgggcctccttctcctcgtttgacaccactgatgaaggccctgtgtactgtgtaccccatgaggaggcaccagcggagagccgggaccccgaagtccccactgtccctgccgaggcgccggcgccgtcccctgtgcccttgaccacgccagcctccgccgaggaggcgatacccctccccgcgtcctccgacagcgagcggtcggcgtccagcgtggaggggcccggaggggctctgtacgcgcgcgtggcccgacgcgaggcccggccggcccgggcccggggcgagattgggggcctgtcgctgtcgccatcgcccgagcgcaggaaaccgccgccacctgaccccgccaccaagcctaaggtgtcctggatccacggcaagcacagcgccgctgcagctggccgtgcgccctcaccaccgccgccaggctccgaggccgcgcccagccccagcaagaggaaacggacgcccagcgacaaatcggcgcatacggtcgaacacggcagcccccggacccgcgacccaacgccgcgccccccggggctgcccgaggaggcgacagccctcgctgcgccctcgccgcccagggcccgagcgcgcgccgcgccccggcctcttggagcccacggacgccggcggtcccccgcgaagcgcgccgaggctgcctccatgttggccgctgacgtgcgcggcaagactcgcagcctgggccgcgccgaggtggccctgggcgcgcagggccccagggaaaagccggcgcccccacagaaagccaagcgctccgtgccgccagcctcgcccgcccgcgcgcccccagcgaccgaaaccccggggcctgagaaggcggcgaccgacttgcccgcgcctgagaccccccggaagaagacccccatccagaagccgccgcgcaagaagagccgggaggcggcgggcgagctgggcagggcgggcgcacccaccctgtagcaggctgtggctcgtccgcgcgcagctccctcagcttcgcagcgccgcccgccaccccacacctcccacgctaccgggcacgggcggcctcctattggccgggcaccgcgcggctagcggaggttgcgtctcattggctcaggtcctgcagccgctcctggattggagcagtgtgctctggcgggaagggcccatcccgttggtcgaggcctgacaggcgcttagcgggcgactccctccccattggccgagttatggagcgctccgaccagacagcgtctcattggccaaagatgggagggttccgcttaaagaccgcctcttactggccaggagtggacttggttagggctaccttctcattggttgcagccagaggcacttctgcccgggctgcctctcccccgctagggcctggtgcctctggctggaggctccctcccttggccgtcccaatagagcccggggctacttccactggccaggctcccgggcatctggttgaccccagcctggggaggagggctggtctccgctcctcaggggcttagtccgtccca

SEQ ID NO: 245784 - DNA, 2613 bp, Artificial Sequence
  derived and/or modified sequence
atggagggcgccggccccagaggcgccggccccgccagaagaagaggcgccggcggcccccccagccccctgctgcccagcctgctgctgctgctgctgctgtggatgctgcccgacaccgtggccccccaggagctgaaccccagaggcagaaacgtgtgcagagcccccggcagccaggtgcccacctgctgcgccggctggagacagcagggcgacgagtgcggcatcgccgtgtgcgagggcaacagcacctgcagcgagaacgaggtgtgcgtgagacccggcgagtgcagatgcagacacggctacttcggcgccaactgcgacaccaagtgccccagacagttctggggccccgactgcaaggagctgtgcagctgccacccccacggccagtgcgaggacgtgaccggccagtgcacctgccacgccagaagatggggcgccagatgcgagcacgcctgccagtgccagcacggcacctgccaccccagaagcggcgcctgcagatgcgagcccggctggtggggcgcccagtgcgccagcgcctgctactgcagcgccaccagcagatgcgacccccagaccggcgcctgcctgtgccacgccggctggtggggcagaagctgcaacaaccagtgcgcctgcaacagcagcccctgcgagcagcagagcggcagatgccagtgcagagagagaaccttcggcgccagatgcgacagatactgccagtgcttcagaggcagatgccaccccgtggacggcacctgcgcctgcgagcccggctacagaggcaagtactgcagagagccctgccccgccggcttctacggcctgggctgcagaagaagatgcggccagtgcaagggccagcagccctgcaccgtggccgagggcagatgcctgacctgcgagcccggctggaacggcaccaagtgcgaccagccctgcgccaccggcttctacggcgagggctgcagccacagatgccccccctgcagagacggccacgcctgcaaccacgtgaccggcaagtgcaccagatgcaacgccggctggatcggcgacagatgcgagaccaagtgcagcaacggcacctacggcgaggactgcgccttcgtgtgcgccgactgcggcagcggccactgcgacttccagagcggcagatgcctgtgcagccccggcgtgcacggcccccactgcaacgtgacctgcccccccggcctgcacggcgccgactgcgcccaggcctgcagctgccacgaggacacctgcgaccccgtgaccggcgcctgccacctggagaccaaccagagaaagggcgtgatgggcgccggcgccctgctggtgctgctggtgtgcctgctgctgagcctgctgggctgctgctgcgcctgcagaggcaaggaccccaccagaagacccagacccagaagagagctgagcctgggcagaaagaaggccccccacagactgtgcggcagattcagcagaatcagcatgaagctgcccagaatccccctgagaagacagaagctgcccaaggtggtggtggcccaccacgacctggacaacaccctgaactgcagcttcctggagccccccagcggcctggagcagcccagccccagctggagcagcagagccagcttcagcagcttcgacaccaccgacgagggccccgtgtactgcgtgccccacgaggaggcccccgccgagagcagagaccccgaggtgcccaccgtgcccgccgaggcccccgcccccagccccgtgcccctgaccacccccgccagcgccgaggaggccatccccctgcccgccagcagcgacagcgagagaagcgccagcagcgtggagggccccggcggcgccctgtacgccagagtggccagaagagaggccagacccgccagagccagaggcgagatcggcggcctgagcctgagccccagccccgagagaagaaagccccccccccccgaccccgccaccaagcccaaggtgagctggatccacggcaagcacagcgccgccgccgccggcagagcccccagcccccccccccccggcagcgaggccgcccccagccccagcaagagaaagagaacccccagcgacaagagcgcccacaccgtggagcacggcagccccagaaccagagaccccacccccagaccccccggcctgcccgaggaggccaccgccctggccgcccccagcccccccagagccagagccagagccgcccccagacccctgggcgcccacggcagaagaagaagccccgccaagagagccgaggccgccagcatgctggccgccgacgtgagaggcaagaccagaagcctgggcagagccgaggtggccctgggcgcccagggccccagagagaagcccgcccccccccagaaggccaagagaagcgtgccccccgccagccccgccagagccccccccgccaccgagacccccggccccgagaaggccgccaccgacctgcccgcccccgagacccccagaaagaagacccccatccagaagccccccagaaagaagagcagagaggccgccggcgagctgggcagagccggcgcccccaccctgtag

SEQ ID NO: 245785 - protein, 347 aa, Artificial Sequence
  derived and/or modified sequence
SLLTNDASSESIASFSKQEVMSSFLPEGGCYELLTVIGKGFEDLMTVNLARYKPTGEYVTVRRINLEACSNEMVTFLQGELHVSKLFNHPNIVPYRATFIADNELWVVTSFMAYGSAKDLICTHFMDGMNELAIAYILQGVLKALDYIHHMGYVHRSVKASHILISVDGKVYLSGLRSNLSMISHGQRQRVVHDFPKYSVKVLPWLSPEVLQQNLQGYDAKSDIYSVGITACELANGHVPFKDMPATQMLLEKLNGTVPCLLDTSTIPAEELTMSPSRSVANSGLSDSLTTSTPRPSNGDSPSHPYHRTFSPHFHHFVEQCLQRNPDARYPCWPGPGLRESRGCSGG

SEQ ID NO: 245786 - protein, 348 aa, Artificial Sequence
  derived and/or modified sequence
MSFLTNDASSESIASFSKQEVMSSFLPEGGCYELLTVIGKGFEDLMTVNLARYKPTGEYVTVRRINLEACSNEMVTFLQGELHVSKLFNHPNIVPYRATFIADNELWVVTSFMAYGSAKDLICTHFMDGMNELAIAYILQGVLKALDYIHHMGYVHRSVKASHILISVDGKVYLSGLRSNLSMISHGQRQRVVHDFPKYSVKVLPWLSPEVLQQNLQGYDAKSDIYSVGITACELANGHVPFKDMPATQMLLEKLNGTVPCLLDTSTIPAEELTMSPSRSVANSGLSDSLTTSTPRPSNGDSPSHPYHRTFSPHFHHFVEQCLQRNPDARYPCWPGPGLRESRGCSGG

SEQ ID NO: 245787 - DNA, 1044 bp, Artificial Sequence
  derived and/or modified sequence
agcctgctgaccaacgacgccagcagcgagagcatcgccagcttcagcaagcaggaggtgatgagcagcttcctgcccgagggcggctgctacgagctgctgaccgtgatcggcaagggcttcgaggacctgatgaccgtgaacctggccagatacaagcccaccggcgagtacgtgaccgtgagaagaatcaacctggaggcctgcagcaacgagatggtgaccttcctgcagggcgagctgcacgtgagcaagctgttcaaccaccccaacatcgtgccctacagagccaccttcatcgccgacaacgagctgtgggtggtgaccagcttcatggcctacggcagcgccaaggacctgatctgcacccacttcatggacggcatgaacgagctggccatcgcctacatcctgcagggcgtgctgaaggccctggactacatccaccacatgggctacgtgcacagaagcgtgaaggccagccacatcctgatcagcgtggacggcaaggtgtacctgagcggcctgagaagcaacctgagcatgatcagccacggccagagacagagagtggtgcacgacttccccaagtacagcgtgaaggtgctgccctggctgagccccgaggtgctgcagcagaacctgcagggctacgacgccaagagcgacatctacagcgtgggcatcaccgcctgcgagctggccaacggccacgtgcccttcaaggacatgcccgccacccagatgctgctggagaagctgaacggcaccgtgccctgcctgctggacaccagcaccatccccgccgaggagctgaccatgagccccagcagaagcgtggccaacagcggcctgagcgacagcctgaccaccagcacccccagacccagcaacggcgacagccccagccacccctaccacagaaccttcagcccccacttccaccacttcgtggagcagtgcctgcagagaaaccccgacgccagatacccctgctggcccggccccggcctgagagagagcagaggctgcagcggcggctag

SEQ ID NO: 245788 - DNA, 1047 bp, Artificial Sequence
  derived and/or modified sequence
atgagcttcctgaccaacgacgccagcagcgagagcatcgccagcttcagcaagcaggaggtgatgagcagcttcctgcccgagggcggctgctacgagctgctgaccgtgatcggcaagggcttcgaggacctgatgaccgtgaacctggccagatacaagcccaccggcgagtacgtgaccgtgagaagaatcaacctggaggcctgcagcaacgagatggtgaccttcctgcagggcgagctgcacgtgagcaagctgttcaaccaccccaacatcgtgccctacagagccaccttcatcgccgacaacgagctgtgggtggtgaccagcttcatggcctacggcagcgccaaggacctgatctgcacccacttcatggacggcatgaacgagctggccatcgcctacatcctgcagggcgtgctgaaggccctggactacatccaccacatgggctacgtgcacagaagcgtgaaggccagccacatcctgatcagcgtggacggcaaggtgtacctgagcggcctgagaagcaacctgagcatgatcagccacggccagagacagagagtggtgcacgacttccccaagtacagcgtgaaggtgctgccctggctgagccccgaggtgctgcagcagaacctgcagggctacgacgccaagagcgacatctacagcgtgggcatcaccgcctgcgagctggccaacggccacgtgcccttcaaggacatgcccgccacccagatgctgctggagaagctgaacggcaccgtgccctgcctgctggacaccagcaccatccccgccgaggagctgaccatgagccccagcagaagcgtggccaacagcggcctgagcgacagcctgaccaccagcacccccagacccagcaacggcgacagccccagccacccctaccacagaaccttcagcccccacttccaccacttcgtggagcagtgcctgcagagaaaccccgacgccagatacccctgctggcccggccccggcctgagagagagcagaggctgcagcggcggctag

SEQ ID NO: 245789 - DNA, 1044 bp, Artificial Sequence
  derived and/or modified sequence
tcactgctcaccaatgacgcatctagtgaaagtatagcttcgtttagcaagcaagaagtgatgtctagcttcctgcccgagggcggatgttacgagctgctgactgtgatcggaaagggattcgaagaccttatgaccgtgaatctcgcgagatacaagccaactggcgaatatgtgaccgtaagacgtattaacttagaagcctgcagcaatgagatggtgaccttcctgcagggagagctgcacgtttccaaactgtttaaccaccccaacattgtgccctacagggctacctttatcgcagataacgagctctgggtcgtgacgtccttcatggcttatgggtcagcaaaggacctgatttgcacacacttcatggacggtatgaatgaactggcaatcgcctacatactgcagggagttcttaaagcacttgattatatacaccatatgggatatgtccacaggtctgtgaaggcctctcacatccttatcagcgtcgacggcaaagtgtacctcagcggcttaaggtccaatctctcaatgatttcccacggccaacgacaacgcgttgtccacgatttcccgaagtactctgtgaaggtactgccttggctgtcccctgaggtgctgcagcaaaatctgcagggttacgatgccaaaagcgatatctattctgttggcatcacagcgtgcgaactggccaacggccacgtgcccttcaaagacatgcctgccactcagatgttgcttgagaagttgaacgggaccgttccttgcttactcgacacctccactattccggccgaggaattgaccatgagccccagccggtcagttgctaacagtggattgtccgattcactgaccacatctacccccagaccctccaatggtgactcaccgtcccacccttaccatcgcaccttcagtccacactttcaccatttcgtcgagcagtgtctccagaggaacccggacgcgcgatatccctgctggcccggcccaggactccgggaaagccgcggatgctctgggggatag

SEQ ID NO: 245790 - DNA, 1047 bp, Artificial Sequence
  derived and/or modified sequence
atgtccttcctcactaatgacgcaagtagtgaatctattgcctcatttagtaagcaagaagtgatgtcctcctttctcccagagggaggttgttacgaactgcttactgtcatcggaaaagggtttgaagacctgatgacagtcaatctagcaagatacaagccaacgggagagtacgtaactgtacgccgtattaatctcgaggcatgctctaatgaaatggttacattcttgcaaggagagctgcatgtgagcaagctgttcaatcacccaaatatcgtgccttaccgagcgacgttcatagccgacaacgaactttgggtggtgacaagctttatggcctacggtagcgccaaggacctgatttgtacccattttatggatggcatgaacgaactggccatcgcgtacattctgcaaggagtgctgaaagcccttgactacatccaccacatgggctatgtgcatagaagcgtgaaagcatcccatatcctgatcagcgtggacgggaaagtatatctctcggggctgcggtctaacctcagcatgataagtcacggccaacgccagagggtggtgcatgatttccctaagtattccgtgaaggtgctcccatggctgagcccggaagtgctgcagcagaatctgcaggggtacgatgctaaatctgacatctacagtgtcgggatcacggcttgcgagcttgcaaacggtcatgtcccatttaaagacatgcccgccacccagatgcttctcgaaaagcttaatggaacagtgccatgtttgcttgacaccagtacaattccagctgaagaattgaccatgtccccgagcaggtccgtggccaatagcggactgtctgattccctcacaacctctactccccgccccagtaatggggactccccgtcccacccctaccacagaactttcagcccgcatttccaccatttcgtcgagcagtgccttcaacggaatccagacgctcgctacccttgttggccggggcctggcctacgagaaagccgggggtgtagtgggggatag

SEQ ID NO: 245791 - DNA, 1044 bp, Artificial Sequence
  derived and/or modified sequence
agcctgctgaccaatgatgccagcagcgagagcatcgccagcttcagcaagcaggaggtgatgagcagcttcctgcctgagggcggctgctatgagctgctgactgtgattggaaaaggatttgaggacctgatgacagtgaacctggcccgctacaagcccactggagaatatgtgacagtgcggcgcatcaacctggaggcctgcagcaatgagatggtgaccttcctgcagggcgagctgcacgtgtccaagctgttcaaccaccccaacatcgtgccctaccgggccaccttcatcgctgacaatgagctgtgggtggtgaccagcttcatggcctacggcagcgccaaggacctgatctgcacccacttcatggatggcatgaatgagctggccatcgcctacatcctgcagggcgtgctgaaggccctggactacatccaccacatgggctacgtgcacaggtctgtgaaggccagccacatcctgatctctgtggatggcaaggtgtacctgagcggcctgcggagcaacctgtccatgatcagccacggccagaggcagagggtggtgcatgacttccccaagtacagcgtgaaggtgctgccctggctgagccctgaggtgctgcagcagaacctgcagggctatgatgccaagagtgacatctacagcgtgggcatcacagcctgtgagctggccaacggccacgtgcccttcaaggacatgcctgccacccagatgctgctggagaagctgaatggaacagtgccctgcctgctggacaccagcaccatcccagctgaggagctgaccatgagccccagccgctctgtggccaacagcggcctgagtgacagcctgaccaccagcaccccccggcccagcaatggagacagccccagccacccctaccacaggaccttcagcccccacttccaccactttgtggagcagtgcctgcagaggaacccagatgcccgctacccctgctggccaggccctggcctgcgggagagccggggctgcagcggcggctag

SEQ ID NO: 245792 - DNA, 1047 bp, Artificial Sequence
  derived and/or modified sequence
atgtccttcctgaccaatgatgccagcagcgagagcatcgccagcttcagcaagcaggaggtgatgagcagcttcctgcctgagggcggctgctatgagctgctgaccgtcatcggcaagggctttgaggacctgatgacagtgaacctggcccgctacaagcccaccggggagtatgtgacagtgcggcgcatcaacctggaggcctgcagcaatgagatggtgaccttcctgcagggcgagctgcacgtgtccaagctgttcaaccaccccaacatcgtgccctaccgggccaccttcatcgctgacaatgagctgtgggtggtgaccagcttcatggcctacggcagcgccaaggacctgatctgcacccacttcatggatggcatgaatgagctggccatcgcctacatcctgcagggcgtgctgaaggccctggactacatccaccacatgggctacgtgcacaggtctgtgaaggccagccacatcctgatctctgtggatggcaaggtgtacctgagcggcctgcggagcaacctgtccatgatcagccacggccagaggcagagggtggtgcatgacttccccaagtacagcgtgaaggtgctgccctggctgagccctgaggtgctgcagcagaacctgcagggctatgatgccaagagtgacatctacagcgtgggcatcacagcctgtgagctggccaatggacatgtgcccttcaaggacatgcctgccacccagatgctgctggagaagctgaatggcaccgtgccctgcctgctggacaccagcaccatcccagctgaggagctgaccatgagccccagccgctctgtggccaacagcggcctgagtgacagcctgaccaccagcaccccccggcccagcaatggagacagccccagccacccctaccacaggaccttcagcccccacttccaccactttgtggagcagtgcctgcagagaaatccagatgcccgctacccctgctggccaggccctggcctgcgggagagccggggctgcagcggcggctag

SEQ ID NO: 245793 - DNA, 1044 bp, Artificial Sequence
  derived and/or modified sequence
agcctgctgaccaacgacgccagcagcgagagcatcgccagcttctccaagcaagaagtaatgagctcgttccttcccgagggtggctgctacgaactgttaactgtcattggtaaaggattcgaagatctgatgaccgtcaatttggccagatacaagcccacaggagaatacgttacagtgcggcggataaacctggaagcatgctctaacgagatggtcacatttcttcagggagaattgcatgttagcaagctcttcaaccatcctaatatcgtgccatacagggccactttcatcgctgacaacgaactgtgggtggtgacatcctttatggcatatggttcagcaaaggatctgatatgcacacatttcatggacggtatgaatgaactggccattgcctacattctacagggcgtactgaaagcgctggattatattcatcacatggggtatgtccatcggagcgttaaggcgtcccacatcttgatctccgtcgatgggaaagtctacttaagcggactaagatcgaatctgagtatgattagccacggacagaggcagcgtgtcgtgcatgacttccctaaatattctgtaaaggttctcccatggctctcaccggaagtgctgcagcagaatttgcaaggttatgatgcaaaatctgatatttactccgtgggaatcacggcttgtgagttggctaacggccatgtcccattcaaggacatgcccgccacccagatgctgcttgaaaagctgaatggcaccgtaccctgcttgttggatacctccactatacccgctgaagagctcacgatgtccccaagccgctctgtggcaaatagcggcctctctgacagcttaaccacatcaactccccggccgtctaatggcgactctccctctcacccctaccacagaacgttcagtccccacttccaccactttgtggagcagtgcctgcagagaaacccagatgcccggtatccgtgctggccagggcccggactgagggagtctcggggatgctccgggggttag

SEQ ID NO: 245794 - DNA, 1047 bp, Artificial Sequence
  derived and/or modified sequence
atgagcttcctgaccaacgacgccagcagcgagagcatcgccagcttctccaaacaggaagtgatgagtagcttcttgcctgagggcggttgctacgaactgctcaccgtaatcggaaaaggctttgaagatctcatgacggtgaacctggccaggtacaagcccactggagagtatgtcactgttcggagaatcaacctggaggcttgctcaaacgagatggtaacatttttacagggcgagcttcacgtctccaaactctttaaccacccgaatattgtgccttatagggcaacttttattgctgacaacgagttgtgggtggttactagctttatggcatacggatccgccaaggacctgatctgcacccactttatggatggaatgaatgagttagctatagcgtacatccttcaaggtgttctgaaagctctcgattatatccaccacatgggttacgtccatcgcagcgttaaagcctctcacattctgatctctgttgacggaaaagtgtatctgtcaggcctaaggagtaacttgagtatgatcagtcacggtcaacgtcagcgcgtcgtgcatgactttcccaaatatagtgtcaaggttctgccttggctgagcccagaagtcctgcagcagaatctgcagggatacgacgctaaatctgacatatactctgtgggaattaccgcatgtgaactggccaatggccacgtgccttttaaggatatgcctgcaacccaaatgctgcttgaaaagctgaatgggacggtaccctgcctgctggacaccagcacaatacctgccgaagagctgacgatgtcacccagccggtctgttgcaaacagcgggctgtccgatagcctgacaacgtccacccccagaccctcaaacggggactctccttctcacccataccatcgcaccttcagtccgcatttccaccacttcgtggagcagtgtctgcaaagaaacccagacgcccggtacccttgttggcccggccccgggctgcgggaatctaggggttgttccggcggctag

SEQ ID NO: 245795 - DNA, 1044 bp, Artificial Sequence
  derived and/or modified sequence
agcctcctgaccaatgacgcttcttctgaatctatcgcctccttctcaaagcaagaggtcatgtcgtccttccttcctgagggaggttgttacgaactcctgaccgtgattggcaagggcttcgaggacctcatgaccgtaaatctggcacggtataaacccactggagaatatgttactgtccgcagaatcaacctggaggcttgttctaacgaaatggtgactttcttgcagggcgagctccacgtctccaagctcttcaatcatcccaacattgtgccctatagagctacgttcatcgctgataatgagttatgggttgtgacctccttcatggcctacggaagcgccaaggacctgatctgcacacattttatggacgggatgaacgaactcgctatcgcatatatccttcagggcgtgttaaaggcactggattatattcatcatatgggctatgtgcatcggtctgtgaaagcttcacacatcctgatcagcgtggatgggaaagtgtacttatctggcttgcgctcaaacctctccatgattagccacggacaacgccagcgtgtggtccatgatttcccgaaatacagcgtcaaggtgctgccctggctcagccctgaagtgctgcagcagaacctccagggttatgacgcaaaatccgatatttactctgtcggtatcacggcctgtgaactggcaaatggtcacgtcccgtttaaggacatgcctgctacacaaatgctgctggaaaagctgaatggcaccgtcccctgcctgctcgacacgtctactattccagccgaggagttgactatgagcccttcccgctccgtagcgaacagtggcctaagcgacagtctgacaactagtaccccaagaccttctaatggagactctccgagccatccctaccataggaccttcagtcctcacttccatcatttcgtggaacagtgcttgcagcggaatcccgatgctcgctatccttgctggcccggtcctggtctgagggaatcacgtggctgtagtggaggttag

SEQ ID NO: 245796 - DNA, 1047 bp, Artificial Sequence
  derived and/or modified sequence
atgagcttcctaacaaacgacgcctcgtctgagagcatagcatccttcagcaagcaggaagttatgtcatcttttctcccggagggcggatgctacgagctgctgacagtgatcggaaaggggttcgaggatctgatgactgtgaatttagcgagatataaaccaaccggggaatatgtgactgtgcgtcgcataaatttagaggcgtgctccaatgaaatggtgacctttcttcagggggagctgcacgtctcaaagctgttcaatcatccaaatattgtgccctatcgcgctaccttcatcgctgacaacgaactctgggttgttaccagctttatggcctatggaagcgccaaagacctaatttgtactcacttcatggacggaatgaacgagctcgctatagcctacatcctccagggtgtactgaaggctttagattatatacaccatatggggtatgtccatcgctccgtaaaagcctcccacattctcatttccgtggacggaaaggtgtacctctcaggcctgcgttctaatctctccatgatctctcatgggcaacgacagcgggtcgtgcacgattttccaaaatattctgtcaaggtgttaccttggttgtctccagaggtgttacagcaaaatctgcaagggtacgatgcaaagtctgatatttactcagtaggaattactgcatgtgagctcgccaacggacacgttccattcaaggatatgcctgctacacagatgctgctggagaagctgaatgggaccgttccatgtctgctcgacactagcactatccctgccgaggaactgaccatgtctccctcccgctcagtggccaacagcggcctgtccgactctttaaccacctccaccccgcgaccaagcaatggggattccccaagtcatccataccaccggacattcagccctcatttccatcacttcgtggagcagtgcttgcagcgcaaccctgacgcacgctatccatgctggccaggccctgggctccgcgagtcccgcggatgttcaggtggctag

SEQ ID NO: 245797 - DNA, 2485 bp, Artificial Sequence
  derived and/or modified sequence
agtctcctcaccaatgatgcgagctcagagtcaatagcatccttctctaaacaggaggtcatgagtagctttctgccagagggagggtgttacgagctgctcactgtgataggcaaaggatttgaggacctgatgactgtgaatctagcaaggtacaaaccaacaggagagtacgtgactgtacggaggattaacctagaagcttgttccaatgagatggtaacattcttgcagggcgagctgcatgtctccaaactcttcaaccatcccaatatcgtgccatatcgagccacttttattgcagacaatgagctgtgggttgtcacatcattcatggcatacggttctgcaaaagatctcatctgtacacacttcatggatggcatgaatgagctggcgattgcttacatcctgcagggggtgctgaaggccctcgactacatccaccacatgggatatgtacacaggagtgtcaaagccagccacatcctgatctctgtggatgggaaggtctacctgtctggtttgcgcagcaacctcagcatgataagccatgggcagcggcagcgagtggtccacgattttcccaagtacagtgtcaaggttctgccgtggctcagccccgaggtcctccagcagaatctccagggttatgatgccaagtctgacatctacagtgtgggaatcacagcctgtgaactggccaacggccatgtcccctttaaggatatgcctgccacccagatgctgctagagaaactgaacggcacagtgccctgcctgttggataccagcaccatccccgctgaggagctgaccatgagcccttcgcgctcagtggccaactctggcctgagtgacagcctgaccaccagcaccccccggccctccaacggtgactcgccctcccacccctaccaccgaaccttctccccccacttccaccactttgtggagcagtgccttcagcgcaacccggatgccaggtatccctgctggcctgggcctgggcttcgggagagcagagggtgctcaggagggtaaggccagggtgtgaagggacttacctcccaaaggttctgcaggggaatctggagctacacacaggagggatcagctcctgggtgtgtcagaggccagcctggggagctctggccactgcttcccatgagctgagggagagggagaggggacccgaggctgaggcataagtggcaggatttcgggaagctggggacacggcagtgatgctgcggtctctcctcccctttccctccaggcccagtgccagcaccctcctgaaccactctttcttcaagcaggtatcgtagccccttcgttctggttctggttctagttctggttctaacaactcacaatccctttagctttctctcccctccctttgaatgagagaaactaccccgcttccgaagcccctgaaagacactgctccttcctctcatggagttggctccgacagcccgtctgccaccaggccatggttccttgccccatggtgtcctgggacccagagcaacaggatctgtcacccacctctctcttctcccccagatcaagcgacgtgcctcagaggctttgcccgaattgcttcgtcctgtcacccccatcaccaattttgagggcagccagtctcaggaccacagtggaatctttggcctggtaacaaacctggaagagctggaggtggacgattgggagttctgagcctctgcaaactgtgcgcattctccagccagggatgcagaggccacccagaggcccttcctgagggccggccacattcccgccctcctgggcagattgggtagaaaggacattcttccaggaaagttgactgctgactgattgggaaagaaaatcctggagagacacttcactgctccaaggcttttgagacacaagggaatctcaacaaccagggatcaggagggtccaaagccgacattcccagtcctgtgagctcaggtgacctcctccgcagaagagagatgctgctctggccctgggagctgaattccaagcccagggtttggctccttaaacccgaggaccgccacctcttcccagtgcttgcgaccagcctcattctatttaactttgctctcagatgcctcagatgctataggtcagtgaaagggcaagtagtaagctgcctgcctcccttccctcagacctctccctcataattccagagaagggcatttctgtctttttaagcacagactaaggctggaacagtccatccttatccctcttctggcttgggccctgacacctaagtctttcccacggtttatgtgtgtgcctcattcctttcccaccaagaatccatcttagcgcctcctgccagctgccctggtgctttctccaagggccatcagtgtcttgcctagcttgagggcttaagtccttatgctgtgttagtttcgttgtcagaacaaattaaaattttcagagacgc

SEQ ID NO: 245798 - DNA, 2768 bp, Artificial Sequence
  derived and/or modified sequence
cggcgcggcggcggctgctagggcctgccgcagccgcggccactcggaaagggcgggacttccccgcagggcggggtggggcggagcgctctatcagtcctcccggtcgccccactgcgcatggcacgttgcgtactcccctcccagcaaccggtctggcggcggcgcggcagtaaaactgaggaggcggagccaagacggtcggggctgcttgctaactccaggaacaggtttaagtttttgaaactgaagtaggcctacacagtaggaactcatgtcatttcttaccaatgatgcgagctcagagtcaatagcatccttctctaaacaggaggtcatgagtagctttctgccagagggagggtgttacgagctgctcactgtgataggcaaaggatttgaggacctgatgactgtgaatctagcaaggtacaaaccaacaggagagtacgtgactgtacggaggattaacctagaagcttgttccaatgagatggtaacattcttgcagggcgagctgcatgtctccaaactcttcaaccatcccaatatcgtgccatatcgagccacttttattgcagacaatgagctgtgggttgtcacatcattcatggcatacggttctgcaaaagatctcatctgtacacacttcatggatggcatgaatgagctggcgattgcttacatcctgcagggggtgctgaaggccctcgactacatccaccacatgggatatgtacacaggagtgtcaaagccagccacatcctgatctctgtggatgggaaggtctacctgtctggtttgcgcagcaacctcagcatgataagccatgggcagcggcagcgagtggtccacgattttcccaagtacagtgtcaaggttctgccgtggctcagccccgaggtcctccagcagaatctccagggttatgatgccaagtctgacatctacagtgtgggaatcacagcctgtgaactggccaacggccatgtcccctttaaggatatgcctgccacccagatgctgctagagaaactgaacggcacagtgccctgcctgttggataccagcaccatccccgctgaggagctgaccatgagcccttcgcgctcagtggccaactctggcctgagtgacagcctgaccaccagcaccccccggccctccaacggtgactcgccctcccacccctaccaccgaaccttctccccccacttccaccactttgtggagcagtgccttcagcgcaacccggatgccaggtatccctgctggcctgggcctgggcttcgggagagcagagggtgctcaggagggtaaggccagggtgtgaagggacttacctcccaaaggttctgcaggggaatctggagctacacacaggagggatcagctcctgggtgtgtcagaggccagcctggggagctctggccactgcttcccatgagctgagggagagggagaggggacccgaggctgaggcataagtggcaggatttcgggaagctggggacacggcagtgatgctgcggtctctcctcccctttccctccaggcccagtgccagcaccctcctgaaccactctttcttcaagcaggtatcgtagccccttcgttctggttctggttctagttctggttctaacaactcacaatccctttagctttctctcccctccctttgaatgagagaaactaccccgcttccgaagcccctgaaagacactgctccttcctctcatggagttggctccgacagcccgtctgccaccaggccatggttccttgccccatggtgtcctgggacccagagcaacaggatctgtcacccacctctctcttctcccccagatcaagcgacgtgcctcagaggctttgcccgaattgcttcgtcctgtcacccccatcaccaattttgagggcagccagtctcaggaccacagtggaatctttggcctggtaacaaacctggaagagctggaggtggacgattgggagttctgagcctctgcaaactgtgcgcattctccagccagggatgcagaggccacccagaggcccttcctgagggccggccacattcccgccctcctgggcagattgggtagaaaggacattcttccaggaaagttgactgctgactgattgggaaagaaaatcctggagagacacttcactgctccaaggcttttgagacacaagggaatctcaacaaccagggatcaggagggtccaaagccgacattcccagtcctgtgagctcaggtgacctcctccgcagaagagagatgctgctctggccctgggagctgaattccaagcccagggtttggctccttaaacccgaggaccgccacctcttcccagtgcttgcgaccagcctcattctatttaactttgctctcagatgcctcagatgctataggtcagtgaaagggcaagtagtaagctgcctgcctcccttccctcagacctctccctcataattccagagaagggcatttctgtctttttaagcacagactaaggctggaacagtccatccttatccctcttctggcttgggccctgacacctaagtctttcccacggtttatgtgtgtgcctcattcctttcccaccaagaatccatcttagcgcctcctgccagctgccctggtgctttctccaagggccatcagtgtcttgcctagcttgagggcttaagtccttatgctgtgttagtttcgttgtcagaacaaattaaaattttcagagacgctgctgg

SEQ ID NO: 245799 - protein, 129 aa, Artificial Sequence
  derived and/or modified sequence
MASPEHPGSPGCMGPITQCTARTQQEAPATGPDLPHPGPDGHLDTHSGLSSNSSMTTRELQQYWQNQKCRWKHVKLLFEIASARIEERKVSKFVMGKSRPGEMTYPGSRGETGTAPEPDPRCPRQSDML

SEQ ID NO: 245800 - DNA, 390 bp, Artificial Sequence
  derived and/or modified sequence
atggccagccccgagcaccccggcagccccggctgcatgggccccatcacccagtgcaccgccagaacccagcaggaggcccccgccaccggccccgacctgccccaccccggccccgacggccacctggacacccacagcggcctgagcagcaacagcagcatgaccaccagagagctgcagcagtactggcagaaccagaagtgcagatggaagcacgtgaagctgctgttcgagatcgccagcgccagaatcgaggagagaaaggtgagcaagttcgtgatgggcaagagcagacccggcgagatgacctaccccggcagcagaggcgagaccggcaccgcccccgagcccgaccccagatgccccagacagagcgacatgctgtag

SEQ ID NO: 245801 - DNA, 390 bp, Artificial Sequence
  derived and/or modified sequence
atggcgagccctgagcaccccggtagccctggttgtatgggccccattacccagtgtacggcaagaacgcagcaggaagcaccagccacaggcccagaccttccacatcctggtccagacggacaccttgacacccactcaggccttagctcgaacagttcgatgacaactcgcgagctgcagcagtattggcaaaaccaaaaatgccgctggaagcatgtcaagctgttattcgagatagccagcgcacgcattgaggaaaggaaggtgtccaaattcgtcatgggtaaatcacgcccgggtgagatgacttacccaggatctagaggcgagactggaacagccccagagccagacccgcgatgtcctcgccagtctgacatgctgtag

SEQ ID NO: 245802 - DNA, 390 bp, Artificial Sequence
  derived and/or modified sequence
atggccagccctgagcaccctggcagccctggctgcatgggccccatcacccagtgcacagcccggacccagcaggaggccccagccaccggccctgacctgccccaccctggcccagatggccacctggacacccacagcggcctgagcagcaacagctccatgaccacccgggagctgcagcagtactggcagaaccagaagtgccgctggaagcacgtgaagctgctgtttgagatcgccagcgccagaattgaggagaggaaggtgtccaagtttgtgatgggcaagagcaggcctggagagatgacctacccaggcagcagaggagagaccggcacagcccctgagccagacccccgctgcccccggcagagcgacatgctgtag

SEQ ID NO: 245803 - DNA, 390 bp, Artificial Sequence
  derived and/or modified sequence
atggccagccccgagcaccccggcagccccggctgcatgggccccataacacagtgcaccgcccgaacccaacaagaggcacccgccacgggtcctgatttacctcacccaggcccagacgggcacttggatacccatagcggcctcagctcaaattcatcaatgactactcgggaattgcagcagtactggcagaaccagaagtgccggtggaaacacgtcaagttactgttcgaaattgcatcggctaggatagaggagaggaaagtgtcaaagttcgtcatgggcaaatcccgacctggggagatgacctacccaggctctcggggagagacaggtaccgcacccgagccggacccgagatgtcctcggcagtccgatatgctgtag

SEQ ID NO: 245804 - DNA, 390 bp, Artificial Sequence
  derived and/or modified sequence
atggccagcccagagcaccctggctcaccaggatgtatggggccaatcacccaatgtacggccagaactcagcaagaagcacctgccaccggtcctgatctgcctcaccccggaccggacggccacttggacacgcattcgggactgagttctaactctagtatgactacccgtgagttgcagcagtactggcagaatcagaaatgtaggtggaagcatgtgaagctccttttcgaaattgcatcggctcggattgaagagagaaaggttagtaagttcgtcatgggcaagtcccgccctggcgagatgacctatcccggatccaggggagaaacagggacggccccagaaccagatcccaggtgccctcgtcagtccgacatgctgtag

SEQ ID NO: 245805 - DNA, 3304 bp, Artificial Sequence
  derived and/or modified sequence
gggcgatcagaagcaggtcacacagcctgtttcctgttttcaaacggggaacttagaaagtggcagcccctcggcttgtcgccggagctgagaaccaagagctcgaaggggccatatgacactcctcccggacccctggacacacacagccctggagactggagccttggagcatggcaagtccagagcaccctgggagccctggctgcatgggacccataacccagtgcacggcaaggacccagcaggaagcaccagccactggccccgacctcccgcacccaggacctgacgggcacttagacacacacagtggcctgagctccaactccagcatgaccacgcgggagcttcagcagtactggcagaaccagaaatgccgctggaagcacgtcaaactgctctttgagatcgcttcagctcgcatcgaggagagaaaagtctctaagtttgtgatggggaaatcaaggcctggagagatgacttatccagggtcacgtggcgagacagggacagcaccagaaccagacccgagatgtccacgtcaaagtgacatgctctgagaggcagcacacacagaataaccctgcatccaaattccaggaagctcttaggggtcatccagctgggcctaggggtgcagggtcagtgctgaggcctgggcagggccgctagcctccctgagctttctggcttcaggctgggaggcacagttcagggtggactgtgaccccttggcctagaatgcccttagctctgctctctagtggctgtccccatagctggaactctgttttggagtggcaaaaccagttccacctgctggtaggggtaggttggctcccaacacatccccagcaggcctctcttgggctcaaaagccaagctgtgcccagccacgtctccaaatgcttcctggcccccatgcagcaactgcatttagctgccttcccagaatttcctgcatgctcacacagcccttccctctggggcccaacaatgccacagcctgttctatcaatcaccagctgttttcctttgagcagtctccttttacttatgcacatttacttgaaaaagaaacttcctattactatcctaaatggaaactcagaatcacttgctataattagaaagtagctacaaaaataaacacaatgaaaccgatcactgttattacaccctaacccgcttttacctgagacaggccctgagcctgaggccgctggtagacttttgttaaaagagagagagacagagacagagaaataagcattagagacctgcaatcaccaagctgagacttctctttgatttactcagaaggactggaaaatgttgtcctgcaaaaggaggtaagtttctcaccacgtagcgctgatcatcccgtgttgcccgtgcgttgctgcagaccatctggggtcttgcccaagcaccctggagactttgctccctggtttcctggtcaccaactcgagtgttcagccctgtgtgctctccagctcctaagtcgtgggcctggtttcagctttgattgcccactcttggctttcaacccgtaggctccggctcctgacgccacaccctgatatcaagaccctcagatggagcgagcgttctgggctggtcgaagcctgaagccgcagtatgtccttgagtgggtccccccctacccatctagctgttgcccccatggtaagatcaagaaaatgccctcccctccaaaagtccccacgccgagccctcatctgtcagctcccaggctcggccccctcactagctccaggctgggaggcacagttcagggcagactgtggcccctcagcatagcatggacttagctctgctctctagtggctgtccccatagctagaactctgttttggagcagcaaaactagttccacctgctggtagggctaagttgactcccaacatgtccccagcgtgttggtgttgggaaccttgatctagctgctcgttttctcagtaaccaaagatccctggcactcctacgatgtctcaggccttatctagagctggggatacagcagtgaccaggacagaactggtccctgcctcacggaagtgaagtgtcaggaggccactcccaaagcaaatggaagctgggacagaatgatgtcctcagccaggtggtcagggaaggcttctcagagggggcgctgttcaaagaatcacagagcatacaaaggagctggccctgggagcacagagaggggagaattttaggcaaagaggtagcaggagcacagccctgaggcaggaaactacccccccaccaccctcggcatcctcagttctggtttgcacccagaaagggggtaggtccaggacacacccggactgatgtgtcacactggctgtgccagctgagagagtgggctccaggcaccactaacagagaagccttgcaaggcaggtccatgcaccgcccgcctccagttaccactcattgcaaaggaaatgagctgggagcctgtgtgtgggccgtgcagacccttttggttacaagccacaaaaacccaggttaatctgatgaggaaggaatttattatctgtaaagtccaggagcaggctagctttacaccaagcaggatccaaggacccacacttgtcacctcatatctctctctctctcccactttcgctttctctgtctcttcttagttctgctttcctccactgtgccttcgctctcagagagagctctcccctggcagtgacaagatggctgcagcagctccagcaacctcagaggactcccccatccagggtccttgtgagctcctcatctgtaggatgtgcagtaaacactcacgtgtcctttcctgaggagcccagtggctggggtgggggctgaggggcagcccctatgccctcacagtgcagcaaccttggttagctcacccatcagggcagacttgggcagaaatcatgtcttggcatattgttttgtaatctgctttttaaattgtcactatatattatgagcatttccctataatatacaatattcttccacattatgtttaatggtttcattgtattctaatgcatattctatagttattttaaccaccccacaatgttgcaaaatgtccttatttgggacaacactgctgcaaacactttgacccatatgtcctttttgtgtgcactcttatggcaacttctaacggtggcatttctgaatcatagacacttttttgacttctacatattttatttttttagttgacaaaaactgtatttatgaatcataaacacttaatgattttgctatt

SEQ ID NO: 245806 - protein, 598 aa, Artificial Sequence
  derived and/or modified sequence
MDDYSLDEFRRRWQEELAQAQAPKKRRRPEAAERRARRPEVGSGRGEQASGDPALAQRLLEGAGRPPAARATRAEGQDVASRSRSPLAREGAGGGEQLVDQLIRDLNEMNDVPFFDIQLPYELAINIFQYLDRKELGRCAQVSKTWKVIAEDEVLWYRLCQQEGHLPDSSISDYSCWKLIFQECRAKEHMLRTNWKNRKGAVSELEHVPDTVLCDVHSHDGVVIAGYTSGDVRVWDTRTWDYVAPFLESEDEEDEPGMQPNVSFVRINSSLAVAAYEDGFLNIWDLRTGKYPVHRFEHDARIQALALSQDDATVATASAFDVVMLSPNEEGYWQIAAEFEVPKLVQYLEIVPETRRYPVAVAAAGDLMYLLKAEDSARTLLYAHGPPVTCLDVSANQVAFGVQGLGWVYEGSKILVYSLEAGRRLLKLGNVLRDFTCVNLSDSPPNLMVSGNMDGRVRIHDLRSGNIALSLSAHQLRVSAVQMDDWKIVSGGEEGLVSVWDYRMNQKLWEVYSGHPVQHISFSSHSLITANVPYQTVMRNADLDSFTTHRRHRGLIRAYEFAVDQLAFQSPLPVCRSSCDAMATHYYDLALAFPYNHV

SEQ ID NO: 245807 - DNA, 2343 bp, Artificial Sequence
  derived and/or modified sequence
gcggcggacacttccctgggcgggactgtctcgtggcacccggtggaaccgaggagaacgtggagcgccgggagcggcgaatatggacgactacagcctggatgagttccgtcggcgctggcaggaggagctggcgcaggcccaggcgccgaagaagcggcgacggcccgaggctgccgagaggcgggctcggcggccggaggtgggctccgggcgcggcgaacaggcctcgggggacccggcgctggcccagcgtctcctggagggcgcggggaggcccccggcggcgcgggcgactcgggccgaggggcaggacgtagcgagccgctcacgttctcctctggcccgcgagggcgccgggggcggggagcagctggtggaccagctcatccgcgacctgaatgaaatgaatgatgtgcctttctttgatatccaactgccttacgaattggcaatcaatatatttcagtatctggacaggaaagaactaggaagatgtgcacaggtgagcaagacgtggaaggtgattgcagaggatgaggtgctgtggtacaggctgtgccagcaggaagggcaccttccggatagcagcatctctgactattcttgctggaagctcatcttccaagagtgccgagccaaggaacacatgttacgaaccaactggaagaatcgcaaaggtgccgtgagcgagctggagcatgttcctgacacagttttgtgtgatgtgcattctcacgatggtgtggtcattgcgggatatacatcaggggatgtgagagtgtgggacacccgcacctgggactacgtagcccccttcctggaatcagaggacgaggaggatgagcctggaatgcagccaaatgtctcctttgtgaggataaacagctcgttggcagtagcagcttatgaggatgggtttcttaatatttgggatttaaggaccggaaagtaccctgttcatcgttttgagcacgatgcaagaatacaggcactagccctcagccaggacgatgcaaccgtggccacagcttctgcttttgatgtcgtgatgttatcccccaatgaggaggggtactggcagatagctgcggaatttgaagttccgaaactggttcagtaccttgaaatagttccagaaaccagaaggtaccctgtggcagtagccgctgctggagatctgatgtacctgctcaaagccgaagactccgccagaaccctcctttacgcccacggcccgcctgtcacatgtctagacgtctcggccaaccaagttgcttttggtgtacagggtctgggatgggtgtacgaaggaagcaagatcctggtgtatagcctggaagcaggacgccgcctcttgaagctgggtaacgttctccgtgacttcacgtgtgtcaacctcagcgacagccctcccaacctcatggtcagtggcaacatggacgggagggtgaggatccacgacctccgcagtggtaacatcgccctgtcgctctccgcccatcagctcagggtctctgctgtgcagatggatgactggaagatcgtcagtggaggcgaggaaggcctggtgtccgtgtgggattatcggatgaaccagaagctgtgggaggtgtattccgggcacccggtgcagcacatctcattcagcagccacagcctcatcacggccaacgtgccttaccagacggtaatgcgaaacgccgacctggacagcttcactactcacaggagacaccgggggctgatccgcgcctatgagtttgcggtggaccagctggccttccagagccctctccctgtctgccgttcatcctgtgacgccatggccactcactactacgacctcgcactggcctttccctataaccatgtttagggatgtgcctcagttgggagcaaggagaaaaatgggaagaaccagttttatccatcttaaaacgccaggcacctcttcacaggtggtaaacatttaggggaagaaagcagcccagggtgccatgcctgacagcacgcatctccctgacccctgcacttcccccagcgcctggggcaagctggcgtgtgccagggctcgagtcccacgtgctgccaactcaaacatagcctccttccccacccagctggccaccctggcctcagctccctcaggacgcctcagggatctcgctgcgcggtcctatacggtccctgcttagccagcttctgtgtgtccgccctcccagctccagccctgcaggccgtcttttccgtctccagccccttacctcttttcctccgagggcctttggatgtgcttgttcctggcctccaaggcaataacctccatgtccttttccctgt

SEQ ID NO: 245808 - DNA, 1797 bp, Artificial Sequence
  derived and/or modified sequence
atggatgattatagcctggatgagttcaggcgccggtggcaggaggagttggcacaggcccaggccccaaaaaagcggagacgacccgaagccgcagagagacgggcacggcgccctgaagtgggtagtggccgcggtgaacaggccagtggggatcctgctctcgctcagaggctcctcgaaggcgccggccggcctccagcggctcgggcaactcgggctgaggggcaagacgtcgctagcaggtcgcgctcgcctctggctagggagggagccggcgggggggaacagctggtcgatcaacttatcagagatctcaatgagatgaatgacgtgccattctttgacatccagctgccctacgagcttgcgatcaatattttccagtatctggaccgcaaggaactgggccggtgtgcacaggtaagcaaaacttggaaggtgatagcggaggatgaagtgctgtggtaccgactctgccagcaggaggggcacctacctgacagtagcatttcggattactcatgttggaagctgatcttccaagagtgtcgggctaaagagcacatgctgcgtacgaattggaagaatagaaaaggcgctgtgtcagagctcgaacacgtgcctgacaccgtgctctgtgacgtgcactcacacgacggggttgtcattgcaggttatacctcaggcgatgtgagagtttgggatacccggacctgggactatgtggctccgtttcttgagtcagaggatgaggaggacgaaccgggtatgcagcctaatgtttcttttgtgagaattaattcgagtctggccgtcgcggcctacgaagatgggttccttaacatatgggatctccgtacaggcaaatatcccgtgcaccggttcgaacacgacgccagaatccaggccctcgccctgtctcaggatgacgcaaccgttgctactgcaagtgccttcgacgtggtgatgctatcacccaacgaagaaggctactggcaaatcgccgccgaatttgaggtgcccaagctagttcagtacctggagattgttcctgagaccagacgctatcccgtcgctgtggcagccgccggagacctgatgtatctgctgaaggccgaagactcagcccgaactctcttgtatgcccatgggccacccgtcacctgtttggatgtctccgccaatcaggtggcctttggagttcagggcttaggctgggtttatgagggaagcaagattttggtttattctcttgaagccgggcggcggttgcttaagcttggaaacgtgctgagggatttcacttgcgtaaacttaagtgatagtccacccaacttgatggtaagcggcaacatggatggaagggttcgcatccatgatctgcgcagcggtaatattgccttgagcctgagtgctcatcaactgcgggtctctgccgtgcagatggacgattggaagatcgtatcgggaggcgaggaaggactcgtatcagtgtgggactaccgcatgaatcagaagctgtgggaggtgtactctggacaccccgtccaacacatctcgtttagtagccattctctgatcactgctaacgtcccctaccagactgtcatgagaaacgccgatctagattcgtttacaacgcatcgtaggcaccgagggctaattcgagcctatgaatttgccgtcgatcagctggccttccaaagtccgctacctgtgtgtcgaagcagttgtgacgccatggccactcattattacgatctcgccctcgcgtttccatacaaccatgtatag

SEQ ID NO: 245809 - DNA, 1797 bp, Artificial Sequence
  derived and/or modified sequence
atggatgactacagcctggatgagttcagaagacgctggcaggaggagctggcccaggcccaggcccccaagaagagaagaagacctgaggccgctgagcggcgggcccggcggcctgaggtgggcagcggccgcggggagcaggccagcggggaccctgccctggcccagaggctgctggagggcgccggccggcccccagctgcccgggccaccagggctgagggccaggatgtggccagccgcagccgcagccccctggcccgggagggcgctgggggcggggagcagctggtggaccagctgatccgggacctgaatgagatgaatgatgtgcccttctttgacatccagctgccctatgagctggccatcaacatcttccagtacctggacaggaaggagctgggccgctgtgcccaggtgtccaagacctggaaggtgattgctgaagatgaggtgctgtggtaccgcctgtgccagcaggagggccacctgcctgacagcagcatcagtgactacagctgctggaagctgatcttccaggagtgccgggccaaggagcacatgctgcggaccaactggaagaacagaaaaggagctgtgtctgagctggagcacgtgcctgacacagtgctgtgtgatgtgcacagccatgatggagtggtgattgctggctacaccagcggagatgtgcgggtgtgggacaccaggacctgggactatgtggcccccttcctggagagtgaagatgaagaagatgagcccggcatgcagcccaacgtgtcctttgtgcgcatcaacagcagcctggccgtggccgcctatgaagatggcttcctgaacatctgggacctgaggacaggcaagtaccctgtgcacagatttgaacatgatgcccgcatccaggccctggccctgagccaggatgatgccaccgtggccacagccagcgcctttgatgtggtgatgctgagccccaatgaggagggctactggcagattgctgctgagtttgaggtgcccaagctggtgcagtacctggagatcgtgcctgagacccggcgctaccctgtggccgtggccgccgccggggacctgatgtacctgctgaaggccgaggacagcgcccggaccctgctgtatgcccacggcccccctgtgacctgcctggatgtgtctgccaaccaggtggccttcggcgtgcagggcctgggctgggtgtatgagggcagcaagatcctggtgtacagcctggaggccggccgccgcctgctgaagctgggcaatgtgctgcgggacttcacctgtgtgaacctgagtgacagcccccccaacctgatggtgtctggcaacatggatggccgggtgcgcatccatgacctgcggagcggcaacatcgccctgagcctgagcgcccaccagctgcgggtgtctgctgtgcagatggatgactggaagatcgtgtctggaggagaggagggcctggtgtctgtgtgggactacaggatgaaccagaagctgtgggaggtgtacagcggccaccctgtgcagcacatctccttcagcagccacagcctcatcacagccaacgtgccctaccagacagtgatgagaaatgctgacctggacagcttcaccacccaccggcggcaccggggcctcatccgggcctatgaatttgctgtggaccagctggccttccagagccccctgcctgtgtgccgcagcagctgtgatgccatggccacccactactatgacctggccctggccttcccctacaaccacgtgtag

SEQ ID NO: 245810 - DNA, 1797 bp, Artificial Sequence
  derived and/or modified sequence
atggacgactacagcctggacgagttccggcggcggtggcaggaggagttggcacaagcacaggctcctaaaaaaagacgccgtccagaggcagccgagcgtagagctaggcgcccagaggtgggctctggtaggggggaacaagcctccggagatcccgcgctggctcaacgcttactggagggtgccggcagaccccccgccgccagggccacacgagcagaaggtcaggacgtcgccagcagaagtcgctcccccttggcgagagagggagccggtggaggcgagcagctggtcgaccagctcattagggacctgaacgaaatgaatgatgtacccttctttgatattcagcttccatacgagctagctatcaatatttttcagtaccttgacagaaaggagctgggcaggtgcgcccaggtgtctaaaacttggaaggtgatcgctgaggacgaggtgctttggtaccgcttgtgtcagcaagaagggcacctgcccgactcgagcatctccgactacagctgctggaagttaatctttcaggaatgcagggcaaaggaacatatgctgaggacaaattggaagaataggaaaggagccgtcagcgagttagaacatgtgcccgataccgtcctgtgcgacgtacattctcacgatggcgtggtaattgctggctacacctctggagacgtccgtgtatgggatacacggacatgggactacgtcgcccctttcctcgagtccgaagatgaagaggacgagcctggcatgcagccgaacgtgagcttcgtacgcataaattcgagcctggccgtggccgcctacgaagacgggttccttaatatctgggatcttcggaccggtaaatatcctgtgcataggtttgaacatgacgcccggatccaggccctcgctctttcacaggatgatgcgaccgtggcgacggcctctgcctttgatgtggtcatgttgtctccaaacgaagaggggtactggcagatcgctgctgaatttgaggttcctaagttggtccagtacctcgagattgtgcctgagactcgcagatacccagttgccgttgcggcggccggagacctgatgtacttgctcaaggcagaagattctgctagaactctgttgtatgcgcacggacctcctgtgacctgcctggatgtgtccgctaaccaggttgcatttggcgttcaaggcctgggatgggtctacgaggggagcaaaatccttgtgtatagcctggaggcagggcgaaggctgttaaaactgggaaatgtcctcagagactttacctgcgtgaatctgtctgattctccccccaacctgatggtgtctggaaacatggatggcagagtgaggatccatgatctacgctccgggaatatcgcccttagtctcagtgcccaccagcttagagtctccgcagtgcaaatggatgattggaagatcgtatctggcggggaggaaggcttggtttccgtctgggactaccgaatgaaccaaaaactctgggaggtgtactcgggtcacccagtccaacatatcagtttctccagtcactcccttattaccgcgaacgtaccgtaccagacggttatgcgtaacgccgacttagattcatttacaactcataggaggcacagaggactgattagagcctacgagtttgcagtggaccaacttgcattccagtcacccctgccagtgtgccggtcttcctgtgacgccatggcgactcattattacgatttagcactggcgtttccctataaccacgtctag

SEQ ID NO: 245811 - DNA, 1797 bp, Artificial Sequence
  derived and/or modified sequence
atggacgattactcattggatgaatttaggaggcgctggcaggaggagctggcccaggcacaagccccaaagaagcgcaggaggcctgaggctgccgagcggcgtgcgaggcgacccgaggtgggatctggcaggggggaacaggccagcggcgaccccgcactggctcagcggctgctcgagggcgctgggagaccacctgccgctcgtgccactagagccgagggacaggacgtggcctctcgctcacgcagccccctggctagggagggagcgggtggcggagagcagctggtcgatcagttgatccgagacttgaacgagatgaacgacgttcctttctttgacatccagctgccctacgaactggcaattaatatctttcagtatctagatcgtaaagaactggggaggtgcgcacaggtctcgaagacatggaaggttatcgccgaggacgaagtcctttggtaccgtctgtgccagcaggaggggcacctcccagacagtagcatcagcgattactcatgctggaaactgatttttcaagaatgccgagctaaggagcatatgcttcggaccaactggaagaaccgcaagggagctgttagcgaactggaacacgtcccagatacagtgctgtgtgatgttcatagccacgatggagtggtgatagctggatacaccagcggcgacgttagagtgtgggacacacggacatgggactatgtcgccccttttctcgaatccgaggacgaggaggacgaacctgggatgcagcccaatgtgtcctttgtgcgaatcaattcttctttagcagtggccgcttatgaagacggcttcctcaatatttgggatctccggactgggaagtatccagtgcaccgtttcgagcacgacgctaggatacaggcacttgccctgagccaggacgatgctaccgtcgcaacggcaagcgctttcgatgtcgtgatgctctcccccaacgaggagggatattggcagatagccgcagagttcgaagtccctaagcttgtgcagtatctggagattgtgccggaaacaagacggtacccggtggcggtcgctgcggcaggtgatctaatgtacctgttgaaagccgaggattctgcaaggacccttctgtatgcccatggaccgcctgtgacgtgcctggacgtgagtgcgaaccaagtcgcgtttggcgttcaggggctgggatgggtgtacgaaggctccaagattctcgtgtacagtctggaagccggtcgtaggctgctgaagctgggcaacgttctccgggattttacatgcgtcaatcttagcgattctcctcctaatcttatggtgtcgggcaacatggatggaagggtccggattcacgacctgcgcagtggaaatattgccctgagcctctcagctcaccagctacgggtctctgctgtccaaatggacgactggaagatcgtgtcaggaggtgaagaagggctggtgtctgtgtgggattacaggatgaaccagaagctctgggaggtgtattccggacaccccgtgcaacatatttctttttcctcccactccctcattaccgccaacgttccgtatcaaactgtgatgaggaatgcagatttggatagctttacaacacacagacgacatcgcggactgattcgagcttacgaatttgcagtcgaccagctcgctttccagtcacctctccctgtgtgcagatccagctgtgacgccatggcaacccactattacgacctagctctcgctttcccatacaaccacgtctag

SEQ ID NO: 245812 - DNA, 1797 bp, Artificial Sequence
  derived and/or modified sequence
atggacgactacagcctggacgagttcagaagaagatggcaggaggagctggcccaggcccaggcccccaagaagagaagaagacccgaggccgccgagagaagagccagaagacccgaggtgggcagcggcagaggcgagcaggccagcggcgaccccgccctggcccagagactgctggagggcgccggcagaccccccgccgccagagccaccagagccgagggccaggacgtggccagcagaagcagaagccccctggccagagagggcgccggcggcggcgagcagctggtggaccagctgatcagagacctgaacgagatgaacgacgtgcccttcttcgacatccagctgccctacgagctggccatcaacatcttccagtacctggacagaaaggagctgggcagatgcgcccaggtgagcaagacctggaaggtgatcgccgaggacgaggtgctgtggtacagactgtgccagcaggagggccacctgcccgacagcagcatcagcgactacagctgctggaagctgatcttccaggagtgcagagccaaggagcacatgctgagaaccaactggaagaacagaaagggcgccgtgagcgagctggagcacgtgcccgacaccgtgctgtgcgacgtgcacagccacgacggcgtggtgatcgccggctacaccagcggcgacgtgagagtgtgggacaccagaacctgggactacgtggcccccttcctggagagcgaggacgaggaggacgagcccggcatgcagcccaacgtgagcttcgtgagaatcaacagcagcctggccgtggccgcctacgaggacggcttcctgaacatctgggacctgagaaccggcaagtaccccgtgcacagattcgagcacgacgccagaatccaggccctggccctgagccaggacgacgccaccgtggccaccgccagcgccttcgacgtggtgatgctgagccccaacgaggagggctactggcagatcgccgccgagttcgaggtgcccaagctggtgcagtacctggagatcgtgcccgagaccagaagataccccgtggccgtggccgccgccggcgacctgatgtacctgctgaaggccgaggacagcgccagaaccctgctgtacgcccacggcccccccgtgacctgcctggacgtgagcgccaaccaggtggccttcggcgtgcagggcctgggctgggtgtacgagggcagcaagatcctggtgtacagcctggaggccggcagaagactgctgaagctgggcaacgtgctgagagacttcacctgcgtgaacctgagcgacagcccccccaacctgatggtgagcggcaacatggacggcagagtgagaatccacgacctgagaagcggcaacatcgccctgagcctgagcgcccaccagctgagagtgagcgccgtgcagatggacgactggaagatcgtgagcggcggcgaggagggcctggtgagcgtgtgggactacagaatgaaccagaagctgtgggaggtgtacagcggccaccccgtgcagcacatcagcttcagcagccacagcctgatcaccgccaacgtgccctaccagaccgtgatgagaaacgccgacctggacagcttcaccacccacagaagacacagaggcctgatcagagcctacgagttcgccgtggaccagctggccttccagagccccctgcccgtgtgcagaagcagctgcgacgccatggccacccactactacgacctggccctggccttcccctacaaccacgtgtag

SEQ ID NO: 245813 - protein, 487 aa, Artificial Sequence
  derived and/or modified sequence
MGVIGIQLVVTMVMASVMQKIIPHYSLARWLLCNGSLRWYQHPTEEELRILAGKQQKGKTKKDRKYNGHIESKPLTIPKDIDLHLETKSVTEVDTLALHYFPEYQWLVDFTVAATVVYLVTEVYYNFMKPTQEMNISLVWCLLVLSFAIKVLFSLTTHYFKVEDGGERSVCVTFGFFFFVKAMAVLIVTENYLEFGLETGFTNFSDSAMQFLEKQGLESQSPVSKLTFKFFLAIFCSFIGAFLTFPGLRLAQMHLDALNLATEKITQTLLHINFLAPLFMVLLWVKPITKDYIMNPPLGKESIPLMTEATFDTLRLWLIILLCALRLAMMRSHLQAYLNLAQKCVDQMKKEAGRISTVELQKMVARVFYYLCVIALQYVAPLVMLLHTTLLLKTLGNHSWGIYPESISTLPVDNSLLSNSVYSELPSAEGKMKVTVTQITVALSSLKNIFTPLLFRGLLSFLTWWIAACLFSTSLFGLFYHQYLTVA

SEQ ID NO: 245814 - protein, 307 aa, Artificial Sequence
  derived and/or modified sequence
MGVIGIQLVVTMVMASVMQKIIPHYSLARWLLCNGSLRWYQHPTEEELRILAGKQQKGKTKKDRKYNGHIESKPLTIPKDIDLHLETKSVTEVDTLALHYFPEYQWLVDFTVAATVVYLVTEVYYNFMKPTQEMNISLVWCLLVLSFAIKVLFSLTTHYFKVEDGGERSVCVTFGFFFFVKAMAVLIVTENYLEFGLETGFTNFSDSAMQFLEKQGLESQSPVSKLTFKFFLAIFCSFIGAFLTFPGLRLAQMHLDALNLATEKITQTLLHINFLAPLFMVLLWVKPITKDYIMNPPLGKEISPSGR

SEQ ID NO: 245815 - DNA, 1464 bp, Artificial Sequence
  derived and/or modified sequence
atgggcgtgatcggcatccagctggtggtgaccatggtgatggccagcgtgatgcagaagatcatcccccactacagcctggccagatggctgctgtgcaacggcagcctgagatggtaccagcaccccaccgaggaggagctgagaatcctggccggcaagcagcagaagggcaagaccaagaaggacagaaagtacaacggccacatcgagagcaagcccctgaccatccccaaggacatcgacctgcacctggagaccaagagcgtgaccgaggtggacaccctggccctgcactacttccccgagtaccagtggctggtggacttcaccgtggccgccaccgtggtgtacctggtgaccgaggtgtactacaacttcatgaagcccacccaggagatgaacatcagcctggtgtggtgcctgctggtgctgagcttcgccatcaaggtgctgttcagcctgaccacccactacttcaaggtggaggacggcggcgagagaagcgtgtgcgtgaccttcggcttcttcttcttcgtgaaggccatggccgtgctgatcgtgaccgagaactacctggagttcggcctggagaccggcttcaccaacttcagcgacagcgccatgcagttcctggagaagcagggcctggagagccagagccccgtgagcaagctgaccttcaagttcttcctggccatcttctgcagcttcatcggcgccttcctgaccttccccggcctgagactggcccagatgcacctggacgccctgaacctggccaccgagaagatcacccagaccctgctgcacatcaacttcctggcccccctgttcatggtgctgctgtgggtgaagcccatcaccaaggactacatcatgaacccccccctgggcaaggagagcatccccctgatgaccgaggccaccttcgacaccctgagactgtggctgatcatcctgctgtgcgccctgagactggccatgatgagaagccacctgcaggcctacctgaacctggcccagaagtgcgtggaccagatgaagaaggaggccggcagaatcagcaccgtggagctgcagaagatggtggccagagtgttctactacctgtgcgtgatcgccctgcagtacgtggcccccctggtgatgctgctgcacaccaccctgctgctgaagaccctgggcaaccacagctggggcatctaccccgagagcatcagcaccctgcccgtggacaacagcctgctgagcaacagcgtgtacagcgagctgcccagcgccgagggcaagatgaaggtgaccgtgacccagatcaccgtggccctgagcagcctgaagaacatcttcacccccctgctgttcagaggcctgctgagcttcctgacctggtggatcgccgcctgcctgttcagcaccagcctgttcggcctgttctaccaccagtacctgaccgtggcctag

SEQ ID NO: 245816 - DNA, 1464 bp, Artificial Sequence
  derived and/or modified sequence
atgggggtaattggtatacaactggtagtcacgatggtgatggcatcagtgatgcaaaagatcataccacattacagtcttgctaggtggctgctgtgcaacgggagtctgcgttggtaccagcacccgacggaggaggaattgcggattctggcgggaaaacagcagaagggaaagaccaagaaagatcggaagtacaacgggcacattgagtcgaagcctctgacgatacccaaggatatcgatctgcatctagagaccaagtccgttaccgaagtggatacgttagctttacactacttccctgagtaccaatggcttgtcgacttcacagtggccgcgaccgtcgtatatcttgtgacagaagtctattataatttcatgaaacccacacaagagatgaacattagtctcgtgtggtgcctgctggtgctcagctttgcaatcaaggtgctcttctccctgactacgcactattttaaggtggaggatggaggggagcgatccgtgtgcgtgactttcgggtttttctttttcgtcaaagcgatggcggtccttattgtcacagaaaactatttagagtttggactggagacaggcttcacgaacttctccgattccgcaatgcaattcctggagaaacagggcctagaatcacagagtcccgtatccaagctgacattcaaatttttcctggcgatcttctgttcatttataggagcctttcttaccttccccggtctaaggctcgcacagatgcacctggatgctctgaaccttgcaacggaaaaaatcacacaaaccctattacacatcaatttcttggcccccctttttatggtcctcttgtgggtgaaaccaattaccaaggactatattatgaatcctcctctgggtaaggaatctattcctctgatgacagaagccacatttgatactcttaggctgtggctcattattcttctctgtgccttgagactggccatgatgcggtctcacctacaggcatatctaaacctggcccagaagtgcgtggatcagatgaaaaaggaggctggcaggattagcacagttgaactccagaagatggtggccagagtcttctattatttgtgcgtgatcgccttacaatacgtggcgccactcgtgatgctcctgcatacaactctcctgctgaaaacactcggcaaccatagttggggaatttacccggaaagcataagtacactgcccgtggacaatagccttctctccaattccgtttacagcgaactgcccagtgccgagggtaagatgaaggtcaccgtgacccagatcacggtcgccctaagctcactgaaaaatatctttacaccactgctgttccgcggactcctgagcttcctcacatggtggatcgccgcgtgcctgttcagcactagcctgttcggactcttctatcaccagtatctgaccgtggcctag

SEQ ID NO: 245817 - DNA, 1464 bp, Artificial Sequence
  derived and/or modified sequence
atgggcgtcatcggcatccagctggtggtgaccatggtgatggcctctgtgatgcagaagatcatcccccactacagcctggcccgctggctgctgtgcaatggcagcctgcgctggtaccagcaccccacagaggaggagctgcgcatcctggccggcaagcagcagaagggcaagaccaagaaggacaggaagtacaacggccacatcgagagcaagcccctgaccatccccaaggacatcgacctgcacctggagaccaagtctgtgacagaggtggacaccctggccctgcactacttccctgagtaccagtggctggtggacttcaccgtggccgccaccgtggtgtacctggtgacagaggtgtactacaacttcatgaagcccacccaggagatgaacatcagcctggtgtggtgcctgctggtgctgagctttgccatcaaggtgctcttcagcctgaccacccactacttcaaggtggaggatggaggagagaggtctgtgtgtgtgaccttcggcttcttcttctttgtgaaggccatggctgtgctgattgtgacagagaactacctggagtttggcctggagaccggcttcaccaacttcagtgacagcgccatgcagttcctggagaagcagggcctggagagccagagccctgtgtccaagctgaccttcaagttcttcctggccatcttctgcagcttcatcggggccttcctgaccttccctggcctgcggctggcccagatgcacctggatgccctgaacctggccacagagaagatcacccagaccctgctgcacatcaacttcctggcccccctcttcatggtgctgctgtgggtgaagcccatcaccaaggactacatcatgaacccccccctgggcaaggagagcatccccctgatgacagaggccacctttgacaccctgcggctgtggctgatcatcctgctgtgtgccctgcggctggccatgatgaggagccacctgcaggcctacctgaacctggcccagaagtgtgtggaccagatgaagaaggaggccggccgcatcagcacagtggagctgcagaagatggtggcccgggtcttctactacctgtgtgtgattgccctgcagtatgtggcccccctggtgatgctgctgcacaccaccctgctgctgaagaccctgggcaaccacagctggggcatctacccagagagcatcagcaccctgcctgtggacaacagcctgctgagcaacagcgtgtacagcgagctgcccagcgctgagggcaagatgaaggtgacagtgacccagatcaccgtggccctgagcagcctgaagaacatcttcacccccctgctcttccggggcctgctgtccttcctgacctggtggattgctgcctgcctcttcagcaccagcctgtttggcctcttctaccaccagtacctgactgtggcctag

SEQ ID NO: 245818 - DNA, 1464 bp, Artificial Sequence
  derived and/or modified sequence
atgggcgtgatcggcatccagctggtggtgaccatggtgatggcctctgtcatgcagaagatcataccccattatagtctggctaggtggcttctgtgtaatgggtctcttcgatggtatcagcaccccaccgaggaagaacttcgcattcttgccggaaagcaacagaagggaaagactaagaaggaccggaagtacaacggacatatagagagtaagcccttgaccattcccaaagacattgacctacatctggagaccaagtctgtgactgaggtggacacactggccctgcattacttccccgaataccagtggttggtggacttcactgttgcagccactgtggtctatttggtgacagaagtatactacaatttcatgaagccaacacaagaaatgaacatctccctggtctggtgcctgcttgtgctatccttcgccatcaaagttttattttctttaactacacattatttcaaggtggaggatgggggcgagcgctccgtctgcgtaacattcggattcttctttttcgtcaaagcaatggcggtgctgattgtcaccgaaaactacttggagtttggactggagaccggtttcactaatttttctgattccgccatgcagtttctagaaaagcagggtcttgaatctcaaagcccagtgtccaaactcaccttcaagtttttccttgcgattttttgttccttcattggggcttttcttactttcccaggactcaggctggcacaaatgcatctcgatgctctaaatctagccaccgaaaagattacccaaacactgctgcacatcaactttctagcacctctgtttatggtccttctgtgggtgaaaccaataactaaggattacatcatgaatccaccgcttggtaaggagtcaataccactaatgaccgaggccaccttcgataccttaagactctggctgataatacttctgtgcgcactgagactcgccatgatgcgatcccatttgcaggcctatctgaatctggcccagaaatgcgtggatcagatgaagaaggaggccggaaggatcagcacggttgagctgcaaaagatggtggcacgtgtgttttattatctgtgtgtgatcgccctccaatacgtggcacctctggtaatgctgctgcatactactctcctactcaagaccctgggaaaccattcctggggcatttaccctgagtctatctccactctgcccgtggataactctctattgagcaatagtgtctattccgaactccctagtgccgagggaaagatgaaggttacggtgacgcagattactgtggcactttcaagtctgaaaaacatttttactcctctgctgttcagaggactcttgagcttcttgacctggtggattgctgcctgcctgttttcgacatccctctttggactgttttaccaccagtatctaactgtcgcatag

SEQ ID NO: 245819 - DNA, 1464 bp, Artificial Sequence
  derived and/or modified sequence
atgggggtgattggaattcagcttgtggttacaatggttatggctagtgttatgcaaaagattattccacattactctctggcaaggtggctgctctgtaacggaagcctacggtggtatcaacaccccaccgaggaagagctgagaatactggccggaaagcagcagaaaggaaagactaagaaggatagaaagtataatggccacattgaaagcaagcccttgaccatcccgaaggatatcgatttacatctcgagaccaagagcgtgacagaggtagataccctggcgctccattattttccggagtaccaatggttggtagattttactgtggcggctaccgtggtgtacctcgtgactgaggtgtactacaactttatgaagcccacccaggagatgaacatctccctagtctggtgcctactggtgctctcatttgcaataaaagtgctgttttctctgactacacactattttaaagtggaggacggcggtgagcgtagtgtttgtgtgacatttggttttttttttttcgtgaaggcaatggcagtgcttattgttaccgaaaactacctggaattcggcctggagactggcttcacaaatttctcagacagcgcaatgcaatttttggaaaaacagggtctcgagagccaaagcccagtgtcaaaactgaccttcaaattcttcctggctattttttgttctttcattggagcattcctgacattcccaggcctgcggctggcacagatgcacctcgacgcattaaatttggccaccgaaaaaattacccaaaccttgttacacatcaacttcctcgcacctttatttatggttctgctgtgggtgaaacctattacaaaagactatataatgaaccctccattgggtaaagagtctatccccctgatgaccgaggctacatttgataccttacgactttggcttattatcctgctatgtgcgttacgcctggccatgatgcggagtcatctgcaggcatacctaaacctcgcacaaaagtgtgtggaccagatgaagaaagaggccggacggatctcgactgtggagctgcagaagatggttgctagagtcttttactacctgtgcgtaatcgctctgcagtacgtggccccactcgtgatgttactacatacaacacttctgctgaaaacactcggcaatcactcatgggggatctatcctgagtctattagtacactgcctgtagataactcccttctgtcaaattccgtgtacagcgagctgccctctgcggaaggaaagatgaaggtgacagtcactcaaatcactgtagcgctgtctagcctgaagaacatattcactcccctcctgttcaggggtctgctgagctttctcacctggtggattgccgcatgcctcttttctacatccctcttcggcctcttctatcaccagtacctaacagtggcttag

SEQ ID NO: 245820 - DNA, 2594 bp, Artificial Sequence
  derived and/or modified sequence
ggcagagccggaagaccctctctttcgctgtttgagagtctctcggctcaaggaccgggaggtaagaggtttgggactgccccggcaactccagggtgtctggtccacgacctatcctaggcgccatgggtgtgataggtatacagctggttgttaccatggtgatggccagtgtcatgcagaagattatacctcactattctcttgctcgatggctactctgtaatggcagtttgaggtggtatcaacatcctacagaagaagaattaagaattcttgcagggaaacaacaaaaagggaaaaccaaaaaagataggaaatataatggtcacattgaaagtaagccattaaccattccaaaggatattgaccttcatctagaaacaaagtcagttacagaagtggatactttagcattgcattactttccagaataccagtggctggtggatttcacagtggctgctacagttgtgtatctagtaactgaagtctactacaattttatgaagcctacacaggaaatgaatatcagcttagtctggtgcctacttgttttgtcttttgcaatcaaagttctattttcattaactacacactattttaaagtagaagatggtggtgaaagatctgtttgtgtcacctttggattttttttctttgtcaaagcaatggcagtgttgattgtaacagaaaattatctggaatttggacttgaaacagggtttacaaatttttcagacagtgcgatgcagtttcttgaaaagcaaggtttagaatctcagagtcctgtttcaaaacttactttcaaatttttcctggctattttctgttcattcattggggcttttttgacatttcctggattacgactggctcaaatgcatctggatgccctgaatttggcaacagaaaaaattacacaaactttacttcatatcaacttcttggcacctttatttatggttctgctctgggtaaaaccaatcaccaaagactacattatgaacccaccactgggcaaagaaagtatccctttaatgacagaagccacattcgatactctgcgactctggttaataatcctgctgtgtgctttgcggttggccatgatgcgtagtcacctgcaagcttatttaaatttagcccaaaaatgtgtggatcagatgaagaaagaagcggggcgaataagcacggttgagctacagaaaatggtggctcgagtcttttattatctttgtgtcattgcactgcagtatgtggcgcctctggtaatgctgcttcacacaactctgcttttgaaaacactaggtaatcattcctggggtatttatccagaatctatctctaccttaccagtggataatagtctactgtccaattctgtttactctgaattaccatcagctgaagggaaaatgaaggtaactgttacacaaataacagtggcactgagcagcttaaaaaatatttttactcctcttctttttcgaggacttctgtcttttctgacctggtggattgctgcttgcctcttttctacaagcctttttgggcttttctatcaccagtatctgactgtggcatgaatctcagttaacaaaaaagcatatccaaatcaccctttaaattaaaatatctgtgcccttaaagggctgatgaaaaccagaagaaagcaaatacaatgggaaaaaaaaaacatatcagaatgtcttgtattaaatgtttcctctgtattctcagggtgaattaatgtagtaatatttaaaattacaaaatagattgttaactgttacactgtggcattggaattttaactctttgtatttactggtatgagagggctatctacaagggtaatatttctgattaccctggtttacagaaacctccagcagtctttgaaacatctcacatgactctagttattgattgcttttaatggttttatggtactgttgatagtcatagtggctgcctatagaacaatcttcaaactgagccatgctttaggggagggaaaggggctaaagtctcttctgttggtaatttattagttactcttgaaacaataaaatccaacagaaaggaagagatagctactgtatattacagtaaagaaagctgcatagttattttaaatttaatggagatgaatatggttaaaatatataactactgctgcttgagaatagcaagagtattgttttaaaacatattccacccaacttgagagttcttttaaaatgattggccatatgaacatttgtaatcttgccattaggtttggacctgccatattttgttttattctgtgatcctaactagttccttttaataggctaaaatatttatcaatactgatcagactttaaagaaattactttgtaaacctgctgactacctgtatgtattgtatatatattatatattaaatatataatatattgagattataaaagatgaaaatattgaatccttataatattttaagttgcagaatgtatgttaaaaagtgacttgaatgagatgtatttgtatctagaaattttatttctttttggaatgagattaaaatacattttgaaagttca

SEQ ID NO: 245821 - protein, 139 aa, Artificial Sequence
  derived and/or modified sequence
MGYCSGRCTLIFICGMQLVCVLERQIFDFLGYQWAPILANFVHIIIVILGLFGTIQYRPRYITGYAVWLVLWVTWNVFVICFYLEAGDLSKLAGFIYACYVVKCITEEEDSFDFIGGFDSYGYQGPQKTSHLQLQPMYM

SEQ ID NO: 245822 - DNA, 420 bp, Artificial Sequence
  derived and/or modified sequence
atggggtattgttctggccgatgtacactcattttcatttgcggcatgcagctggtctgtgtgctggaacgccaaatcttcgacttcctcggatatcagtgggcccctatcctcgcaaactttgttcatatcattattgtgatccttgggcttttcggaactattcagtatcggcccaggtacatcaccggctacgcagtctggctagtactctgggtgacctggaacgtgttcgtgatatgcttttatttggaggcaggggatctgtccaagctcgccgggtttatttacgcctgctacgtggttaaatgtatcaccgaggaggaagactcatttgactttatcggtggcttcgattcttatggctatcaggggcctcagaaaacctcccacctacaacttcagcccatgtatatgtag

SEQ ID NO: 245823 - DNA, 420 bp, Artificial Sequence
  derived and/or modified sequence
atgggctactgcagcggccgctgcaccctcatcttcatctgtggcatgcagctggtgtgtgtgctggagcggcagatctttgacttcctgggctaccagtgggcccccatcctggccaactttgtgcacatcatcatcgtcatcctgggcctgtttggcaccatccagtaccggccccgctacatcaccggctatgctgtgtggctggtgctgtgggtgacctggaatgtgtttgtgatctgcttctacctggaggccggggacctgagcaagctggccggcttcatctatgcctgctacgtggtgaagtgcatcacagaggaggaggacagctttgacttcatcggcggctttgacagctatggctaccagggcccccagaagaccagccacctgcagctgcagcccatgtacatgtag

SEQ ID NO: 245824 - DNA, 420 bp, Artificial Sequence
  derived and/or modified sequence
atgggttattgcagtggcaggtgcacgcttatctttatctgtggcatgcaactggtttgtgtgctggagaggcaaatatttgacttccttggatatcagtgggcacctatcctggcaaattttgtacatattattatcgtcattcttggtttgtttggaactattcaatatagacctcgttacataacaggatatgctgtctggctagtcctctgggttacgtggaatgtgtttgttatctgcttctatttggaggctggggacctctcaaagctggcaggtttcatctacgcctgttatgttgtgaaatgtataactgaagaagaggacagctttgatttcataggtggctttgactcttatggctatcaagggcctcagaagacatctcatttacaactacagcctatgtacatgtaa

SEQ ID NO: 245825 - DNA, 420 bp, Artificial Sequence
  derived and/or modified sequence
atgggctactgcagcggccggtgcaccctgatcttcatctgcggcatgcagctggtctgtgtcctcgagaggcagatcttcgacttcctgggctaccagtgggcccccatcctggccaactttgtccatatcatcatcgtgatacttggtctctttggaaccattcagtatcggccccgctacataaccggctacgccgtgtggctagtgctctgggttacctggaatgttttcgtaatctgcttctacttggaagctggtgacctgtccaaactcgcaggctttatctacgcttgctacgtggtgaaatgtattactgaggaagaagatagctttgacttcattggcggatttgattcatacggatatcaaggcccccaaaagactagccatctgcaactgcagccgatgtatatgtag

SEQ ID NO: 245826 - DNA, 420 bp, Artificial Sequence
  derived and/or modified sequence
atgggctactgctcgggccgatgtacccttatattcatctgtgggatgcagctggtctgcgtgctggagcgccagattttcgacttcctgggttaccagtgggctcccatcctggcaaacttcgtccatataattatagtgatcctaggcttgttcggaactatccaatacaggccacgatacatcacagggtacgcggtgtggctggtgctgtgggttacgtggaatgtgtttgtgatctgtttttacctggaggccggagacctgtcaaaactcgctggatttatctacgcgtgttatgtcgtgaagtgtataaccgaagaggaggattccttcgacttcatcggcggttttgattcctacggataccagggtccccaaaagacaagtcatttgcagctccagcccatgtacatgtag

SEQ ID NO: 245827 - DNA, 420 bp, Artificial Sequence
  derived and/or modified sequence
atgggctactgcagcggcagatgcaccctgatcttcatctgcggcatgcagctggtgtgcgtgctggagagacagatcttcgacttcctgggctaccagtgggcccccatcctggccaacttcgtgcacatcatcatcgtgatcctgggcctgttcggcaccatccagtacagacccagatacatcaccggctacgccgtgtggctggtgctgtgggtgacctggaacgtgttcgtgatctgcttctacctggaggccggcgacctgagcaagctggccggcttcatctacgcctgctacgtggtgaagtgcatcaccgaggaggaggacagcttcgacttcatcggcggcttcgacagctacggctaccagggcccccagaagaccagccacctgcagctgcagcccatgtacatgtag

SEQ ID NO: 245828 - protein, 471 aa, Artificial Sequence
  derived and/or modified sequence
MPAPQRKHRRGGFSHRCFPTPQTAMTPQPAGPPDGGWGWVVAAAAFAINGLSYGLLRSLGLAFPDLAEHFDRSAQDTAWISALALAVQQAASPVGSALSTRWGARPVVMVGGVLASLGFVFSAFASDLLHLYLGLGLLAGFGWALVFAPALGTLSRYFSRRRVLAVGLALTGNGASSLLLAPALQLLLDTFGWRGALLLLGAITLHLTPCGALLLPLVLPGDPPAPPRSPLAALGLSLFTRRAFSIFALGTALVGGGYFVPYVHLAPHALDRGLGGYGAALVVAVAAMGDAGARLVCGWLADQGWVPLPRLLAVFGALTGLGLWVVGLVPVVGGEESWGGPLLAAAVAYGLSAGSYAPLVFGVLPGLVGVGGVVQATGLVMMLMSLGGLLGPPLSGFLRDETGDFTASFLLSGSLILSGSFIYIGLPRALPSCGPASPPATPPPETGELLPAPQAVLLSPGGPGSTLDTTC

SEQ ID NO: 245829 - protein, 439 aa, Artificial Sequence
  derived and/or modified sequence
MTPQPAGPPDGGWGWVVAAAAFAINGLSYGLLRSLGLAFPDLAEHFDRSAQDTAWISALALAVQQAASPVGSALSTRWGARPVVMVGGVLASLGFVFSAFASDLLHLYLGLGLLAGFGWALVFAPALGTLSRYFSRRRVLAVGLALTGNGASSLLLAPALQLLLDTFGWRGALLLLGAITLHLTPCGALLLPLVLPGDPPAPPRSPLAALGLSLFTRRAFSIFALGTALVGGGYFVPYVHLAPHALDRGLGGYGAALVVAVAAMGDAGARLVCGWLADQGWVPLPRLLAVFGALTGLGLWVVGLSWGGPLLAAAVAYGLSAGSYAPLVFGVLPGLVGVGGVVQATGLVMMLMSLGGLLGPPLSGFLRDETGDFTASFLLSGSLILSGSFIYIGLPRALPSCGPASPPATPPPETGELLPAPQAVLLSPGGPGSTLDTTC

SEQ ID NO: 245830 - DNA, 1416 bp, Artificial Sequence
  derived and/or modified sequence
atgcccgccccccagagaaagcacagaagaggcggcttcagccacagatgcttccccaccccccagaccgccatgaccccccagcccgccggcccccccgacggcggctggggctgggtggtggccgccgccgccttcgccatcaacggcctgagctacggcctgctgagaagcctgggcctggccttccccgacctggccgagcacttcgacagaagcgcccaggacaccgcctggatcagcgccctggccctggccgtgcagcaggccgccagccccgtgggcagcgccctgagcaccagatggggcgccagacccgtggtgatggtgggcggcgtgctggccagcctgggcttcgtgttcagcgccttcgccagcgacctgctgcacctgtacctgggcctgggcctgctggccggcttcggctgggccctggtgttcgcccccgccctgggcaccctgagcagatacttcagcagaagaagagtgctggccgtgggcctggccctgaccggcaacggcgccagcagcctgctgctggcccccgccctgcagctgctgctggacaccttcggctggagaggcgccctgctgctgctgggcgccatcaccctgcacctgaccccctgcggcgccctgctgctgcccctggtgctgcccggcgacccccccgccccccccagaagccccctggccgccctgggcctgagcctgttcaccagaagagccttcagcatcttcgccctgggcaccgccctggtgggcggcggctacttcgtgccctacgtgcacctggccccccacgccctggacagaggcctgggcggctacggcgccgccctggtggtggccgtggccgccatgggcgacgccggcgccagactggtgtgcggctggctggccgaccagggctgggtgcccctgcccagactgctggccgtgttcggcgccctgaccggcctgggcctgtgggtggtgggcctggtgcccgtggtgggcggcgaggagagctggggcggccccctgctggccgccgccgtggcctacggcctgagcgccggcagctacgcccccctggtgttcggcgtgctgcccggcctggtgggcgtgggcggcgtggtgcaggccaccggcctggtgatgatgctgatgagcctgggcggcctgctgggcccccccctgagcggcttcctgagagacgagaccggcgacttcaccgccagcttcctgctgagcggcagcctgatcctgagcggcagcttcatctacatcggcctgcccagagccctgcccagctgcggccccgccagcccccccgccacccccccccccgagaccggcgagctgctgcccgccccccaggccgtgctgctgagccccggcggccccggcagcaccctggacaccacctgctag

SEQ ID NO: 245831 - DNA, 1320 bp, Artificial Sequence
  derived and/or modified sequence
atgaccccccagcccgccggcccccccgacggcggctggggctgggtggtggccgccgccgccttcgccatcaacggcctgagctacggcctgctgagaagcctgggcctggccttccccgacctggccgagcacttcgacagaagcgcccaggacaccgcctggatcagcgccctggccctggccgtgcagcaggccgccagccccgtgggcagcgccctgagcaccagatggggcgccagacccgtggtgatggtgggcggcgtgctggccagcctgggcttcgtgttcagcgccttcgccagcgacctgctgcacctgtacctgggcctgggcctgctggccggcttcggctgggccctggtgttcgcccccgccctgggcaccctgagcagatacttcagcagaagaagagtgctggccgtgggcctggccctgaccggcaacggcgccagcagcctgctgctggcccccgccctgcagctgctgctggacaccttcggctggagaggcgccctgctgctgctgggcgccatcaccctgcacctgaccccctgcggcgccctgctgctgcccctggtgctgcccggcgacccccccgccccccccagaagccccctggccgccctgggcctgagcctgttcaccagaagagccttcagcatcttcgccctgggcaccgccctggtgggcggcggctacttcgtgccctacgtgcacctggccccccacgccctggacagaggcctgggcggctacggcgccgccctggtggtggccgtggccgccatgggcgacgccggcgccagactggtgtgcggctggctggccgaccagggctgggtgcccctgcccagactgctggccgtgttcggcgccctgaccggcctgggcctgtgggtggtgggcctgagctggggcggccccctgctggccgccgccgtggcctacggcctgagcgccggcagctacgcccccctggtgttcggcgtgctgcccggcctggtgggcgtgggcggcgtggtgcaggccaccggcctggtgatgatgctgatgagcctgggcggcctgctgggcccccccctgagcggcttcctgagagacgagaccggcgacttcaccgccagcttcctgctgagcggcagcctgatcctgagcggcagcttcatctacatcggcctgcccagagccctgcccagctgcggccccgccagcccccccgccacccccccccccgagaccggcgagctgctgcccgccccccaggccgtgctgctgagccccggcggccccggcagcaccctggacaccacctgctag

SEQ ID NO: 245832 - DNA, 1416 bp, Artificial Sequence
  derived and/or modified sequence
atgcccgcccctcagaggaagcatagaaggggaggattcagccatagatgtttccccacaccccagacggccatgacaccacagccggcagggccccctgacggtgggtggggatgggtggtcgcagctgccgcttttgcgatcaacggtctgtcctacggactactgagatccctggggcttgccttcccggacctggccgaacacttcgatcgcagcgcacaggatacggcttggatttcagccctggccctcgcagttcagcaggccgcctctcctgttggcagtgcgctatccaccaggtggggggcccgccccgtggttatggtgggcggagtgctagcgagtctcggattcgtcttctcagccttcgctagcgatcttctgcatctctacctgggcctggggctgttggccggttttggctgggccttggtattcgctcccgcgctggggactctgagccgatatttttctcgccgccgtgtcctggcggttggtctggcactcaccggtaatggcgcaagctccctgttgctcgcccccgccctgcagctgctgcttgacacctttgggtggcgaggcgccttactgcttctgggtgcgatcaccttacacttgactccatgcggggcactgctgctcccattggtgctgcctggggacccccccgcccctccaagaagccctctcgctgcgctgggtctgagcctattcacgcggcgcgctttcagtatattcgcacttggaaccgccctcgttggagggggttatttcgtgccgtacgtgcatctggctccccacgcgttggacagaggactgggcggatatggagccgccctcgttgtcgctgtggccgctatgggggacgccggcgccaggctggtctgtgggtggctcgcagaccagggttgggtgcccctgccaaggcttctggcggtgttcggggccttgactgggttgggcttgtgggtggttgggctggtccctgtggtgggtggcgaagagagttggggaggacctctcttagccgccgcggttgcctatggactgtctgctggttcctacgcccctctggtgttcggggtcttgccagggctagttggcgtcggcggagttgtccaggccaccggcttagttatgatgctcatgagccttggtggtctcctggggcctcccctgtcagggttcttgcgagatgaaaccggcgactttacagcctcatttctgctgtctgggtcactgatactctctggttcgtttatctacatcggcctgccacgggcacttcccagctgtggtcctgcttcccctcctgctactcctccaccagaaactggagaacttctccccgccccccaagctgttctgctgagcccggggggccctgggagtacgctcgacacaacatgctag

SEQ ID NO: 245833 - DNA, 1320 bp, Artificial Sequence
  derived and/or modified sequence
atgaccccgcaaccggctggtcccccagatgggggctggggctgggttgtggccgccgccgccttcgctatcaatgggctttcgtatgggctgttgaggtccctggggctcgctttccctgatctggccgagcactttgaccgttcagctcaagataccgcttggatttccgccctggcactcgctgtccagcaggccgccagtccagtcggaagcgctctgtctacccggtggggcgcccgccctgtggttatggtcggaggagtgctggcgagcctcggctttgtgtttagcgcttttgcttcagatctgctgcatctctatcttggtctgggcctactggccggatttggctgggccctagtgtttgccccagcactggggacactgtccagatacttctccagacgaagggtgctggccgtaggactcgctctgacaggcaatggagcttctagtttactgctcgcccccgctctccagttacttctcgatacttttggctggcgtggagccttattgctacttggagccataactttgcatctcaccccttgcggcgccttactgctgccattggtcctacctggagatccgcctgcacctccccggagtccattagctgcgttgggactgagcctgtttaccaggcgcgccttttccatattcgccctcggtacagcccttgtcgggggtgggtattttgtgccctatgtgcatttagcgccacatgcactcgaccggggactgggaggatacggggcggcactggtggtagccgtggccgcaatgggagacgcaggagcacggctcgtgtgcggttggctggctgatcaaggttgggtgcccctacctcgcctgctggcagtttttggagccctgactgggttggggttatgggtggtcggcctgtcttggggtggcccactcttggccgccgctgtggcttatgggctctcagctggatcgtacgccccattggttttcggggtattgccagggctggtgggtgtaggcggagttgtgcaggccaccgggcttgttatgatgctgatgagcctgggagggctgctgggccccccactatcaggctttctacgtgatgaaactggagactttaccgctagcttcctactctccggaagcctcatcttgagtggatcattcatttatattggcctccccagggcccttccgtcctgcgggcccgcctcgcctcccgccactcccccgcccgagactggcgaacttctccccgcaccacaggctgtgctccttagtcctggcggccccggctcaacactagataccacctgctag

SEQ ID NO: 245834 - DNA, 1416 bp, Artificial Sequence
  derived and/or modified sequence
atgcctgccccccagaggaagcacagaagaggaggcttcagccaccgctgcttccccaccccccagacagccatgaccccccagcctgctggccccccagatggcggctggggctgggtggtggccgccgccgcctttgccatcaatggcctgtcctatggcctgctgcggagcctgggcctggccttcccagacctggccgagcactttgacagaagtgcccaggacacagcctggatcagcgccctggccctggccgtgcagcaggccgccagccctgtgggcagcgccctgagcacccgctggggcgcccggcctgtggtgatggtgggcggcgtgctggccagcctgggctttgtgttcagcgcctttgccagtgacctgctgcacctgtacctgggcctgggcctgctggccggcttcggctgggccctggtgtttgccccagccctgggcaccctgagccgctacttcagcagaagaagagtgctggccgtgggcctggccctgactggaaatggagccagcagcctgctgctggccccagccctgcagctgctgctggacaccttcggctggaggggggccctgctgctgctgggcgccatcaccctgcacctgaccccctgtggggccctgctgctgcccctggtgctgcccggggaccccccagccccacccaggagccccctggccgccctgggcctgagcctcttcacccggcgggccttcagcatctttgccctgggcacagccctggtgggcggcggctactttgtgccctacgtgcacctggccccccacgccctggaccggggcctgggcggctatggagctgccctggtggtggccgtggccgccatgggagatgctggggcccggctggtgtgtggctggctggccgaccagggctgggtgcccctgccccggctgctggccgtgtttggagccctgaccggcctgggcctgtgggtggtgggcctggtgcctgtggtgggcggggaggagagctggggcggccccctgctggccgctgctgtggcctacggcctgtctgctggcagctatgcccccctggtgtttggagtgctgcccggcctggtgggcgtgggcggcgtggtgcaggccaccggcctggtgatgatgctgatgagcctgggcggcctgctgggcccccccctgagcggcttcctgagagatgagaccggggacttcaccgccagcttcctgctgagcggcagcctcatcctgagcggcagcttcatctacatcggcctgccccgggccctgcccagctgtggccctgccagccccccagccaccccacctcctgagaccggggagctgctgcctgccccccaggccgtgctgctgagccctgggggccctggcagcaccctggacaccacctgctag

SEQ ID NO: 245835 - DNA, 1320 bp, Artificial Sequence
  derived and/or modified sequence
atgaccccccagcctgctggccccccagatggcggctggggctgggtggtggccgccgccgcctttgccatcaatggcctgtcctatggcctgctgcggagcctgggcctggccttcccagacctggccgagcactttgacagaagtgcccaggacacagcctggatcagcgccctggccctggccgtgcagcaggccgccagccctgtgggcagcgccctgagcacccgctggggcgcccggcctgtggtgatggtgggcggcgtgctggccagcctgggctttgtgttcagcgcctttgccagtgacctgctgcacctgtacctgggcctgggcctgctggccggcttcggctgggccctggtgtttgccccagccctgggcaccctgagccgctacttcagcagaagaagagtgctggccgtgggcctggccctgactggaaatggagccagcagcctgctgctggccccagccctgcagctgctgctggacaccttcggctggaggggggccctgctgctgctgggcgccatcaccctgcacctgaccccctgtggggccctgctgctgcccctggtgctgcccggggaccccccagccccacccaggagccccctggccgccctgggcctgagcctcttcacccggcgggccttcagcatctttgccctgggcacagccctggtgggcggcggctactttgtgccctacgtgcacctggccccccacgccctggaccggggcctgggcggctatggagctgccctggtggtggccgtggccgccatgggagatgctggggcccggctggtgtgtggctggctggccgaccagggctgggtgcccctgccccggctgctggccgtgtttggagccctgaccggcctgggcctgtgggtggtgggcctgtcctggggcggccccctgctggccgctgctgtggcctacggcctgtctgctggcagctatgcccccctggtgtttggagtgctgcccggcctggtgggcgtgggcggcgtggtgcaggccaccggcctggtgatgatgctgatgagcctgggcggcctgctgggcccccccctgagcggcttcctgagagatgagaccggggacttcaccgccagcttcctgctgagcggcagcctcatcctgagcggcagcttcatctacatcggcctgccccgggccctgcccagctgtggccctgccagccccccagccaccccacctcctgagaccggggagctgctgcctgccccccaggccgtgctgctgagccctgggggccctggcagcaccctggacaccacctgctag

SEQ ID NO: 245836 - DNA, 1416 bp, Artificial Sequence
  derived and/or modified sequence
atgcccgccccccagcggaagcaccggcggggcggcttcagccacagatgctttcctacccctcaaactgctatgaccccgcaaccagctgggcctccagatggggggtggggttgggtggttgccgcagccgccttcgccatcaacggactgagctacggcctgctgaggagcctgggacttgccttccctgacctggcggaacattttgacaggagcgcacaagataccgcctggatctctgctctggctctggctgtgcagcaggctgccagtcctgtggggagcgcattatccacgagatggggggccagacctgtggtgatggttgggggtgtactggcctccctggggttcgtattctcggccttcgcttcagaccttctgcatctgtacctggggttggggctcctggctgggttcggatgggctctagtgtttgccccagctctggggaccctgtcgaggtatttttccaggaggagagttctcgctgttgggctggcattgacaggaaatggggctagtagcctactactagcccccgccctacagctgctgttagatacgttcggatggcggggagcactgttgctgctcggcgcaatcaccctgcaccttacaccttgcggcgccttgctgttgcctttagtgcttcccggggacccgccagctcctccacgcagcccactggctgcgctggggttgtctctgtttactaggagagcttttagcatattcgctctgggcaccgccctcgtcggcggtggatattttgtcccctacgtgcacctggctccccacgctcttgataggggccttggggggtatggcgctgccctagtagttgctgtagccgccatgggagacgcgggagcccggctcgtgtgcggctggcttgccgaccagggatgggttccactcccaagactgctcgccgtgttcggggcactgaccggactgggcctctgggtggtcggactggtgcctgtagttggcggtgaggagtcctggggcggccccctgctcgcggcagctgtcgcctatggacttagcgctggtagttacgccccgcttgtgtttggtgttctaccagggctcgtcggtgtgggtggcgtggtccaggccaccggactcgttatgatgctgatgagtctgggcggacttttgggccccccattatcagggttcctgagggatgagaccggtgactttacagccagcttcctattgtccggttcactcatcctgagcggaagctttatttatatcggtctgccaagagcactgccatcttgtggccccgcgtcaccccctgccacacctcctccagagactggggagttgctgcccgccccccaggcagtgctgctatctcccggaggccctggctcgacgttggacaccacctgttag

SEQ ID NO: 245837 - DNA, 1320 bp, Artificial Sequence
  derived and/or modified sequence
atgaccccccagcccgccggcccccccgacggcggctggggctgggtggtggccgctgccgcatttgcaattaacggcttatcttatggactgctgcggtcactgggcttggcttttccagacctcgccgaacactttgaccggagcgctcaggatacagcttggatttccgcgctcgccctagctgtgcagcaagctgcgtccccggtgggatctgcccttagcactcgctggggagctcgccccgtggtcatggtggggggggtgctcgcatcactgggttttgtattctcagcctttgccagcgatttgttacacttgtacctcgggttagggcttcttgccggatttggttgggccctggtctttgcccctgccctgggcacactaagcagatactttagcagacggagagtactggcggtcgggttggcgctgactggcaatggcgcttcatcactactcctcgccccagcactacaactgctgttggatacttttggatggcggggggcattgctcttattaggcgccatcaccttacacctgacaccctgtggcgccctgctgttacccttggtcctgcccggagatccccctgcaccccctagaagccctctggccgcactgggactgtctctgtttactcggcgggcctttagcatcttcgccctgggtaccgcactagtgggcggaggctactttgtaccttatgttcatcttgccccacacgccttggatagaggattaggtgggtatggagcagcgcttgttgtcgccgtagccgccatgggcgatgccggtgcacgtcttgtgtgtgggtggttagcggaccagggctgggtaccccttcccaggctactggctgtctttggagctctcacggggctggggctgtgggtagtgggtctttcttggggtggccctctcttagcggccgccgtggcctatggcctgagtgccggatcttacgctcctcttgtctttggcgtattgccaggactagtgggagttgggggagtcgtgcaagcaacaggcttggttatgatgctcatgagtctgggtggactgctgggcccccctctttcaggatttttgcgggacgaaacgggcgacttcactgctagctttctgttatccggctcactcatcttaagcggcagcttcatctacattggactacctcgggcactacccagttgcggccctgcttcacctcccgccacacctcctcccgagaccggggagctcctgcctgccccccaggcagtgttgctttcgccaggcggtcctgggtcgactcttgatacaacatgctag

SEQ ID NO: 245838 - DNA, 1416 bp, Artificial Sequence
  derived and/or modified sequence
atgccggcacctcaaagaaagcatcgacgtgggggatttagccaccgctgctttcccacaccacagaccgctatgaccccgcagcctgccggaccacccgacggcggttggggttgggtggtggctgccgcagcatttgccatcaatggactgagctacgggcttctgaggtccttaggactggctttccctgatttggcagagcacttcgatagaagcgcccaagatacagcctggatttccgcacttgctctcgccgtgcagcaggctgcaagccctgtgggaagcgcattgtcaacccgctggggcgctaggcccgtggtcatggtgggaggcgttctggcttccctgggcttcgtgttctcagcgttcgcaagtgatttgctacacttatacctcgggcttggtttgctggctggcttcggctgggcacttgtgtttgcccctgccctgggcaccctgtccagatacttctctcggaggcgtgtccttgcggtcggactggcactcaccggcaacggggcaagctcccttctgcttgccccagccctgcagctactgcttgatactttcggctggcgcggagctctgctgctgctaggcgcaatcacgctgcacctgacgccctgcggcgctctgctcctccctttggtgcttcctggagacccacccgctcctccgcgaagccctctggccgctctcggactttccctttttaccagaagagcattctcaatatttgcacttggaacagcactagttgggggaggctacttcgtgccctacgtgcacctcgcccctcacgcactggacagaggactcggagggtatggggcagccctggttgtggctgttgccgctatgggagatgccggtgccaggctcgtctgtggatggctggccgatcagggctgggtgcctctcccacgcctcctggcagtcttcggcgctctcactggcctggggctgtgggttgtaggcctcgttccagtcgttggcggagaggagtcatggggcggacctttgctggcagccgcagttgcctacgggcttagcgccggatcatatgcacctctggtgttcggcgtgctgccaggccttgtcggagtcgggggtgtcgtgcaggcaacagggctggtgatgatgctgatgtccctgggaggtcttctcggccctcccctgtctggcttcttgcgcgatgaaactggcgacttcaccgcctcatttctcctgagcgggtcgctcatcctgtcggggtcttttatttacattggcctcccacgtgcgcttccttcatgcggcccagcttcaccgcctgcaacaccaccgccagagactggtgagttgctcccggcaccacaggccgtccttctgtcaccaggagggccaggatctacacttgataccacttgctag

SEQ ID NO: 245839 - DNA, 1320 bp, Artificial Sequence
  derived and/or modified sequence
atgactcctcagccagccggaccacctgatggcggatggggttgggtcgtagccgctgcggctttcgcgataaatggtctatcctacggattactgagatccctcggactggcattcccagatcttgccgaacattttgatcggtccgcccaggacacagcatggatttcggcgctcgcactcgctgtgcagcaagccgcatcacctgtggggagtgccctgagcactagatggggtgcacgccctgtggtgatggttggcggagtgcttgcctctctggggtttgtgtttagcgcttttgcaagcgacttactccatttatacctaggactcggcctgctcgccggatttgggtgggcactggtgtttgcaccagctctggggactctgtcgagatattttagtcgtcgccgtgtgttagccgtcggcctggcactcaccggcaatggcgcttcatccttgctgttggccccagctctgcaactgctcctcgataccttcggctggcgcggagcactgctgttgttaggagctatcacgcttcatctgaccccttgtggcgctctcctgctgcccctggtgttaccaggggatcccccagccccaccaaggagtccgttagccgctctgggactatccctgttcacccgccgtgctttttcgatttttgccctgggcacagctcttgtcggcggaggctactttgtcccctatgtgcatctcgcaccacacgccttggaccgcggtctgggtggatacggagccgctctggtcgttgctgtggccgctatgggagacgccggagcccgactcgtttgcggttggttggccgaccagggctgggtgcccctgccaagactgctggccgtgtttggtgcgcttacgggcttagggttgtgggtcgttggactttcctgggggggaccgttgttggccgcagcggtagcatatgggctgtccgcagggtcatacgcccctctcgtgttcggagtgttgccagggctggtcggcgttggtggggttgtgcaggcaaccggactggtgatgatgctgatgagcctcgggggtctcctcgggcctccactctcagggttcctgcgagatgaaactggcgattttaccgccagcttcctgctgagcggatccctgattctttctggctccttcatctacatcggcctgcccagagcccttccaagttgtggtccggcttctcctcccgctacaccccctccagagacaggagaactgctgccggctcctcaggctgtgctcctgtctccaggcggaccaggcagcacacttgacacgacgtgttag

SEQ ID NO: 245840 - DNA, 1803 bp, Artificial Sequence
  derived and/or modified sequence
atctctgtttaccgagagagcccgtccaagttgggctccatcgctgccctcgctccccttcggggcccccgcccgcctgggaagcagagagaaagccgggcccagcccttcctcacccttcccctccccgcaccgcccggagaggtcgggtaagggggaaggagtgtgcgtgggacggggaacctcgggcctggggatctggctgtccccgtccccgtacctcgcgcggacccgggagttccagccctaggccaggctccggctccctccgccccgcgccatcgcgctcggagtgacgggcccaccccgggcgagcagccagaggctggatctcagggatgccagctccccagcggaagcacaggcgtggaggcttctctcacagatgtttccccaccccgcagacggcgatgaccccccagcccgccggacccccggatgggggctggggctgggtggtggcggccgcagccttcgcgataaacgggctgtcctacgggctgctgcgctcgctgggccttgccttccctgaccttgccgagcactttgaccgaagcgcccaggacactgcgtggatcagcgccctggccctggccgtgcagcaggcagccagccccgtgggcagcgccctgagcacgcgctggggggcccgccccgtggtgatggttgggggcgtcctcgcctcgctgggcttcgtcttctcggctttcgccagcgatctgctgcatctctacctcggcctgggcctcctcgctggctttggttgggccctggtgttcgcccccgccctaggcaccctctcgcgttacttctcccgccgtcgagtcttggcggtggggctggcgctcaccggcaacggggcctcctcgctgctcctggcgcccgccttgcagcttcttctcgatactttcggctggcggggcgctctgctcctcctcggcgcgatcaccctccacctcaccccctgtggcgccctgctgctacccctggtccttcctggagaccccccagccccaccgcgtagtcccctagctgccctcggcctgagtctgttcacacgccgggccttctcaatctttgctctaggcacagccctggttgggggcgggtacttcgttccttacgtgcacttggctccccacgctttagaccggggcctggggggatacggagcagcgctggtggtggccgtggctgcgatgggggatgcgggcgcccggctggtctgcgggtggctggcagaccaaggctgggtgcccctcccgcggctgctggccgtattcggggctctgactgggctggggctgtgggtggtggggctggtgcccgtggtgggcggcgaagagagctgggggggtcccctgctggccgcggctgtggcctatgggctgagcgcggggagttacgccccgctggttttcggtgtactccccgggctggtgggcgtcggaggtgtggtgcaggccacagggctggtgatgatgctgatgagcctcggggggctcctgggccctcccctgtcaggcttcctaagggatgagacaggagacttcaccgcctctttcctcctgtctggttctttgatcctctccggcagcttcatctacatagggttgcccagggcgctgccctcctgtggtccagcctcccctccagccacgcctcccccagagacgggggagctgcttcccgctccccaggcagtcttgctgtccccaggaggccctggctccactctggacaccacttgttgattattttcttgtttgagcccctcccccaataaagaatttttatcgggtt

SEQ ID NO: 245841 - DNA, 1779 bp, Artificial Sequence
  derived and/or modified sequence
atctctgtttaccgagagagcccgtccaagttgggctccatcgctgccctcgctccccttcggggcccccgcccgcctgggaagcagagagaaagccgggcccagcccttcctcacccttcccctccccgcaccgcccggagaggtcgggtaagggggaaggagtgtgcgtgggacggggaacctcgggcctggggatctggctgtccccgtccccgtacctcgcgcggacccgggagttccagccctaggccaggctccggctccctccgccccgcgccatcgcgctcggagtgacgggcccaccccgggcgagcagccagaggctggatctcagggatgccagctccccagcggaagcacaggcgtggaggcttctctcacagatgtttccccaccccgcagacggcgatgaccccccagcccgccggacccccggatgggggctggggctgggtggtggcggccgcagccttcgcgataaacgggctgtcctacgggctgctgcgctcgctgggccttgccttccctgaccttgccgagcactttgaccgaagcgcccaggacactgcgtggatcagcgccctggccctggccgtgcagcaggcagccagccccgtgggcagcgccctgagcacgcgctggggggcccgccccgtggtgatggttgggggcgtcctcgcctcgctgggcttcgtcttctcggctttcgccagcgatctgctgcatctctacctcggcctgggcctcctcgctggctttggttgggccctggtgttcgcccccgccctaggcaccctctcgcgttacttctcccgccgtcgagtcttggcggtggggctggcgctcaccggcaacggggcctcctcgctgctcctggcgcccgccttgcagcttcttctcgatactttcggctggcggggcgctctgctcctcctcggcgcgatcaccctccacctcaccccctgtggcgccctgctgctacccctggtccttcctggagaccccccagccccaccgcgtagtcccctagctgccctcggcctgagtctgttcacacgccgggccttctcaatctttgctctaggcacagccctggttgggggcgggtacttcgttccttacgtgcacttggctccccacgctttagaccggggcctggggggatacggagcagcgctggtggtggccgtggctgcgatgggggatgcgggcgcccggctggtctgcgggtggctggcagaccaaggctgggtgcccctcccgcggctgctggccgtattcggggctctgactgggctggggctgtgggtggtggggctgagctgggggggtcccctgctggccgcggctgtggcctatgggctgagcgcggggagttacgccccgctggttttcggtgtactccccgggctggtgggcgtcggaggtgtggtgcaggccacagggctggtgatgatgctgatgagcctcggggggctcctgggccctcccctgtcaggcttcctaagggatgagacaggagacttcaccgcctctttcctcctgtctggttctttgatcctctccggcagcttcatctacatagggttgcccagggcgctgccctcctgtggtccagcctcccctccagccacgcctcccccagagacgggggagctgcttcccgctccccaggcagtcttgctgtccccaggaggccctggctccactctggacaccacttgttgattattttcttgtttgagcccctcccccaataaagaatttttatcgggtt

SEQ ID NO: 245842 - protein, 501 aa, Artificial Sequence
  derived and/or modified sequence
MPAAMLPYACVLVLLGAHTAPAAGEAGGSCLRWEPHCQQPLPDRVPSTAILPPRLNGPWISTGCEVRPGPEFLTRAYTFYPSRLFRAHQFYYEDPFCGEPAHSLLVKGKVRLRRASWVTRGATEADYHLHKVGIVFHSRRALVDVTGRLNQTRAGRDCARRLPPARAWLPGALYELRSARAQGDCLEALGLTMHELSLVRVQRRLQPQPRASPRLVEELYLGDIHTDPAERRHYRPTGYQRPLQSALHHVQPCPACGLIARSDVHHPPVLPPPLALPLHLGGWWVSSGCEVRPAVLFLTRLFTFHGHSRSWEGYYHHFSDPACRQPTFTVYAAGRYTRGTPSTRVRGGTELVFEVTRAHVTPMDQVTTAMLNFSEPSSCGGAGAWSMGTERDVTATNGCLPLGIRLPHVEYELFKMEQDPLGQSLLFIGQRPTDGSSPDTPEKRPTSYQAPLVLCHGEAPDFSRPPQHRPSLQKHPSTGGLHIAPFPLLPLVLGLAFLHWL

SEQ ID NO: 245843 - DNA, 1506 bp, Artificial Sequence
  derived and/or modified sequence
atgcccgccgccatgctgccctacgcctgcgtgctggtgctgctgggcgcccacaccgcccccgccgccggcgaggccggcggcagctgcctgagatgggagccccactgccagcagcccctgcccgacagagtgcccagcaccgccatcctgccccccagactgaacggcccctggatcagcaccggctgcgaggtgagacccggccccgagttcctgaccagagcctacaccttctaccccagcagactgttcagagcccaccagttctactacgaggaccccttctgcggcgagcccgcccacagcctgctggtgaagggcaaggtgagactgagaagagccagctgggtgaccagaggcgccaccgaggccgactaccacctgcacaaggtgggcatcgtgttccacagcagaagagccctggtggacgtgaccggcagactgaaccagaccagagccggcagagactgcgccagaagactgccccccgccagagcctggctgcccggcgccctgtacgagctgagaagcgccagagcccagggcgactgcctggaggccctgggcctgaccatgcacgagctgagcctggtgagagtgcagagaagactgcagccccagcccagagccagccccagactggtggaggagctgtacctgggcgacatccacaccgaccccgccgagagaagacactacagacccaccggctaccagagacccctgcagagcgccctgcaccacgtgcagccctgccccgcctgcggcctgatcgccagaagcgacgtgcaccacccccccgtgctgcccccccccctggccctgcccctgcacctgggcggctggtgggtgagcagcggctgcgaggtgagacccgccgtgctgttcctgaccagactgttcaccttccacggccacagcagaagctgggagggctactaccaccacttcagcgaccccgcctgcagacagcccaccttcaccgtgtacgccgccggcagatacaccagaggcacccccagcaccagagtgagaggcggcaccgagctggtgttcgaggtgaccagagcccacgtgacccccatggaccaggtgaccaccgccatgctgaacttcagcgagcccagcagctgcggcggcgccggcgcctggagcatgggcaccgagagagacgtgaccgccaccaacggctgcctgcccctgggcatcagactgccccacgtggagtacgagctgttcaagatggagcaggaccccctgggccagagcctgctgttcatcggccagagacccaccgacggcagcagccccgacacccccgagaagagacccaccagctaccaggcccccctggtgctgtgccacggcgaggcccccgacttcagcagacccccccagcacagacccagcctgcagaagcaccccagcaccggcggcctgcacatcgcccccttccccctgctgcccctggtgctgggcctggccttcctgcactggctgtag

SEQ ID NO: 245844 - DNA, 1506 bp, Artificial Sequence
  derived and/or modified sequence
atgccggcagccatgttgccctatgcctgcgtgctggtccttctcggggcccatactgctccggccgcaggggaagctgggggcagttgcctgcgttgggagcctcactgtcagcagcctttgccagatagagttccttccaccgccatcctgcccccgaggctcaacggcccatggattagtacaggctgcgaggtaaggccaggccctgagttcctgacccgcgcctatacattctacccgagccggctgtttagggcccatcaattttactacgaagacccattctgtggtgaacctgcccactccctgctggtgaaaggtaaagtgcgactgcgacgcgctagctgggtgacgcggggggcaaccgaagccgactaccatctccataaagtggggatagttttccatagtaggagggctttagtggatgtaacgggaagacttaaccaaactcgagccggcagagattgtgcccgtcgtctcccacctgctagagcctggctcccaggtgccttatacgaactcaggtctgcccgggcccagggagattgcctggaggcactgggtctgaccatgcacgagctatccttagttagggtgcagaggaggctgcagccccaaccccgggcgtctccaagactcgttgaagagttgtacctgggtgatattcacaccgaccccgccgagcggaggcactataggccgaccgggtaccagagaccactgcagagtgctctgcatcacgttcagccttgccccgcctgcggtctgatagcccgctccgatgtgcaccacccacccgtgctacctcctccactggccctgcccctgcatctcggaggatggtgggtgtcctccggctgcgaggtccgccctgccgtgcttttcttgacgcgtctgttcaccttccacggccactcacgatcttgggaaggctactatcatcacttctccgatccagcatgtcgccagcccaccttcactgtgtatgcagccggcagatatacacggggcacaccctcaactcgggtgcggggcggtaccgaactcgtattcgaggtcactcgggcccatgtgaccccaatggaccaagttacaaccgccatgctcaatttctctgaaccttcaagctgcggaggcgccggtgcatggagcatgggcaccgagcgtgatgttactgccactaacggctgcctgccccttggaatccgactgccccatgtggagtatgagctttttaaaatggagcaagaccccttgggtcaatcgctgttattcatcggccagcgcccgactgatggttcctcgccagatacacctgaaaagcgtccaacctcatatcaggccccgctcgtcctgtgtcacggagaggccccagatttttcccgtccgcctcagcaccggccaagtctgcaaaaacacccctccaccgggggactgcatatcgcaccatttccactcctacctctggtgctgggtctggcctttctgcactggctgtag

SEQ ID NO: 245845 - DNA, 3426 bp, Artificial Sequence
  derived and/or modified sequence
ccacctcttctggcaagttggacctatgagtgcgcagctccgcttacaactatcaacagccgggaaggctgagcgcgtgtgagcgccgaggggggcgcaggaccctcgcaacttcttcgcaggactccagcctggccgccggcgcccgcagccgtccgagagccctgcgcccgcgcctccccttgcgcaccgtggcagcgcccggcgggcggtcctgccagccccgacgggatgcccgcagccatgctcccctacgcttgcgtcctggtgcttttgggagcccacactgcaccggcggctggggaggccgggggcagctgcctgcgctgggaaccccactgccagcagcccttgccagatagagtgcccagcactgcgatcctgcctccacgccttaatggaccttggatctccacaggctgcgaggtgcgcccaggaccggagttcctgacccgcgcctacaccttctaccccagccggctctttcgagcccaccagttctactacgaggaccccttctgcggggaacctgcccactcgctgctcgtcaagggcaaagtccgcctgcgccgggcctcctgggtcacccggggagccaccgaggccgactaccacctgcacaaggtgggcatcgtcttccacagccgccgggccctggtcgacgtcaccgggcgcctcaaccagacccgcgccggccgggactgcgcgcggcggctgcctccggcccgggcctggctgcctggggcgctgtacgagctgcggagcgcccgggctcagggggactgcctggaggcgctgggcctcaccatgcacgagctcagcctggtccgcgtgcagcgccgcctgcagccgcagccccgggcgtcgccccggctggtggaggagctgtacctgggggacatccacaccgacccggcggagaggcggcactaccggcccacgggctaccagcgcccgctgcagagcgcactgcaccacgtgcagccgtgcccagcctgtggcctcattgcccgctccgatgtgcaccacccgcccgtgctgccgccccctctggccctgcccctgcacctgggcggctggtgggtcagctcggggtgcgaggtgcgcccagcagtcctgttcctcacccggctcttcactttccacgggcacagccgctcctgggaagggtattaccaccacttctcagacccagcctgccggcagcccaccttcaccgtgtatgccgccggccgctacaccaggggcacgccatccaccagggtccgcggcggcaccgagctggtgtttgaggtcacacgggcccatgtgacccccatggaccaggtcaccacggccatgctcaacttctctgagccaagcagctgtgggggtgcgggggcctggtccatgggcactgagcgggatgtcacagccaccaacggctgcctaccgctgggcatccggctcccgcatgtggagtacgagcttttcaagatggaacaagaccccctcgggcaaagcctgctcttcatcggacaaaggcccaccgatggctcaagtcccgataccccagagaaacgtcccacctcctaccaagcacccctggtgctctgtcatggggaggcccccgacttctccaggccaccgcagcacaggccatcgctgcagaagcaccccagcacagggggtcttcacatagcccccttcccacttctgcccctagttctagggctggccttcctccactggctatgacattggacttgacatcaggatggcggctctggacacccattcaacccttcagactccctcctggcagctgtagggaaggaaccattctcctctgctctgtcatggatggatgcacagccccactgcttccaaactctgcctgtgtcccatgtggctcaggacatgagcttaacccctgcaaagcctataccacatcccacagcccgggtccccagtcaagcacttggatgcggcagtgatgttcatcgctacgtgagtttctaaagatcactcccaatttttctactttcctcatccttggcagctcgccaacaggtgcagtcagggggccacacggaacacccccatcccatgttccccccagttcttcccatcctgacccttgggattccaagatgggagcaagaggagatcctgaggctctgcctagggacgaggcctacagttctgccatgtctgtaggttgttgtttaaagattattaattcgaatttagcaatacgatctctaagtggtgccatgaattaaagatgccacttcgggctttcagtgcttctcagcttttgggcaaagggcttgtgtcttcaggggcagctcagctttcctgagtcctgactgctggcattcgtctgcatttgcctgtgcttctgcgagtcggacctcaagctgccaacactgcatgtggataaatccagttttcccgggccagcatgcaaaatgaagaggactccatctaagctgagaagcatggcctccccagagcagcctgcggcctccaagccttcctggcccaggcaaatgccagtgtgcaccaggctggctgctgggggcaggtctttggaggggagcagcatttccagccttctgaacatagttaatagtaatgacagccgtaacactaacgcgctctgcaattcgccctgcccagccatcctcggttgccaagattgcctgtgcctgcctgacaaaggaagagaatctccgaatgtgtatctttgggcccaccctagggagaggtcggggtcaccaggctacatggcgacatctaggcagctccgccttgcccagcctccttgccataatcctaatatattggtgtcctctgctcagaggggactgtcatcatggtgggaacaggctgtgcctccccagggactctgcccatgttcccagggcctcatctgtacactgtgaaattaactggcatcctggtgggcccaagggttttcaggactgggggccaatgactcaccccctccttcctcctcctgatccctatctctagctcttatcacagattttgaacaattgtctgtgaggttaatgatggtttcagagggaagcccttttcctccctgagactgtgtggggttcagtcagcctgctgaaattgcttccacttattacccatccttcctcttaaaaaaaaaaaaagcccaccaagttagtattctctgtagctctcagacagctacaagtgttcctggcatatttaccaaagtacaagaaatcattacattatttacggtctcagactacatcagggttgggggagctcctggtggggatggcagtgggtgtcgatgatatgtccacggctgagcaggtcttgtatccgaagcttgaagtaaccatgccaccatttatcatcaaatttgaaccttttaataaaattaaacagcctgaaaaa

SEQ ID NO: 245846 - DNA, 1506 bp, Artificial Sequence
  derived and/or modified sequence
atgcctgctgccatgctgccctatgcctgtgtgctggtgctgctgggcgcccacacagccccagctgctggggaggccggcggcagctgcctgcgctgggagccccactgccagcagcccctgcctgacagagtgcccagcacagccatcctgcccccccggctgaatggcccctggatcagcacaggctgtgaggtgcggcccggccctgagttcctgacccgggcctacaccttctaccccagccgcctcttccgggcccaccagttctactatgaggaccccttctgtggggagcccgcccacagcctgctggtgaagggcaaggtgcggctgcggcgggcctcctgggtgaccaggggggccacagaagctgactaccacctgcacaaggtgggcatcgtgttccacagcagaagagccctggtggatgtgacaggccgcctgaaccagacccgggccggccgggactgtgcccggcggctgcccccagcccgggcctggctgcccggggccctgtatgagctgcggagcgcccgggcccagggcgactgcctggaggccctgggcctgaccatgcatgagctgagcctggtgcgggtgcagaggcggctgcagccccagccccgggccagcccccggctggtggaggagctgtacctgggggacatccacacagatcctgctgagaggaggcactaccggcccaccggctaccagaggcccctgcagagcgccctgcaccacgtgcagccctgcccagcctgtggcctgattgcccggagtgatgtgcaccacccccctgtgctgcccccacccctggccctgcccctgcacctgggcggctggtgggtgagcagcggctgtgaggtgcggcctgctgtgctcttcctgaccaggctcttcaccttccacggccacagccgctcctgggagggctactaccaccacttcagtgaccctgcctgccggcagcccaccttcaccgtgtatgctgctggccgctacacccggggcacccccagcaccagggtgcggggcggcacagagctggtgtttgaggtgacccgggcccacgtgacccccatggaccaggtgaccacagccatgctgaacttcagcgagcccagcagctgtggcggggccggggcctggagcatgggcacagaaagagatgtgacagccaccaacggctgcctgcccctgggcatccggctgccccacgtggagtatgagctgttcaagatggagcaggaccccctgggccagagcctgctcttcatcggccagaggcccacagatggcagcagcccagacaccccagagaagaggcccaccagctaccaggcccccctggtgctgtgccacggggaggccccagacttcagcaggcctccccagcaccggcccagcctgcagaagcaccccagcactggaggcctgcacatcgcccccttccccctgctgcccctggtgctgggcctggccttcctgcactggctgtag

SEQ ID NO: 245847 - DNA, 1506 bp, Artificial Sequence
  derived and/or modified sequence
atgcccgccgccatgctgccctacgcctgcgtgctggtgctgctgggggcccatacagcccccgccgcgggggaagccggcgggtcttgcctgagatgggagccgcactgtcagcagcctcttcccgatcgggtgccctcgactgctattctgcccccccgtttgaacgggccctggatttcaactgggtgtgaagttaggccagggcccgaatttctgactcgcgcatacaccttctacccctcccgcctcttccgcgcccaccagttttactacgaagaccctttctgtggtgaacctgcgcatagccttcttgtgaagggtaaggttcgtctgaggcgggcatcttgggtcacacggggcgcgacagaggccgactaccacttgcacaaagtcggaatcgtgtttcactcccggcgggccctcgtagatgtgactggacgcctgaaccagacacgggcgggccgcgattgcgctaggaggcttccacctgcgagagcatggttgcctggcgccctgtatgaactacggtctgcgagggcacagggcgactgtctggaagctctgggcctcactatgcatgagttatccttagtcagagtgcagcgcagactgcaaccgcagcccagagcgtctcccagattggtggaagagctgtacctgggcgatattcacacagaccccgctgagcgtcgtcattataggccaactggataccagagacctctccagtctgctctgcaccacgtgcagccttgccccgcttgtggcttgatcgctcgcagcgacgtacatcacccaccagtgttgccacctcccctagcgctgccgcttcaccttggcggatggtgggtctcaagtggatgtgaagttagaccagctgtgctgtttctgaccagactctttacgttccacggacatagcagaagctgggagggatattatcatcacttcagcgacccggcctgtcgccagcccacatttacagtgtacgcggcaggccgctatacccggggtacgccctcaacccgcgtccgcggtggtactgagctggtgtttgaggttaccagagcacacgttacccctatggatcaagttactacggcaatgctgaatttcagcgaaccttcgtcttgtggcggagcaggtgcttggagcatgggcaccgagcgagacgtcaccgcaaccaacggatgcttacctctgggcattcgactcccccatgtggagtacgagctctttaagatggaacaagatcctctgggccagtcgctcctcttcattggtcaacgcccgacagatggaagttccccagacacgcccgagaagaggcctacatcttaccaggctccacttgtcctctgccatggagaagctccagatttttctcgccccccccaacatcgaccatctctccagaagcacccctcaaccggaggcctgcacatcgctccatttcccctactgccactggtgctcggcttggcctttctgcactggctttag

SEQ ID NO: 245848 - DNA, 1506 bp, Artificial Sequence
  derived and/or modified sequence
atgccagctgctatgctaccatacgcatgcgtccttgtcttgctgggtgcacacaccgccccagctgccggtgaggctggtgggtcttgcttgaggtgggagccacactgccagcagcctctcccagatcgcgtcccttcgaccgctatcctccccccacgcctgaacggtccctggatctcaaccgggtgcgaagttcgtcccggaccagagtttctgacaagagcctatacgttttatccaagtcgcctgtttcgggctcaccaattctactacgaagaccctttttgtggagagccagctcactctcttctggttaaaggcaaagtccggttgcgaagagcttcttgggtgacccggggtgctaccgaagctgactatcacctgcacaaggtaggcatcgtgttccactctcgacgcgcacttgttgatgtgaccggtcgactgaatcagaccagagcaggtagggattgcgctcggcgtttgccccctgctagagcttggcttcccggtgctctttatgaacttagatcagcaagagctcagggtgactgtttggaggccctgggcctgacaatgcacgagctgagcctcgtccgtgttcagaggcgacttcagccgcagcctcgggcaagtccacgcctggtggaagagctttatttgggcgatatacataccgatcctgccgaaaggagacactatagacccacggggtatcaacgaccactccagtcagccctccaccacgtgcagccctgccctgcctgcgggctgattgccagaagtgatgttcaccaccccccagtgcttccccctccgctggccctccctcttcacttgggaggttggtgggtaagcagcgggtgcgaggtgcggcctgcggttttgttcctcacccgcctctttacgttccacggccactcacggagttgggaagggtattatcaccacttctctgacccagcatgtcgccagccaacctttactgtgtatgcggctggacgctatacaaggggcacacccagcactcgcgttcgaggcggtaccgagctcgtgttcgaagtcactagggctcacgtcacccctatggatcaggtgactacagctatgctgaatttcagtgaacccagtagctgcgggggagccggtgcctggtctatgggcaccgagagagatgtgacagccacaaatggctgcctacctctaggcattcgcctgcctcacgtggaatatgagctgtttaagatggaacaagacccactcggtcagtcgctcctttttattgggcagcgtccgaccgacgggtccagtcccgacacacctgaaaaacggccaacctcgtatcaggccccacttgtgctctgtcacggggaggctccagacttcagccgtcccccacagcacaggccatcactgcagaagcatccaagcactggcggactgcacattgctccatttccactcctcccacttgtgctcgggttggcattcctgcactggctgtag

SEQ ID NO: 245849 - protein, 1497 aa, Artificial Sequence
  derived and/or modified sequence
MPRCIAHFCEKPPSVSYSILESVSKAKFAAGSVVSFKCMEGFVLNTSAKIECMRGGQWNPSPMSIQCIPVRCGEPPSIMNGYASGSNYSFGAMVAYSCNKGFYIKGEKKSTCEATGQWSSPIPTCHPVSCGEPPKVENGFLEHTTGRIFESEVRYQCNPGYKSVGSPVFVCQANRHWHSESPLMCVPLDCGKPPPIQNGFMKGENFEVGSKVQFFCNEGYELVGDSSWTCQKSGKWNKKSNPKCMPAKCPEPPLLENQLVLKELTTEVGVVTFSCKEGHVLQGPSVLKCLPSQQWNDSFPVCKIVLCTPPPLISFGVPIPSSALHFGSTVKYSCVGGFFLRGNSTTLCQPDGTWSSPLPECVPVECPQPEEIPNGIIDVQGLAYLSTALYTCKPGFELVGNTTTLCGENGHWLGGKPTCKAIECLKPKEILNGKFSYTDLHYGQTVTYSCNRGFRLEGPSALTCLETGDWDVDAPSCNAIHCDSPQPIENGFVEGADYSYGAIIIYSCFPGFQVAGHAMQTCEESGWSSSIPTCMPIDCGLPPHIDFGDCTKLKDDQGYFEQEDDMMEVPYVTPHPPYHLGAVAKTWENTKESPATHSSNFLYGTMVSYTCNPGYELLGNPVLICQEDGTWNGSAPSCISIECDLPTAPENGFLRFTETSMGSAVQYSCKPGHILAGSDLRLCLENRKWSGASPRCEAISCKKPNPVMNGSIKGSNYTYLSTLYYECDPGYVLNGTERRTCQDDKNWDEDEPICIPVDCSSPPVSANGQVRGDEYTFQKEIEYTCNEGFLLEGARSRVCLANGSWSGATPDCVPVRCATPPQLANGVTEGLDYGFMKEVTFHCHEGYILHGAPKLTCQSDGNWDAEIPLCKPVNCGPPEDLAHGFPNGFSFIHGGHIQYQCFPGYKLHGNSSRRCLSNGSWSGSSPSCLPCRCSTPVIEYGTVNGTDFDCGKAARIQCFKGFKLLGLSEITCEADGQWSSGFPHCEHTSCGSLPMIPNAFISETSSWKENVITYSCRSGYVIQGSSDLICTEKGVWSQPYPVCEPLSCGSPPSVANAVATGEAHTYESEVKLRCLEGYTMDTDTDTFTCQKDGRWFPERISCSPKKCPLPENITHILVHGDDFSVNRQVSVSCAEGYTFEGVNISVCQLDGTWEPPFSDESCSPVSCGKPESPEHGFVVGSKYTFESTIIYQCEPGYELEGNRERVCQENRQWSGGVAICKETRCETPLEFLNGKADIENRTTGPNVVYSCNRGYSLEGPSEAHCTENGTWSHPVPLCKPNPCPVPFVIPENALLSEKEFYVDQNVSIKCREGFLLQGHGIITCNPDETWTQTSAKCEKISCGPPAHVENAIARGVHYQYGDMITYSCYSGYMLEGFLRSVCLENGTWTSPPICRAVCRFPCQNGGICQRPNACSCPEGWMGRLCEEPICILPCLNGGRCVAPYQCDCPPGWTGSRCHTAVCQSPCLNGGKCVRPNRCHCLSSWTGHNCSRKRRTGF

SEQ ID NO: 245850 - protein, 1549 aa, Artificial Sequence
  derived and/or modified sequence
MWPRLAFCCWGLALVSGWATFQQMSPSRNFSFRLFPETAPGAPGSIPAPPAPGDEAAGSRVERLGQAFRRRVRLLRELSERLELVFLVDDSSSVGEVNFRSELMFVRKLLSDFPVVPTATRVAIVTFSSKNYVVPRVDYISTRRARQHKCALLLQEIPAISYRGGGTYTKGAFQQAAQILLHARENSTKVVFLITDGYSNGGDPRPIAASLRDSGVEIFTFGIWQGNIRELNDMASTPKEEHCYLLHSFEEFEALARRALHEDLPSGSFIQDDMVHCSYLCDEGKDCCDRMGSCKCGTHTGHFECICEKGYYGKGLQYECTACPSGTYKPEGSPGGISSCIPCPDENHTSPPGSTSPEDCVCREGYRASGQTCELVHCPALKPPENGYFIQNTCNNHFNAACGVRCHPGFDLVGSSIILCLPNGLWSGSESYCRVRTCPHLRQPKHGHISCSTREMLYKTTCLVACDEGYRLEGSDKLTCQGNSQWDGPEPRCVERHCSTFQMPKDVIISPHNCGKQPAKFGTICYVSCRQGFILSGVKEMLRCTTSGKWNVGVQAAVCKDVEAPQINCPKDIEAKTLEQQDSANVTWQIPTAKDNSGEKVSVHVHPAFTPPYLFPIGDVAIVYTATDLSGNQASCIFHIKVIDAEPPVIDWCRSPPPVQVSEKVHAASWDEPQFSDNSGAELVITRSHTQGDLFPQGETIVQYTATDPSGNNRTCDIHIVIKGSPCEIPFTPVNGDFICTPDNTGVNCTLTCLEGYDFTEGSTDKYYCAYEDGVWKPTYTTEWPDCAKKRFANHGFKSFEMFYKAARCDDTDLMKKFSEAFETTLGKMVPSFCSDAEDIDCRLEENLTKKYCLEYNYDYENGFAIGPGGWGAANRLDYSYDDFLDTVQETATSIGNAKSSRIKRSAPLSDYKIKLIFNITASVPLPDERNDTLEWENQQRLLQTLETITNKLKRTLNKDPMYSFQLASEILIADSNSLETKKASPFCRPGSVLRGRMCVNCPLGTYYNLEHFTCESCRIGSYQDEEGQLECKLCPSGMYTEYIHSRNISDCKAQCKQGTYSYSGLETCESCPLGTYQPKFGSRSCLSCPENTSTVKRGAVNISACGVPCPEGKFSRSGLMPCHPCPRDYYQPNAGKAFCLACPFYGTTPFAGSRSITECSSFSSTFSAAEESVVPPASLGHIKKRHEISSRVFHECFFNPCHNSGTCQQLGRGYVCLCPLGYTGLKCETDIDECSPLPCLNNGVCKDLVGEFICECPSGYTGQRCEENINECSSSPCLNKGICVDGVAGYRCTCVKGFVGLHCETEVNECQSNPCLNNAVCEDQVGGFLCKCPPGFLGTRCGKNVDECLSQPCKNGATCKDGANSFRCLCAAGFTGSHCELNINECQSNPCRNQATCVDELNSYSCKCQPGFSGKRCETEQSTGFNLDFEVSGIYGYVMLDGMLPSLHALTCTFWMKSSDDMNYGTPISYAVDNGSDNTLLLTDYNGWVLYVNGREKITNCPSVNDGRWHHIAITWTSANGIWKVYIDGKLSDGGAGLSVGLPIPGMF

SEQ ID NO: 245851 - protein, 845 aa, Artificial Sequence
  derived and/or modified sequence
MSPSRNFSFRLFPETAPGAPGSIPAPPAPGDEAAGSRVERLGQAFRRRVRLLRELSERLELVFLVDDSSSVGEVNFRSELMFVRKLLSDFPVVPTATRVAIVTFSSKNYVVPRVDYISTRRARQHKCALLLQEIPAISYRGGGTYTKGAFQQAAQILLHARENSTKVVFLITDGYSNGGDPRPIAASLRDSGVEIFTFGIWQGNIRELNDMASTPKEEHCYLLHSFEEFEALARRALHEDLPSGSFIQDDMVHCSYLCDEGKDCCDRMGSCKCGTHTGHFECICEKGYYGKGLQYECTACPSGTYKPEGSPGGISSCIPCPDENHTSPPGSTSPEDCVCREGYRASGQTCELVHCPALKPPENGYFIQNTCNNHFNAACGVRCHPGFDLVGSSIILCLPNGLWSGSESYCRVRTCPHLRQPKHGHISCSTREMLYKTTCLVACDEGYRLEGSDKLTCQGNSQWDGPEPRCVERHCSTFQMPKDVIISPHNCGKQPAKFGTICYVSCRQGFILSGVKEMLRCTTSGKWNVGVQAAVCKDVEAPQINCPKDIEAKTLEQQDSANVTWQIPTAKDNSGEKVSVHVHPAFTPPYLFPIGDVAIVYTATDLSGNQASCIFHIKVIDAEPPVIDWCRSPPPVQVSEKVHAASWDEPQFSDNSGAELVITRSHTQGDLFPQGETIVQYTATDPSGNNRTCDIHIVIKGSPCEIPFTPVNGDFICTPDNTGVNCTLTCLEGYDFTEGSTDKYYCAYEDGVWKPTYTTEWPDCAKKRFANHGFKSFEMFYKAARCDDTDLMKKFSEAFETTLGKMVPSFCSDAEDIDCRLEENLTKKYCLEYNYDYENGFAIGN

SEQ ID NO: 245852 - protein, 515 aa, Artificial Sequence
  derived and/or modified sequence
LENQLVLKELTTEVGVVTFSCKEGHVLQGPSVLKCLPSQQWNDSFPVCKIVLCTPPPLISFGVPIPSSALHFGSTVKYSCVGGFFLRGNSTTLCQPDGTWSSPLPECVPVECPQPEEIPNGIIDVQGLAYLSTALYTCKPGFELVGNTTTLCGENGHWLGGKPTCKAIECLKPKEILNGKFSYTDLHYGQTVTYSCNRGFRLEGPSALTCLETGDWDVDAPSCNAIHCDSPQPIENGFVEGADYSYGAIIIYSCFPGFQVAGHAMQTCEESGWSSSIPTCMPIDCGLPPHIDFGDCTKLKDDQGYFEQEDDMMEVPYVTPHPPYHLGAVAKTWENTKESPATHSSNFLYGTMVSYTCNPGYELLGNPVLICQEDGTWNGSAPSCISIECDLPTAPENGFLRFTETSMGSAVQYSCKPGHILAGSDLRLCLENRKWSGASPRCEAISCKKPNPVMNGSIKGSNYTYLSTLYYECDPGYVLNGTERRTCQDDKTGMRMSPFAFLWTAVHPQSQPMAR

SEQ ID NO: 245853 - protein, 3548 aa, Artificial Sequence
  derived and/or modified sequence
MSPSRNFSFRLFPETAPGAPGSIPAPPAPGDEAAGSRVERLGQAFRRRVRLLRELSERLELVFLVDDSSSVGEVNFRSELMFVRKLLSDFPVVPTATRVAIVTFSSKNYVVPRVDYISTRRARQHKCALLLQEIPAISYRGGGTYTKGAFQQAAQILLHARENSTKVVFLITDGYSNGGDPRPIAASLRDSGVEIFTFGIWQGNIRELNDMASTPKEEHCYLLHSFEEFEALARRALHEDLPSGSFIQDDMVHCSYLCDEGKDCCDRMGSCKCGTHTGHFECICEKGYYGKGLQYECTACPSGTYKPEGSPGGISSCIPCPDENHTSPPGSTSPEDCVCREGYRASGQTCELVHCPALKPPENGYFIQNTCNNHFNAACGVRCHPGFDLVGSSIILCLPNGLWSGSESYCRVRTCPHLRQPKHGHISCSTREMLYKTTCLVACDEGYRLEGSDKLTCQGNSQWDGPEPRCVERHCSTFQMPKDVIISPHNCGKQPAKFGTICYVSCRQGFILSGVKEMLRCTTSGKWNVGVQAAVCKDVEAPQINCPKDIEAKTLEQQDSANVTWQIPTAKDNSGEKVSVHVHPAFTPPYLFPIGDVAIVYTATDLSGNQASCIFHIKVIDAEPPVIDWCRSPPPVQVSEKVHAASWDEPQFSDNSGAELVITRSHTQGDLFPQGETIVQYTATDPSGNNRTCDIHIVIKGSPCEIPFTPVNGDFICTPDNTGVNCTLTCLEGYDFTEGSTDKYYCAYEDGVWKPTYTTEWPDCAKKRFANHGFKSFEMFYKAARCDDTDLMKKFSEAFETTLGKMVPSFCSDAEDIDCRLEENLTKKYCLEYNYDYENGFAIGPGGWGAANRLDYSYDDFLDTVQETATSIGNAKSSRIKRSAPLSDYKIKLIFNITASVPLPDERNDTLEWENQQRLLQTLETITNKLKRTLNKDPMYSFQLASEILIADSNSLETKKASPFCRPGSVLRGRMCVNCPLGTYYNLEHFTCESCRIGSYQDEEGQLECKLCPSGMYTEYIHSRNISDCKAQCKQGTYSYSGLETCESCPLGTYQPKFGSRSCLSCPENTSTVKRGAVNISACGVPCPEGKFSRSGLMPCHPCPRDYYQPNAGKAFCLACPFYGTTPFAGSRSITECSSFSSTFSAAEESVVPPASLGHIKKRHEISSQVFHECFFNPCHNSGTCQQLGRGYVCLCPLGYTGLKCETDIDECSPLPCLNNGVCKDLVGEFICECPSGYTGQRCEENINECSSSPCLNKGICVDGVAGYRCTCVKGFVGLHCETEVNECQSNPCLNNAVCEDQVGGFLCKCPPGFLGTRCGKNVDECLSQPCKNGATCKDGANSFRCLCAAGFTGSHCELNINECQSNPCRNQATCVDELNSYSCKCQPGFSGKRCETEQSTGFNLDFEVSGIYGYVMLDGMLPSLHALTCTFWMKSSDDMNYGTPISYAVDNGSDNTLLLTDYNGWVLYVNGREKITNCPSVNDGRWHHIAITWTSANGIWKVYIDGKLSDGGAGLSVGLPIPGGGALVLGQEQDKKGEGFSPAESFVGSISQLNLWDYVLSPQQVKSLATSCPEELSKGNVLAWPDFLSGIVGKVKIDSKSIFCSDCPRLGGSVPHLRTASEDLKPGSKVNLFCDPGFQLVGNPVQYCLNQGQWTQPLPHCERISCGVPPPLENGFHSADDFYAGSTVTYQCNNGYYLLGDSRMFCTDNGSWNGVSPSCLDVDECAVGSDCSEHASCLNVDGSYICSCVPPYTGDGKNCAEPIKCKAPGNPENGHSSGEIYTVGAEVTFSCQEGYQLMGVTKITCLESGEWNHLIPYCKAVSCGKPAIPENGCIEELAFTFGSKVTYRCNKGYTLAGDKESSCLANSSWSHSPPVCEPVKCSSPENINNGKYILSGLTYLSTASYSCDTGYSLQGPSIIECTASGIWDRAPPACHLVFCGEPPAIKDAVITGNNFTFRNTVTYTCKEGYTLAGLDTIECLADGKWSRSDQQCLAVSCDEPPIVDHASPETAHRLFGDIAFYYCSDGYSLADNSQLLCNAQGKWVPPEGQDMPRCIAHFCEKPPSVSYSILESVSKAKFAAGSVVSFKCMEGFVLNTSAKIECMRGGQWNPSPMSIQCIPVRCGEPPSIMNGYASGSNYSFGAMVAYSCNKGFYIKGEKKSTCEATGQWSSPIPTCHPVSCGEPPKVENGFLEHTTGRIFESEVRYQCNPGYKSVGSPVFVCQANRHWHSESPLMCVPLDCGKPPPIQNGFMKGENFEVGSKVQFFCNEGYELVGDSSWTCQKSGKWNKKSNPKCMPAKCPEPPLLENQLVLKELTTEVGVVTFSCKEGHVLQGPSVLKCLPSQQWNDSFPVCKIVLCTPPPLISFGVPIPSSALHFGSTVKYSCVGGFFLRGNSTTLCQPDGTWSSPLPECVPVECPQPEEIPNGIIDVQGLAYLSTALYTCKPGFELVGNTTTLCGENGHWLGGKPTCKAIECLKPKEILNGKFSYTDLHYGQTVTYSCNRGFRLEGPSALTCLETGDWDVDAPSCNAIHCDSPQPIENGFVEGADYSYGAIIIYSCFPGFQVAGHAMQTCEESGWSSSIPTCMPIDCGLPPHIDFGDCTKLKDDQGYFEQEDDMMEVPYVTPHPPYHLGAVAKTWENTKESPATHSSNFLYGTMVSYTCNPGYELLGNPVLICQEDGTWNGSAPSCISIECDLPTAPENGFLRFTETSMGSAVQYSCKPGHILAGSDLRLCLENRKWSGASPRCEAISCKKPNPVMNGSIKGSNYTYLSTLYYECDPGYVLNGTERRTCQDDKNWDEDEPICIPVDCSSPPVSANGQVRGDEYTFQKEIEYTCNEGFLLEGARSRVCLANGSWSGATPDCVPVRCATPPQLANGVTEGLDYGFMKEVTFHCHEGYILHGAPKLTCQSDGNWDAEIPLCKPVNCGPPEDLAHGFPNGFSFIHGGHIQYQCFPGYKLHGNSSRRCLSNGSWSGSSPSCLPCRCSTPVIEYGTVNGTDFDCGKAARIQCFKGFKLLGLSEITCEADGQWSSGFPHCEHTSCGSLPMIPNAFISETSSWKENVITYSCRSGYVIQGSSDLICTEKGVWSQPYPVCEPLSCGSPPSVANAVATGEAHTYESEVKLRCLEGYTMDTDTDTFTCQKDGRWFPERISCSPKKCPLPENITHILVHGDDFSVNRQVSVSCAEGYTFEGVNISVCQLDGTWEPPFSDESCSPVSCGKPESPEHGFVVGSKYTFESTIIYQCEPGYELEGNRERVCQENRQWSGGVAICKETRCETPLEFLNGKADIENRTTGPNVVYSCNRGYSLEGPSEAHCTENGTWSHPVPLCKPNPCPVPFVIPENALLSEKEFYVDQNVSIKCREGFLLQGHGIITCNPDETWTQTSAKCEKISCGPPAHVENAIARGVHYQYGDMITYSCYSGYMLEGFLRSVCLENGTWTSPPICRAVCRFPCQNGGICQRPNACSCPEGWMGRLCEEPICILPCLNGGRCVAPYQCDCPPGWTGSRCHTAVCQSPCLNGGKCVRPNRCHCLSSWTGHNCSRKRRTGF

SEQ ID NO: 245854 - protein, 3571 aa, Artificial Sequence
  derived and/or modified sequence
MWPRLAFCCWGLALVSGWATFQQMSPSRNFSFRLFPETAPGAPGSIPAPPAPGDEAAGSRVERLGQAFRRRVRLLRELSERLELVFLVDDSSSVGEVNFRSELMFVRKLLSDFPVVPTATRVAIVTFSSKNYVVPRVDYISTRRARQHKCALLLQEIPAISYRGGGTYTKGAFQQAAQILLHARENSTKVVFLITDGYSNGGDPRPIAASLRDSGVEIFTFGIWQGNIRELNDMASTPKEEHCYLLHSFEEFEALARRALHEDLPSGSFIQDDMVHCSYLCDEGKDCCDRMGSCKCGTHTGHFECICEKGYYGKGLQYECTACPSGTYKPEGSPGGISSCIPCPDENHTSPPGSTSPEDCVCREGYRASGQTCELVHCPALKPPENGYFIQNTCNNHFNAACGVRCHPGFDLVGSSIILCLPNGLWSGSESYCRVRTCPHLRQPKHGHISCSTREMLYKTTCLVACDEGYRLEGSDKLTCQGNSQWDGPEPRCVERHCSTFQMPKDVIISPHNCGKQPAKFGTICYVSCRQGFILSGVKEMLRCTTSGKWNVGVQAAVCKDVEAPQINCPKDIEAKTLEQQDSANVTWQIPTAKDNSGEKVSVHVHPAFTPPYLFPIGDVAIVYTATDLSGNQASCIFHIKVIDAEPPVIDWCRSPPPVQVSEKVHAASWDEPQFSDNSGAELVITRSHTQGDLFPQGETIVQYTATDPSGNNRTCDIHIVIKGSPCEIPFTPVNGDFICTPDNTGVNCTLTCLEGYDFTEGSTDKYYCAYEDGVWKPTYTTEWPDCAKKRFANHGFKSFEMFYKAARCDDTDLMKKFSEAFETTLGKMVPSFCSDAEDIDCRLEENLTKKYCLEYNYDYENGFAIGPGGWGAANRLDYSYDDFLDTVQETATSIGNAKSSRIKRSAPLSDYKIKLIFNITASVPLPDERNDTLEWENQQRLLQTLETITNKLKRTLNKDPMYSFQLASEILIADSNSLETKKASPFCRPGSVLRGRMCVNCPLGTYYNLEHFTCESCRIGSYQDEEGQLECKLCPSGMYTEYIHSRNISDCKAQCKQGTYSYSGLETCESCPLGTYQPKFGSRSCLSCPENTSTVKRGAVNISACGVPCPEGKFSRSGLMPCHPCPRDYYQPNAGKAFCLACPFYGTTPFAGSRSITECSSFSSTFSAAEESVVPPASLGHIKKRHEISSQVFHECFFNPCHNSGTCQQLGRGYVCLCPLGYTGLKCETDIDECSPLPCLNNGVCKDLVGEFICECPSGYTGQRCEENINECSSSPCLNKGICVDGVAGYRCTCVKGFVGLHCETEVNECQSNPCLNNAVCEDQVGGFLCKCPPGFLGTRCGKNVDECLSQPCKNGATCKDGANSFRCLCAAGFTGSHCELNINECQSNPCRNQATCVDELNSYSCKCQPGFSGKRCETEQSTGFNLDFEVSGIYGYVMLDGMLPSLHALTCTFWMKSSDDMNYGTPISYAVDNGSDNTLLLTDYNGWVLYVNGREKITNCPSVNDGRWHHIAITWTSANGIWKVYIDGKLSDGGAGLSVGLPIPGGGALVLGQEQDKKGEGFSPAESFVGSISQLNLWDYVLSPQQVKSLATSCPEELSKGNVLAWPDFLSGIVGKVKIDSKSIFCSDCPRLGGSVPHLRTASEDLKPGSKVNLFCDPGFQLVGNPVQYCLNQGQWTQPLPHCERISCGVPPPLENGFHSADDFYAGSTVTYQCNNGYYLLGDSRMFCTDNGSWNGVSPSCLDVDECAVGSDCSEHASCLNVDGSYICSCVPPYTGDGKNCAEPIKCKAPGNPENGHSSGEIYTVGAEVTFSCQEGYQLMGVTKITCLESGEWNHLIPYCKAVSCGKPAIPENGCIEELAFTFGSKVTYRCNKGYTLAGDKESSCLANSSWSHSPPVCEPVKCSSPENINNGKYILSGLTYLSTASYSCDTGYSLQGPSIIECTASGIWDRAPPACHLVFCGEPPAIKDAVITGNNFTFRNTVTYTCKEGYTLAGLDTIECLADGKWSRSDQQCLAVSCDEPPIVDHASPETAHRLFGDIAFYYCSDGYSLADNSQLLCNAQGKWVPPEGQDMPRCIAHFCEKPPSVSYSILESVSKAKFAAGSVVSFKCMEGFVLNTSAKIECMRGGQWNPSPMSIQCIPVRCGEPPSIMNGYASGSNYSFGAMVAYSCNKGFYIKGEKKSTCEATGQWSSPIPTCHPVSCGEPPKVENGFLEHTTGRIFESEVRYQCNPGYKSVGSPVFVCQANRHWHSESPLMCVPLDCGKPPPIQNGFMKGENFEVGSKVQFFCNEGYELVGDSSWTCQKSGKWNKKSNPKCMPAKCPEPPLLENQLVLKELTTEVGVVTFSCKEGHVLQGPSVLKCLPSQQWNDSFPVCKIVLCTPPPLISFGVPIPSSALHFGSTVKYSCVGGFFLRGNSTTLCQPDGTWSSPLPECVPVECPQPEEIPNGIIDVQGLAYLSTALYTCKPGFELVGNTTTLCGENGHWLGGKPTCKAIECLKPKEILNGKFSYTDLHYGQTVTYSCNRGFRLEGPSALTCLETGDWDVDAPSCNAIHCDSPQPIENGFVEGADYSYGAIIIYSCFPGFQVAGHAMQTCEESGWSSSIPTCMPIDCGLPPHIDFGDCTKLKDDQGYFEQEDDMMEVPYVTPHPPYHLGAVAKTWENTKESPATHSSNFLYGTMVSYTCNPGYELLGNPVLICQEDGTWNGSAPSCISIECDLPTAPENGFLRFTETSMGSAVQYSCKPGHILAGSDLRLCLENRKWSGASPRCEAISCKKPNPVMNGSIKGSNYTYLSTLYYECDPGYVLNGTERRTCQDDKNWDEDEPICIPVDCSSPPVSANGQVRGDEYTFQKEIEYTCNEGFLLEGARSRVCLANGSWSGATPDCVPVRCATPPQLANGVTEGLDYGFMKEVTFHCHEGYILHGAPKLTCQSDGNWDAEIPLCKPVNCGPPEDLAHGFPNGFSFIHGGHIQYQCFPGYKLHGNSSRRCLSNGSWSGSSPSCLPCRCSTPVIEYGTVNGTDFDCGKAARIQCFKGFKLLGLSEITCEADGQWSSGFPHCEHTSCGSLPMIPNAFISETSSWKENVITYSCRSGYVIQGSSDLICTEKGVWSQPYPVCEPLSCGSPPSVANAVATGEAHTYESEVKLRCLEGYTMDTDTDTFTCQKDGRWFPERISCSPKKCPLPENITHILVHGDDFSVNRQVSVSCAEGYTFEGVNISVCQLDGTWEPPFSDESCSPVSCGKPESPEHGFVVGSKYTFESTIIYQCEPGYELEGNRERVCQENRQWSGGVAICKETRCETPLEFLNGKADIENRTTGPNVVYSCNRGYSLEGPSEAHCTENGTWSHPVPLCKPNPCPVPFVIPENALLSEKEFYVDQNVSIKCREGFLLQGHGIITCNPDETWTQTSAKCEKISCGPPAHVENAIARGVHYQYGDMITYSCYSGYMLEGFLRSVCLENGTWTSPPICRAVCRFPCQNGGICQRPNACSCPEGWMGRLCEEPICILPCLNGGRCVAPYQCDCPPGWTGSRCHTAVCQSPCLNGGKCVRPNRCHCLSSWTGHNCSRKRRTGF

SEQ ID NO: 245855 - DNA, 4494 bp, Artificial Sequence
  derived and/or modified sequence
atgcccagatgcatcgcccacttctgcgagaagccccccagcgtgagctacagcatcctggagagcgtgagcaaggccaagttcgccgccggcagcgtggtgagcttcaagtgcatggagggcttcgtgctgaacaccagcgccaagatcgagtgcatgagaggcggccagtggaaccccagccccatgagcatccagtgcatccccgtgagatgcggcgagccccccagcatcatgaacggctacgccagcggcagcaactacagcttcggcgccatggtggcctacagctgcaacaagggcttctacatcaagggcgagaagaagagcacctgcgaggccaccggccagtggagcagccccatccccacctgccaccccgtgagctgcggcgagccccccaaggtggagaacggcttcctggagcacaccaccggcagaatcttcgagagcgaggtgagataccagtgcaaccccggctacaagagcgtgggcagccccgtgttcgtgtgccaggccaacagacactggcacagcgagagccccctgatgtgcgtgcccctggactgcggcaagcccccccccatccagaacggcttcatgaagggcgagaacttcgaggtgggcagcaaggtgcagttcttctgcaacgagggctacgagctggtgggcgacagcagctggacctgccagaagagcggcaagtggaacaagaagagcaaccccaagtgcatgcccgccaagtgccccgagccccccctgctggagaaccagctggtgctgaaggagctgaccaccgaggtgggcgtggtgaccttcagctgcaaggagggccacgtgctgcagggccccagcgtgctgaagtgcctgcccagccagcagtggaacgacagcttccccgtgtgcaagatcgtgctgtgcacccccccccccctgatcagcttcggcgtgcccatccccagcagcgccctgcacttcggcagcaccgtgaagtacagctgcgtgggcggcttcttcctgagaggcaacagcaccaccctgtgccagcccgacggcacctggagcagccccctgcccgagtgcgtgcccgtggagtgcccccagcccgaggagatccccaacggcatcatcgacgtgcagggcctggcctacctgagcaccgccctgtacacctgcaagcccggcttcgagctggtgggcaacaccaccaccctgtgcggcgagaacggccactggctgggcggcaagcccacctgcaaggccatcgagtgcctgaagcccaaggagatcctgaacggcaagttcagctacaccgacctgcactacggccagaccgtgacctacagctgcaacagaggcttcagactggagggccccagcgccctgacctgcctggagaccggcgactgggacgtggacgcccccagctgcaacgccatccactgcgacagcccccagcccatcgagaacggcttcgtggagggcgccgactacagctacggcgccatcatcatctacagctgcttccccggcttccaggtggccggccacgccatgcagacctgcgaggagagcggctggagcagcagcatccccacctgcatgcccatcgactgcggcctgcccccccacatcgacttcggcgactgcaccaagctgaaggacgaccagggctacttcgagcaggaggacgacatgatggaggtgccctacgtgaccccccaccccccctaccacctgggcgccgtggccaagacctgggagaacaccaaggagagccccgccacccacagcagcaacttcctgtacggcaccatggtgagctacacctgcaaccccggctacgagctgctgggcaaccccgtgctgatctgccaggaggacggcacctggaacggcagcgcccccagctgcatcagcatcgagtgcgacctgcccaccgcccccgagaacggcttcctgagattcaccgagaccagcatgggcagcgccgtgcagtacagctgcaagcccggccacatcctggccggcagcgacctgagactgtgcctggagaacagaaagtggagcggcgccagccccagatgcgaggccatcagctgcaagaagcccaaccccgtgatgaacggcagcatcaagggcagcaactacacctacctgagcaccctgtactacgagtgcgaccccggctacgtgctgaacggcaccgagagaagaacctgccaggacgacaagaactgggacgaggacgagcccatctgcatccccgtggactgcagcagcccccccgtgagcgccaacggccaggtgagaggcgacgagtacaccttccagaaggagatcgagtacacctgcaacgagggcttcctgctggagggcgccagaagcagagtgtgcctggccaacggcagctggagcggcgccacccccgactgcgtgcccgtgagatgcgccacccccccccagctggccaacggcgtgaccgagggcctggactacggcttcatgaaggaggtgaccttccactgccacgagggctacatcctgcacggcgcccccaagctgacctgccagagcgacggcaactgggacgccgagatccccctgtgcaagcccgtgaactgcggcccccccgaggacctggcccacggcttccccaacggcttcagcttcatccacggcggccacatccagtaccagtgcttccccggctacaagctgcacggcaacagcagcagaagatgcctgagcaacggcagctggagcggcagcagccccagctgcctgccctgcagatgcagcacccccgtgatcgagtacggcaccgtgaacggcaccgacttcgactgcggcaaggccgccagaatccagtgcttcaagggcttcaagctgctgggcctgagcgagatcacctgcgaggccgacggccagtggagcagcggcttcccccactgcgagcacaccagctgcggcagcctgcccatgatccccaacgccttcatcagcgagaccagcagctggaaggagaacgtgatcacctacagctgcagaagcggctacgtgatccagggcagcagcgacctgatctgcaccgagaagggcgtgtggagccagccctaccccgtgtgcgagcccctgagctgcggcagcccccccagcgtggccaacgccgtggccaccggcgaggcccacacctacgagagcgaggtgaagctgagatgcctggagggctacaccatggacaccgacaccgacaccttcacctgccagaaggacggcagatggttccccgagagaatcagctgcagccccaagaagtgccccctgcccgagaacatcacccacatcctggtgcacggcgacgacttcagcgtgaacagacaggtgagcgtgagctgcgccgagggctacaccttcgagggcgtgaacatcagcgtgtgccagctggacggcacctgggagccccccttcagcgacgagagctgcagccccgtgagctgcggcaagcccgagagccccgagcacggcttcgtggtgggcagcaagtacaccttcgagagcaccatcatctaccagtgcgagcccggctacgagctggagggcaacagagagagagtgtgccaggagaacagacagtggagcggcggcgtggccatctgcaaggagaccagatgcgagacccccctggagttcctgaacggcaaggccgacatcgagaacagaaccaccggccccaacgtggtgtacagctgcaacagaggctacagcctggagggccccagcgaggcccactgcaccgagaacggcacctggagccaccccgtgcccctgtgcaagcccaacccctgccccgtgcccttcgtgatccccgagaacgccctgctgagcgagaaggagttctacgtggaccagaacgtgagcatcaagtgcagagagggcttcctgctgcagggccacggcatcatcacctgcaaccccgacgagacctggacccagaccagcgccaagtgcgagaagatcagctgcggcccccccgcccacgtggagaacgccatcgccagaggcgtgcactaccagtacggcgacatgatcacctacagctgctacagcggctacatgctggagggcttcctgagaagcgtgtgcctggagaacggcacctggaccagcccccccatctgcagagccgtgtgcagattcccctgccagaacggcggcatctgccagagacccaacgcctgcagctgccccgagggctggatgggcagactgtgcgaggagcccatctgcatcctgccctgcctgaacggcggcagatgcgtggccccctaccagtgcgactgcccccccggctggaccggcagcagatgccacaccgccgtgtgccagagcccctgcctgaacggcggcaagtgcgtgagacccaacagatgccactgcctgagcagctggaccggccacaactgcagcagaaagagaagaaccggcttctag

SEQ ID NO: 245856 - DNA, 4650 bp, Artificial Sequence
  derived and/or modified sequence
atgtggcccagactggccttctgctgctggggcctggccctggtgagcggctgggccaccttccagcagatgagccccagcagaaacttcagcttcagactgttccccgagaccgcccccggcgcccccggcagcatccccgccccccccgcccccggcgacgaggccgccggcagcagagtggagagactgggccaggccttcagaagaagagtgagactgctgagagagctgagcgagagactggagctggtgttcctggtggacgacagcagcagcgtgggcgaggtgaacttcagaagcgagctgatgttcgtgagaaagctgctgagcgacttccccgtggtgcccaccgccaccagagtggccatcgtgaccttcagcagcaagaactacgtggtgcccagagtggactacatcagcaccagaagagccagacagcacaagtgcgccctgctgctgcaggagatccccgccatcagctacagaggcggcggcacctacaccaagggcgccttccagcaggccgcccagatcctgctgcacgccagagagaacagcaccaaggtggtgttcctgatcaccgacggctacagcaacggcggcgaccccagacccatcgccgccagcctgagagacagcggcgtggagatcttcaccttcggcatctggcagggcaacatcagagagctgaacgacatggccagcacccccaaggaggagcactgctacctgctgcacagcttcgaggagttcgaggccctggccagaagagccctgcacgaggacctgcccagcggcagcttcatccaggacgacatggtgcactgcagctacctgtgcgacgagggcaaggactgctgcgacagaatgggcagctgcaagtgcggcacccacaccggccacttcgagtgcatctgcgagaagggctactacggcaagggcctgcagtacgagtgcaccgcctgccccagcggcacctacaagcccgagggcagccccggcggcatcagcagctgcatcccctgccccgacgagaaccacaccagcccccccggcagcaccagccccgaggactgcgtgtgcagagagggctacagagccagcggccagacctgcgagctggtgcactgccccgccctgaagccccccgagaacggctacttcatccagaacacctgcaacaaccacttcaacgccgcctgcggcgtgagatgccaccccggcttcgacctggtgggcagcagcatcatcctgtgcctgcccaacggcctgtggagcggcagcgagagctactgcagagtgagaacctgcccccacctgagacagcccaagcacggccacatcagctgcagcaccagagagatgctgtacaagaccacctgcctggtggcctgcgacgagggctacagactggagggcagcgacaagctgacctgccagggcaacagccagtgggacggccccgagcccagatgcgtggagagacactgcagcaccttccagatgcccaaggacgtgatcatcagcccccacaactgcggcaagcagcccgccaagttcggcaccatctgctacgtgagctgcagacagggcttcatcctgagcggcgtgaaggagatgctgagatgcaccaccagcggcaagtggaacgtgggcgtgcaggccgccgtgtgcaaggacgtggaggccccccagatcaactgccccaaggacatcgaggccaagaccctggagcagcaggacagcgccaacgtgacctggcagatccccaccgccaaggacaacagcggcgagaaggtgagcgtgcacgtgcaccccgccttcacccccccctacctgttccccatcggcgacgtggccatcgtgtacaccgccaccgacctgagcggcaaccaggccagctgcatcttccacatcaaggtgatcgacgccgagccccccgtgatcgactggtgcagaagccccccccccgtgcaggtgagcgagaaggtgcacgccgccagctgggacgagccccagttcagcgacaacagcggcgccgagctggtgatcaccagaagccacacccagggcgacctgttcccccagggcgagaccatcgtgcagtacaccgccaccgaccccagcggcaacaacagaacctgcgacatccacatcgtgatcaagggcagcccctgcgagatccccttcacccccgtgaacggcgacttcatctgcacccccgacaacaccggcgtgaactgcaccctgacctgcctggagggctacgacttcaccgagggcagcaccgacaagtactactgcgcctacgaggacggcgtgtggaagcccacctacaccaccgagtggcccgactgcgccaagaagagattcgccaaccacggcttcaagagcttcgagatgttctacaaggccgccagatgcgacgacaccgacctgatgaagaagttcagcgaggccttcgagaccaccctgggcaagatggtgcccagcttctgcagcgacgccgaggacatcgactgcagactggaggagaacctgaccaagaagtactgcctggagtacaactacgactacgagaacggcttcgccatcggccccggcggctggggcgccgccaacagactggactacagctacgacgacttcctggacaccgtgcaggagaccgccaccagcatcggcaacgccaagagcagcagaatcaagagaagcgcccccctgagcgactacaagatcaagctgatcttcaacatcaccgccagcgtgcccctgcccgacgagagaaacgacaccctggagtgggagaaccagcagagactgctgcagaccctggagaccatcaccaacaagctgaagagaaccctgaacaaggaccccatgtacagcttccagctggccagcgagatcctgatcgccgacagcaacagcctggagaccaagaaggccagccccttctgcagacccggcagcgtgctgagaggcagaatgtgcgtgaactgccccctgggcacctactacaacctggagcacttcacctgcgagagctgcagaatcggcagctaccaggacgaggagggccagctggagtgcaagctgtgccccagcggcatgtacaccgagtacatccacagcagaaacatcagcgactgcaaggcccagtgcaagcagggcacctacagctacagcggcctggagacctgcgagagctgccccctgggcacctaccagcccaagttcggcagcagaagctgcctgagctgccccgagaacaccagcaccgtgaagagaggcgccgtgaacatcagcgcctgcggcgtgccctgccccgagggcaagttcagcagaagcggcctgatgccctgccacccctgccccagagactactaccagcccaacgccggcaaggccttctgcctggcctgccccttctacggcaccacccccttcgccggcagcagaagcatcaccgagtgcagcagcttcagcagcaccttcagcgccgccgaggagagcgtggtgccccccgccagcctgggccacatcaagaagagacacgagatcagcagcagagtgttccacgagtgcttcttcaacccctgccacaacagcggcacctgccagcagctgggcagaggctacgtgtgcctgtgccccctgggctacaccggcctgaagtgcgagaccgacatcgacgagtgcagccccctgccctgcctgaacaacggcgtgtgcaaggacctggtgggcgagttcatctgcgagtgccccagcggctacaccggccagagatgcgaggagaacatcaacgagtgcagcagcagcccctgcctgaacaagggcatctgcgtggacggcgtggccggctacagatgcacctgcgtgaagggcttcgtgggcctgcactgcgagaccgaggtgaacgagtgccagagcaacccctgcctgaacaacgccgtgtgcgaggaccaggtgggcggcttcctgtgcaagtgcccccccggcttcctgggcaccagatgcggcaagaacgtggacgagtgcctgagccagccctgcaagaacggcgccacctgcaaggacggcgccaacagcttcagatgcctgtgcgccgccggcttcaccggcagccactgcgagctgaacatcaacgagtgccagagcaacccctgcagaaaccaggccacctgcgtggacgagctgaacagctacagctgcaagtgccagcccggcttcagcggcaagagatgcgagaccgagcagagcaccggcttcaacctggacttcgaggtgagcggcatctacggctacgtgatgctggacggcatgctgcccagcctgcacgccctgacctgcaccttctggatgaagagcagcgacgacatgaactacggcacccccatcagctacgccgtggacaacggcagcgacaacaccctgctgctgaccgactacaacggctgggtgctgtacgtgaacggcagagagaagatcaccaactgccccagcgtgaacgacggcagatggcaccacatcgccatcacctggaccagcgccaacggcatctggaaggtgtacatcgacggcaagctgagcgacggcggcgccggcctgagcgtgggcctgcccatccccggcatgttctag

SEQ ID NO: 245857 - DNA, 2538 bp, Artificial Sequence
  derived and/or modified sequence
atgagccccagcagaaacttcagcttcagactgttccccgagaccgcccccggcgcccccggcagcatccccgccccccccgcccccggcgacgaggccgccggcagcagagtggagagactgggccaggccttcagaagaagagtgagactgctgagagagctgagcgagagactggagctggtgttcctggtggacgacagcagcagcgtgggcgaggtgaacttcagaagcgagctgatgttcgtgagaaagctgctgagcgacttccccgtggtgcccaccgccaccagagtggccatcgtgaccttcagcagcaagaactacgtggtgcccagagtggactacatcagcaccagaagagccagacagcacaagtgcgccctgctgctgcaggagatccccgccatcagctacagaggcggcggcacctacaccaagggcgccttccagcaggccgcccagatcctgctgcacgccagagagaacagcaccaaggtggtgttcctgatcaccgacggctacagcaacggcggcgaccccagacccatcgccgccagcctgagagacagcggcgtggagatcttcaccttcggcatctggcagggcaacatcagagagctgaacgacatggccagcacccccaaggaggagcactgctacctgctgcacagcttcgaggagttcgaggccctggccagaagagccctgcacgaggacctgcccagcggcagcttcatccaggacgacatggtgcactgcagctacctgtgcgacgagggcaaggactgctgcgacagaatgggcagctgcaagtgcggcacccacaccggccacttcgagtgcatctgcgagaagggctactacggcaagggcctgcagtacgagtgcaccgcctgccccagcggcacctacaagcccgagggcagccccggcggcatcagcagctgcatcccctgccccgacgagaaccacaccagcccccccggcagcaccagccccgaggactgcgtgtgcagagagggctacagagccagcggccagacctgcgagctggtgcactgccccgccctgaagccccccgagaacggctacttcatccagaacacctgcaacaaccacttcaacgccgcctgcggcgtgagatgccaccccggcttcgacctggtgggcagcagcatcatcctgtgcctgcccaacggcctgtggagcggcagcgagagctactgcagagtgagaacctgcccccacctgagacagcccaagcacggccacatcagctgcagcaccagagagatgctgtacaagaccacctgcctggtggcctgcgacgagggctacagactggagggcagcgacaagctgacctgccagggcaacagccagtgggacggccccgagcccagatgcgtggagagacactgcagcaccttccagatgcccaaggacgtgatcatcagcccccacaactgcggcaagcagcccgccaagttcggcaccatctgctacgtgagctgcagacagggcttcatcctgagcggcgtgaaggagatgctgagatgcaccaccagcggcaagtggaacgtgggcgtgcaggccgccgtgtgcaaggacgtggaggccccccagatcaactgccccaaggacatcgaggccaagaccctggagcagcaggacagcgccaacgtgacctggcagatccccaccgccaaggacaacagcggcgagaaggtgagcgtgcacgtgcaccccgccttcacccccccctacctgttccccatcggcgacgtggccatcgtgtacaccgccaccgacctgagcggcaaccaggccagctgcatcttccacatcaaggtgatcgacgccgagccccccgtgatcgactggtgcagaagccccccccccgtgcaggtgagcgagaaggtgcacgccgccagctgggacgagccccagttcagcgacaacagcggcgccgagctggtgatcaccagaagccacacccagggcgacctgttcccccagggcgagaccatcgtgcagtacaccgccaccgaccccagcggcaacaacagaacctgcgacatccacatcgtgatcaagggcagcccctgcgagatccccttcacccccgtgaacggcgacttcatctgcacccccgacaacaccggcgtgaactgcaccctgacctgcctggagggctacgacttcaccgagggcagcaccgacaagtactactgcgcctacgaggacggcgtgtggaagcccacctacaccaccgagtggcccgactgcgccaagaagagattcgccaaccacggcttcaagagcttcgagatgttctacaaggccgccagatgcgacgacaccgacctgatgaagaagttcagcgaggccttcgagaccaccctgggcaagatggtgcccagcttctgcagcgacgccgaggacatcgactgcagactggaggagaacctgaccaagaagtactgcctggagtacaactacgactacgagaacggcttcgccatcggcaactag

SEQ ID NO: 245858 - DNA, 1548 bp, Artificial Sequence
  derived and/or modified sequence
ctggagaaccagctggtgctgaaggagctgaccaccgaggtgggcgtggtgaccttcagctgcaaggagggccacgtgctgcagggccccagcgtgctgaagtgcctgcccagccagcagtggaacgacagcttccccgtgtgcaagatcgtgctgtgcacccccccccccctgatcagcttcggcgtgcccatccccagcagcgccctgcacttcggcagcaccgtgaagtacagctgcgtgggcggcttcttcctgagaggcaacagcaccaccctgtgccagcccgacggcacctggagcagccccctgcccgagtgcgtgcccgtggagtgcccccagcccgaggagatccccaacggcatcatcgacgtgcagggcctggcctacctgagcaccgccctgtacacctgcaagcccggcttcgagctggtgggcaacaccaccaccctgtgcggcgagaacggccactggctgggcggcaagcccacctgcaaggccatcgagtgcctgaagcccaaggagatcctgaacggcaagttcagctacaccgacctgcactacggccagaccgtgacctacagctgcaacagaggcttcagactggagggccccagcgccctgacctgcctggagaccggcgactgggacgtggacgcccccagctgcaacgccatccactgcgacagcccccagcccatcgagaacggcttcgtggagggcgccgactacagctacggcgccatcatcatctacagctgcttccccggcttccaggtggccggccacgccatgcagacctgcgaggagagcggctggagcagcagcatccccacctgcatgcccatcgactgcggcctgcccccccacatcgacttcggcgactgcaccaagctgaaggacgaccagggctacttcgagcaggaggacgacatgatggaggtgccctacgtgaccccccaccccccctaccacctgggcgccgtggccaagacctgggagaacaccaaggagagccccgccacccacagcagcaacttcctgtacggcaccatggtgagctacacctgcaaccccggctacgagctgctgggcaaccccgtgctgatctgccaggaggacggcacctggaacggcagcgcccccagctgcatcagcatcgagtgcgacctgcccaccgcccccgagaacggcttcctgagattcaccgagaccagcatgggcagcgccgtgcagtacagctgcaagcccggccacatcctggccggcagcgacctgagactgtgcctggagaacagaaagtggagcggcgccagccccagatgcgaggccatcagctgcaagaagcccaaccccgtgatgaacggcagcatcaagggcagcaactacacctacctgagcaccctgtactacgagtgcgaccccggctacgtgctgaacggcaccgagagaagaacctgccaggacgacaagaccggcatgagaatgagccccttcgccttcctgtggaccgccgtgcacccccagagccagcccatggccagatag

SEQ ID NO: 245859 - DNA, 10647 bp, Artificial Sequence
  derived and/or modified sequence
atgagccccagcagaaacttcagcttcagactgttccccgagaccgcccccggcgcccccggcagcatccccgccccccccgcccccggcgacgaggccgccggcagcagagtggagagactgggccaggccttcagaagaagagtgagactgctgagagagctgagcgagagactggagctggtgttcctggtggacgacagcagcagcgtgggcgaggtgaacttcagaagcgagctgatgttcgtgagaaagctgctgagcgacttccccgtggtgcccaccgccaccagagtggccatcgtgaccttcagcagcaagaactacgtggtgcccagagtggactacatcagcaccagaagagccagacagcacaagtgcgccctgctgctgcaggagatccccgccatcagctacagaggcggcggcacctacaccaagggcgccttccagcaggccgcccagatcctgctgcacgccagagagaacagcaccaaggtggtgttcctgatcaccgacggctacagcaacggcggcgaccccagacccatcgccgccagcctgagagacagcggcgtggagatcttcaccttcggcatctggcagggcaacatcagagagctgaacgacatggccagcacccccaaggaggagcactgctacctgctgcacagcttcgaggagttcgaggccctggccagaagagccctgcacgaggacctgcccagcggcagcttcatccaggacgacatggtgcactgcagctacctgtgcgacgagggcaaggactgctgcgacagaatgggcagctgcaagtgcggcacccacaccggccacttcgagtgcatctgcgagaagggctactacggcaagggcctgcagtacgagtgcaccgcctgccccagcggcacctacaagcccgagggcagccccggcggcatcagcagctgcatcccctgccccgacgagaaccacaccagcccccccggcagcaccagccccgaggactgcgtgtgcagagagggctacagagccagcggccagacctgcgagctggtgcactgccccgccctgaagccccccgagaacggctacttcatccagaacacctgcaacaaccacttcaacgccgcctgcggcgtgagatgccaccccggcttcgacctggtgggcagcagcatcatcctgtgcctgcccaacggcctgtggagcggcagcgagagctactgcagagtgagaacctgcccccacctgagacagcccaagcacggccacatcagctgcagcaccagagagatgctgtacaagaccacctgcctggtggcctgcgacgagggctacagactggagggcagcgacaagctgacctgccagggcaacagccagtgggacggccccgagcccagatgcgtggagagacactgcagcaccttccagatgcccaaggacgtgatcatcagcccccacaactgcggcaagcagcccgccaagttcggcaccatctgctacgtgagctgcagacagggcttcatcctgagcggcgtgaaggagatgctgagatgcaccaccagcggcaagtggaacgtgggcgtgcaggccgccgtgtgcaaggacgtggaggccccccagatcaactgccccaaggacatcgaggccaagaccctggagcagcaggacagcgccaacgtgacctggcagatccccaccgccaaggacaacagcggcgagaaggtgagcgtgcacgtgcaccccgccttcacccccccctacctgttccccatcggcgacgtggccatcgtgtacaccgccaccgacctgagcggcaaccaggccagctgcatcttccacatcaaggtgatcgacgccgagccccccgtgatcgactggtgcagaagccccccccccgtgcaggtgagcgagaaggtgcacgccgccagctgggacgagccccagttcagcgacaacagcggcgccgagctggtgatcaccagaagccacacccagggcgacctgttcccccagggcgagaccatcgtgcagtacaccgccaccgaccccagcggcaacaacagaacctgcgacatccacatcgtgatcaagggcagcccctgcgagatccccttcacccccgtgaacggcgacttcatctgcacccccgacaacaccggcgtgaactgcaccctgacctgcctggagggctacgacttcaccgagggcagcaccgacaagtactactgcgcctacgaggacggcgtgtggaagcccacctacaccaccgagtggcccgactgcgccaagaagagattcgccaaccacggcttcaagagcttcgagatgttctacaaggccgccagatgcgacgacaccgacctgatgaagaagttcagcgaggccttcgagaccaccctgggcaagatggtgcccagcttctgcagcgacgccgaggacatcgactgcagactggaggagaacctgaccaagaagtactgcctggagtacaactacgactacgagaacggcttcgccatcggccccggcggctggggcgccgccaacagactggactacagctacgacgacttcctggacaccgtgcaggagaccgccaccagcatcggcaacgccaagagcagcagaatcaagagaagcgcccccctgagcgactacaagatcaagctgatcttcaacatcaccgccagcgtgcccctgcccgacgagagaaacgacaccctggagtgggagaaccagcagagactgctgcagaccctggagaccatcaccaacaagctgaagagaaccctgaacaaggaccccatgtacagcttccagctggccagcgagatcctgatcgccgacagcaacagcctggagaccaagaaggccagccccttctgcagacccggcagcgtgctgagaggcagaatgtgcgtgaactgccccctgggcacctactacaacctggagcacttcacctgcgagagctgcagaatcggcagctaccaggacgaggagggccagctggagtgcaagctgtgccccagcggcatgtacaccgagtacatccacagcagaaacatcagcgactgcaaggcccagtgcaagcagggcacctacagctacagcggcctggagacctgcgagagctgccccctgggcacctaccagcccaagttcggcagcagaagctgcctgagctgccccgagaacaccagcaccgtgaagagaggcgccgtgaacatcagcgcctgcggcgtgccctgccccgagggcaagttcagcagaagcggcctgatgccctgccacccctgccccagagactactaccagcccaacgccggcaaggccttctgcctggcctgccccttctacggcaccacccccttcgccggcagcagaagcatcaccgagtgcagcagcttcagcagcaccttcagcgccgccgaggagagcgtggtgccccccgccagcctgggccacatcaagaagagacacgagatcagcagccaggtgttccacgagtgcttcttcaacccctgccacaacagcggcacctgccagcagctgggcagaggctacgtgtgcctgtgccccctgggctacaccggcctgaagtgcgagaccgacatcgacgagtgcagccccctgccctgcctgaacaacggcgtgtgcaaggacctggtgggcgagttcatctgcgagtgccccagcggctacaccggccagagatgcgaggagaacatcaacgagtgcagcagcagcccctgcctgaacaagggcatctgcgtggacggcgtggccggctacagatgcacctgcgtgaagggcttcgtgggcctgcactgcgagaccgaggtgaacgagtgccagagcaacccctgcctgaacaacgccgtgtgcgaggaccaggtgggcggcttcctgtgcaagtgcccccccggcttcctgggcaccagatgcggcaagaacgtggacgagtgcctgagccagccctgcaagaacggcgccacctgcaaggacggcgccaacagcttcagatgcctgtgcgccgccggcttcaccggcagccactgcgagctgaacatcaacgagtgccagagcaacccctgcagaaaccaggccacctgcgtggacgagctgaacagctacagctgcaagtgccagcccggcttcagcggcaagagatgcgagaccgagcagagcaccggcttcaacctggacttcgaggtgagcggcatctacggctacgtgatgctggacggcatgctgcccagcctgcacgccctgacctgcaccttctggatgaagagcagcgacgacatgaactacggcacccccatcagctacgccgtggacaacggcagcgacaacaccctgctgctgaccgactacaacggctgggtgctgtacgtgaacggcagagagaagatcaccaactgccccagcgtgaacgacggcagatggcaccacatcgccatcacctggaccagcgccaacggcatctggaaggtgtacatcgacggcaagctgagcgacggcggcgccggcctgagcgtgggcctgcccatccccggcggcggcgccctggtgctgggccaggagcaggacaagaagggcgagggcttcagccccgccgagagcttcgtgggcagcatcagccagctgaacctgtgggactacgtgctgagcccccagcaggtgaagagcctggccaccagctgccccgaggagctgagcaagggcaacgtgctggcctggcccgacttcctgagcggcatcgtgggcaaggtgaagatcgacagcaagagcatcttctgcagcgactgccccagactgggcggcagcgtgccccacctgagaaccgccagcgaggacctgaagcccggcagcaaggtgaacctgttctgcgaccccggcttccagctggtgggcaaccccgtgcagtactgcctgaaccagggccagtggacccagcccctgccccactgcgagagaatcagctgcggcgtgcccccccccctggagaacggcttccacagcgccgacgacttctacgccggcagcaccgtgacctaccagtgcaacaacggctactacctgctgggcgacagcagaatgttctgcaccgacaacggcagctggaacggcgtgagccccagctgcctggacgtggacgagtgcgccgtgggcagcgactgcagcgagcacgccagctgcctgaacgtggacggcagctacatctgcagctgcgtgcccccctacaccggcgacggcaagaactgcgccgagcccatcaagtgcaaggcccccggcaaccccgagaacggccacagcagcggcgagatctacaccgtgggcgccgaggtgaccttcagctgccaggagggctaccagctgatgggcgtgaccaagatcacctgcctggagagcggcgagtggaaccacctgatcccctactgcaaggccgtgagctgcggcaagcccgccatccccgagaacggctgcatcgaggagctggccttcaccttcggcagcaaggtgacctacagatgcaacaagggctacaccctggccggcgacaaggagagcagctgcctggccaacagcagctggagccacagcccccccgtgtgcgagcccgtgaagtgcagcagccccgagaacatcaacaacggcaagtacatcctgagcggcctgacctacctgagcaccgccagctacagctgcgacaccggctacagcctgcagggccccagcatcatcgagtgcaccgccagcggcatctgggacagagccccccccgcctgccacctggtgttctgcggcgagccccccgccatcaaggacgccgtgatcaccggcaacaacttcaccttcagaaacaccgtgacctacacctgcaaggagggctacaccctggccggcctggacaccatcgagtgcctggccgacggcaagtggagcagaagcgaccagcagtgcctggccgtgagctgcgacgagccccccatcgtggaccacgccagccccgagaccgcccacagactgttcggcgacatcgccttctactactgcagcgacggctacagcctggccgacaacagccagctgctgtgcaacgcccagggcaagtgggtgccccccgagggccaggacatgcccagatgcatcgcccacttctgcgagaagccccccagcgtgagctacagcatcctggagagcgtgagcaaggccaagttcgccgccggcagcgtggtgagcttcaagtgcatggagggcttcgtgctgaacaccagcgccaagatcgagtgcatgagaggcggccagtggaaccccagccccatgagcatccagtgcatccccgtgagatgcggcgagccccccagcatcatgaacggctacgccagcggcagcaactacagcttcggcgccatggtggcctacagctgcaacaagggcttctacatcaagggcgagaagaagagcacctgcgaggccaccggccagtggagcagccccatccccacctgccaccccgtgagctgcggcgagccccccaaggtggagaacggcttcctggagcacaccaccggcagaatcttcgagagcgaggtgagataccagtgcaaccccggctacaagagcgtgggcagccccgtgttcgtgtgccaggccaacagacactggcacagcgagagccccctgatgtgcgtgcccctggactgcggcaagcccccccccatccagaacggcttcatgaagggcgagaacttcgaggtgggcagcaaggtgcagttcttctgcaacgagggctacgagctggtgggcgacagcagctggacctgccagaagagcggcaagtggaacaagaagagcaaccccaagtgcatgcccgccaagtgccccgagccccccctgctggagaaccagctggtgctgaaggagctgaccaccgaggtgggcgtggtgaccttcagctgcaaggagggccacgtgctgcagggccccagcgtgctgaagtgcctgcccagccagcagtggaacgacagcttccccgtgtgcaagatcgtgctgtgcacccccccccccctgatcagcttcggcgtgcccatccccagcagcgccctgcacttcggcagcaccgtgaagtacagctgcgtgggcggcttcttcctgagaggcaacagcaccaccctgtgccagcccgacggcacctggagcagccccctgcccgagtgcgtgcccgtggagtgcccccagcccgaggagatccccaacggcatcatcgacgtgcagggcctggcctacctgagcaccgccctgtacacctgcaagcccggcttcgagctggtgggcaacaccaccaccctgtgcggcgagaacggccactggctgggcggcaagcccacctgcaaggccatcgagtgcctgaagcccaaggagatcctgaacggcaagttcagctacaccgacctgcactacggccagaccgtgacctacagctgcaacagaggcttcagactggagggccccagcgccctgacctgcctggagaccggcgactgggacgtggacgcccccagctgcaacgccatccactgcgacagcccccagcccatcgagaacggcttcgtggagggcgccgactacagctacggcgccatcatcatctacagctgcttccccggcttccaggtggccggccacgccatgcagacctgcgaggagagcggctggagcagcagcatccccacctgcatgcccatcgactgcggcctgcccccccacatcgacttcggcgactgcaccaagctgaaggacgaccagggctacttcgagcaggaggacgacatgatggaggtgccctacgtgaccccccaccccccctaccacctgggcgccgtggccaagacctgggagaacaccaaggagagccccgccacccacagcagcaacttcctgtacggcaccatggtgagctacacctgcaaccccggctacgagctgctgggcaaccccgtgctgatctgccaggaggacggcacctggaacggcagcgcccccagctgcatcagcatcgagtgcgacctgcccaccgcccccgagaacggcttcctgagattcaccgagaccagcatgggcagcgccgtgcagtacagctgcaagcccggccacatcctggccggcagcgacctgagactgtgcctggagaacagaaagtggagcggcgccagccccagatgcgaggccatcagctgcaagaagcccaaccccgtgatgaacggcagcatcaagggcagcaactacacctacctgagcaccctgtactacgagtgcgaccccggctacgtgctgaacggcaccgagagaagaacctgccaggacgacaagaactgggacgaggacgagcccatctgcatccccgtggactgcagcagcccccccgtgagcgccaacggccaggtgagaggcgacgagtacaccttccagaaggagatcgagtacacctgcaacgagggcttcctgctggagggcgccagaagcagagtgtgcctggccaacggcagctggagcggcgccacccccgactgcgtgcccgtgagatgcgccacccccccccagctggccaacggcgtgaccgagggcctggactacggcttcatgaaggaggtgaccttccactgccacgagggctacatcctgcacggcgcccccaagctgacctgccagagcgacggcaactgggacgccgagatccccctgtgcaagcccgtgaactgcggcccccccgaggacctggcccacggcttccccaacggcttcagcttcatccacggcggccacatccagtaccagtgcttccccggctacaagctgcacggcaacagcagcagaagatgcctgagcaacggcagctggagcggcagcagccccagctgcctgccctgcagatgcagcacccccgtgatcgagtacggcaccgtgaacggcaccgacttcgactgcggcaaggccgccagaatccagtgcttcaagggcttcaagctgctgggcctgagcgagatcacctgcgaggccgacggccagtggagcagcggcttcccccactgcgagcacaccagctgcggcagcctgcccatgatccccaacgccttcatcagcgagaccagcagctggaaggagaacgtgatcacctacagctgcagaagcggctacgtgatccagggcagcagcgacctgatctgcaccgagaagggcgtgtggagccagccctaccccgtgtgcgagcccctgagctgcggcagcccccccagcgtggccaacgccgtggccaccggcgaggcccacacctacgagagcgaggtgaagctgagatgcctggagggctacaccatggacaccgacaccgacaccttcacctgccagaaggacggcagatggttccccgagagaatcagctgcagccccaagaagtgccccctgcccgagaacatcacccacatcctggtgcacggcgacgacttcagcgtgaacagacaggtgagcgtgagctgcgccgagggctacaccttcgagggcgtgaacatcagcgtgtgccagctggacggcacctgggagccccccttcagcgacgagagctgcagccccgtgagctgcggcaagcccgagagccccgagcacggcttcgtggtgggcagcaagtacaccttcgagagcaccatcatctaccagtgcgagcccggctacgagctggagggcaacagagagagagtgtgccaggagaacagacagtggagcggcggcgtggccatctgcaaggagaccagatgcgagacccccctggagttcctgaacggcaaggccgacatcgagaacagaaccaccggccccaacgtggtgtacagctgcaacagaggctacagcctggagggccccagcgaggcccactgcaccgagaacggcacctggagccaccccgtgcccctgtgcaagcccaacccctgccccgtgcccttcgtgatccccgagaacgccctgctgagcgagaaggagttctacgtggaccagaacgtgagcatcaagtgcagagagggcttcctgctgcagggccacggcatcatcacctgcaaccccgacgagacctggacccagaccagcgccaagtgcgagaagatcagctgcggcccccccgcccacgtggagaacgccatcgccagaggcgtgcactaccagtacggcgacatgatcacctacagctgctacagcggctacatgctggagggcttcctgagaagcgtgtgcctggagaacggcacctggaccagcccccccatctgcagagccgtgtgcagattcccctgccagaacggcggcatctgccagagacccaacgcctgcagctgccccgagggctggatgggcagactgtgcgaggagcccatctgcatcctgccctgcctgaacggcggcagatgcgtggccccctaccagtgcgactgcccccccggctggaccggcagcagatgccacaccgccgtgtgccagagcccctgcctgaacggcggcaagtgcgtgagacccaacagatgccactgcctgagcagctggaccggccacaactgcagcagaaagagaagaaccggcttctag

SEQ ID NO: 245860 - DNA, 10716 bp, Artificial Sequence
  derived and/or modified sequence
atgtggcccagactggccttctgctgctggggcctggccctggtgagcggctgggccaccttccagcagatgagccccagcagaaacttcagcttcagactgttccccgagaccgcccccggcgcccccggcagcatccccgccccccccgcccccggcgacgaggccgccggcagcagagtggagagactgggccaggccttcagaagaagagtgagactgctgagagagctgagcgagagactggagctggtgttcctggtggacgacagcagcagcgtgggcgaggtgaacttcagaagcgagctgatgttcgtgagaaagctgctgagcgacttccccgtggtgcccaccgccaccagagtggccatcgtgaccttcagcagcaagaactacgtggtgcccagagtggactacatcagcaccagaagagccagacagcacaagtgcgccctgctgctgcaggagatccccgccatcagctacagaggcggcggcacctacaccaagggcgccttccagcaggccgcccagatcctgctgcacgccagagagaacagcaccaaggtggtgttcctgatcaccgacggctacagcaacggcggcgaccccagacccatcgccgccagcctgagagacagcggcgtggagatcttcaccttcggcatctggcagggcaacatcagagagctgaacgacatggccagcacccccaaggaggagcactgctacctgctgcacagcttcgaggagttcgaggccctggccagaagagccctgcacgaggacctgcccagcggcagcttcatccaggacgacatggtgcactgcagctacctgtgcgacgagggcaaggactgctgcgacagaatgggcagctgcaagtgcggcacccacaccggccacttcgagtgcatctgcgagaagggctactacggcaagggcctgcagtacgagtgcaccgcctgccccagcggcacctacaagcccgagggcagccccggcggcatcagcagctgcatcccctgccccgacgagaaccacaccagcccccccggcagcaccagccccgaggactgcgtgtgcagagagggctacagagccagcggccagacctgcgagctggtgcactgccccgccctgaagccccccgagaacggctacttcatccagaacacctgcaacaaccacttcaacgccgcctgcggcgtgagatgccaccccggcttcgacctggtgggcagcagcatcatcctgtgcctgcccaacggcctgtggagcggcagcgagagctactgcagagtgagaacctgcccccacctgagacagcccaagcacggccacatcagctgcagcaccagagagatgctgtacaagaccacctgcctggtggcctgcgacgagggctacagactggagggcagcgacaagctgacctgccagggcaacagccagtgggacggccccgagcccagatgcgtggagagacactgcagcaccttccagatgcccaaggacgtgatcatcagcccccacaactgcggcaagcagcccgccaagttcggcaccatctgctacgtgagctgcagacagggcttcatcctgagcggcgtgaaggagatgctgagatgcaccaccagcggcaagtggaacgtgggcgtgcaggccgccgtgtgcaaggacgtggaggccccccagatcaactgccccaaggacatcgaggccaagaccctggagcagcaggacagcgccaacgtgacctggcagatccccaccgccaaggacaacagcggcgagaaggtgagcgtgcacgtgcaccccgccttcacccccccctacctgttccccatcggcgacgtggccatcgtgtacaccgccaccgacctgagcggcaaccaggccagctgcatcttccacatcaaggtgatcgacgccgagccccccgtgatcgactggtgcagaagccccccccccgtgcaggtgagcgagaaggtgcacgccgccagctgggacgagccccagttcagcgacaacagcggcgccgagctggtgatcaccagaagccacacccagggcgacctgttcccccagggcgagaccatcgtgcagtacaccgccaccgaccccagcggcaacaacagaacctgcgacatccacatcgtgatcaagggcagcccctgcgagatccccttcacccccgtgaacggcgacttcatctgcacccccgacaacaccggcgtgaactgcaccctgacctgcctggagggctacgacttcaccgagggcagcaccgacaagtactactgcgcctacgaggacggcgtgtggaagcccacctacaccaccgagtggcccgactgcgccaagaagagattcgccaaccacggcttcaagagcttcgagatgttctacaaggccgccagatgcgacgacaccgacctgatgaagaagttcagcgaggccttcgagaccaccctgggcaagatggtgcccagcttctgcagcgacgccgaggacatcgactgcagactggaggagaacctgaccaagaagtactgcctggagtacaactacgactacgagaacggcttcgccatcggccccggcggctggggcgccgccaacagactggactacagctacgacgacttcctggacaccgtgcaggagaccgccaccagcatcggcaacgccaagagcagcagaatcaagagaagcgcccccctgagcgactacaagatcaagctgatcttcaacatcaccgccagcgtgcccctgcccgacgagagaaacgacaccctggagtgggagaaccagcagagactgctgcagaccctggagaccatcaccaacaagctgaagagaaccctgaacaaggaccccatgtacagcttccagctggccagcgagatcctgatcgccgacagcaacagcctggagaccaagaaggccagccccttctgcagacccggcagcgtgctgagaggcagaatgtgcgtgaactgccccctgggcacctactacaacctggagcacttcacctgcgagagctgcagaatcggcagctaccaggacgaggagggccagctggagtgcaagctgtgccccagcggcatgtacaccgagtacatccacagcagaaacatcagcgactgcaaggcccagtgcaagcagggcacctacagctacagcggcctggagacctgcgagagctgccccctgggcacctaccagcccaagttcggcagcagaagctgcctgagctgccccgagaacaccagcaccgtgaagagaggcgccgtgaacatcagcgcctgcggcgtgccctgccccgagggcaagttcagcagaagcggcctgatgccctgccacccctgccccagagactactaccagcccaacgccggcaaggccttctgcctggcctgccccttctacggcaccacccccttcgccggcagcagaagcatcaccgagtgcagcagcttcagcagcaccttcagcgccgccgaggagagcgtggtgccccccgccagcctgggccacatcaagaagagacacgagatcagcagccaggtgttccacgagtgcttcttcaacccctgccacaacagcggcacctgccagcagctgggcagaggctacgtgtgcctgtgccccctgggctacaccggcctgaagtgcgagaccgacatcgacgagtgcagccccctgccctgcctgaacaacggcgtgtgcaaggacctggtgggcgagttcatctgcgagtgccccagcggctacaccggccagagatgcgaggagaacatcaacgagtgcagcagcagcccctgcctgaacaagggcatctgcgtggacggcgtggccggctacagatgcacctgcgtgaagggcttcgtgggcctgcactgcgagaccgaggtgaacgagtgccagagcaacccctgcctgaacaacgccgtgtgcgaggaccaggtgggcggcttcctgtgcaagtgcccccccggcttcctgggcaccagatgcggcaagaacgtggacgagtgcctgagccagccctgcaagaacggcgccacctgcaaggacggcgccaacagcttcagatgcctgtgcgccgccggcttcaccggcagccactgcgagctgaacatcaacgagtgccagagcaacccctgcagaaaccaggccacctgcgtggacgagctgaacagctacagctgcaagtgccagcccggcttcagcggcaagagatgcgagaccgagcagagcaccggcttcaacctggacttcgaggtgagcggcatctacggctacgtgatgctggacggcatgctgcccagcctgcacgccctgacctgcaccttctggatgaagagcagcgacgacatgaactacggcacccccatcagctacgccgtggacaacggcagcgacaacaccctgctgctgaccgactacaacggctgggtgctgtacgtgaacggcagagagaagatcaccaactgccccagcgtgaacgacggcagatggcaccacatcgccatcacctggaccagcgccaacggcatctggaaggtgtacatcgacggcaagctgagcgacggcggcgccggcctgagcgtgggcctgcccatccccggcggcggcgccctggtgctgggccaggagcaggacaagaagggcgagggcttcagccccgccgagagcttcgtgggcagcatcagccagctgaacctgtgggactacgtgctgagcccccagcaggtgaagagcctggccaccagctgccccgaggagctgagcaagggcaacgtgctggcctggcccgacttcctgagcggcatcgtgggcaaggtgaagatcgacagcaagagcatcttctgcagcgactgccccagactgggcggcagcgtgccccacctgagaaccgccagcgaggacctgaagcccggcagcaaggtgaacctgttctgcgaccccggcttccagctggtgggcaaccccgtgcagtactgcctgaaccagggccagtggacccagcccctgccccactgcgagagaatcagctgcggcgtgcccccccccctggagaacggcttccacagcgccgacgacttctacgccggcagcaccgtgacctaccagtgcaacaacggctactacctgctgggcgacagcagaatgttctgcaccgacaacggcagctggaacggcgtgagccccagctgcctggacgtggacgagtgcgccgtgggcagcgactgcagcgagcacgccagctgcctgaacgtggacggcagctacatctgcagctgcgtgcccccctacaccggcgacggcaagaactgcgccgagcccatcaagtgcaaggcccccggcaaccccgagaacggccacagcagcggcgagatctacaccgtgggcgccgaggtgaccttcagctgccaggagggctaccagctgatgggcgtgaccaagatcacctgcctggagagcggcgagtggaaccacctgatcccctactgcaaggccgtgagctgcggcaagcccgccatccccgagaacggctgcatcgaggagctggccttcaccttcggcagcaaggtgacctacagatgcaacaagggctacaccctggccggcgacaaggagagcagctgcctggccaacagcagctggagccacagcccccccgtgtgcgagcccgtgaagtgcagcagccccgagaacatcaacaacggcaagtacatcctgagcggcctgacctacctgagcaccgccagctacagctgcgacaccggctacagcctgcagggccccagcatcatcgagtgcaccgccagcggcatctgggacagagccccccccgcctgccacctggtgttctgcggcgagccccccgccatcaaggacgccgtgatcaccggcaacaacttcaccttcagaaacaccgtgacctacacctgcaaggagggctacaccctggccggcctggacaccatcgagtgcctggccgacggcaagtggagcagaagcgaccagcagtgcctggccgtgagctgcgacgagccccccatcgtggaccacgccagccccgagaccgcccacagactgttcggcgacatcgccttctactactgcagcgacggctacagcctggccgacaacagccagctgctgtgcaacgcccagggcaagtgggtgccccccgagggccaggacatgcccagatgcatcgcccacttctgcgagaagccccccagcgtgagctacagcatcctggagagcgtgagcaaggccaagttcgccgccggcagcgtggtgagcttcaagtgcatggagggcttcgtgctgaacaccagcgccaagatcgagtgcatgagaggcggccagtggaaccccagccccatgagcatccagtgcatccccgtgagatgcggcgagccccccagcatcatgaacggctacgccagcggcagcaactacagcttcggcgccatggtggcctacagctgcaacaagggcttctacatcaagggcgagaagaagagcacctgcgaggccaccggccagtggagcagccccatccccacctgccaccccgtgagctgcggcgagccccccaaggtggagaacggcttcctggagcacaccaccggcagaatcttcgagagcgaggtgagataccagtgcaaccccggctacaagagcgtgggcagccccgtgttcgtgtgccaggccaacagacactggcacagcgagagccccctgatgtgcgtgcccctggactgcggcaagcccccccccatccagaacggcttcatgaagggcgagaacttcgaggtgggcagcaaggtgcagttcttctgcaacgagggctacgagctggtgggcgacagcagctggacctgccagaagagcggcaagtggaacaagaagagcaaccccaagtgcatgcccgccaagtgccccgagccccccctgctggagaaccagctggtgctgaaggagctgaccaccgaggtgggcgtggtgaccttcagctgcaaggagggccacgtgctgcagggccccagcgtgctgaagtgcctgcccagccagcagtggaacgacagcttccccgtgtgcaagatcgtgctgtgcacccccccccccctgatcagcttcggcgtgcccatccccagcagcgccctgcacttcggcagcaccgtgaagtacagctgcgtgggcggcttcttcctgagaggcaacagcaccaccctgtgccagcccgacggcacctggagcagccccctgcccgagtgcgtgcccgtggagtgcccccagcccgaggagatccccaacggcatcatcgacgtgcagggcctggcctacctgagcaccgccctgtacacctgcaagcccggcttcgagctggtgggcaacaccaccaccctgtgcggcgagaacggccactggctgggcggcaagcccacctgcaaggccatcgagtgcctgaagcccaaggagatcctgaacggcaagttcagctacaccgacctgcactacggccagaccgtgacctacagctgcaacagaggcttcagactggagggccccagcgccctgacctgcctggagaccggcgactgggacgtggacgcccccagctgcaacgccatccactgcgacagcccccagcccatcgagaacggcttcgtggagggcgccgactacagctacggcgccatcatcatctacagctgcttccccggcttccaggtggccggccacgccatgcagacctgcgaggagagcggctggagcagcagcatccccacctgcatgcccatcgactgcggcctgcccccccacatcgacttcggcgactgcaccaagctgaaggacgaccagggctacttcgagcaggaggacgacatgatggaggtgccctacgtgaccccccaccccccctaccacctgggcgccgtggccaagacctgggagaacaccaaggagagccccgccacccacagcagcaacttcctgtacggcaccatggtgagctacacctgcaaccccggctacgagctgctgggcaaccccgtgctgatctgccaggaggacggcacctggaacggcagcgcccccagctgcatcagcatcgagtgcgacctgcccaccgcccccgagaacggcttcctgagattcaccgagaccagcatgggcagcgccgtgcagtacagctgcaagcccggccacatcctggccggcagcgacctgagactgtgcctggagaacagaaagtggagcggcgccagccccagatgcgaggccatcagctgcaagaagcccaaccccgtgatgaacggcagcatcaagggcagcaactacacctacctgagcaccctgtactacgagtgcgaccccggctacgtgctgaacggcaccgagagaagaacctgccaggacgacaagaactgggacgaggacgagcccatctgcatccccgtggactgcagcagcccccccgtgagcgccaacggccaggtgagaggcgacgagtacaccttccagaaggagatcgagtacacctgcaacgagggcttcctgctggagggcgccagaagcagagtgtgcctggccaacggcagctggagcggcgccacccccgactgcgtgcccgtgagatgcgccacccccccccagctggccaacggcgtgaccgagggcctggactacggcttcatgaaggaggtgaccttccactgccacgagggctacatcctgcacggcgcccccaagctgacctgccagagcgacggcaactgggacgccgagatccccctgtgcaagcccgtgaactgcggcccccccgaggacctggcccacggcttccccaacggcttcagcttcatccacggcggccacatccagtaccagtgcttccccggctacaagctgcacggcaacagcagcagaagatgcctgagcaacggcagctggagcggcagcagccccagctgcctgccctgcagatgcagcacccccgtgatcgagtacggcaccgtgaacggcaccgacttcgactgcggcaaggccgccagaatccagtgcttcaagggcttcaagctgctgggcctgagcgagatcacctgcgaggccgacggccagtggagcagcggcttcccccactgcgagcacaccagctgcggcagcctgcccatgatccccaacgccttcatcagcgagaccagcagctggaaggagaacgtgatcacctacagctgcagaagcggctacgtgatccagggcagcagcgacctgatctgcaccgagaagggcgtgtggagccagccctaccccgtgtgcgagcccctgagctgcggcagcccccccagcgtggccaacgccgtggccaccggcgaggcccacacctacgagagcgaggtgaagctgagatgcctggagggctacaccatggacaccgacaccgacaccttcacctgccagaaggacggcagatggttccccgagagaatcagctgcagccccaagaagtgccccctgcccgagaacatcacccacatcctggtgcacggcgacgacttcagcgtgaacagacaggtgagcgtgagctgcgccgagggctacaccttcgagggcgtgaacatcagcgtgtgccagctggacggcacctgggagccccccttcagcgacgagagctgcagccccgtgagctgcggcaagcccgagagccccgagcacggcttcgtggtgggcagcaagtacaccttcgagagcaccatcatctaccagtgcgagcccggctacgagctggagggcaacagagagagagtgtgccaggagaacagacagtggagcggcggcgtggccatctgcaaggagaccagatgcgagacccccctggagttcctgaacggcaaggccgacatcgagaacagaaccaccggccccaacgtggtgtacagctgcaacagaggctacagcctggagggccccagcgaggcccactgcaccgagaacggcacctggagccaccccgtgcccctgtgcaagcccaacccctgccccgtgcccttcgtgatccccgagaacgccctgctgagcgagaaggagttctacgtggaccagaacgtgagcatcaagtgcagagagggcttcctgctgcagggccacggcatcatcacctgcaaccccgacgagacctggacccagaccagcgccaagtgcgagaagatcagctgcggcccccccgcccacgtggagaacgccatcgccagaggcgtgcactaccagtacggcgacatgatcacctacagctgctacagcggctacatgctggagggcttcctgagaagcgtgtgcctggagaacggcacctggaccagcccccccatctgcagagccgtgtgcagattcccctgccagaacggcggcatctgccagagacccaacgcctgcagctgccccgagggctggatgggcagactgtgcgaggagcccatctgcatcctgccctgcctgaacggcggcagatgcgtggccccctaccagtgcgactgcccccccggctggaccggcagcagatgccacaccgccgtgtgccagagcccctgcctgaacggcggcaagtgcgtgagacccaacagatgccactgcctgagcagctggaccggccacaactgcagcagaaagagaagaaccggcttctag

SEQ ID NO: 245861 - DNA, 4494 bp, Artificial Sequence
  derived and/or modified sequence
atgccccgatgcatcgcgcacttttgtgaaaagccccccagcgtgtcgtacagtatcttagagtccgtgagtaaggcaaagtttgccgcggggtctgtcgtttcgttcaaatgcatggaaggtttcgttctgaacaccagcgccaagatcgaatgtatgagaggaggtcagtggaatccgtccccaatgtccattcaatgcatcccagtgcggtgtggagagcctcctagcatcatgaatggttatgcatctggctccaactatagcttcggcgccatggtcgcttatagttgtaacaaaggattttatatcaaaggagaaaaaaaaagcacttgtgaggcaaccggccagtggtcaagtccgatccctacatgtcatcccgtcagctgcggggaaccacccaaggtggagaacggatttttagagcacaccactggcagaatattcgaaagtgaggtgcgctatcaatgcaatcccggctataagagcgttggatctcctgtctttgtatgccaggcaaatagacattggcacagcgaatcacccttaatgtgtgtgcccttggattgcggcaaacctcctcccattcagaatggcttcatgaaaggggaaaacttcgaggttgggtctaaagtgcaattcttctgtaatgaaggctatgagctggtcggagatagttcttggacatgtcagaaatctggcaagtggaacaaaaaatctaaccctaagtgcatgcctgcgaagtgccccgaaccgcccctgctcgaaaatcagcttgtactcaaggagctcacaacggaggtcggcgttgttactttcagttgcaaagaaggacacgtgttacaggggccctctgtgttgaaatgtctgccgtcacagcagtggaacgactcattccccgtctgcaagatcgttctgtgcactcctccccctcttatctcgttcggggtccctattccttcctctgcgcttcatttcggtagtaccgtcaagtactcctgcgtgggcgggttctttctgcgtgggaactctaccacactctgccagccagacggtacatggagcagtccactgcccgagtgtgtccccgtcgagtgtccacaaccagaggagattcctaatggcattatcgacgtgcagggcctggcctatttgtcgaccgccttgtacacttgcaagccgggatttgaattggtggggaacacaactaccttgtgcggggaaaacgggcactggcttggcggaaaacctacctgcaaggctatcgagtgtctaaagccaaaggagatcctaaatggtaaattctcttatactgatctccactacggccagacggtcacctactcatgtaatcgggggttcaggttggagggcccctcggcgctgacttgcctcgagaccggtgattgggacgtggacgcaccaagttgtaacgctatacactgcgactctccccagcctattgagaatggctttgtggagggtgcggactatagctacggagctattatcatctactcttgcttccccggcttccaagtagccggccatgcaatgcagacatgcgaggagtccggatggtccagctcaattccgacctgcatgccaatcgattgcgggctgccgccccatattgatttcggcgattgcacgaagcttaaggacgaccagggttacttcgagcaagaggatgatatgatggaggtgccgtacgttacccctcatccgccctatcacctgggggccgtggctaagacgtgggaaaatacaaaggagtctcctgcaacgcattcaagtaactttctgtacggtaccatggtgtcttacacttgtaatccgggctacgagctgctgggaaatcccgtgctgatctgtcaggaagacggtacttggaacggatctgccccaagctgcattagcattgagtgcgacctgcccaccgccccagagaacggatttcttaggttcacggagaccagcatgggatctgccgtgcagtactcctgtaagcccggacatatcctggccggctccgatctgagactgtgcttagagaacaggaaatggagcggagcctctccccgatgcgaagcaatctcatgtaagaagccgaacccggtcatgaacggcagtatcaagggcagcaattacacctaccttagcactctatactacgaatgcgacccaggttacgttctgaatggcacagaacggcgcacctgccaggacgataagaattgggacgaggacgagcccatctgtattcctgtcgactgctcttcgccgccagtgagtgcaaatggacaggtacgcggtgatgaatacacattccagaaagagatcgaatatacatgtaatgagggattccttctggagggcgctcggtctagagtctgcctggctaacggctcatggtcaggtgcgacgcctgattgcgtgcctgtgagatgcgctacacccccccagttggcaaatggggtgactgagggtctggattacggattcatgaaggaagtgacattccactgtcacgaggggtatattctgcacggcgcacccaaactaacctgccagagtgatgggaactgggacgctgagatcccactgtgcaaaccggttaactgtgggccacctgaggaccttgcccatgggttccccaacggctttagcttcatccacggaggacatatacaataccaatgttttcctggatacaaactgcacggcaacagttcacggagatgcctgagcaacggatcctggagcggttcatcaccttcctgtttgccttgtaggtgcagcactccagtgatcgagtatggcaccgtaaatggtacagacttcgactgcggcaaggcagccagaatccagtgctttaagggtttcaagttgttggggctgagcgagattacatgtgaagccgatggacagtggtcgtctggcttcccccattgtgagcacacatcatgtggctcattacctatgatacctaatgcatttattagtgagacaagctcctggaaggagaatgtgatcacgtattcgtgtcgcagcggatacgttatccagggcagttccgaccttatctgcaccgagaagggcgtctggtctcagccatacccagtgtgtgagcccctgagctgtgggtcacccccttctgttgccaatgcggtggccacgggcgaagcccacacatatgagagcgaggtgaagctgcggtgtctcgagggctacactatggacaccgacactgacaccttcacttgtcagaaagacggcaggtggttccccgagagaatctcctgctcacccaaaaagtgcccgttgccagagaacataacccacatactcgtccatggggacgacttctcagttaatcgccaggtgtccgtctcttgcgctgaaggctacaccttcgaaggggtgaacatcagcgtgtgccagttggacggcacttgggaacctccattttccgacgagtcctgcagcccggtgtcctgtggaaagcccgaatccccagaacacggcttcgtggtaggctctaagtatacctttgagtccaccattatttatcagtgcgaacccgggtacgagctggaggggaatcgggagagggtgtgtcaggagaatcggcagtggtcaggcggggtggccatctgcaaggagacacgctgcgagacgcctctcgaattcctgaacggaaaagccgatattgaaaacagaaccactgggcctaacgttgtgtattcgtgcaatcggggctattccctagaggggccctctgaagcccattgcacagagaatggcacgtggtcacacccagtgcctttgtgcaagcccaacccttgcccggttccattcgtgatccctgagaatgccttattatccgaaaaggaattctatgtggatcagaatgtcagcattaaatgccgcgaaggatttctcttgcagggccacgggattatcacttgtaatcccgacgagacatggacgcagacttccgcaaagtgcgagaagatatcgtgcggcccacctgctcacgtggagaatgccatagcgaggggcgtgcattatcagtacggggacatgatcacctacagctgttacagcgggtatatgctggagggatttcttcgtagcgtgtgtttagaaaacggcacctggacttccccccccatctgcagagctgtctgtagatttccctgtcaaaacgggggcatttgtcagcgtcctaacgcctgctcatgtccagagggctggatgggccgcctgtgtgaagagcctatctgtatcctgccctgcctcaacggtggaagatgtgtagcgccttatcagtgcgactgtccccctgggtggactgggtcgcgttgccacacagccgtctgccagtccccatgcctcaacggtggaaaatgtgtccgcccaaataggtgtcactgcctgagttcgtggaccggccataactgttctagaaagagaaggaccggtttttag

SEQ ID NO: 245862 - DNA, 4650 bp, Artificial Sequence
  derived and/or modified sequence
atgtggcctcgcttggctttttgctgttggggactggccctagtgagcggatgggcgacgttccagcagatgagtccaagtcggaacttctctttcagacttttcccagaaaccgctcctggagccccaggaagtatccctgccccccctgctcctggggacgaagccgccggtagtcgggtggagcggctggggcaggcttttagacgtagagtcaggcttctgagagagctgtctgaaaggctggagctggtgtttctggtagatgatagtagtagcgttggggaggtgaatttccgcagcgagctcatgttcgtccgcaagctgttaagcgacttccccgtggtacctacagcaacccgagtggctatcgtgacattttcctcaaagaactatgtggtgccaagggttgattacatttcaactcgccgcgcacgccagcataagtgcgcactcctgctgcaggaaataccggctatctcttaccgaggcgggggaacatacaccaaaggtgctttccagcaggcagcacagattttgctgcacgcccgggagaacagcactaaggtcgtgtttctcataactgatggatacagtaacgggggggacccccgccccatagccgcatctctcagggattcaggagtcgaaatcttcacgtttgggatttggcaggggaatatccgggaactgaatgacatggcatcaacccccaaagaggaacactgttacttgttacattctttcgaggaattcgaggcactggcccgccgggctctccacgaagacttgccctctggatcctttattcaggacgatatggtgcactgttcatatttatgcgacgagggcaaagactgttgtgatcgcatgggcagttgcaaatgcggcactcacacaggtcatttcgaatgtatctgtgaaaagggctattacggaaaaggactgcagtatgaatgcactgcctgtcctagtggtacttataaaccagagggcagtccaggcggcatcagctcttgcataccgtgccctgatgagaaccacacatctccacccggaagcactagccccgaagattgcgtctgtagagaaggataccgggcctctgggcaaacgtgcgagctggtccactgtccagcacttaaaccacctgagaatggctacttcattcagaacacctgtaacaaccattttaatgccgcctgcggagttaggtgccaccccggattcgacctggtggggagctccataattttgtgcctgcccaacggtttgtggtctggctctgagagttattgtcgggtaagaacgtgtccccaccttagacaacccaagcacgggcacatcagctgtagcaccagggaaatgctatataaaactacctgccttgtggcctgcgacgaggggtatagactcgaagggagtgataagctgacatgccaagggaactcccagtgggatggaccagaacctcgttgtgtcgagcgacactgctccacgttccagatgcccaaggatgtgattatatccccacataactgtggaaagcagcccgccaaattcgggaccatctgctacgtttcctgtcgacagggcttcattttatccggcgtaaaagagatgttgcgctgtactactagtggcaagtggaacgtcggcgttcaggccgccgtctgcaaggatgtagaagccccccaaatcaattgtcctaaggatatagaggccaagaccttggaacagcaagactccgccaatgtcacctggcagattcccaccgcaaaggataacagtggcgaaaaagtctctgtccacgttcacccagcttttactccaccctacctcttccccatcggcgacgtggccatcgtgtatactgctactgatctgtctggtaaccaggcctcatgcattttccacatcaaggtaattgatgcagagcctccggtcatagattggtgcaggtcccccccaccagttcaggtgagcgaaaaagtgcatgctgctagctgggacgagccacagttttcagataactcaggcgccgaactcgtcattacacggtctcatacccagggagacctgtttccgcaaggagaaacaatcgtacagtatactgcaaccgacccaagtggcaacaaccgtacttgcgatatccatattgtgatcaaaggctctccatgtgagattccattcaccccagtgaacggcgatttcatctgtacccctgacaacaccggtgtcaactgtactctgacctgtctggaaggttacgattttactgaggggtccaccgacaagtactattgcgcttatgaggacggcgtatggaaaccgacttatacaacagaatggccagactgtgccaaaaagcgatttgcgaatcacggattcaaaagcttcgaaatgttctataaggcagccaggtgcgacgatacagatcttatgaagaagtttagcgaggccttcgaaacaaccctcggaaagatggtcccttcgttttgcagtgatgcagaagacattgactgtcgtctggaagaaaatctgactaagaagtactgtctggagtacaactacgattatgaaaatggtttcgctatcggtccgggcggttggggagcagccaatcgcctcgactatagctatgacgatttcctggacacagttcaggagaccgcaacaagcattgggaacgcaaagtccagcagaattaaaagatctgccccactcagcgattataagattaagcttatcttcaacattacagcttcagtcccactgcctgatgaacgtaacgatactctagagtgggaaaaccagcagaggctgctgcagactctagagactattaccaataagctcaaaagaaccttgaacaaggatcccatgtacagtttccaactggcctccgagattctcatcgcggatagtaattcgctagaaaccaagaaggcttctcctttctgccgccccgggagcgtactgcgcggtcgcatgtgtgttaattgtccattgggaacctactataacctggagcactttacatgcgaatcttgcaggataggaagctaccaggatgaagaaggccagcttgagtgtaagctgtgtcctagcgggatgtacacagagtacattcactctagaaacatatccgattgcaaggcgcaatgtaagcagggcacgtactcctactccggtctcgagacctgcgaaagttgcccactgggaacctaccagcccaaatttggatctcgaagctgcctaagttgccccgaaaataccagcaccgtgaaacgcggcgctgtgaacattagtgcatgtggagtgccctgtcctgaggggaagttctcccggtcaggcctgatgccgtgtcatccttgtccccgtgactactaccaacctaatgctggaaaggcattctgtctggcttgcccattttacggaactaccccctttgccggttccagatctatcaccgaatgctccagcttctcctcaactttttcggctgcagaggagagtgtagtgcctccagccagtttggggcacatcaaaaagagacacgaaatctcttcgcgcgtgttccacgaatgtttttttaatccatgccacaattcagggacttgtcagcagttaggtcgcggctatgtctgtctgtgccctttgggatacaccggcctgaaatgcgagaccgacatagacgagtgttccccgttaccatgtctgaacaatggtgtctgtaaagatctcgtgggagagttcatctgcgaatgccctagcggttatactggccagcgctgtgaagagaacattaatgagtgctcatcctcaccctgtttaaacaaaggaatctgtgtcgacggcgtcgcaggttaccgatgtacatgcgttaaaggttttgtgggactgcactgtgagaccgaagtcaatgaatgccagagcaatccatgcttgaataacgccgtttgcgaggatcaggtcggaggatttctgtgcaagtgtcctccaggcttcttaggcacccggtgtgggaaaaacgtcgacgagtgtctgtcccaaccatgcaaaaacggggcaacatgtaaagatggggctaacagctttcggtgtttgtgcgctgctggcttcaccggtagtcactgtgagctgaacataaacgagtgccagtccaacccatgcaggaaccaggcgacttgtgtcgacgagcttaattcctactcatgtaagtgccagcctggatttagtggaaaaaggtgcgagaccgaacaaagcaccggatttaacctcgacttcgaagtgtctggtatctacgggtatgttatgctggatgggatgctaccctccctgcatgctcttacttgtactttctggatgaagagcagcgacgatatgaattacggcacacctatctcttatgcagtcgataacggctccgataatacactactcctgaccgactataacggatgggtactgtacgtgaacgggagggaaaagatcaccaactgtccgtctgtcaacgacggccgctggcatcatatcgccattacatggacttctgctaacggcatttggaaagtatacatcgacgggaagctcagcgatggaggcgcagggttatccgtaggactacccatccccggcatgttttag

SEQ ID NO: 245863 - DNA, 2538 bp, Artificial Sequence
  derived and/or modified sequence
atgagcccctcgcgcaatttttccttccgcctgttccccgagacagccccaggggcccctggctcaataccagcgcctccagcacccggcgatgaagccgccgggagccgggtggagcggctagggcaagcatttcgacgccgcgttcggctgctgcgtgaactgagcgaaaggcttgaactggtcttccttgtagacgattcatcaagtgttggagaggtcaacttccgctccgagctgatgtttgtgagaaaactgttgagtgattttcctgtggtgccaacggctactcgcgtcgctatagtgactttttcctctaaaaactatgtggtgcccagagtggattatattagtaccaggagggccagacaacataaatgcgcgctgctccttcaggagatcccagctatttcttacaggggggggggcacctacacaaaaggcgcattccaacaggccgcgcaaatcctgctccacgctcgggaaaacagtacaaaagtggttttcctcatcactgacggatactcaaatggtggagacccccgccccatcgccgcatccctgagagacagtggagtggagatcttcacattcggcatttggcaaggaaatattagggaactgaatgatatggctagtaccccaaaagaagagcattgttacttgctgcactccttcgaagaattcgaagccctcgcccgaagagctttgcatgaggatcttccctcagggtccttcatccaggacgacatggtccattgttcttacctgtgtgacgaaggcaaagattgttgcgatcggatgggtagctgcaagtgcggaacacacacaggccacttcgagtgtatttgcgagaaagggtattacgggaaggggctgcagtacgagtgtacagcatgtcccagcgggacctacaagccggaaggcagcccgggcggaatttcttcttgcattccttgcccggatgaaaaccacacctctcccccaggctcgacaagccccgaggactgcgtttgcagagagggttatagagcctccgggcagacgtgcgagctcgttcactgcccggccctgaagccccctgagaatggttatttcattcaaaacacctgcaataatcacttcaacgcagcctgcggggtgaggtgtcacccgggatttgaccttgtcggcagcagcatcatcctgtgcctgcctaatgggctgtggtcaggcagcgagagttattgccgggtgcgcacctgccctcacctgagacagcccaagcacgggcacatctcctgtagtactcgagagatgctgtataagacaacctgcctggtagcttgtgacgaaggctatcgacttgaaggctcagacaagctgacctgtcaaggaaatagccagtgggacggcccggagcccagatgtgtggagcgtcattgttctaccttccaaatgcccaaagacgtgatcatcagtcctcacaactgcgggaagcagccagctaaattcgggacaatttgctacgtgagctgcaggcaaggttttatcctctccggagtgaaggagatgctgcgttgcactacgagtggtaagtggaatgtgggagtgcaggccgcggtctgcaaagatgtagaggcccctcagattaattgccctaaagatatcgaggccaaaacactggagcagcaggattcagccaacgtcacctggcagatccccacagccaaggacaactccggcgaaaaagtgtcagtgcatgtgcatccggcatttacacccccctacctgttccctatcggtgatgtagccatcgtgtataccgctactgatctcagcgggaaccaggcgagttgtatcttccacattaaggtgatagatgccgagccacccgtgatcgattggtgccggtctccccctcccgtccaggtcagtgaaaaggtccatgccgccagctgggacgagcctcaattttccgacaattccggagccgaacttgttataactagaagccacacccagggtgatctatttccgcagggcgagactatagtccagtacaccgctaccgatcccagtggcaacaatagaacttgtgacatccatattgtgatcaaggggagcccttgtgagatcccattcactccagtaaacggcgattttatctgcaccccggataatactggcgtgaactgtaccctcacctgcttagaggggtacgatttcactgaaggaagtacggataaatactactgcgcgtatgaagacggggtgtggaagcccacctacactacggagtggcccgactgtgctaagaagaggtttgcaaaccacgggtttaagagcttcgaaatgttttacaaagcagcccgatgcgatgacactgacctgatgaaaaagttctctgaagcttttgaaactaccctcggaaaaatggttccctccttctgcagtgacgcagaggatatcgactgtcggctggaagaaaacctgaccaaaaagtactgcctggagtacaactatgattacgagaatggtttcgcaatcggtaactag

SEQ ID NO: 245864 - DNA, 1548 bp, Artificial Sequence
  derived and/or modified sequence
ctggagaaccagctggtccttaaagaactcactactgaagtaggtgtggtgacattttcatgtaaagagggacatgtgctacagggcccaagcgttcttaagtgcttacccagtcagcagtggaacgactcatttccagtgtgtaagatcgtactgtgcacacctccacctctgatctctttcggagtgccgatccctagctccgctctgcacttcgggtcaacagttaagtattcgtgtgtgggcggtttctttttgaggggaaactccaccaccctgtgtcagccagatggcacatggagtagcccactccccgagtgcgtgccagttgaatgcccccagcctgaggaaatccccaatggcattattgatgtgcagggtctcgcctacttgtctacagctctatatacctgcaagcctggcttcgaactggttgggaacacaacaacattgtgtggagaaaacggccattggctcggaggcaaaccaacatgtaaagccattgaatgtctgaagcccaaggaaattttgaacggcaagttttcctatacggacttgcactacggacagacagtcacatactcctgtaatagaggcttccgactggaaggacccagtgcgttaacctgtctcgagactggggattgggacgtggatgccccttcatgcaacgcaattcattgtgatagtccacagccaatcgagaacggctttgttgagggcgctgattacagttatggggcgattattatttatagctgcttccccgggttccaggttgccggacatgccatgcagacatgcgaggagtcagggtggagcagcagcatacctacttgcatgccaatcgattgcgggctcccaccacacatcgattttggcgactgcacaaagctaaaagacgatcaaggttattttgagcaagaagacgacatgatggaggttccctatgtgactcctcatcctccttaccacctgggtgccgtcgcaaagacatgggaaaacacaaaagaatcccccgcaactcacagttcaaatttcctgtacggcacaatggtttcctacacgtgcaacccaggctatgaacttctggggaatcccgtgctcatttgccaagaggatggtacctggaacggtagcgcgccttcatgtataagtattgaatgtgatctaccaactgctcccgagaacggcttccttcgcttcaccgagacctcaatgggttccgcagtgcagtattcttgcaaacccggacacatccttgcaggctcggatctgcgtctctgcctcgaaaacaggaagtggagtggcgccagtccccggtgcgaagccatttcttgcaagaagccaaaccccgtgatgaatggatcaatcaagggctcgaattacacgtatctttccacattatactacgaatgcgatcctggctacgtgctgaacggcactgaaaggcggacatgccaggacgataagacagggatgcgcatgagtccctttgcatttctgtggacagctgttcatcctcagtcccagcccatggctagatag

SEQ ID NO: 245865 - DNA, 10647 bp, Artificial Sequence
  derived and/or modified sequence
atgtctccctccaggaacttctcatttcgtctattcccagagacagctcctggtgctccagggtccattcctgcgcctcccgcgcctggagatgaagctgccgggtcacgggtcgagagacttggccaagcctttagacgccgggtgcgtttactgcgggagctttccgaaagactggaactggtcttcctcgtggacgattctagttccgtgggggaagtaaactttcggagcgagttaatgtttgtgcgcaaacttcttagtgactttccagtggtgccgacagcaacacgggtagcaattgtgacattcagctcgaaaaactacgtagttccccgcgtggactacattagcactaggcgagctagacagcacaaatgcgctctcctcctacaggagatcccagccatcagttaccgcggtggtggaacctatacaaagggtgcctttcagcaggcggcccagatcctactgcacgcccgtgagaactccaccaaggtcgtgtttcttatcacggacggttattctaatgggggcgatcccagacctattgcagcttctctgagggattcaggagtcgagatcttcacttttggtatttggcagggaaatataagggaactcaacgatatggccagcacaccgaaagaagaacactgctatttactccacagcttcgaagaatttgaagccctggctaggagagctctccacgaagatctaccatccggatccttcatccaggacgatatggtacattgctcctacctgtgcgatgaaggcaaggattgttgcgatagaatgggctcttgcaaatgcggcacacacaccgggcacttcgaatgtatctgtgaaaagggatactatggcaaaggcctccaatacgagtgcactgcgtgcccaagcggcacgtataaacctgagggtagtcccggcggaatttcctcttgcattccctgtcctgacgagaatcacacatcacccccaggttccacaagtccagaggactgcgtgtgccgggagggatatagagcctcgggacagacctgtgaactcgtgcactgcccagctctcaagccacctgaaaacgggtactttatccagaacacatgtaataatcactttaatgctgcgtgcggcgtaaggtgccacccggggttcgatctggtcgggtcctctattatactgtgcctgccgaacggattatggtcagggtcggagtcctactgtcgcgtgaggacatgcccacacctgagacaacctaaacacggccatatctcctgcagcacccgagagatgctctataagactacatgtctcgtggcctgtgacgaaggatacaggttggagggatcggataagttgacctgtcaggggaatagccaatgggatggcccagaaccccggtgtgtcgagcgccattgttcaactttccagatgccaaaagatgtcataatctcaccccacaactgcggaaagcaacccgctaaatttggtactatctgttatgttagctgtcggcaaggtttcatcttgtccggcgttaaagaaatgcttcggtgcaccacctctgggaagtggaatgtgggggtgcaggccgctgtctgcaaagacgtcgaagccccacagatcaactgtccaaaggacatcgaggctaagacactggaacagcaagattccgccaatgtgacatggcaaatcccaacggccaaggataatagtggcgagaaggtctccgtgcatgtacaccccgcattcactcctccttacctgtttccaattggtgacgtggcaattgtgtatacggctaccgacttgagtggtaaccaagcttcctgtatttttcacatcaaagtgatcgatgccgagccaccagtgattgactggtgtagatcgccccctcccgtacaagtgtcagaaaaagtccatgctgcttcttgggacgaaccccagttctctgacaacagcggggcagagctggtgatcacgagatctcatactcagggcgatctctttcctcagggggaaactatcgtacagtacacggctaccgatcctagcggaaacaacagaacatgcgacatccacattgtgatcaagggctccccatgcgaaatcccgtttacaccagtgaatggggacttcatttgcactccagacaacacaggcgtcaactgtacgctgacctgcttggagggctacgatttcacagagggctccacagataagtattactgtgcttatgaggacggcgtttggaaacccacctataccactgaatggccggactgcgccaaaaagaggttcgcaaaccatgggttcaaatcttttgagatgttctacaaggctgcccgttgcgacgataccgatctgatgaagaaattttctgaggcttttgagactaccctgggcaaaatggtgccttctttttgttctgatgccgaggatatcgactgtagactggaggagaacctaaccaaaaaatactgcctggaatacaattatgattacgaaaacgggttcgctatcgggcccggcggctggggagctgctaacagactcgactattcctatgacgatttcctcgatactgtccaagagacagcaactagtatcggcaatgcaaaaagcagccgcattaagaggagtgcccccttgtctgattacaaaattaaactcatttttaatatcacagctagcgtccccctcccggacgagcgcaatgacaccctggagtgggagaatcagcagaggctgctgcagactttggagaccatcaccaacaagctcaaaaggaccttgaataaagatccaatgtatagtttccagttggcctcagagatccttatcgcggatagtaactctctcgaaaccaagaaggccagcccattttgtaggccaggatctgttctgcgcggccgaatgtgcgtcaactgcccactgggaacctactacaatcttgagcatttcacttgtgagagctgccgaataggaagttatcaagatgaagaaggacagctggaatgcaagctgtgtccatcgggaatgtatactgaatacattcattcaaggaacatcagcgactgtaaagcccagtgtaaacagggtacctactcttactccggtctggagacatgcgagtcatgccccctcggcacttaccagccaaagttcgggtccaggtcgtgccttagctgtcctgagaacacctctacggtgaagagaggcgctgttaacatatctgcgtgcggggtgccttgccccgagggcaagttttctaggagtggtttgatgccttgccatccttgccccagggattactaccagcctaacgccggcaaggcattttgcctggcatgtcccttctatgggaccacgccatttgcaggatcccggagtatcaccgaatgttctagttttagctccacattttctgcagctgaagaaagtgtggtgccacctgcaagcttgggacacatcaagaagaggcacgagatctcctcacaggtgttccatgaatgcttcttcaatccatgccacaatagcggtacgtgccagcagctgggacgtggctacgtgtgcctgtgtccattaggctatacgggccttaagtgcgaaactgacattgatgaatgtagcccgctaccctgcctcaacaatggggtgtgcaaagacctagttggtgaattcatttgtgagtgcccaagcggctatacaggtcagagatgtgaggagaacattaacgagtgctcatcgtccccctgcttgaataaaggcatatgtgtggacggcgtggcaggctaccggtgcacttgtgtcaagggctttgtgggcctgcattgtgaaaccgaagtgaatgagtgtcagtccaacccttgtttgaacaatgccgtctgtgaggatcaggtgggtggatttctgtgtaagtgcccacctgggttcctggggaccaggtgcggaaagaatgtggacgaatgcctttcccagccttgcaaaaatggcgctacctgtaaagatggcgccaattcttttcgctgcctctgtgcagccgggttcaccggctcccattgtgaactcaatattaatgaatgccaaagcaatccatgccgcaatcaagcgacctgcgtcgacgaacttaatagctattcctgcaaatgtcaacctggattctcaggcaagaggtgtgagactgaacagagtactgggttcaacttggacttcgaggtgagtggaatttatggctacgttatgctggatgggatgctgcccagtctgcatgctctgacgtgcacattttggatgaagtccagtgacgatatgaattacggaactcctatctcctacgccgtggacaacggctctgataataccctgcttcttacagactataatgggtgggtgctttacgtgaatgggagagagaaaatcaccaattgcccttcagtgaacgatggcagatggcaccacatcgccattacctggacaagcgccaatggcatttggaaggtatacatagatggaaagctgagcgatggtggagccggactgagtgtgggattgcccatcccaggcggcggggccctcgtgcttggtcaagagcaggacaagaagggcgagggtttttcccccgcagagtcctttgtgggatccatatcacagttgaacttgtgggattacgtgcttagtccccagcaggtgaagagccttgctacaagttgtcccgaagagttatctaaggggaatgttctggcatggcccgactttcttagcggaattgttggcaaagtaaaaatcgactcaaagtcgatcttttgcagtgattgtccccgcctggggggctctgtgccgcacctgcggaccgcatcagaagacctgaagccgggttccaaagtaaacctgttctgcgatcccggattccagctggtgggaaatcccgtgcagtattgtctcaaccagggacagtggacccaaccactgccccattgtgagcgcatctcctgcggcgtgcctccacccctggagaatgggttccactctgcggacgatttctacgcggggtccactgtcacgtaccagtgtaacaacggatattacctgctgggtgattctagaatgttctgcaccgacaatggcagctggaacggagtcagcccttcatgcttggacgtagatgagtgcgccgtaggcagcgactgcagcgagcacgcaagttgtctcaacgtggatggttcatacatctgttcctgtgtgcctccttacacaggtgacggcaaaaactgcgctgagcccattaaatgcaaagctcccggcaacccagaaaatgggcattcatccggcgaaatttacactgtcggcgcggaggtcacctttagctgtcaggaaggatatcaactgatgggcgtgacaaaaatcacttgtcttgagagcggtgaatggaatcaccttatcccgtattgtaaagcagtctcatgcgggaaaccagctatacctgagaatggatgcatagaagagttagccttcactttcgggtcaaaggtgacatatcggtgcaataaaggctacacgctggctggagacaaggaatcttcctgtctggcgaactctagctggtctcattcaccccctgtgtgtgagccggtgaagtgtagtagtcccgaaaatatcaataatggaaagtatatcctgagcggacttacctacttgtccacagcaagttacagttgcgatacgggctattccctgcaagggcccagcatcatcgaatgcactgccagcggcatatgggaccgggcaccaccagcctgtcatttggttttctgtggagaacccccagcaatcaaggacgccgtcattaccggcaacaatttcacgttccgtaatacagtcacttacacgtgtaaagaggggtatacactagctggcctagataccatagaatgcctggctgacgggaagtggagtaggagcgatcagcagtgcctggctgtttcttgcgatgagccacctattgtggatcatgcaagccctgaaaccgctcaccgtctgttcggggatattgcattttactactgctcagatggctacagcctggccgataattcccagctgctgtgtaacgcccagggcaaatgggtccccccagaaggacaggatatgcccaggtgcattgcgcacttctgcgaaaaacctccctctgtgtcctattcaattctggaatctgtcagcaaggctaagttcgccgcaggaagcgtggtgtctttcaaatgcatggaggggttcgtgcttaacacttcagctaagattgagtgcatgaggggtggccaatggaacccgagcccgatgagcatccagtgcatccctgtacggtgtggagagcctccaagtatcatgaatggatacgcatcagggagtaattattcctttggagccatggtggcttattcctgcaataaggggttctacatcaaaggcgagaaaaagtctacgtgcgaggccacggggcagtggtcttcacctattcccacatgtcatccagtttcatgcggagaaccacccaaagtggaaaacggcttccttgaacacaccacaggcaggattttcgagagtgaggtccggtatcagtgcaacccaggctacaagtccgtgggatctcccgtattcgtgtgtcaggctaatcgacattggcatagcgagagtcccctgatgtgtgtccccttggattgtggcaaaccccctcccatccagaatggttttatgaaaggtgagaatttcgaggtgggatctaaggtgcagtttttttgcaatgagggctacgaactggtaggcgacagctcatggacctgtcagaagagtggaaagtggaataaaaagtctaaccccaagtgcatgcccgccaagtgccctgagccgcctctattggagaaccaactagtgctaaaggaattgactaccgaggtgggcgtggtaacgttttcatgcaaagagggacacgtgctgcagggcccctccgtgcttaagtgtctacccagccaacagtggaacgactcattccccgtctgtaagattgtcctgtgtacccccccaccccttatcagcttcggagtgcccatcccaagctctgccctgcattttggctcaacggttaagtattcatgcgtgggagggtttttcctgcgtggcaactccaccactctctgccagcccgacggcacatggagctcccccttgccggagtgtgttcccgtcgaatgtcctcagcccgaggaaataccgaatgggataatagatgttcagggactcgcgtatttgtctaccgcgctctatacctgtaaacccgggtttgaactcgtcggaaataccactaccttgtgtggcgagaatggccactggcttggcggcaagcctacgtgcaaggccattgaatgcctgaaacctaaggagattttgaatggaaaatttagctacacagatttgcactatggccagaccgtgacatactcttgcaataggggctttaggctagagggaccctccgccctcacttgtctcgagacaggagattgggacgttgatgccccatcctgcaacgccattcactgcgacagtccacagccgatcgagaatgggtttgtggaaggcgctgactattcctatggagccataattatttatagttgctttcccggctttcaggtggctggacacgctatgcaaacatgcgaggagtccggctggagcagctctattccgacttgcatgccaatcgattgcggtcttcctcctcatatagacttcggcgactgtactaaactgaaagacgaccagggctactttgaacaggaggacgacatgatggaggtcccgtacgttaccccacatcctccttaccacctcggcgccgtagctaaaacatgggagaataccaaagagtcccccgctactcattctagcaatttcttgtacggtaccatggttagctatacatgtaaccccggatatgaactactcggcaaccctgtactgatttgccaggaggatggtacctggaacggctcagcccctagctgcatctctatagagtgcgacctgcccactgcccctgagaacgggttcctcagattcaccgagacgagcatggggagtgcggtgcagtactcttgtaaacccgggcacatactggcaggctcagatctgagactgtgccttgaaaatcggaaatggtcaggtgctagtccccgttgcgaggccatttcctgcaagaaaccgaatcctgtgatgaacggcagcattaaaggttctaactatacctatctttcaaccctgtattacgagtgtgacccgggttacgtactcaacggcaccgagcggagaacgtgccaggacgacaaaaattgggatgaggatgagccaatttgtattcccgtcgactgtagcagccctcccgtaagtgcaaatgggcaggtgcgcggagacgaatacactttccagaaggaaatcgaatacacctgtaacgagggtttcctgctcgagggtgccagatcaagggtgtgtcttgctaatggctcatggagcggagctaccccggattgcgtgccagtgaggtgtgcaacacccccgcagcttgcaaacggagtgactgagggactcgactacggattcatgaaggaggtgaccttccactgtcatgagggctatattctgcacggtgcaccgaagctgacgtgccaaagcgacggcaactgggacgcagaaattccattgtgcaagcctgtgaactgcggcccccctgaagacttggctcatgggttcccgaacggttttagtttcatacatggcgggcacatccagtaccagtgtttccccgggtacaagctgcatggcaactccagcaggcgctgtttatctaatggctcctggtccggctcctctccctcctgcctgccgtgccgctgtagcactccagttatcgagtacggaacagttaacggcaccgactttgactgtggaaaagctgccagaattcaatgtttcaaaggctttaagctgttagggctctcagaaataacgtgtgaagcagacgggcagtggagcagcgggttcccacactgtgaacacacatcttgtggctcgctccccatgatcccgaacgcctttattagcgagactagctcctggaaggagaacgtgattacttacagttgtaggagtggctacgtgatccagggatcctccgatttgatctgcacagagaaaggggtctggagtcagccatacccagtgtgcgagcccctctcatgcgggagcccaccctcagttgccaacgccgtggccaccggggaggcacacacctacgagtcggaggtgaaactgcgctgcctggaggggtacaccatggatactgatactgacacctttacctgtcagaaagacgggaggtggtttcccgagaggattagctgttcccctaaaaaatgtccactcccggagaatattacacacatcttggtccatggggatgatttttcagtaaatcggcaggtttcagtgtcctgtgccgaaggatatacctttgagggggtgaacatctcagtgtgccagctagacggcacctgggagcctcctttttcagatgaatcatgctctccggtgtcttgcgggaaacccgaatctccagaacacggttttgtggtagggtcaaagtacacattcgagtcaactattatttaccagtgcgaaccgggatatgaactggagggtaatagggagagggtatgtcaggagaaccgccagtggagtggtggcgtggcaatctgtaaagagacaaggtgcgagacgcccctcgaattcctgaatggtaaggccgacatagaaaatcgaaccactggccctaatgtggtttattcatgtaatcgaggctactccctcgaagggccaagcgaagcacattgcacagaaaatggaacttggagccaccctgttcccttgtgtaaacccaacccctgccccgtccccttcgtgattcccgaaaatgcccttttaagcgaaaaggagttttacgttgaccaaaatgtctcgatcaagtgtcgtgaggggtttcttttacagggacacggcattataacctgcaaccctgacgagacatggacacaaacctccgccaaatgcgaaaaaatttcctgtggcccccccgctcatgtcgagaatgccatcgccaggggggtacactaccagtacggtgatatgatcacctattcatgctactccggctacatgttggaaggttttttaaggtccgtgtgtctcgagaatggcacttggacatccccaccaatctgtcgggctgtgtgcaggtttccctgccaaaatggtggaatctgtcaacggcctaacgcttgcagctgtccggaaggttggatgggacggttatgcgaagagcccatctgcattttgccgtgcctgaacggtggaaggtgcgtggctccataccagtgtgattgtccacccgggtggaccggcagccgctgccacacagcagtgtgccaatccccatgtttaaacggtggcaaatgcgtgcggccaaatcggtgtcattgtcttagtagctggaccggccataattgtagtcgtaagaggcgaacaggattttag

SEQ ID NO: 245866 - DNA, 10716 bp, Artificial Sequence
  derived and/or modified sequence
atgtggcccaggctggccttctgttgctggggccttgcccttgtgtcaggatgggccacttttcagcagatgagtcccagcaggaactttagtttccgtctgtttcccgaaacagcccccggagccccggggtcaatccccgctcctcccgcccccggggatgaggcagcaggatctagagtggagcgcctgggtcaagcctttaggaggcgggtacgactgctccgggagctctccgaacggctagaactagtatttctagtggacgactcctccagtgtgggagaagtaaactttaggtccgaactaatgtttgtccgaaagcttctctcagattttcccgtcgtgcctaccgccactcgagttgccattgtgaccttcagttccaagaactacgtggtgccaagagtcgattatatcagcacccgcagggcccgtcagcataaatgcgctctgcttctgcaggagattcctgctataagctaccgggggggaggaacttacactaaaggcgctttccagcaagccgcacagatcctgctccacgccagggagaacagcaccaaagtggttttcctgatcacagatggttattctaacggaggcgatcctcggccaatagccgcttccctgcgggatagcggagtggaaatcttcacgtttgggatctggcagggcaacattagggagcttaacgacatggcttccacaccaaaagaggagcactgctatctccttcactcattcgaagagtttgaggctctggcacgcagggctcttcatgaagacctaccatctggcagctttatccaggatgacatggtccactgctcatatctctgcgacgaaggcaaagactgctgtgatcggatgggcagctgcaaatgcgggacacacacggggcattttgagtgcatatgcgagaaagggtactacggaaaaggcctccagtacgaatgcaccgcatgcccatctgggacatacaagccagaaggatcgccaggcgggataagctcttgtatcccctgtcccgatgaaaatcatacctctcctcccggatccacttcaccagaagactgtgtgtgccgcgagggctacagagcatccgggcagacatgtgagctggtccattgtcctgccctgaagccacccgagaacggatatttcatccagaacacgtgtaataatcatttcaatgcggcgtgcggcgtcagatgccatcctggattcgatctggtaggctctagtattatcctttgtctgcccaacggtctgtggagtgggtctgaaagctattgccgcgtccgcacatgtccacaccttcgccagccgaagcatggccatatcagttgttccacacgcgaaatgctctacaaaacgacttgtctcgtcgcttgcgatgaaggataccgcctcgaagggagcgacaagctgacctgccaggggaatagccagtgggatggcccagagcctcggtgcgtggaaaggcactgtagcacctttcagatgccgaaagatgtaattattagtcctcacaactgcggaaaacaacctgctaagttcggcacaatttgctatgtctcatgcagacagggatttatcctgtcaggcgtcaaggagatgctaaggtgtactactagtggtaaatggaatgtgggtgtacaggccgctgtgtgcaaggacgtggaagctcctcagatcaattgtcccaaggatatcgaggccaagactctggagcagcaggattctgctaatgtaacctggcagatccctacggccaaagataatagcggggagaaggtctctgtgcatgtgcacccggcctttacgcctccatacttgttcccaataggcgatgttgcaattgtgtacacagccactgacctgtctggtaaccaggcgagttgtatctttcatattaaggtcattgacgctgagccaccagtgatagactggtgtcgaagtccccccccagttcaggtgagtgagaaggtacatgcagcctcttgggatgaaccccaattctccgataattccggggcggagctagtgattacccggagccatacacagggcgacctgtttcctcagggtgaaactattgtgcagtatactgcaaccgatccttcaggcaacaatagaacatgtgatatccacatcgtgatcaagggttccccctgtgagatcccatttactcccgttaacggtgacttcatctgtacccccgataatacgggcgtgaattgtaccctgacatgtctggaagggtatgattttactgaagggtcaaccgacaagtattactgtgcctacgaagacggagtgtggaaaccgacatatacgacagaatggcccgactgtgctaagaagcgcttcgcaaatcacggcttcaagtctttcgaaatgttttataaggccgccaggtgtgacgatactgaccttatgaagaagttttctgaggcctttgaaactactttagggaagatggtgccatcattttgcagtgacgctgaagatatcgactgccgactcgaggagaatttaacaaaaaagtactgtcttgagtacaattatgattatgagaatgggtttgcaatcggacccggggggtggggagccgcaaaccggctcgactacagctacgacgacttcttggatactgtgcaagaaacagctacttctatcggtaacgccaagtcatcccgtataaaacgctctgcacctctatccgactataagatcaagctgatcttcaatattacagctagtgtccccctgcccgacgaacgtaatgatacacttgagtgggagaaccaacagcggttgttgcagaccctggaaaccattacaaataagctgaagagaacactcaataaggaccctatgtattcattccagctggcctccgaaatcttgatcgccgattctaactctctggaaaccaagaaggcctctcccttctgtagacccggatctgttctgagggggagaatgtgcgtaaattgtccactgggcacgtactacaacctcgaacacttcacatgcgagtcctgccgaatcggctcatatcaggatgaagaggggcagttagagtgcaaactgtgtccctcaggcatgtacacggaatacattcacagccggaacatcagcgattgcaaggctcaatgtaagcagggaacttactcctattccggtctcgagacctgcgaaagctgtcccctgggaacctaccaacctaagtttggatcccgaagttgtctgtcatgccccgagaataccagtaccgtgaagcgaggagccgttaacattagcgcttgcggcgtgccctgccccgagggcaaatttagtaggagcggcttgatgccttgccacccctgcccaagggactactatcagcctaacgcaggcaaggcattctgcttagcctgccctttttatgggacaacgccttttgccgggagcaggtcgatcactgaatgcagtagcttcagtagtacgttctcagccgctgaggagagtgtcgtgccccctgcatccttggggcacattaagaaacggcacgagatctcttcacaggtgttccacgaatgtttctttaatccatgccacaacagtggcacatgccaacagttggggaggggatacgtgtgcctctgccctcttggctacaccggtctgaagtgcgagaccgacatagatgagtgcagtcccctaccttgcttgaacaacggagtttgtaaagacctggtcggcgaattcatctgtgaatgtccgtccgggtacactggacagcgatgtgaggagaatatcaacgagtgtagcagctctccgtgccttaacaagggcatctgcgtggatggagtggccggctataggtgcacgtgcgttaaaggattcgtgggcttacattgcgagactgaagtcaatgagtgtcaatctaacccatgccttaacaacgccgtctgcgaagatcaggtcggggggttcctttgtaagtgcccccccggctttctggggacaaggtgcgggaagaacgtcgacgaatgcctttcccaaccatgcaagaatggcgccacgtgcaaggacggagccaactctttccggtgtctgtgcgcagccgggttcacaggatctcattgcgaactgaatatcaatgaatgccagagcaatccctgccgtaaccaggccacttgcgtggacgaattgaatagttactcgtgtaaatgccaacccggattcagcggaaagcgatgtgagaccgaacagtccactggctttaacctggactttgaagtttctgggatttatgggtacgttatgctggatggtatgcttccgagccttcacgcactaacttgcacattttggatgaaaagctcggacgatatgaactatggaaccccgatttcatacgctgtcgataacggaagcgataatacgttgttgctaacagattacaacggatgggtcctatacgttaacggacgcgagaagatcaccaactgcccgtcagtcaacgacggacgctggcatcatatcgccatcacctggaccagcgccaatgggatttggaaggtgtatatcgacggcaaactgtccgatggcggtgccggactgtcagtaggattacctatccccggtggaggcgcgctcgtacttggacaagagcaggataaaaagggggaaggctttagtcccgcggagtcatttgtgggatccatcagccagctgaacctgtgggactacgtactgtctccacagcaggttaagtctctggcaacatcatgtcctgaggaattgtccaaggggaacgtcctcgcttggccagattttctgtcaggaatcgtaggtaaagtgaaaattgattcaaagtccattttttgttcagactgtccaagacttggcggatccgtgccccatctccgcaccgcctccgaagacctgaaacctggcagcaaggttaacctgttttgcgaccccggctttcagctggttgggaatcccgtgcagtattgtttgaaccagggacagtggactcaaccactacctcactgcgagagaataagctgtggggtacctcccccattagaaaatggcttccattccgctgatgacttttacgccggctcaaccgttacctaccagtgcaacaacggatactatttactgggtgactcaagaatgttttgcacagataatggaagttggaatggagtctccccttcctgccttgacgtcgatgagtgtgctgttgggagcgactgttctgagcacgcttcgtgtctgaatgtcgacggatcatatatctgctcatgtgtaccaccatacactggcgacgggaagaattgcgcagaacccatcaagtgtaaggcaccgggcaatccagaaaatggccatagttctggggaaatatacacagtaggtgccgaggtgacattttcatgtcaagaagggtatcagctgatgggcgtgaccaagataacttgtctagaatctggtgagtggaaccacttgataccatattgcaaagcagtgtcatgtggcaagccagctatccctgaaaacggatgtattgaagagctcgctttcaccttcggcagtaaagtgacataccgctgcaataaaggatacactttggcaggggataaagagtcgtcgtgcctcgccaactcatcctggtctcattccccacctgtctgtgaacctgtgaagtgttcaagccccgaaaacattaacaatggcaagtacatcctatccggccttacatacctttcaaccgccagttatagttgtgataccggatacagcttacaaggcccctctattatcgagtgcaccgcctccggaatctgggacagagctccacctgcctgtcatctggtgttctgtggggagccgccggccatcaaggatgccgtgatcacagggaacaattttaccttcagaaacacggtgacatatacctgcaaagaagggtacacactggccggtctggacactatcgaatgcctggctgacggcaaatggtcccgttccgatcagcagtgcttagctgtcagctgtgacgagccacctattgtggaccacgctagcccagagacagcacaccgtctgttcggtgatatcgcgttctactactgttccgacgggtattctctggccgataattcccagcttctgtgcaacgctcagggcaaatgggtgcctcctgagggacaggatatgcctcgttgtatagctcacttctgcgaaaagccaccttcagtgagctatagtatcctggagtccgtatccaaagctaagttcgccgctggcagcgtcgtctcattcaagtgtatggagggttttgtcttaaatacctccgccaagattgaatgtatgcgaggcggccaatggaacccatcacccatgtcaattcagtgcatccccgtcaggtgcggcgaacctccatccatcatgaatggttatgctagcggatcgaactatagctttggcgccatggtggcttactcctgcaataaaggattttatattaaaggcgagaagaaatctacttgtgaagcgacagggcagtggagcagtccaattcccacttgccacccagtttcttgtggcgaacctccaaaggtggaaaatggatttttagagcatactaccggtaggatatttgaaagcgaggtgcgctaccagtgcaatccgggttacaagagtgtagggagtcccgtcttcgtgtgccaggccaatcggcattggcactctgaatcccccctgatgtgtgtccccctggattgtggcaagcccccccccatccagaacggattcatgaagggcgaaaattttgaagtgggttcaaaggtacaattcttctgtaatgaggggtatgaacttgtaggcgactcctcctggacctgtcaaaaatccgggaaatggaataagaagagcaacccaaagtgcatgcccgctaagtgcccagagccacccctgttggagaaccaattagtccttaaagagcttactacagaggtgggggtggtgactttttcatgcaaggagggacacgttctgcagggcccgagtgtgctgaaatgcctgcctagccagcagtggaacgactccttcccggtatgcaaaattgtgctatgtacaccgccacctttaatttcattcggtgtgcctatcccctcctcagctcttcacttcggctcaacagtcaagtatagttgtgtgggcggatttttccttagaggcaacagcaccactttatgtcagccagatgggacttggtcttctcctctgcctgagtgcgtgccggtggaatgcccccagccggaagagatccccaatggcatcatcgacgtacagggattagcctatttgtccactgctttgtacacttgtaaacctgggtttgagctggttgggaatacgactaccctttgtggcgagaacggccattggttaggcggcaagccgacctgcaaagcaatcgaatgtctgaagcccaaggagattttgaatggcaagttctcatatacagacctgcactacggtcagacagtgacttatagctgcaaccggggtttccgtctggaggggccctctgcactcacatgtttggagaccggcgactgggacgtagacgcgccaagttgtaatgcaatacactgcgatagccctcagcctatcgagaatggcttcgtggagggggctgattatagctatggggcgatcattatctactcttgttttccaggctttcaggttgccggccacgcaatgcagacatgcgaagagtcaggttggagttcctctatccccacctgcatgcctattgactgcggactgccccctcacatcgacttcggcgattgtacaaagctcaaggacgatcagggttatttcgagcaggaggacgacatgatggaggtgccttacgttacaccacatccaccgtaccatctcggcgcagttgcaaagacatgggagaacacaaaggagtctcccgctactcattcttctaatttcctttatggcacaatggtatcttacacatgcaacccaggctatgagctattgggtaatcctgtgctgatttgtcaagaggacggcacgtggaatggatctgccccaagctgtatctcaattgagtgtgatctacctaccgctcccgaaaatggatttctgcgctttacagagaccagcatgggttctgctgtgcaatatagttgcaagcctggacacatcctggctggttctgatcttaggttgtgtttggagaaccggaagtggtccggagcttcccctcgctgcgaggccatcagctgtaaaaaaccgaaccctgtgatgaatggttccattaagggatcaaactatacttacttgtccacgctgtattatgaatgcgatcccgggtatgtattgaatggcacagaaaggcgcacctgccaggacgacaagaattgggacgaggatgagcccatatgcatcccagttgactgctccagtccccctgtgtccgccaacggacaggtccggggagacgagtatacctttcaaaaggaaattgagtacacttgcaatgaaggctttctcctggagggggccagatctagggtgtgcctggcgaatggaagttggtccggcgctacacctgattgcgtccctgtgcgctgcgcaacaccccctcagctggcaaatggcgtgactgaaggcctcgattatggatttatgaaagaggtcacattccactgccacgaggggtatattttacacggtgctccaaagctgacgtgtcagagcgacggaaattgggatgccgagatacccttgtgtaaaccagtcaactgtgggccgcctgaagatcttgcccacggatttccaaacggcttcagctttatccacggtggacatattcagtatcaatgcttccccggatataagctccacggaaatagctctcgtcgctgccttagtaacggatcatggtcgggaagctctccatcttgcctgccttgtcgatgttcaacacccgtgattgagtatgggaccgtgaacggtactgattttgattgcggtaaggcggcacgcatccagtgctttaagggcttcaagctgctgggtctctctgaaattacctgtgaagccgacggccagtggtctagtgggttcccacattgcgagcatacatcttgtggcagcctccctatgattcctaacgcgttcatttccgagacttcctcttggaaggaaaatgtgattacatatagttgcagatctgggtacgtcatccagggtagctccgatctgatctgtacggagaagggggtgtggagccagccgtacccagtatgcgagccactgtcttgcgggtctcccccttccgtcgccaatgccgtagcaactggagaggcacacacgtatgagagcgaggtcaagcttcgctgtcttgagggatacactatggacacagacacggatacattcacatgtcaaaaggatggcaggtggtttcctgagagaataagctgttcccctaagaaatgtcctctgccagaaaatattacgcatattcttgttcacggagacgactttagcgtaaaccgtcaggtgtctgtctcttgcgccgaaggttacactttcgagggcgtgaacataagcgtctgccaactggacgggacctgggagccccctttctccgacgagtcgtgttcacccgtgtcctgcggaaagcccgaaagtcccgaacacggattcgttgtaggcagtaagtatacattcgagtcaactatcatctaccagtgtgaacctggatatgagctcgaaggaaatagagagcgagtgtgccaggaaaataggcagtggtctggtggcgtagcgatttgtaaggagacccggtgcgaaactcctcttgaattcctcaacggaaaggcggatatcgaaaataggaccaccgggcccaatgtggtctatagttgcaaccgtggctacagcttggaggggccgtccgaagctcattgcaccgaaaacggaacttggtcacatccagtgcccctatgtaaacctaatccctgccctgtgccgtttgtaattccagaaaacgcactcctctccgaaaaagagttctatgtagaccagaatgtatcgattaagtgtcgcgagggattccttctgcagggtcatggcattatcacatgtaatcctgacgaaacttggacccagacctctgccaaatgcgagaaaatcagctgtgggccccctgcacatgtagaaaacgcaatcgccagaggcgtacattaccaatatggagacatgattacatattcctgctatagcggttacatgttagaagggtttctgcgcagcgtatgccttgagaatggaacgtggacgtctccaccaatttgtagggccgtctgtcgcttcccctgccaaaacggaggaatctgccaacgacctaacgcctgtagctgtccggaaggttggatgggaaggttatgtgaggagccaatttgtatcctgccatgtctcaatgggggtcgctgcgtcgcaccataccaatgcgactgtcctcctggctggaccggttccagatgccatactgctgtgtgccaaagtccatgcctaaacggaggtaagtgtgttcggcccaaccgctgccactgcttgagttcatggaccggtcacaattgcagtcggaagaggcgaaccgggttttag

SEQ ID NO: 245867 - DNA, 4494 bp, Artificial Sequence
  derived and/or modified sequence
atgccccgctgcatcgcccacttctgtgagaagccacccagcgtgtcctacagcatcctggagagcgtgtccaaggccaagtttgctgctggctctgtggtgtccttcaagtgcatggagggctttgtgctgaacaccagcgccaagattgagtgcatgagaggaggccagtggaaccccagccccatgagcatccagtgcatccctgtgcgctgtggggagcccccatccatcatgaatggctacgccagcggcagcaactacagctttggagccatggtggcctacagctgcaacaagggcttctacatcaagggggagaagaagagcacctgtgaggccaccggccagtggagcagccccatccccacctgccaccctgtgtcctgtggggagccccccaaggtggagaatggcttcctggagcacaccaccggccgcatctttgaaagtgaggtgcgctaccagtgcaaccctggctacaagtctgtgggcagccctgtgtttgtgtgccaggccaacagacactggcacagcgagagccccctgatgtgtgtgcccctggactgtgggaagcccccacccatccagaatggcttcatgaagggggagaactttgaggtgggcagcaaggtgcagttcttctgcaatgaaggctatgagctggtgggggacagctcctggacctgccagaagagcggcaagtggaacaagaagagcaaccccaagtgcatgcctgccaagtgcccagagccccccctgctggagaaccagctggtgctgaaggagctgaccacagaggtgggcgtggtgaccttcagctgcaaggagggccacgtgctgcagggccccagcgtgctgaagtgcctgcccagccagcagtggaatgacagcttccctgtgtgcaagatcgtgctgtgcaccccaccacccctcatcagctttggagtgcccatccccagcagcgccctgcacttcggcagcacagtgaagtacagctgtgtgggcggcttcttcctgcggggcaacagcaccaccctgtgccagccagatggcacctggagcagccccctgcctgaatgtgtgcctgtggagtgcccccagcctgaggagatccccaacggcatcattgatgtgcagggcctggcctacctgagcacagccctgtacacctgcaagccaggctttgagctggtgggcaacaccaccaccctgtgtggggagaatggccactggctgggcggcaagcccacctgcaaggccattgaatgtctgaagcccaaggagatcctgaatggcaagttctcctacacagacctgcactacggccagacagtgacctacagctgcaacagaggcttccggctggagggccccagcgccctgacctgcctggagactggagactgggatgtggatgcccccagctgcaatgccatccactgtgacagcccccagcccattgaaaatggatttgtggagggcgctgactacagctatggagccatcatcatctacagctgcttccctggcttccaggtggccggccacgccatgcagacctgtgaggagagcggctggagcagcagcatccccacctgcatgcccatcgactgtggcctgcccccccacatcgactttggagactgcaccaagctgaaggatgaccagggctactttgagcaggaggatgacatgatggaggtgccctacgtgaccccccaccccccctaccacctgggcgctgtggccaagacctgggagaacaccaaggagagccctgccacccacagcagcaacttcctgtatggcaccatggtgtcctacacctgcaaccctggctatgagctgctgggcaaccctgtgctgatctgccaggaggatggcacctggaatggcagcgcccccagctgcatcagcattgaatgtgacctgcccacagccccagaaaatggcttcctgcgcttcacagagacctccatgggcagcgctgtgcagtacagctgcaagccaggccacatcctggccggcagtgacctgcggctgtgcctggagaacaggaagtggagcggggccagcccccgctgtgaggccatcagctgcaagaagcccaaccctgtgatgaatggcagcatcaagggcagcaactacacctacctgagcaccctgtactatgaatgtgaccccggctacgtgctgaatggaacagagaggaggacctgccaggatgacaagaactgggatgaagatgagcccatctgcatccctgtggactgcagcagcccccctgtgtctgccaacggccaggtgagaggagatgagtacaccttccagaaggagattgagtacacctgcaatgaaggcttcctgctggagggcgcccggagccgggtgtgcctggccaacggctcctggagcggggccaccccagactgtgtgcctgtgcgctgtgccaccccaccccagctggccaatggagtgacagagggcctggactatggcttcatgaaggaggtgaccttccactgccacgagggctacatcctgcacggggcccccaagctgacctgccagagtgatggcaactgggatgctgagatccccctgtgcaagcctgtgaactgtggccccccagaggacctggcccacggcttccccaacggcttctccttcatccatggaggccacatccagtaccagtgcttccctggctacaagctgcacggcaacagcagccgccgctgcctgagcaatggctcctggagcggcagcagccccagctgcctgccctgccgctgcagcacccctgtgattgaatatggcaccgtgaatggaacagactttgactgtgggaaggccgcccgcatccagtgcttcaagggcttcaagctgctgggcctgtctgagatcacctgtgaggctgatggccagtggagcagcggcttcccccactgtgagcacaccagctgtggcagcctgcccatgatccccaatgccttcatcagcgagaccagctcctggaaggaaaatgtcatcacctacagctgccgcagcggctacgtgatccagggcagcagtgacctgatctgcacagagaagggcgtgtggagccagccctaccctgtgtgtgagcccctgagctgtggcagccccccatctgtggccaatgctgtggccaccggggaggcccacacctatgagagcgaggtgaagctgcgctgcctggagggctacaccatggacacagacacagacaccttcacctgccagaaggatggccgctggttccctgagcgcatcagctgcagccccaagaagtgccccctgcctgagaacatcacccacatcctggtgcatggagatgacttctctgtgaaccggcaggtgtctgtgtcctgtgccgagggctacacctttgaaggagtgaacatctctgtgtgccagctggatggcacctgggagccccccttcagtgatgagagctgcagccctgtgtcctgtgggaagccagagagccctgagcacggctttgtggtgggcagcaagtacacctttgagagcaccatcatctaccagtgtgagcccggctatgagctggagggcaaccgggagcgggtgtgccaggagaaccggcagtggagcggcggcgtggccatctgcaaggagacccgctgtgagacccccctggagttcctgaatggcaaggctgacattgaaaatagaaccaccggccccaacgtggtgtacagctgcaacagaggctacagcctggagggccccagcgaggcccactgcacagaaaatggcacctggagccaccctgtgcccctgtgcaagcccaacccctgccctgtgccctttgtgatcccagaaaatgccctgctgtctgagaaggagttctacgtggaccagaatgtgtccatcaagtgccgggagggcttcctgctgcagggccacggcatcatcacctgcaacccagatgagacctggacccagaccagcgccaagtgtgagaagatcagctgtggccccccagcccacgtggagaatgccatcgcccggggcgtgcactaccagtacggggacatgatcacctacagctgctacagcggctacatgctggagggcttcctgcggtctgtgtgcctggagaatggcacctggaccagcccccccatctgcagagctgtgtgccgcttcccctgccagaatggaggcatctgccagaggcccaatgcctgcagctgcccagagggctggatgggccgcctgtgtgaggagcccatctgcatcctgccctgcctgaatggaggccgctgtgtggccccctaccagtgtgactgccccccaggctggacaggcagccgctgccacacagctgtgtgccagagcccctgcctgaatggaggaaaatgtgtgcggcccaaccgctgccactgcctgagctcctggacaggccacaactgcagcaggaagagaagaacaggcttctag

SEQ ID NO: 245868 - DNA, 4650 bp, Artificial Sequence
  derived and/or modified sequence
atgtggccccggctggccttctgctgctggggcctggccctggtgtctggctgggccaccttccagcagatgagccccagcaggaacttctccttccgcctcttccctgagacagcccctggggcccctggcagcatcccagcccccccagcccctggagatgaggccgccggcagccgggtggagcggctgggccaggccttcagaagaagagtgcggctgctgcgggagctgtctgagcggctggagctggtgttcctggtggatgacagcagctctgtgggggaggtgaacttccgctctgagctgatgtttgtgaggaagctgctgagtgacttccctgtggtgcccacagccaccagggtggccatcgtgaccttcagcagcaagaactacgtggtgccccgggtggactacatcagcacccggcgggcccggcagcacaagtgtgccctgctgctgcaggagatcccagccatctcctaccggggcggcggcacctacaccaagggggccttccagcaggccgcccagatcctgctgcacgcccgggagaacagcaccaaggtggtgttcctgatcacagatggctacagcaatggaggagacccccggcccatcgccgccagcctgcgggacagcggcgtggagatcttcaccttcggcatctggcagggcaacatccgggagctgaatgacatggccagcacccccaaggaggagcactgctacctgctgcacagctttgaggagtttgaggccctggcccggcgggccctgcacgaggacctgcccagcggcagcttcatccaggatgacatggtgcactgcagctacctgtgtgatgagggcaaggactgctgtgacaggatgggcagctgcaagtgtggcacccacacaggccactttgagtgcatctgtgagaagggctactacggcaagggcctgcagtatgaatgtacagcctgccccagcggcacctacaagccagagggcagccctgggggcatcagcagctgcatcccctgcccagatgagaaccacaccagccccccaggcagcaccagccctgaggactgtgtgtgccgggagggctaccgggccagcggccagacctgtgagctggtgcactgcccagccctgaagcccccagaaaatggctacttcatccagaacacctgcaacaaccacttcaatgctgcctgtggggtgcgctgccaccctggctttgacctggtgggcagcagcatcatcctgtgcctgcccaacggcctgtggagcggcagcgagagctactgccgggtgaggacctgcccccacctgcggcagcccaagcacggccacatcagctgcagcacccgggagatgctgtacaagaccacctgcctggtggcctgtgatgagggctaccgcctggagggcagtgacaagctgacctgccagggcaacagccagtgggatggccctgagccccgctgtgtggagcggcactgcagcaccttccagatgcccaaggatgtgatcatcagcccccacaactgtgggaagcagcctgccaagtttggcaccatctgctacgtgtcctgccggcagggcttcatcctgagcggcgtgaaggagatgctgcgctgcaccaccagcggcaagtggaatgtgggcgtgcaggccgctgtgtgcaaggatgtggaggccccccagatcaactgccccaaggacatcgaggccaagaccctggagcagcaggacagcgccaacgtgacctggcagatccccacagccaaggacaacagcggggagaaggtgtctgtgcacgtgcacccagccttcaccccaccctacctgttccccatcggagatgtggccatcgtgtacacagccacagacctgagcggcaaccaggccagctgcatcttccacatcaaggtgattgatgctgagccccctgtgattgactggtgccgcagccccccacctgtgcaggtgtctgagaaggtgcatgctgcctcctgggatgagccccagttcagtgacaacagcggggctgagctggtgatcaccaggagccacacccagggcgacctcttcccccagggcgagaccatcgtgcagtacacagccacagaccccagcggcaacaacagaacctgtgacatccacatcgtcatcaagggcagcccctgtgagatccccttcacccctgtgaatggagacttcatctgcaccccagacaacacaggagtgaactgcaccctgacctgcctggagggctatgacttcacagagggcagcacagacaagtactactgtgcctatgaagatggagtgtggaagcccacctacaccacagagtggccagactgtgccaagaagagatttgccaaccacggcttcaagagctttgagatgttctacaaggccgcccgctgtgatgacacagacctgatgaagaagttcagcgaggcctttgagaccaccctgggcaagatggtgcccagcttctgcagtgatgctgaggacatcgactgccgcctggaggagaacctgaccaagaagtactgcctggagtacaactatgactatgaaaatggatttgccatcggccctgggggctggggcgccgccaaccggctggactacagctatgatgacttcctggacacagtgcaggagacagccaccagcattggaaatgccaagagcagccgcatcaagaggtctgcccccctgagtgactacaagatcaagctgatcttcaacatcacagcctctgtgcccctgcctgatgaaagaaatgacaccctggagtgggagaaccagcagaggctgctgcagaccctggagaccatcaccaacaagctgaagaggaccctgaacaaggaccccatgtacagcttccagctggccagcgagatcctgattgctgacagcaacagcctggagaccaagaaggccagccccttctgccggcccggctctgtgctgcggggccgcatgtgtgtgaactgccccctgggcacctactacaacctggagcacttcacctgtgagagctgccgcatcggcagctaccaggatgaggagggccagctggagtgcaagctgtgccccagcggcatgtacacagagtacatccacagcaggaacatcagtgactgcaaggcccagtgcaagcagggcacctacagctacagcggcctggagacctgtgagagctgccccctgggcacctaccagcccaagtttggcagccgcagctgcctgagctgcccagagaacaccagcacagtgaagagaggagctgtgaacatcagcgcctgtggggtgccctgcccagagggcaagttcagccgcagcggcctgatgccctgccacccctgcccccgggactactaccagcccaatgccggcaaggccttctgcctggcctgccccttctacggcaccaccccatttgctggcagccgcagcatcacagaatgtagcagcttcagcagcaccttctctgctgctgaggagagcgtggtgcccccagccagcctgggccacatcaagaagagacatgagatcagcagcagggtcttccacgagtgcttcttcaacccctgccacaacagcggcacctgccagcagctgggccggggctacgtgtgcctgtgccccctgggctacacaggcctgaagtgtgaaacagacattgatgagtgcagccccctgccctgcctgaacaatggagtgtgcaaggacctggtgggggagttcatctgtgagtgccccagcggctacacaggccagagatgtgaggagaacatcaatgaatgtagcagcagcccctgcctgaacaagggcatctgtgtggatggagtggccggctaccgctgcacctgtgtgaagggctttgtgggcctgcactgtgaaacagaggtgaatgaatgccagagcaacccctgcctgaacaatgctgtgtgtgaggaccaggtgggcggcttcctgtgcaagtgccccccaggcttcctgggcacccgctgtgggaagaatgtggatgagtgcctgagccagccctgcaagaatggagccacctgcaaggatggagccaacagcttccgctgcctgtgtgccgccggcttcaccggcagccactgtgagctgaacatcaatgaatgccagagcaacccctgcaggaaccaggccacctgtgtggatgagctgaacagctacagctgcaagtgccagcccggcttcagcggcaagagatgtgaaacagagcagagcacaggcttcaacctggactttgaggtgtctggcatctacggctacgtgatgctggatggcatgctgcccagcctgcacgccctgacctgcaccttctggatgaagagcagtgatgacatgaactacggcacccccatctcctatgctgtggacaatggaagtgacaacaccctgctgctgacagactacaacggctgggtgctgtatgtgaatggccgggagaagatcaccaactgccccagcgtgaatgatggccgctggcaccacatcgccatcacctggaccagcgccaacggcatctggaaggtgtacattgatggcaagctgagtgatggaggagctggcctgtctgtgggcctgcccatccctggcatgttttag

SEQ ID NO: 245869 - DNA, 2538 bp, Artificial Sequence
  derived and/or modified sequence
atgagccccagcaggaacttctccttccgcctcttccctgagacagcccctggggcccctggcagcatcccagcccccccagcccctggagatgaagctgctggcagccgggtggagcggctgggccaggccttcagaagaagagtgcggctgctgcgggagctgtctgagcggctggagctggtgttcctggtggatgacagcagctctgtgggggaggtgaacttccgctctgagctgatgtttgtgaggaagctgctgagtgacttccctgtggtgcccacagccaccagggtggccatcgtgaccttcagcagcaagaactacgtggtgccccgggtggactacatcagcacccggcgggcccggcagcacaagtgtgccctgctgctgcaggagatcccagccatctcctacagaggaggcggcacctacaccaagggggccttccagcaggccgcccagatcctgctgcacgcccgggagaacagcaccaaggtggtgttcctgatcacagatggctacagcaatggaggagacccccggcccatcgccgccagcctgcgggacagcggcgtggagatcttcaccttcggcatctggcagggcaacatccgggagctgaatgacatggccagcacccccaaggaggagcactgctacctgctgcacagctttgaggagtttgaggccctggcccggcgggccctgcacgaggacctgcccagcggcagcttcatccaggatgacatggtgcactgcagctacctgtgtgatgagggcaaggactgctgtgacaggatgggcagctgcaagtgtggcacccacacaggccactttgagtgcatctgtgagaagggctactacggcaagggcctgcagtatgagtgcacagcctgccccagcggcacctacaagccagagggcagccctgggggcatcagcagctgcatcccctgcccagatgagaaccacaccagccccccaggcagcaccagccctgaggactgtgtgtgccgggagggctaccgggccagcggccagacctgtgagctggtgcactgcccagccctgaagcccccagaaaatggctacttcatccagaacacctgcaacaaccacttcaatgctgcctgtggggtgcgctgccaccctggctttgacctggtgggcagcagcatcatcctgtgcctgcccaacggcctgtggagcggcagcgagagctactgccgggtgaggacctgcccccacctgcggcagcccaagcacggccacatcagctgcagcacccgggagatgctgtacaagaccacctgcctggtggcctgtgatgagggctaccgcctggagggcagtgacaagctgacctgccagggcaacagccagtgggatggccctgagccccgctgtgtggagcggcactgcagcaccttccagatgcccaaggatgtgatcatcagcccccacaactgtgggaagcagcctgccaagtttggcaccatctgctacgtgtcctgccggcagggcttcatcctgtctggagtgaaggagatgctgcgctgcaccaccagcggcaagtggaatgtgggcgtgcaggccgctgtgtgcaaggatgtggaggccccccagatcaactgccccaaggacatcgaggccaagaccctggagcagcaggacagcgccaacgtgacctggcagatccccacagccaaggacaacagcggggagaaggtgtctgtgcacgtgcacccagccttcaccccaccctacctgttccccatcggagatgtggccatcgtgtacacagccacagacctgagcggcaaccaggccagctgcatcttccacatcaaggtgattgatgctgagccccctgtgattgactggtgccgcagccccccacctgtgcaggtgtctgagaaggtgcacgccgcctcctgggatgagccccagttcagtgacaacagcggggctgagctggtgatcaccaggagccacacccagggcgacctcttcccccagggcgagaccatcgtgcagtacacagccacagaccccagcggcaacaacagaacctgtgacatccacatcgtcatcaagggcagcccctgtgagatccccttcacccctgtgaatggagacttcatctgcaccccagacaacacaggagtgaactgcaccctgacctgcctggagggctatgacttcacagagggcagcacagacaagtactactgtgcctatgaagatggagtgtggaagcccacctacaccacagagtggccagactgtgccaagaagagatttgccaaccacggcttcaagagctttgagatgttctacaaggccgcccgctgtgatgacacagacctgatgaagaagttcagcgaggcctttgagaccaccctgggcaagatggtgcccagcttctgcagtgatgctgaagatattgactgccgcctggaggagaacctgaccaagaagtactgcctggagtacaactatgactatgaaaatggatttgccatcggcaactag

SEQ ID NO: 245870 - DNA, 1548 bp, Artificial Sequence
  derived and/or modified sequence
ctggagaaccagctggtgctgaaggagctgaccacagaggtgggcgtggtgaccttcagctgcaaggagggccacgtgctgcagggccccagcgtgctgaagtgcctgcccagccagcagtggaatgacagcttccctgtgtgcaagatcgtgctgtgcaccccaccacccctcatcagctttggagtgcccatccccagcagcgccctgcacttcggcagcacagtgaagtacagctgtgtgggcggcttcttcctgcggggcaacagcaccaccctgtgccagccagatggcacctggagcagccccctgcctgaatgtgtgcctgtggagtgcccccagcctgaggagatccccaacggcatcattgatgtgcagggcctggcctacctgagcacagccctgtacacctgcaagccaggctttgagctggtgggcaacaccaccaccctgtgtggggagaatggccactggctgggcggcaagcccacctgcaaggccattgaatgtctgaagcccaaggagatcctgaatggcaagttctcctacacagacctgcactacggccagacagtgacctacagctgcaacagaggcttccggctggagggccccagcgccctgacctgcctggagactggagactgggatgtggatgcccccagctgcaatgccatccactgtgacagcccccagcccattgaaaatggatttgtggagggcgctgactacagctatggagccatcatcatctacagctgcttccctggcttccaggtggccggccacgccatgcagacctgtgaggagagcggctggagcagcagcatccccacctgcatgcccatcgactgtggcctgcccccccacatcgactttggagactgcaccaagctgaaggatgaccagggctactttgagcaggaggatgacatgatggaggtgccctacgtgaccccccaccccccctaccacctgggcgctgtggccaagacctgggagaacaccaaggagagccctgccacccacagcagcaacttcctgtatggcaccatggtgtcctacacctgcaaccctggctatgagctgctgggcaaccctgtgctgatctgccaggaggatggcacctggaatggcagcgcccccagctgcatcagcattgaatgtgacctgcccacagccccagaaaatggcttcctgcgcttcacagagacctccatgggcagcgctgtgcagtacagctgcaagccaggccacatcctggccggcagtgacctgcggctgtgcctggagaacaggaagtggagcggggccagcccccgctgtgaggccatcagctgcaagaagcccaaccctgtgatgaatggcagcatcaagggcagcaactacacctacctgagcaccctgtactatgaatgtgaccccggctacgtgctgaatggaacagagaggaggacctgccaggatgacaagacaggcatgaggatgagcccctttgccttcctgtggacagctgtgcacccccagagccagcccatggccaggtag

SEQ ID NO: 245871 - DNA, 10647 bp, Artificial Sequence
  derived and/or modified sequence
atgagccccagcaggaacttctccttccgcctcttccctgagacagcccctggggcccctggcagcatcccagcccccccagcccctggagatgaagctgctggcagccgggtggagcggctgggccaggccttcagaagaagagtgcggctgctgcgggagctgtctgagcggctggagctggtgttcctggtggatgacagcagctctgtgggggaggtgaacttccgctctgagctgatgtttgtgaggaagctgctgagtgacttccctgtggtgcccacagccaccagggtggccatcgtgaccttcagcagcaagaactacgtggtgccccgggtggactacatcagcacccggcgggcccggcagcacaagtgtgccctgctgctgcaggagatcccagccatctcctacagaggaggcggcacctacaccaagggggccttccagcaggccgcccagatcctgctgcacgcccgggagaacagcaccaaggtggtgttcctgatcacagatggctacagcaatggaggagacccccggcccatcgccgccagcctgcgggacagcggcgtggagatcttcaccttcggcatctggcagggcaacatccgggagctgaatgacatggccagcacccccaaggaggagcactgctacctgctgcacagctttgaggagtttgaggccctggcccggcgggccctgcacgaggacctgcccagcggcagcttcatccaggatgacatggtgcactgcagctacctgtgtgatgagggcaaggactgctgtgacaggatgggcagctgcaagtgtggcacccacacaggccactttgagtgcatctgtgagaagggctactacggcaagggcctgcagtatgagtgcacagcctgccccagcggcacctacaagccagagggcagccctgggggcatcagcagctgcatcccctgcccagatgagaaccacaccagccccccaggcagcaccagccctgaggactgtgtgtgccgggagggctaccgggccagcggccagacctgtgagctggtgcactgcccagccctgaagcccccagaaaatggctacttcatccagaacacctgcaacaaccacttcaatgctgcctgtggggtgcgctgccaccctggctttgacctggtgggcagcagcatcatcctgtgcctgcccaacggcctgtggagcggcagcgagagctactgccgggtgaggacctgcccccacctgcggcagcccaagcacggccacatcagctgcagcacccgggagatgctgtacaagaccacctgcctggtggcctgtgatgagggctaccgcctggagggcagtgacaagctgacctgccagggcaacagccagtgggatggccctgagccccgctgtgtggagcggcactgcagcaccttccagatgcccaaggatgtgatcatcagcccccacaactgtgggaagcagcctgccaagtttggcaccatctgctacgtgtcctgccggcagggcttcatcctgtctggagtgaaggagatgctgcgctgcaccaccagcggcaagtggaatgtgggcgtgcaggccgctgtgtgcaaggatgtggaggccccccagatcaactgccccaaggacatcgaggccaagaccctggagcagcaggacagcgccaacgtgacctggcagatccccacagccaaggacaacagcggggagaaggtgtctgtgcacgtgcacccagccttcaccccaccctacctgttccccatcggagatgtggccatcgtgtacacagccacagacctgagcggcaaccaggccagctgcatcttccacatcaaggtgattgatgctgagccccctgtgattgactggtgccgcagccccccacctgtgcaggtgtctgagaaggtgcacgccgcctcctgggatgagccccagttcagtgacaacagcggggctgagctggtgatcaccaggagccacacccagggcgacctcttcccccagggcgagaccatcgtgcagtacacagccacagaccccagcggcaacaacagaacctgtgacatccacatcgtcatcaagggcagcccctgtgagatccccttcacccctgtgaatggagacttcatctgcaccccagacaacacaggagtgaactgcaccctgacctgcctggagggctatgacttcacagagggcagcacagacaagtactactgtgcctatgaagatggagtgtggaagcccacctacaccacagagtggccagactgtgccaagaagagatttgccaaccacggcttcaagagctttgagatgttctacaaggccgcccgctgtgatgacacagacctgatgaagaagttcagcgaggcctttgagaccaccctgggcaagatggtgcccagcttctgcagtgatgctgaagatattgactgccgcctggaggagaacctgaccaagaagtactgcctggagtacaactatgactatgaaaatggatttgccatcggccctgggggctggggcgccgccaaccggctggactacagctatgatgacttcctggacacagtgcaggagacagccaccagcattggaaatgccaagagcagccgcatcaagaggtctgcccccctgagtgactacaagatcaagctgatcttcaacatcacagcctctgtgcccctgcctgatgaaagaaatgacaccctggagtgggagaaccagcagaggctgctgcagaccctggagaccatcaccaacaagctgaagaggaccctgaacaaggaccccatgtacagcttccagctggccagcgagatcctgattgctgacagcaacagcctggagaccaagaaggccagccccttctgcaggcctggctctgtgctgcggggccgcatgtgtgtgaactgccccctgggcacctactacaacctggagcacttcacctgtgagagctgcagaattggcagctaccaggatgaggagggccagctggagtgcaagctgtgccccagcggcatgtacacagagtacatccacagcaggaacatcagtgactgcaaggcccagtgcaagcagggcacctacagctacagcggcctggagacctgtgagagctgccccctgggcacctaccagcccaagtttggcagccgcagctgcctgagctgcccagagaacaccagcacagtgaagagaggagctgtgaacatcagcgcctgtggggtgccctgcccagagggcaagttcagccgcagcggcctgatgccctgccacccctgcccccgggactactaccagcccaatgctgggaaggccttctgcctggcctgccccttctacggcaccaccccatttgctggcagccgcagcatcacagagtgcagcagcttcagcagcaccttctctgctgctgaggagagcgtggtgcccccagccagcctgggccacatcaagaagagacatgagatcagcagccaggtgttccacgagtgcttcttcaacccctgccacaacagcggcacctgccagcagctgggccggggctacgtgtgcctgtgccccctgggctacacaggcctgaagtgtgaaacagacattgatgaatgtagccccctgccctgcctgaacaacggggtgtgcaaggacctggtgggggagttcatctgtgaatgtcccagcggctacacaggccagagatgtgaggagaacatcaatgaatgtagcagcagcccctgcctgaacaagggcatctgtgtggatggagtggccggctaccgctgcacctgtgtgaagggctttgtgggcctgcactgtgaaacagaggtgaatgaatgccagagcaacccctgcctgaacaatgctgtgtgtgaggaccaggtgggcggcttcctgtgcaagtgccccccaggcttcctgggcacccgctgtgggaagaatgtggatgaatgtctgagccagccctgcaagaatggagccacctgcaaggatggagccaacagcttccgctgcctgtgtgccgccggcttcaccggcagccactgtgagctgaacatcaatgaatgccagagcaacccctgcaggaaccaggccacctgtgtggatgagctgaacagctacagctgcaagtgccagcccggcttcagcggcaagagatgtgaaacagagcagagcacaggcttcaacctggactttgaggtgtctggcatctacggctacgtgatgctggatggcatgctgcccagcctgcacgccctgacctgcaccttctggatgaagagcagtgatgacatgaactacggcacccccatctcctatgctgtggacaatggaagtgacaacaccctgctgctgacagactacaacggctgggtgctgtatgtgaatggccgggagaagatcaccaactgccccagcgtgaatgatggccgctggcaccacatcgccatcacctggaccagcgccaacggcatctggaaggtgtacattgatggcaagctgagtgatggaggagctggcctgtctgtgggcctgcccatccctgggggcggggccctggtgctgggccaggagcaggacaagaagggggagggcttctccccagctgagagctttgtgggcagcatcagccagctgaacctgtgggactatgtgctgagcccccagcaggtgaagagcctggccaccagctgcccagaggagctgagcaaaggaaatgtgctggcctggccagacttcctgagcggcatcgtgggcaaggtgaagattgacagcaagagcatcttctgcagcgactgcccccggctgggcggctctgtgccccacctgaggacagccagcgaggacctgaagccaggcagcaaggtgaacctcttctgtgaccccggcttccagctggtgggcaaccctgtgcagtactgcctgaaccagggccagtggacccagcccctgccccactgtgagcgcatcagctgtggggtgcccccacccctggagaatggcttccacagcgcagatgacttctacgccggcagcacagtgacctaccagtgcaacaacggctactacctgctgggggacagcaggatgttctgcacagacaatggctcctggaatggagtgagccccagctgcctggatgtggatgaatgtgctgtgggcagtgactgcagcgagcacgccagctgcctgaatgtggatggcagctacatctgcagctgtgtgcccccctacacaggagatggcaagaactgtgccgagcccatcaagtgcaaggcccctggcaacccagaaaatggccacagcagcggggagatctacacagtgggcgctgaggtgaccttcagctgccaggagggctaccagctgatgggcgtgaccaagatcacctgcctggagagcggggagtggaaccacctgatcccctactgcaaggctgtgtcctgtgggaagccagccatcccagaaaatggctgcatcgaggagctggccttcaccttcggcagcaaggtgacctaccgctgcaacaagggctacaccctggccggggacaaggagagcagctgcctggccaacagctcctggagccacagcccccctgtgtgtgagcctgtgaagtgcagcagccctgagaacatcaacaacgggaagtacatcctgagcggcctgacctacctgagcacagccagctacagctgtgacaccggctacagcctgcagggccccagcatcattgaatgtacagccagcggcatctgggaccgggcccccccagcctgccacctggtgttctgtggggagcccccagccatcaaggatgctgtgatcaccggcaacaacttcaccttcaggaacacagtgacctacacctgcaaggagggctacaccctggccggcctggacaccattgaatgtctggctgatggcaagtggagcagaagtgaccagcagtgcctggccgtgtcctgtgatgagccccccatcgtggaccacgccagccctgagacagcccaccggctgtttggagacatcgccttctactactgcagtgatggctacagcctggccgacaacagccagctgctgtgcaatgcccagggcaagtgggtgcccccagagggccaggacatgccccgctgcatcgcccacttctgtgagaagcccccatctgtgtcctacagcatcctggagagcgtgtccaaggccaagtttgctgctggctctgtggtgtccttcaagtgcatggagggctttgtgctgaacaccagcgccaagattgagtgcatgaggggcggccagtggaaccccagccccatgagcatccagtgcatccctgtgcgctgtggggagccccccagcatcatgaatggctacgccagcggcagcaactacagctttggagccatggtggcctacagctgcaacaagggcttctacatcaagggggagaagaagagcacctgtgaggccaccggccagtggagcagccccatccccacctgccaccctgtgtcctgtggggagccccccaaggtggagaatggcttcctggagcacaccaccggccgcatctttgagagcgaggtgcgctaccagtgcaaccctggctacaagtctgtgggcagccctgtgtttgtgtgccaggccaacagacactggcacagcgagagccccctgatgtgtgtgcccctggactgtgggaagcccccacccatccagaatggcttcatgaagggagaaaattttgaggtgggcagcaaggtgcagttcttctgcaatgaaggctatgagctggtgggggacagctcctggacctgccagaagagcggcaagtggaacaagaagagcaaccccaagtgcatgcctgccaagtgcccagagccccccctgctggagaaccagctggtgctgaaggagctgaccacagaggtgggcgtggtgaccttcagctgcaaggagggccacgtgctgcagggccccagcgtgctgaagtgcctgcccagccagcagtggaatgacagcttccctgtgtgcaagatcgtgctgtgcaccccacctcctctcatcagctttggagtgcccatccccagcagcgccctgcacttcggcagcacagtgaagtacagctgtgtgggcggcttcttcctgcggggcaacagcaccaccctgtgccagccagatggcacctggagcagccccctgcctgaatgtgtgcctgtggagtgcccccagcctgaggagatccccaacggcatcattgatgtgcagggcctggcctacctgagcacagccctgtacacctgcaagccaggctttgagctggtgggcaacaccaccaccctgtgtggagaaaatggccactggctgggcggcaagcccacctgcaaggccatcgagtgcctgaagcccaaggagatcctgaatggcaagttctcctacacagacctgcactacggccagacagtgacctacagctgcaacagaggcttccggctggagggccccagcgccctgacctgcctggagaccggggactgggatgtggatgcccccagctgcaatgccatccactgtgacagcccccagcccattgaaaatggatttgtggagggcgctgactacagctatggagccatcatcatctacagctgcttccctggcttccaggtggccggccacgccatgcagacctgtgaggagagcggctggagcagcagcatccccacctgcatgcccatcgactgtggcctgcccccccacatcgactttggagactgcaccaagctgaaggatgaccagggctactttgagcaggaggatgacatgatggaggtgccctacgtgaccccccaccccccctaccacctgggcgctgtggccaagacctgggagaacaccaaggagagccctgccacccacagcagcaacttcctgtatggcaccatggtgtcctacacctgcaaccctggctatgagctgctgggcaaccctgtgctgatctgccaggaggatggcacctggaatggaagtgcccccagctgcatcagcattgaatgtgacctgcccacagccccagaaaatggcttcctgcgcttcacagagacctccatgggcagcgctgtgcagtacagctgcaagccaggccacatcctggccggcagtgacctgcggctgtgcctggagaacaggaagtggagcggggccagcccccgctgtgaggccatcagctgcaagaagcccaaccctgtgatgaatggcagcatcaagggcagcaactacacctacctgagcaccctgtactatgaatgtgaccccggctacgtgctgaatggaacagaaagaaggacctgccaggatgacaagaactgggatgaagatgagcccatctgcatccctgtggactgcagcagcccccctgtgtctgccaacggccaggtgagaggagatgagtacaccttccagaaggagattgagtacacctgcaatgaaggcttcctgctggagggcgcccggagccgggtgtgcctggccaacggctcctggagcggggccaccccagactgtgtgcctgtgcgctgtgccaccccaccccagctggccaacggggtgacagagggcctggactatggcttcatgaaggaggtgaccttccactgccacgagggctacatcctgcatggagcccccaagctgacctgccagagtgatggcaactgggatgctgagatccccctgtgcaagcctgtgaactgtggccccccagaggacctggcccacggcttccccaacggcttctccttcatccacggcggccacatccagtaccagtgcttccctggctacaagctgcacggcaacagcagccgccgctgcctgagcaatggctcctggagcggcagcagccccagctgcctgccctgccgctgcagcacccctgtgattgaatatggaacagtgaatggaacagactttgactgtgggaaggccgcccgcatccagtgcttcaagggcttcaagctgctgggcctgtctgagatcacctgtgaggctgatggccagtggagcagcggcttcccccactgtgagcacaccagctgtggcagcctgcccatgatccccaatgccttcatcagcgagaccagctcctggaaggaaaatgtcatcacctacagctgccgcagcggctacgtgatccagggcagcagtgacctgatctgcacagagaagggcgtgtggagccagccctaccctgtgtgtgagcccctgagctgtggcagcccccccagcgtggccaatgctgtggccactggagaggcccacacctatgaaagtgaggtgaagctgcgctgcctggagggctacaccatggacacagacacagacaccttcacctgccagaaggatggccgctggttccctgagcgcatcagctgcagccccaagaagtgccccctgcctgagaacatcacccacatcctggtgcatggagatgacttctctgtgaaccggcaggtgtctgtgtcctgtgccgagggctacacctttgagggcgtgaacatctctgtgtgccagctggatggcacctgggagccccccttcagtgatgagagctgcagccctgtgtcctgtgggaagccagagagccctgagcacggctttgtggtgggcagcaagtacacctttgagagcaccatcatctaccagtgtgagcccggctatgagctggagggcaaccgggagcgggtgtgccaggagaaccggcagtggagcggaggagtggccatctgcaaggagacccgctgtgagacccccctggagttcctgaatggcaaggctgacatcgagaacagaaccaccggccccaacgtggtgtacagctgcaacagaggctacagcctggagggccccagcgaggcccactgcacagaaaatggcacctggagccaccctgtgcccctgtgcaagcccaacccctgccctgtgcccttcgtcatcccagaaaatgccctgctgtctgagaaggagttctacgtggaccagaatgtgtccatcaagtgccgggagggcttcctgctgcagggccacggcatcatcacctgcaacccagatgagacctggacccagaccagcgccaagtgtgagaagatcagctgtggccccccagcccacgtggagaatgccatcgcccggggcgtgcactaccagtatggagacatgatcacctacagctgctacagcggctacatgctggagggcttcctgcggtctgtgtgcctggagaatggcacctggaccagcccccccatctgcagagctgtgtgccgcttcccctgccagaatggaggcatctgccagaggcccaatgcctgcagctgcccagagggctggatgggccgcctgtgtgaggagcccatctgcatcctgccctgcctgaatggaggccgctgtgtggccccctaccagtgtgactgccccccaggctggacaggcagccgctgccacacagctgtgtgccagagcccctgcctgaatggaggaaaatgtgtgcggcccaaccgctgccactgcctgagctcctggacaggccacaactgcagcaggaagagaagaacaggcttctag

SEQ ID NO: 245872 - DNA, 10716 bp, Artificial Sequence
  derived and/or modified sequence
atgtggccccggctggccttctgctgctggggcctggccctggtgtctggctgggccaccttccagcagatgagccccagcaggaacttctccttccgcctcttccctgagacagcccctggggcccctggcagcatcccagcccccccagcccctggagatgaggccgccggcagccgggtggagcggctgggccaggccttcagaagaagagtgcggctgctgcgggagctgtctgagcggctggagctggtgttcctggtggatgacagcagctctgtgggggaggtgaacttccgctctgagctgatgtttgtgaggaagctgctgagtgacttccctgtggtgcccacagccaccagggtggccatcgtgaccttcagcagcaagaactacgtggtgccccgggtggactacatcagcacccggcgggcccggcagcacaagtgtgccctgctgctgcaggagatcccagccatctcctaccggggcggcggcacctacaccaagggggccttccagcaggccgcccagatcctgctgcacgcccgggagaacagcaccaaggtggtgttcctgatcacagatggctacagcaatggaggagacccccggcccatcgccgccagcctgcgggacagcggcgtggagatcttcaccttcggcatctggcagggcaacatccgggagctgaatgacatggccagcacccccaaggaggagcactgctacctgctgcacagctttgaggagtttgaggccctggcccggcgggccctgcacgaggacctgcccagcggcagcttcatccaggatgacatggtgcactgcagctacctgtgtgatgagggcaaggactgctgtgacaggatgggcagctgcaagtgtggcacccacacaggccactttgagtgcatctgtgagaagggctactacggcaagggcctgcagtatgaatgtacagcctgccccagcggcacctacaagccagagggcagccctgggggcatcagcagctgcatcccctgcccagatgagaaccacaccagccccccaggcagcaccagccctgaggactgtgtgtgccgggagggctaccgggccagcggccagacctgtgagctggtgcactgcccagccctgaagcccccagaaaatggctacttcatccagaacacctgcaacaaccacttcaatgctgcctgtggggtgcgctgccaccctggctttgacctggtgggcagcagcatcatcctgtgcctgcccaacggcctgtggagcggcagcgagagctactgccgggtgaggacctgcccccacctgcggcagcccaagcacggccacatcagctgcagcacccgggagatgctgtacaagaccacctgcctggtggcctgtgatgagggctaccgcctggagggcagtgacaagctgacctgccagggcaacagccagtgggatggccctgagccccgctgtgtggagcggcactgcagcaccttccagatgcccaaggatgtgatcatcagcccccacaactgtgggaagcagcctgccaagtttggcaccatctgctacgtgtcctgccggcagggcttcatcctgagcggcgtgaaggagatgctgcgctgcaccaccagcggcaagtggaatgtgggcgtgcaggccgctgtgtgcaaggatgtggaggccccccagatcaactgccccaaggacatcgaggccaagaccctggagcagcaggacagcgccaacgtgacctggcagatccccacagccaaggacaacagcggggagaaggtgtctgtgcacgtgcacccagccttcaccccaccctacctgttccccatcggagatgtggccatcgtgtacacagccacagacctgagcggcaaccaggccagctgcatcttccacatcaaggtgattgatgctgagccccctgtgattgactggtgccgcagccccccacctgtgcaggtgtctgagaaggtgcatgctgcctcctgggatgagccccagttcagtgacaacagcggggctgagctggtgatcaccaggagccacacccagggcgacctcttcccccagggcgagaccatcgtgcagtacacagccacagaccccagcggcaacaacagaacctgtgacatccacatcgtcatcaagggcagcccctgtgagatccccttcacccctgtgaatggagacttcatctgcaccccagacaacacaggagtgaactgcaccctgacctgcctggagggctatgacttcacagagggcagcacagacaagtactactgtgcctatgaagatggagtgtggaagcccacctacaccacagagtggccagactgtgccaagaagagatttgccaaccacggcttcaagagctttgagatgttctacaaggccgcccgctgtgatgacacagacctgatgaagaagttcagcgaggcctttgagaccaccctgggcaagatggtgcccagcttctgcagtgatgctgaggacatcgactgccgcctggaggagaacctgaccaagaagtactgcctggagtacaactatgactatgaaaatggatttgccatcggccctgggggctggggcgccgccaaccggctggactacagctatgatgacttcctggacacagtgcaggagacagccaccagcattggaaatgccaagagcagccgcatcaagaggtctgcccccctgagtgactacaagatcaagctgatcttcaacatcacagcctctgtgcccctgcctgatgaaagaaatgacaccctggagtgggagaaccagcagaggctgctgcagaccctggagaccatcaccaacaagctgaagaggaccctgaacaaggaccccatgtacagcttccagctggccagcgagatcctgattgctgacagcaacagcctggagaccaagaaggccagccccttctgccggcccggctctgtgctgcggggccgcatgtgtgtgaactgccccctgggcacctactacaacctggagcacttcacctgtgagagctgccgcatcggcagctaccaggatgaggagggccagctggagtgcaagctgtgccccagcggcatgtacacagagtacatccacagcaggaacatcagtgactgcaaggcccagtgcaagcagggcacctacagctacagcggcctggagacctgtgagagctgccccctgggcacctaccagcccaagtttggcagccgcagctgcctgagctgcccagagaacaccagcacagtgaagagaggagctgtgaacatcagcgcctgtggggtgccctgcccagagggcaagttcagccgcagcggcctgatgccctgccacccctgcccccgggactactaccagcccaatgccggcaaggccttctgcctggcctgccccttctacggcaccaccccatttgctggcagccgcagcatcacagaatgtagcagcttcagcagcaccttctctgctgctgaggagagcgtggtgcccccagccagcctgggccacatcaagaagagacatgagatcagcagccaggtgttccacgagtgcttcttcaacccctgccacaacagcggcacctgccagcagctgggccggggctacgtgtgcctgtgccccctgggctacacaggcctgaagtgtgaaacagacattgatgagtgcagccccctgccctgcctgaacaatggagtgtgcaaggacctggtgggggagttcatctgtgagtgccccagcggctacacaggccagagatgtgaggagaacatcaatgaatgtagcagcagcccctgcctgaacaagggcatctgtgtggatggagtggccggctaccgctgcacctgtgtgaagggctttgtgggcctgcactgtgaaacagaggtgaatgaatgccagagcaacccctgcctgaacaatgctgtgtgtgaggaccaggtgggcggcttcctgtgcaagtgccccccaggcttcctgggcacccgctgtgggaagaatgtggatgagtgcctgagccagccctgcaagaatggagccacctgcaaggatggagccaacagcttccgctgcctgtgtgccgccggcttcaccggcagccactgtgagctgaacatcaatgaatgccagagcaacccctgcaggaaccaggccacctgtgtggatgagctgaacagctacagctgcaagtgccagcccggcttcagcggcaagagatgtgaaacagagcagagcacaggcttcaacctggactttgaggtgtctggcatctacggctacgtgatgctggatggcatgctgcccagcctgcacgccctgacctgcaccttctggatgaagagcagtgatgacatgaactacggcacccccatctcctatgctgtggacaatggaagtgacaacaccctgctgctgacagactacaacggctgggtgctgtatgtgaatggccgggagaagatcaccaactgccccagcgtgaatgatggccgctggcaccacatcgccatcacctggaccagcgccaacggcatctggaaggtgtacattgatggcaagctgagtgatggaggagctggcctgtctgtgggcctgcccatccctgggggcggggccctggtgctgggccaggagcaggacaagaagggggagggcttcagccctgctgagagctttgtgggcagcatcagccagctgaacctgtgggactatgtgctgagcccccagcaggtgaagagcctggccaccagctgcccagaggagctgagcaaaggaaatgtgctggcctggccagacttcctgtctggaattgtgggcaaggtgaagattgacagcaagagcatcttctgcagcgactgcccccggctgggcggctctgtgccccacctgaggacagccagcgaggacctgaagccaggcagcaaggtgaacctcttctgtgaccccggcttccagctggtgggcaaccctgtgcagtactgcctgaaccagggccagtggacccagcccctgccccactgtgagcgcatcagctgtggggtgcccccacccctggagaatggcttccacagcgcagatgacttctacgccggcagcacagtgacctaccagtgcaacaacggctactacctgctgggggacagcaggatgttctgcacagacaatggctcctggaatggagtgagccccagctgcctggatgtggatgaatgtgctgtgggcagtgactgcagcgagcacgccagctgcctgaatgtggatggcagctacatctgcagctgtgtgcccccctacacaggagatggcaagaactgtgccgagcccatcaagtgcaaggcccctggcaacccagaaaatggccacagcagtggagagatctacacagtgggcgctgaggtgaccttcagctgccaggagggctaccagctgatgggcgtgaccaagatcacctgcctggagagcggggagtggaaccacctgatcccctactgcaaggctgtgtcctgtgggaagccagccatcccagaaaatggctgcatcgaggagctggccttcaccttcggcagcaaggtgacctaccgctgcaacaagggctacaccctggccggggacaaggagagcagctgcctggccaacagctcctggagccacagcccccctgtgtgtgagcctgtgaagtgcagcagccctgagaacatcaacaacgggaagtacatcctgagcggcctgacctacctgagcacagccagctacagctgtgacaccggctacagcctgcagggccccagcatcatcgagtgcacagccagcggcatctgggaccgggcccccccagcctgccacctggtgttctgtggggagcccccagccatcaaggatgctgtgatcactggaaacaacttcaccttcaggaacacagtgacctacacctgcaaggagggctacaccctggccggcctggacaccatcgagtgcctggctgatggcaagtggagcagaagtgaccagcagtgcctggccgtgtcctgtgatgagccccccatcgtggaccacgccagccctgagacagcccaccggctgtttggagacatcgccttctactactgcagtgatggctacagcctggccgacaacagccagctgctgtgcaatgcccagggcaagtgggtgcccccagagggccaggacatgccccgctgcatcgcccacttctgtgagaagccacccagcgtgtcctacagcatcctggagagcgtgtccaaggccaagtttgctgctggctctgtggtgtccttcaagtgcatggagggctttgtgctgaacaccagcgccaagattgagtgcatgagaggaggccagtggaaccccagccccatgagcatccagtgcatccctgtgcgctgtggggagcccccatccatcatgaatggctacgccagcggcagcaactacagctttggagccatggtggcctacagctgcaacaagggcttctacatcaagggggagaagaagagcacctgtgaggccaccggccagtggagcagccccatccccacctgccaccctgtgtcctgtggggagccccccaaggtggagaatggcttcctggagcacaccaccggccgcatctttgaaagtgaggtgcgctaccagtgcaaccctggctacaagtctgtgggcagccctgtgtttgtgtgccaggccaacagacactggcacagcgagagccccctgatgtgtgtgcccctggactgtgggaagcccccacccatccagaatggcttcatgaagggggagaactttgaggtgggcagcaaggtgcagttcttctgcaatgaaggctatgagctggtgggggacagctcctggacctgccagaagagcggcaagtggaacaagaagagcaaccccaagtgcatgcctgccaagtgcccagagccccccctgctggagaaccagctggtgctgaaggagctgaccacagaggtgggcgtggtgaccttcagctgcaaggagggccacgtgctgcagggccccagcgtgctgaagtgcctgcccagccagcagtggaatgacagcttccctgtgtgcaagatcgtgctgtgcaccccaccacccctcatcagctttggagtgcccatccccagcagcgccctgcacttcggcagcacagtgaagtacagctgtgtgggcggcttcttcctgcggggcaacagcaccaccctgtgccagccagatggcacctggagcagccccctgcctgaatgtgtgcctgtggagtgcccccagcctgaggagatccccaacggcatcattgatgtgcagggcctggcctacctgagcacagccctgtacacctgcaagccaggctttgagctggtgggcaacaccaccaccctgtgtggggagaatggccactggctgggcggcaagcccacctgcaaggccattgaatgtctgaagcccaaggagatcctgaatggcaagttctcctacacagacctgcactacggccagacagtgacctacagctgcaacagaggcttccggctggagggccccagcgccctgacctgcctggagactggagactgggatgtggatgcccccagctgcaatgccatccactgtgacagcccccagcccattgaaaatggatttgtggagggcgctgactacagctatggagccatcatcatctacagctgcttccctggcttccaggtggccggccacgccatgcagacctgtgaggagagcggctggagcagcagcatccccacctgcatgcccatcgactgtggcctgcccccccacatcgactttggagactgcaccaagctgaaggatgaccagggctactttgagcaggaggatgacatgatggaggtgccctacgtgaccccccaccccccctaccacctgggcgctgtggccaagacctgggagaacaccaaggagagccctgccacccacagcagcaacttcctgtatggcaccatggtgtcctacacctgcaaccctggctatgagctgctgggcaaccctgtgctgatctgccaggaggatggcacctggaatggcagcgcccccagctgcatcagcattgaatgtgacctgcccacagccccagaaaatggcttcctgcgcttcacagagacctccatgggcagcgctgtgcagtacagctgcaagccaggccacatcctggccggcagtgacctgcggctgtgcctggagaacaggaagtggagcggggccagcccccgctgtgaggccatcagctgcaagaagcccaaccctgtgatgaatggcagcatcaagggcagcaactacacctacctgagcaccctgtactatgaatgtgaccccggctacgtgctgaatggaacagagaggaggacctgccaggatgacaagaactgggatgaagatgagcccatctgcatccctgtggactgcagcagcccccctgtgtctgccaacggccaggtgagaggagatgagtacaccttccagaaggagattgagtacacctgcaatgaaggcttcctgctggagggcgcccggagccgggtgtgcctggccaacggctcctggagcggggccaccccagactgtgtgcctgtgcgctgtgccaccccaccccagctggccaatggagtgacagagggcctggactatggcttcatgaaggaggtgaccttccactgccacgagggctacatcctgcacggggcccccaagctgacctgccagagtgatggcaactgggatgctgagatccccctgtgcaagcctgtgaactgtggccccccagaggacctggcccacggcttccccaacggcttctccttcatccatggaggccacatccagtaccagtgcttccctggctacaagctgcacggcaacagcagccgccgctgcctgagcaatggctcctggagcggcagcagccccagctgcctgccctgccgctgcagcacccctgtgattgaatatggcaccgtgaatggaacagactttgactgtgggaaggccgcccgcatccagtgcttcaagggcttcaagctgctgggcctgtctgagatcacctgtgaggctgatggccagtggagcagcggcttcccccactgtgagcacaccagctgtggcagcctgcccatgatccccaatgccttcatcagcgagaccagctcctggaaggaaaatgtcatcacctacagctgccgcagcggctacgtgatccagggcagcagtgacctgatctgcacagagaagggcgtgtggagccagccctaccctgtgtgtgagcccctgagctgtggcagccccccatctgtggccaatgctgtggccaccggggaggcccacacctatgagagcgaggtgaagctgcgctgcctggagggctacaccatggacacagacacagacaccttcacctgccagaaggatggccgctggttccctgagcgcatcagctgcagccccaagaagtgccccctgcctgagaacatcacccacatcctggtgcatggagatgacttctctgtgaaccggcaggtgtctgtgtcctgtgccgagggctacacctttgaaggagtgaacatctctgtgtgccagctggatggcacctgggagccccccttcagtgatgagagctgcagccctgtgtcctgtgggaagccagagagccctgagcacggctttgtggtgggcagcaagtacacctttgagagcaccatcatctaccagtgtgagcccggctatgagctggagggcaaccgggagcgggtgtgccaggagaaccggcagtggagcggcggcgtggccatctgcaaggagacccgctgtgagacccccctggagttcctgaatggcaaggctgacattgaaaatagaaccaccggccccaacgtggtgtacagctgcaacagaggctacagcctggagggccccagcgaggcccactgcacagaaaatggcacctggagccaccctgtgcccctgtgcaagcccaacccctgccctgtgccctttgtgatcccagaaaatgccctgctgtctgagaaggagttctacgtggaccagaatgtgtccatcaagtgccgggagggcttcctgctgcagggccacggcatcatcacctgcaacccagatgagacctggacccagaccagcgccaagtgtgagaagatcagctgtggccccccagcccacgtggagaatgccatcgcccggggcgtgcactaccagtacggggacatgatcacctacagctgctacagcggctacatgctggagggcttcctgcggtctgtgtgcctggagaatggcacctggaccagcccccccatctgcagagctgtgtgccgcttcccctgccagaatggaggcatctgccagaggcccaatgcctgcagctgcccagagggctggatgggccgcctgtgtgaggagcccatctgcatcctgccctgcctgaatggaggccgctgtgtggccccctaccagtgtgactgccccccaggctggacaggcagccgctgccacacagctgtgtgccagagcccctgcctgaatggaggaaaatgtgtgcggcccaaccgctgccactgcctgagctcctggacaggccacaactgcagcaggaagagaagaacaggcttctag

SEQ ID NO: 245873 - DNA, 4494 bp, Artificial Sequence
  derived and/or modified sequence
atgccccggtgcatcgcccacttctgcgagaagccccccagcgtgtcatacagcatcttggagtctgtgtcaaaggctaagtttgctgcaggatctgtggtgagttttaagtgtatggagggtttcgtcctgaacacttcagctaagatcgaatgcatgcgggggggccaatggaatccgtcacccatgtcaattcagtgtatacccgtgaggtgcggtgagccccctagcattatgaatgggtatgcttctgggagcaattattcctttggtgcaatggtggcctacagctgcaacaaaggcttttacattaagggtgagaaaaaaagcacctgtgaggctacaggtcagtggagctcaccaattcctacatgtcaccctgtgagctgcggcgagccgcccaaggtggaaaatggctttctcgagcacaccaccggcagaatcttcgagagtgaggttcgataccagtgtaatccagggtataagtccgtcggtagccccgtttttgtgtgtcaagccaatagacactggcattcggaaagccctctcatgtgcgttcctctagactgtggaaaaccaccgccaatccagaatggcttcatgaaaggagagaacttcgaagtggggtcaaaagtgcagttcttctgcaacgaaggctatgaactcgttggagactcttcctggacctgtcagaagtccggcaagtggaataagaagtccaatccaaagtgcatgcctgcgaaatgccccgagcctcctctcctcgagaaccagctcgttctgaaagagctcacaacagaggtgggagttgtgacgttctcatgtaaggagggccacgtcctgcagggaccctctgtgttaaagtgcctccctagtcagcagtggaacgattccttccccgtttgtaagattgttctttgtacgcctcctcctctcatcagctttggggtgccaatcccctcttcagccctacatttcggatccaccgtgaaatactcatgtgtaggaggattctttctcagggggaacagcactaccctgtgtcaaccagacggaacctggtcctcacccctgccagaatgtgttcccgtggaatgtccgcagcccgaggaaattcctaacgggatcattgacgtacagggactcgcctatttaagcaccgcgctgtatacctgtaagccagggttcgaattagtcggtaacaccacgaccttgtgtggagagaacggtcactggctgggcggtaaaccaacttgcaaggctatcgaatgcctgaagccaaaagagatcctcaatgggaagttttcctacacagatttgcattacggacaaacggtgacatattcctgtaaccgcggctttcgcctcgagggaccgtcggccttaacctgtttggaaaccggtgactgggatgttgacgccccttcttgtaatgctatccactgtgattcgccccagccgatcgaaaatggtttcgtggaaggtgccgattactcttatggagctatcataatctactcatgttttcccgggttccaagtcgcgggccatgccatgcagacttgcgaggagtctggctggtctagtagcattccgacttgcatgcctatagactgtggcctgcctccccacatcgacttcggggactgtacgaagctgaaagacgaccaggggtacttcgagcaggaagatgacatgatggaggtgccttatgtaacaccccatcccccgtaccacctgggagctgttgcaaagacttgggagaacacgaaggagagccccgccacacactccagcaactttctttatgggaccatggtgtcttatacatgcaatcccggctacgagcttctaggaaaccccgtccttatctgccaggaggacggaacatggaatggttcagcaccatcttgtattagcatagagtgcgatctgccaacagcccctgaaaatggctttctcagattcactgagacatctatgggatctgctgtgcaatattcatgtaaaccaggacatatccttgctgggagcgatttaaggctctgtctggagaatcggaagtggagcggagcttctccccgctgcgaagcaattagttgcaaaaagcccaaccctgtcatgaacggatccattaagggcagcaactacacttacctctcaactctgtattatgagtgtgatcccgggtatgtgctcaatggtacagagcgacgcacctgccaggatgacaaaaactgggacgaggacgagcccatctgcatacctgtggattgcagctcccctcccgtatcagcaaatgggcaggtgcgtggggacgagtataccttccaaaaagagattgaatatacatgcaacgaaggattcctgcttgaaggagcacggtccagagtgtgcctggctaacggcagttggtccggcgcgactcccgactgcgtccccgtgagatgcgccaccccgcctcagctggccaatggagtgaccgagggcctggattacggcttcatgaaagaagtgacctttcattgtcatgaaggttatattcttcacggagcacccaagttaacctgccagtcagacggaaactgggacgcagaaattcccctttgtaagccggtcaattgcggcccgcctgaggaccttgcccatggatttccaaatggttttagcttcatccatggcggacacatccagtatcagtgtttcccagggtacaagttacatgggaactccagtagaaggtgcttaagcaacggaagctggagcggaagctctccaagctgtcttccatgtaggtgttccacgcctgtgatcgaatatggaactgtgaacggcactgatttcgattgcggtaaagcagctcggattcagtgctttaagggcttcaagttgcttggcctgagcgagatcacctgtgaagccgacggccagtggagtagtgggtttcctcattgcgaacacacaagttgcggcagcctacccatgatccccaacgctttcatttccgagacctcaagctggaaggagaacgttatcacatattcttgtcgctctggatatgttatccagggctcttctgatttgatctgcaccgagaaaggcgtttggtctcagccctacccagtgtgcgagccactgagctgcgggagccccccgagcgtcgcaaacgcggtcgctaccggagaggctcacacctacgagagcgaagtaaagctgcgctgcttggagggctacactatggatacagataccgatacatttacctgtcaaaaagatggcagatggtttcccgagagaataagctgtagccctaaaaagtgtcctctgccagagaatattacacatattttagttcatggcgatgatttttccgtgaacaggcaggtgagcgtgtcctgtgcagagggatatacgtttgagggcgtgaacatcagcgtctgccagttggacggaacctgggaaccacctttttccgatgagagttgcagccccgtgtcttgtggcaaaccggagtctcccgaacatggcttcgtggttgggtccaaatatactttcgaatctaccattatataccagtgtgagccaggttacgaactggagggaaaccgagaacgtgtctgccaggagaaccgccaatggtctggtggcgttgccatttgtaaggagacaaggtgcgaaactccactggagtttcttaatggcaaagctgacatcgagaaccgtactacaggtccaaatgtcgtttacagttgcaataggggctatagcttagaaggaccatcagaggctcattgcactgagaacggcacttggagtcaccctgtgcccctgtgcaagccgaacccctgcccagttccatttgtgattcctgaaaatgccttactgagtgaaaaggagttctacgtcgaccaaaatgtctcaattaagtgtagagaaggtttcctgctgcagggccatggcatcatcacctgcaatccagacgagacttggacacagacatcggctaaatgtgagaaaatctcatgcggacctcctgctcacgtagagaatgccatcgcccgaggtgtgcactatcagtacggcgacatgataacatattcttgctattctggttatatgctggagggcttcttgcgatccgtctgcctggagaatggaacatggactagccccccaatctgcagggcagtgtgtcgcttcccatgtcagaatggaggcatttgccagaggccgaatgcctgctcctgtcctgagggctggatgggcagactttgtgaagaaccgatttgcatcctcccgtgcttaaatgggggacgctgcgttgccccataccagtgcgactgtcctccaggctggacaggaagtcgttgccacacagctgtgtgccagagcccctgcctgaatggtggcaagtgtgttagacctaatagatgtcactgtctgtctagctggacagggcataactgcagtcggaagaggcggacaggtttctag

SEQ ID NO: 245874 - DNA, 4650 bp, Artificial Sequence
  derived and/or modified sequence
atgtggccccggctggccttctgctgctggggcctggccctggtgagcggctgggcaaccttccagcagatgagcccatcgcggaacttctcctttaggttgttcccggagacagccccaggagccccaggctcaatacctgccccccctgctccgggcgacgaggccgccggtagccgtgtcgaaagactgggccaggccttcagacggagagtcagactgctgagagaactctctgaaagactggaattggtattcttagttgacgatagctcaagtgttggtgaagtgaatttcaggtctgagctcatgtttgttaggaaattgttgagcgacttcccagtagtcccgacagccacccgagtggccattgtgacgttttcatcaaagaactacgtcgtgcctcgagtggattatattagcacccgaagagcccgccagcataagtgtgctctgctgctgcaggagattcccgccatctcctacagaggcggcggcacgtatacgaaaggggcattccagcaagccgctcagattctgctgcatgctcgggagaatagcaccaaagtggttttcctgatcaccgacgggtatagtaacgggggtgacccaaggcccattgcagcctcccttagagattctggggtggagattttcacattcggtatatggcagggcaacattcgcgaactgaatgatatggcctctacccctaaggaggagcactgctatctcctacatagctttgaggagtttgaggcgctcgcccgcagggctctacatgaggacttgcctagtggatcctttatccaggacgacatggtccactgttcatatctgtgcgacgaggggaaagattgttgcgatcgcatgggctcttgcaaatgcgggacacataccgggcacttcgagtgtatctgcgagaagggttattatggtaagggcctccagtatgagtgcactgcctgcccgagcggcacctataaacctgagggcagccccggcggtatcagctcttgtatcccctgccccgacgagaatcatacaagccccccgggctccactagtcctgaagactgtgtttgccgagaggggtaccgcgcctccggccagacatgcgagctggtgcactgccccgctttgaagcccccggagaacggctatttcattcagaacacctgtaataaccatttcaacgccgcctgcggagtgcggtgccatcccggatttgatctggttggctcaagtataatactctgcttgcccaacggactgtggtccggcagcgagagctactgtcgcgtgcgaacatgcccacatttgcgccagcccaagcacggtcacattagctgttcaactagggagatgctctataaaacaacttgtctggtcgcttgcgatgaagggtacaggctggaggggagtgacaagctgacctgccagggtaattcacagtgggacggacctgaaccacgttgtgtggagcgtcattgcagcacatttcaaatgcctaaggacgtcataattagtccccacaactgcgggaaacagccagcaaaatttgggacaatctgctacgttagctgccggcagggttttattcttagtggagtaaaagagatgctgcgctgcacaacgtcgggcaagtggaatgtgggagtccaggctgctgtgtgtaaagatgtcgaggcaccccagatcaattgccccaaagacattgaagccaagaccttggaacagcaggatagcgcaaacgtgacctggcaaatcccaaccgctaaggataattcaggcgaaaaggtgagtgtgcacgtccatcctgcctttacgcctccttatctcttccctatcggggacgtcgcaatcgtttatacagcaaccgacttgtctgggaatcaggcgtcttgtatttttcacatcaaagtcattgacgcggaaccccccgtcatcgactggtgtagaagtcctcccccagtacaggtatccgaaaaagttcacgccgcttcctgggatgagccacagttttccgacaactctggtgcagaattagtgattacccgctcgcatacgcagggcgatttatttccacagggggaaaccattgtgcaatataccgccacagatcctagtggaaataacaggacgtgtgacatacatatcgtcataaagggaagcccctgcgaaataccctttacccctgtgaacggagacttcatttgtactcctgacaataccggagtgaattgcactctcacttgtcttgagggctacgacttcaccgagggctccacagacaagtactactgtgcctatgaagatggcgtgtggaagcccacctacaccacggagtggcctgattgtgccaagaagcgcttcgccaaccacggtttcaagtcttttgagatgttttataaagcggctaggtgcgatgatacagacctgatgaagaagttcagtgaagcttttgaaaccaccttgggcaagatggtgccaagcttctgttccgacgctgaggatatcgactgtaggctggaagagaacctgaccaagaagtattgtctggaatataactatgattatgagaacgggttcgctattggcccaggcgggtggggcgccgctaacagactggactactcttacgacgacttcctcgataccgtacaggagaccgcaacttcaattggaaacgctaagtcttcccgcattaagcggagcgctcctctgagtgactacaagattaagctcattttcaatataacagcctcggtaccactgcctgacgagaggaatgacacgcttgagtgggaaaatcagcaaagacttctgcagaccctggaaaccattactaataaactcaagagaacgctgaacaaagatcctatgtactcctttcagcttgcaagtgagattctcatcgcagacagcaatagcctcgaaacaaagaaagcatcaccattttgtcgccccggaagcgtactgcgcggtcggatgtgtgtgaactgtcccctgggcacatactacaatctcgaacatttcacatgcgagtcgtgccgcatcgggtcatatcaagatgaggagggccagctggagtgcaaactttgcccttccgggatgtatacggaatatatacattctcgaaacatctcagattgcaaagcacaatgcaagcagggaacttatagttactcaggcttggagacctgcgagtcatgcccactcgggacctaccagccaaagtttggaagccggtcgtgtctgagttgccctgagaatacctcaacagtcaaacggggggcggtgaacatcagcgcatgtggcgtgccatgtcctgaaggaaagttcagtaggtctggcctcatgccgtgccacccgtgccctcgggattactatcaacctaacgctggcaaggccttctgcctggcttgcccgttttatggcaccaccccatttgccgggtctcgcagcattacggagtgtagctcattctcctcaaccttctctgccgcagaggagtctgtggtcccccctgccagtcttgggcatattaaaaaacgccacgagattagcagccgggtgtttcatgagtgtttctttaacccctgtcataatagcggaacctgccaacagctgggacgaggatatgtgtgcctgtgccctcttggatataccggcttgaaatgcgagacggatatagacgagtgtagtcctctcccgtgcctgaacaacggcgtgtgcaaagatctcgtgggggaattcatatgtgaatgcccgtcagggtataccggccaaaggtgcgaggagaacatcaacgaatgttcctcgtcaccgtgtctgaacaagggtatatgcgtggacggagtagctggctataggtgcacctgcgtaaaaggatttgtgggcctgcactgcgagacggaggtgaacgaatgccagtccaacccctgtctcaacaacgctgtctgtgaggatcaagtggggggcttcctatgcaagtgccccccaggctttctgggtacacgttgcggcaaaaatgttgacgaatgtttaagccagccatgcaaaaatggggctacatgtaaggacggcgccaacagctttcgttgcctgtgtgccgccgggttcacaggctcacactgcgagctgaatattaacgagtgtcagagtaatccctgccgcaaccaggccacgtgtgttgacgaattaaattcctattcctgcaaatgtcagccgggattcagtggcaagagatgcgaaaccgagcagagtactgggttcaatctggacttcgaagttagcggtatttacggatatgtcatgctggacggtatgctgccttcactccacgctctgacttgtactttctggatgaaatcttccgatgacatgaattacggcacaccaattagttacgccgtggacaacggatctgataatacgctgctgctgacggactataatgggtgggtactgtatgttaacgggagggaaaagataaccaactgcccgtccgtgaatgacgggagatggcaccacatagccattacgtggacaagcgccaatggcatttggaaagtgtacatagatggaaagcttagcgatgggggtgccggcctttctgtgggcctaccaattcccgggatgttttag

SEQ ID NO: 245875 - DNA, 2538 bp, Artificial Sequence
  derived and/or modified sequence
atgagccccagccggaacttcagcttccggctgttccccgagaccgccccgggcgctccaggcagcatcccagccccccccgcccctggggacgaggccgcaggctctcgcgtggagcggttgggtcaggccttccgccgtagagttaggctgctccgagagctgagtgagagacttgagctggtgtttttagtagacgactccagctcagtaggggaggtcaactttcggtctgagctgatgtttgtacgcaagctcctctctgattttccggtggtgccgacagcaacccgggtggcaattgtgacgttcagttccaagaattacgttgtgcctagggtggactacatcagtacccgacgagcccgacagcacaagtgcgctctcctgctccaggagatccctgccatcagctatcggggcgggggcacctatacaaagggggcctttcaacaggcggcccagatccttttacatgctagagagaactcaactaaagttgttttcctcatcaccgacggctatagcaatggaggggatcctcgccctattgctgctagcctgcgggactcaggggttgagatctttacgttcggaatctggcagggaaatataagagagcttaacgatatggcctccacacctaaggaagagcactgctatctcctgcactcattcgaggaatttgaagcactcgccaggcgcgctttgcacgaggaccttccctcaggtagctttattcaggacgacatggtccactgcagctatttatgcgacgagggaaaagattgctgtgacagaatggggtcatgcaaatgtggcacccacactggacacttcgagtgcatctgtgagaagggctattatgggaaaggactccagtatgagtgcacagcctgccctagcggaacttacaaacccgaaggctctccgggcggaatctcttcctgcattccgtgtccggacgagaaccacaccagcccacctggctcaacctctcccgaagactgtgtgtgtagggaagggtaccgggcctccggacaaacatgcgaactggtgcattgccctgccctgaaacctccagaaaacggctatttcatccagaatacttgtaataaccacttcaacgctgcatgtggtgtgcggtgtcacccaggattcgatcttgtggggtcgagcatcattctttgtctgccaaatggtctgtggagtggtagtgaatcatattgtagggtgcgcacctgtccccatctgaggcagcccaagcacgggcacatctcctgttccactcgagagatgctgtacaaaactacttgcctggtcgcctgcgacgagggctacaggctggaggggagtgacaaactgacctgccagggcaactctcagtgggatgggcccgagccgagatgtgtggagagacactgctcaacattccagatgcctaaagatgttatcattagtccgcacaattgtgggaaacagccagctaagttcggcacaatttgttatgttagctgccgacagggatttatcctgagcggtgtcaaggagatgttacgatgtactaccagcggcaagtggaatgtgggcgtccaggccgccgtctgtaaagacgtggaggccccacagattaattgcccaaaagatattgaggcaaagaccttggagcagcaggattccgccaatgtgacttggcagatcccgaccgccaaagataactctggagagaaggtgagcgttcacgtgcatccagcctttacgcctccctatctgttccccattggagatgtggcaatcgtatacacggcaacagaccttagcggaaatcaagcttcatgtattttccatataaaggttatcgatgctgagccaccagtcatcgattggtgccggagccctcccccggtccaggtgagcgaaaaagtacatgctgcctcatgggacgagccacagttttcggataactccggagcagaattggtgattacaagaagccacacacaaggagacctctttccccaaggagaaaccatcgtgcagtatactgcaaccgacccaagcggcaataacagaacgtgcgatatccacatagtcatcaagggaagcccatgtgagatacccttcactcccgtaaatggagatttcatatgtacgcctgacaataccggggtgaactgtacattaacttgccttgagggttatgacttcaccgaaggttcaactgataagtattactgtgcctatgaagacggggtctggaaacccacttatacaacggagtggcctgattgcgccaaaaaacgcttcgccaaccacggcttcaagagttttgagatgttttacaaggccgcaaggtgtgatgatacggacctgatgaagaaattctcagaagccttcgagaccaccctgggaaagatggtcccaagcttctgcagtgacgctgaagacatcgactgtcgactggaagaaaatttgaccaaaaaatactgtttggagtataattacgattacgaaaacggctttgctatcgggaactag

SEQ ID NO: 245876 - DNA, 1548 bp, Artificial Sequence
  derived and/or modified sequence
ctggagaaccagctggtgctgaaggagctgaccaccgaggtgggcgtcgtgactttcagctgtaaagagggccacgtgctacagggaccgagtgtcctgaagtgccttccgtctcagcagtggaatgattcttttcctgtttgcaagattgtcctttgcacccctccccccctgatcagcttcggagtgcctattccttcttcagctctgcacttcggaagtaccgtcaagtacagttgcgtgggcgggttttttctaagaggcaacagcacgactctctgccagcccgacggcacttggtctagcccactgccagaatgcgttcccgtggagtgtccgcagcctgaggaaatcccaaacggcataatcgatgtgcagggcctcgcgtatctcagtacagcattgtatacatgcaaacccgggtttgaattggttggcaacacaacaaccttatgcggcgagaatggccactggctgggggggaagcctacatgcaaagcgatcgaatgcttgaagcccaaagagatacttaacggcaagttttcctacactgatcttcactacggtcagacagttacgtacagttgtaacaggggcttcagactggagggtccatcagccttaacctgcctcgaaaccggcgactgggacgttgatgctccctcctgcaacgcgattcactgtgactcgccccagccaattgaaaatggattcgtcgaaggcgccgactactcttatggcgcaatcattatttatagctgttttcccggatttcaggtggctggccacgcaatgcagacttgcgaggagtccgggtggtctagcagtattccaacctgtatgcccatagactgtggattgcctccccacatcgactttggggactgtacaaagctgaaagatgatcagggctactttgagcaagaagacgacatgatggaagttccctacgtgacgccgcatcccccatatcacttgggcgctgtagccaaaacatgggagaacacaaaagaatcgcctgcgacccatagttcaaactttctttatggcaccatggtgtcctacacttgcaatcccggttatgaactgcttggaaatccagtcttaatctgccaagaagacggcacttggaacggatctgctcctagctgtatctccattgaatgcgatctgccgaccgctcctgagaacggctttttgcgcttcactgagacaagtatgggaagcgccgtgcagtatagctgtaaaccaggtcacattttggccggctccgatttgcgactatgcttagaaaatcgtaagtggagcggcgcgagccctagatgtgaggctatctcgtgcaagaagccaaatccagtcatgaatggttcaatcaagggctccaattatacatatctgagcacattatattacgaatgtgaccccgggtacgtgctgaatggcaccgagcggcgaacctgtcaggatgacaaaacagggatgcgcatgtcgccctttgctttcctctggactgcagtccatccccagtcccaacctatggccaggtag

SEQ ID NO: 245877 - DNA, 10647 bp, Artificial Sequence
  derived and/or modified sequence
atgagccccagccggaacttcagcttccggctgttccccgagaccgcccccggcgccccaggctcgatacctgccccgcctgctcccggtgacgaagctgccgggagtcgtgtggaacggctggggcaggcctttcgccgacgcgtgcgactgctgcgggaattgtctgaacgcctagagctagtgttcctggtggatgacagttctagcgtaggagaagtaaattttcgatccgaacttatgttcgtccgcaaactattatccgactttcctgtggtacccacagcaaccagagttgccattgtgacgttctcaagtaagaactatgtcgtgcctcgtgttgactatattagtacacgacgcgctcgtcagcataaatgtgcactgctactgcaggagattcctgccatctcctacagaggaggcgggacatacacgaaaggggcgttccagcaggcggcacagatcctactgcatgcacgggagaactccaccaaggttgttttcctgataaccgatgggtattctaacggaggagaccctcgacctatagcagcctctctcagagactcaggggtggagattttcacctttggtatctggcagggcaatatcagggagttgaatgatatggcgtcaacgcctaaggaggaacactgttacctgctgcatagttttgaagagtttgaagctctggcaagacgggcattgcatgaggatctgcctagtggaagctttatccaggatgacatggtgcactgtagctacctttgcgacgaaggtaaagattgctgcgaccgtatgggctcatgtaagtgtggtacccacacgggtcacttcgaatgcatttgtgaaaagggctattacggcaagggccttcaatatgaatgcaccgcctgccccagtggcacctataaaccggaagggagccccggcggcatatcaagttgcatcccttgtcccgacgagaaccatacctctcctccaggctccacttcgccagaggattgcgtctgccgtgaaggctatcgagcctcaggccaaacctgtgagctggttcactgtcccgcactgaagccaccagagaacggctacttcattcaaaatacttgcaacaaccattttaacgcagcttgcggagtacggtgtcatcccggtttcgatctggttggaagcagtattatcctgtgtctgcctaacggtctatggtcgggcagcgagtcatattgcagagtgcggacctgtcctcacctgcggcagcctaagcatggccatatctcatgctctacccgggaaatgttgtacaagaccacttgtttagttgcatgcgacgaaggatatcgccttgagggttccgataagctgacatgccagggtaatagccagtgggacggccctgagcctagatgtgtggaaaggcactgcagtacgttccagatgccaaaggacgttatcataagcccccacaattgtgggaagcaaccggccaagttcggaactatctgctacgtcagctgccgtcaggggttcatacttagcggtgttaaggaaatgcttcgatgtacgacctccggcaagtggaacgttggcgtacaggccgccgtgtgcaaagacgtagaggccccccaaattaactgcccaaaggatatcgaagctaagacacttgaacaacaagacagtgctaatgtgacctggcagatacccaccgccaaggataatagcggcgagaaagtaagcgtgcatgtgcatcccgcctttacacctccatatctttttcccatcggtgacgtggcgatagtctacacagccactgacctgtccggtaatcaggcatcctgtattttccacatcaaagtgatcgatgccgagcctcccgtaattgactggtgccgcagccctcctcccgtccaggtaagtgagaaggtacacgccgctagctgggacgagccacaattcagcgataacagcggggccgagctggtgattacccggtcacacacacagggtgatctctttccacagggtgaaactattgttcagtatacagccacagacccttccggcaacaacaggacatgcgatatccatatcgtgattaagggctcaccatgtgaaattccctttacccccgtaaatggggacttcatttgcaccccagataacactggagtgaactgcactctaacctgtctggaagggtatgatttcaccgaggggtccaccgataagtattactgcgcctacgaagacggcgtttggaaacctacatatactacagagtggcctgattgtgccaagaagcggttcgcgaatcacggctttaagtcttttgaaatgttttacaaagcagcccgctgtgatgacaccgacctcatgaagaaattctcggaggcttttgagaccactcttggcaaaatggtcccttcattttgcagcgacgctgaggacatcgattgccgcctggaagaaaaccttactaagaaatactgcctggagtataattacgattatgagaacgggtttgcaataggcccaggggggtggggcgcagcaaatcggctggattacagctatgatgacttcctggatacggtccaagaaactgctacatcaattggtaacgctaagagctcgcgcatcaagaggtccgcccctctgagcgactacaagatcaaattaatatttaatattaccgcctccgttcctctgcccgacgaacggaatgacacccttgagtgggaaaaccagcagcggctgttgcagactctcgagaccatcacaaataaactcaaacgcaccttgaataaggacccgatgtacagcttccaactggcctctgagatcctgattgccgatagcaatagcctggagaccaagaaggctagtccattttgtagaccgggaagtgtcctccgaggaaggatgtgcgtgaattgtccactgggtacatattacaacctggagcactttacttgtgaatcttgcagaattggcagctatcaagacgaggaaggacaactcgagtgcaagctgtgcccctccgggatgtatactgaatacatccattctagaaacattagcgattgtaaggcacagtgtaagcagggcacctactcatatagcgggttagagacctgtgagtcatgccctcttggaacctaccagccgaaattcgggagcaggtcttgtctgtcatgtcccgaaaatacctcaactgtcaagcgcggggccgtcaacataagtgcttgcggtgttccttgcccggaaggaaaatttagtagatcaggactcatgccttgtcacccctgtcctagagactactatcagccgaatgccgggaaggcattttgtctggcctgtccattctatggcaccacaccttttgcagggagccgcagcattacagaatgctcgagcttcagcagtacgttttctgccgccgaagagagtgtcgttcctcccgcttctctggggcacattaaaaaacgccatgagattagctcccaagtattccatgagtgcttctttaacccctgtcataacagtggcacttgtcagcagctcgggaggggttacgtgtgtctctgtccgctcggatatacaggcctgaagtgcgagaccgatattgacgagtgcagtccattgccatgcctgaacaacggggtttgtaaggacctcgtaggcgagtttatttgcgaatgcccgtccggctataccgggcagaggtgtgaggaaaatattaatgaatgctcctctagcccatgtctgaacaaaggcatctgtgtcgatggtgtggctggctaccggtgtacctgtgtgaaaggcttcgtaggattacactgcgagacagaggtcaacgagtgccagagtaatccgtgtctgaataacgctgtttgtgaagatcaggtcggaggcttcctgtgcaaatgcccccctggattcctgggtacacggtgcgggaaaaatgtggacgaatgcttgtcgcagccctgcaagaatggagcgacttgcaaagatggtgctaattccttcagatgcctgtgtgccgccggattcaccggaagccattgtgaactgaatattaacgagtgtcaaagcaacccgtgccgcaaccaggccacttgtgttgacgagctgaatagctactcctgcaagtgccagccgggattcagtggaaagcgatgtgaaaccgagcagtcaaccgggtttaatcttgactttgaggtaagcggcatttatggatacgtgatgcttgatgggatgctgcctagcctccacgccctgacttgcacattctggatgaagtccagtgacgacatgaactacggtacacccatctcttacgccgttgataatggttctgataataccttgctgctcacagattacaatggctgggtgctttatgtcaacggacgcgaaaaaatcactaactgccctagtgttaatgatggacgatggcatcatatcgcaattacctggacatccgctaacggcatatggaaggtttatatagatggaaaacttagcgatggaggcgctggactgtccgtgggcctgccaattccaggcggcggcgctctggtgctcggccaagaacaggacaagaaaggagaaggcttttcacctgctgagtcattcgtgggctcaatatcccagctgaatctttgggactacgtgctcagtccccagcaggtgaagtctctggctacatcctgtcccgaagagctctcgaagggtaacgttttggcctggcctgatttcctgagcggtatagtaggaaaggtgaagatcgattctaaaagtattttttgtagtgactgtccgaggctgggtgggagtgtcccacacctaaggactgctagcgaagacctcaagccaggttctaaggtgaatctcttttgcgaccccggattccagctggttgggaaccccgtgcagtactgcctcaatcaaggacagtggacacagcctctgccacactgcgaaagaatcagttgcggcgtgccacctcctcttgagaatggatttcactctgccgacgacttctatgctggatctaccgttacctatcaatgcaataacggttactatctgctgggtgatagccgcatgttttgcaccgataatggctcatggaatggggtgagtccaagttgcctcgatgtcgacgagtgcgctgtgggatctgattgttcggaacacgcatcgtgtctgaacgtcgacgggagctacatctgttcctgcgttcctccgtacaccggtgacggcaagaactgcgccgaaccaattaaatgtaaggcaccaggtaatcctgagaacggtcactccagtggggaaatctatactgtgggggccgaggtgactttctcgtgtcaagagggatatcagctcatgggtgtcaccaagatcacttgtctcgagtccggggaatggaatcatctgatcccttattgcaaggcggtaagctgcggcaagccagccatcccagagaatggctgcatcgaggagctggcattcacattcggctctaaagtaacgtatcggtgcaacaagggttatacactcgcaggtgataaagagtcttcttgcctggccaattcctcctggagtcactcaccccctgtctgtgaacctgttaagtgcagttccccagagaacatcaacaacgggaagtacatcttgagcggtctcacttatctatctactgccagttactcgtgtgatacgggatactcacttcagggacctagcatcatcgaatgcactgctagcgggatctgggatagggcacctcctgcatgccacttggtgttttgtggtgaacctcccgctatcaaggatgcagttattaccgggaataatttcactttcaggaatactgtgacatatacctgtaaagaagggtacactttggcaggtttagacacaattgagtgtttagccgatgggaaatggagcagaagcgaccagcaatgtctggcagtgtcctgcgacgagccacctattgtcgatcatgcatcacccgaaaccgcccatcggctgttcggcgatatagctttctactactgttccgacgggtactccctggccgataattctcaactcttgtgcaacgcccagggcaagtgggtcccccccgaaggccaggacatgccacgctgcatcgctcacttttgcgagaagcctccatctgtgagctactcaatcctggaatcggtgtctaaagcaaagtttgctgccgggagcgttgtgtcctttaagtgcatggaaggcttcgtgctgaacacatcagctaagattgagtgcatgagaggcggacagtggaaccccagtcccatgagtatccagtgcattccagttcggtgcggtgaacctccaagcatcatgaatggttatgcctctggctctaattattcatttggagccatggtggcctattcttgtaataaggggttctatattaagggagagaagaaatccacatgtgaggccactgggcagtggtcctcgccaattcctacatgccaccccgtatcctgcggggagccccctaaggtcgaaaacggcttcctggagcacactactgggcgaatttttgagagtgaggtccgttatcaatgtaaccccggttataaatccgttgggtcgcccgtgttcgtttgccaggcaaacaggcactggcattctgagtcaccgctgatgtgcgttccactggattgtgggaaacccccacctatccaaaacggttttatgaaaggtgagaattttgaggtgggttccaaggtgcagttcttctgtaacgagggttatgagctggtcggagacagttcgtggacctgtcagaaatccggtaaatggaacaagaaatcgaaccctaagtgtatgccagccaagtgtcctgagccacctctgctggaaaaccaactcgttctgaaggagctgacaacagaggtaggagtggtgaccttttcgtgcaaggaggggcacgtgctgcaggggcccagcgtactcaaatgcctcccttctcagcagtggaatgactcattcccagtgtgcaaaatcgtcctgtgcacacctcccccgttgattagttttggcgttcctatcccgtccagcgcactacattttggttccaccgtaaagtactcctgtgtcgggggcttcttcctgcgtggaaactcaacgaccctctgtcaacctgacggtacctggtcctcacctctccccgaatgcgtgccagttgaatgcccccagcccgaggagattcccaatggaattatcgacgtacaggggttagcctacttatcgaccgcattgtacacctgtaaacctggtttcgaactggtgggaaatactacgaccttgtgtggggagaatgggcactggttgggaggtaagcccacttgtaaggcaattgaatgcctgaaaccaaaagaaatcctgaacgggaagttctcctacacggacttgcattacggccagactgtgacttactcgtgtaatcgcgggtttcgccttgaagggccctctgcactgacttgccttgagactggggactgggatgttgacgccccatcctgtaatgccatccactgtgattccccccagcccatcgagaacgggttcgtcgagggcgcagattactcttacggcgccatcatcatctactcttgttttcctggatttcaggtcgctggccacgccatgcagacttgcgaggaatccgggtggtcaagcagcattcccacgtgtatgccgatcgattgtggattaccgccgcacatcgatttcggggactgcactaagcttaaagatgaccagggctactttgaacaggaggatgatatgatggaagttccttacgtgactcctcatccaccataccacttaggcgccgtggctaagacttgggagaatacaaaggagagccctgctacccattcatccaacttcctttatggtacaatggtgtcttacacgtgtaatcccggatatgaattattgggtaatcctgtgctgatttgtcaagaagacggaacttggaatgggtctgctccaagctgcatcagcatcgagtgtgacttgcccaccgctcctgagaacggtttcttgcgatttactgagacttcaatgggttccgcggtacagtatagctgtaaacctggacacatcctggccggaagcgacctccggctctgtctggaaaatcggaagtggagcggagctagtcccagatgtgaggccatctcctgtaagaagccgaaccctgtgatgaacggctcaattaaagggtccaactacacttatcttagcacgttgtactatgaatgcgatccggggtatgtcctaaatggcactgagcggcggacctgtcaggacgacaagaattgggacgaggacgagcctatctgcatcccagttgattgtagctccccacctgtgagcgccaatgggcaagtcaggggcgacgagtatactttccaaaaggaaatagaatacacatgcaatgaggggttcttgcttgaaggagctagaagcagagtctgcctggccaacggtagttggagcggggctacaccggactgcgtacccgttaggtgcgccacgccaccgcagctcgccaatggcgtgacagaaggactggactacggctttatgaaagaagtgactttccattgtcatgagggatacatactgcacggagcgcctaagctgacatgtcagtccgacggaaattgggacgctgaaatccccctttgtaagccagttaattgtggcccccctgaggatctcgcacatggatttcctaacggcttcagttttatccatggtgggcacatccagtatcaatgtttcccagggtataagctccatggtaattcaagtcggagatgcttaagcaacggcagctggagcggcagtagcccctcgtgtttgccctgtaggtgttcgacccctgtaatcgaatacgggactgttaacggaactgatttcgactgtggcaaggccgcgcgtatacagtgcttcaaagggtttaagttactcggcctgtccgagatcacctgcgaggctgatgggcagtggtcatccggattcccgcactgcgagcacactagctgcggttctctgcctatgatcccgaacgcattcatatccgagacatcatcttggaaagaaaatgtcatcacatatagctgtcgctctgggtacgtgattcaaggaagtagcgacctcatctgtaccgaaaaaggagtgtggagccaaccatatcctgtgtgtgagcctttaagttgtggctcacctccaagcgtggccaatgctgttgcgaccggagaagcccacacatatgagtccgaggtaaagctccgatgtctggagggctacaccatggatactgacacagatacctttacctgccagaaggacggccgttggttccctgagagaatctcgtgcagtccaaaaaaatgcccgctcccagagaatatcacccatattttggtgcacggtgacgatttctctgtaaacaggcaggtgtcagtttcttgtgcggaggggtacacatttgagggcgttaacataagcgtctgccagctagatggaacatgggagccacctttttccgacgagtcatgttcccccgtctcttgtggcaaacctgagagtcctgagcacggcttcgtggtgggcagcaaatacaccttcgagtcaacgattatttatcagtgcgaacccgggtatgagttagagggcaaccgcgagcgtgtgtgccaggagaatagacagtggagcgggggggtcgccatatgtaaagaaactcgatgcgagacccccctggagttcttgaacgggaaagctgatatcgagaaccgcacaacgggccctaatgttgtatattcttgcaatagaggatatagtcttgaggggccctccgaagctcattgtactgagaatggcacttggtcccacccagtaccattgtgcaagcccaatccatgccccgttcccttcgttattcctgagaatgctctgctatcagaaaaagaattctacgtggaccagaatgtgagtattaaatgcagggaggggtttcttctccaaggacacggtattatcacatgtaatcccgatgagacgtggacacagacttcagccaagtgtgagaaaattagctgcggccccccagcccacgtggagaacgccattgcacgtggcgttcattaccagtacggtgacatgattacctacagctgttactcggggtatatgctggagggatttctgaggagcgtctgcctggaaaatgggacctggacttcccctcccatatgcagggccgtgtgcaggttcccatgtcaaaatggcgggatctgtcagcggccgaacgcttgtagttgtcctgaaggatggatgggtcgactctgtgaggagcccatttgtattctgccctgcctcaatggtgggaggtgcgttgcaccttatcagtgcgattgcccccctggctggacaggcagccggtgccacacagctgtttgtcagtccccatgtctgaacggcggcaaatgcgtaaggccaaatagatgtcactgcttatcttcgtggaccggccacaattgttcccgtaagcgcagaacaggcttttag

SEQ ID NO: 245878 - DNA, 10716 bp, Artificial Sequence
  derived and/or modified sequence
atgtggccccggctggccttctgctgctggggcctggccctggtgtccggttgggctacttttcagcagatgtctccaagtagaaattttagtttccggcttttccccgaaaccgccccaggggcccccggcagcattcccgcgcccccagctccaggggatgaggccgccggatctagggtagagcggctcggacaggccttcaggcggcgggtgagactcctgcgcgaactcagcgagagactggagcttgtgttcctggttgatgactcttccagcgtgggggaagtgaatttcaggtcagagctcatgtttgtaaggaagctattgagtgattttcctgtggtacctaccgcaaccagggtggccatcgtgacattcagcagcaagaactacgtcgttcccagagtggattacatcagcaccagaagggctcgccaacataaatgtgcgctgctgctgcaggaaatccccgccatttcatacaggggcgggggcacatacaccaagggagcgtttcaacaggccgcccagattctgctccacgctagagaaaatagcaccaaggtagtgttcttaatcacagacggatattcaaacggtggtgacccacgtccaatcgcagcaagcctccgggactcgggagtcgagattttcacttttggcatctggcaaggtaatatcagggagttaaatgacatggcctccacacctaaggaggagcactgttatctcctccactcgttcgaggagttcgaggcattagccaggcgggcactgcatgaggatcttcccagcgggtcattcatacaagatgatatggtgcattgtagctatctgtgcgatgaagggaaggattgctgtgacagaatgggcagctgtaaatgtggcactcacactgggcatttcgagtgtatctgtgaaaaagggtattacggcaagggattgcagtatgaatgcaccgcatgtccgagtgggacatacaagcccgagggatctccagggggtattagcagttgtatcccgtgcccagacgagaaccacactagccctccagggtcaacttccccggaggactgcgtttgcagggagggttatagagcctctgggcagacttgcgagctggtccattgccccgcgctcaaaccccctgaaaacggatactttatccagaatacctgcaataaccacttcaacgccgcctgtggcgtgcgctgccaccctgggtttgatctagtcgggtcatctatcattttatgtctgcccaatggcctatggagtggctctgagagctactgccgagtaagaacatgtcctcacctgcgtcaaccaaagcacggtcacatcagttgctcgacccgcgagatgctgtataaaaccacctgcttagtagcctgtgatgagggctaccgactggagggaagtgataaactaacttgtcagggcaactcacagtgggatggcccagagccccgctgtgtggagcggcactgctccacattccaaatgcctaaagacgtgatcatatcccctcataattgcggaaaacaacccgctaaatttggaacaatctgctacgtttcatgcagacagggatttatcctgagtggtgtcaaagaaatgctgaggtgcaccacttccgggaagtggaatgtgggagtgcaggccgcagtgtgtaaggatgttgaagctcctcagataaactgccccaaagacattgaagccaagacactagagcagcaggatagcgcgaacgtgacctggcagataccaaccgctaaggataactccggagagaaagtatccgtgcacgttcacccagccttcacacctccctatttattccccattggcgatgtggctattgtttacactgccacggacctgagcggaaaccaggcctcatgtatctttcatattaaggtgatcgatgccgagccaccagtaatagattggtgccgttcgccacccccagtgcaggtgagcgaaaaggtacatgccgcctcctgggatgagccgcaattttctgacaatagcggcgccgagctcgtaattacacgttcccacacacagggggatttattcccgcagggcgagaccattgttcagtacactgccactgaccctagcggcaataacagaacatgcgacattcatatcgtgatcaaaggaagcccgtgcgagatccccttcacacccgttaacggcgacttcatctgtacaccagataacaccggagtaaactgtactctgacttgcctggaaggctatgacttcacagaaggctctacggacaagtattattgcgcatacgaggatggcgtgtggaagcccacgtacactacagaatggccagactgtgccaagaaacggttcgccaaccacggctttaaatcttttgagatgttctataaagccgcaaggtgtgacgacactgacctcatgaagaagttctcagaggcgtttgaaacaacactcggcaagatggtgccatcattctgctccgatgccgaagatatcgattgcaggctggaggagaatttgaccaaaaaatactgtttggagtataattatgactatgaaaacgggttcgctattgggccgggtggctggggcgccgccaaccgcctggactatagctatgacgatttcttagacaccgttcaggagactgcaacatcaattggaaatgccaaaagctctcgcattaagaggagtgcaccactttccgactacaagatcaaattgatttttaacatcacggcgtccgtccccctgcctgacgagcggaacgacaccctagagtgggaaaatcagcagagactcctgcagacattggagactatcaccaataagttgaagcgaacactgaataaagacccaatgtactctttccagctggcatcagaaattctcatcgcagatagtaatagtctggaaacgaagaaggcttcaccattttgccggccaggttccgtactgagagggcggatgtgcgtgaattgtccactaggaacttactacaatctcgagcacttcacatgtgaatcctgcaggattgggagctaccaggatgaagagggccagttagagtgtaagctgtgcccttccggcatgtatacagagtacatccactccagaaacatcagtgattgcaaggcgcagtgcaagcagggcacttacagttacagtgggctagaaacttgcgaaagctgtcccctcgggacctatcagcctaagtttggctcgcgttcttgtctgagttgccccgagaacacctcgactgtaaaaagaggagccgttaatatctcagcttgcggtgtgccatgtcccgagggtaagttcagtaggtcaggtctcatgccttgtcacccttgccctcgggattattaccagccaaacgcaggaaaggctttctgcctagcctgccctttttatggcaccaccccattcgctgggtcaagatcaatcacggagtgtagcagcttcagctctactttttctgccgccgaggagtcagtggtgcctccggccagtctcggccacatcaaaaaacgccacgagataagttcccaggtcttccacgaatgcttcttcaatccttgccacaattccggcacatgtcaacagctggggcgcggctatgtctgtttatgcccactggggtacacgggactaaagtgtgaaaccgatatcgacgagtgttcaccactaccctgtcttaataacggcgtatgcaaagatttggtgggtgaattcatttgcgagtgtcctagcgggtacaccggccagcgctgcgaggagaacattaacgagtgttcctcttcaccgtgccttaataaaggtatctgtgttgacggagtggccggataccgctgcacttgcgtaaaaggattcgtgggcctgcactgcgaaaccgaggtgaatgaatgccagtctaatccatgcctgaacaatgccgtgtgcgaggaccaggtgggtggattcctttgtaagtgcccccctgggttcctaggcacacgctgcggtaaaaacgtggatgagtgcctttcacagccctgtaagaatggggccacctgcaaagacggagcaaacagctttaggtgcctctgcgcggctggcttcaccggttcacactgcgagctcaacattaatgaatgccaatcaaatccctgcaggaatcaggccacctgtgtcgatgagttaaatagctattcttgtaaatgtcagcccgggttttccggaaagcggtgcgagacagaacagtccacgggtttcaatctggacttcgaggtgtctggcatctacggatatgtgatgctggatggtatgctgccatctctccacgcgctgacttgcacattctggatgaaaagcagtgacgacatgaactacgggacccctattagctacgccgttgataacgggtctgacaataccctcttgttaaccgattacaacggatgggtcttgtacgtgaacggcagggagaaaatcactaactgccctagtgtgaatgacgggcggtggcaccatatcgcaatcacatggactagcgccaacgggatttggaaggtctatattgacggaaaattgtctgacggtggcgctggcctgtccgtgggcttgcccatcccaggcggcggagctctcgttctgggtcaggaacaggataaaaagggagagggctttagtcctgccgagtccttcgtgggctcaattagtcagttgaacctgtgggattacgtgctgtcccctcagcaggtcaaatcactggccacctcctgtcctgaagaactgtccaaaggcaacgtactggcctggccagatttcctgtcgggcatcgttggaaaggtcaagatcgatagcaagagcatcttttgcagcgactgccctcggctcggcgggtctgtgccccacctgcgaactgcatctgaggatctaaagccaggtagtaaggtaaatctgttttgtgaccccggattccagctggtggggaacccagtccagtactgcctcaatcaagggcaatggacacagccgctgccgcactgcgagcggatctcctgtggcgtgcccccccctcttgaaaatgggttccactccgcggatgatttctacgctggctctacagtgacgtatcagtgcaacaatggatactatctgctcggagatagtaggatgttctgtaccgacaatggttcttggaatggagtctctccttcgtgtctcgacgttgacgagtgtgccgtggggtccgattgtagcgaacatgcatcctgtctgaacgtcgatggcagttacatttgcagttgcgttccgccttataccggagacgggaaaaattgcgccgagccaattaagtgcaaggcacccgggaaccccgagaatgggcactccagtggcgaaatatacaccgtgggagcggaggtgacattctcttgtcaggagggataccaactgatgggcgtgaccaaaattacatgtctcgaatccggagaatggaatcacctgataccttactgcaaggccgtgtcatgcggcaaacccgctattccggaaaacggttgcattgaggaactggcctttacattcgggagcaaagtgacatacaggtgtaacaaagggtatacattggccggcgataaagagagctcctgcctggcaaactcctcctggagtcattcgccacccgtttgtgagcccgtgaaatgctcctctccagaaaatataaataacgggaagtatattttgagtgggctgacgtacctgagtactgcctcttacagctgcgatacgggatattccctgcagggcccgtcaatcatagaatgtacggcttccggcatttgggatagggctccaccggcctgccacctggttttctgtggcgaaccccccgcaattaaggacgcagtgattacaggaaacaatttcacctttagaaataccgtcacctacacctgtaaagaaggttacactctggctgggctggacaccattgagtgtctggccgacggtaagtggagtcgctctgatcagcagtgtctggcggtgtcttgcgacgagccccccatagtggaccacgcatcaccggaaactgcccacaggctgttcggggatattgcattttactattgttcagacggatactccttagccgataattctcaactgctgtgcaatgcacagggcaaatgggtccctcctgagggacaggatatgcctaggtgcatagcccatttctgtgagaagcctccaagcgtgagctacagcattctggagtcagtctcaaaagccaagtttgccgccggctctgttgtgtcttttaaatgtatggaggggtttgtgctgaacacttccgctaagatagagtgcatgcgcgggggacaatggaaccccagccctatgtcaatccaatgcattccagtccgctgcggagagcccccctctataatgaacggatatgcatcaggaagcaactatagctttggcgctatggtcgcatactcatgcaacaagggcttttatataaagggggaaaagaaatccacgtgtgaagccacaggccagtggagttcgccaatccctacctgtcacccagtgtcctgtggggagccacccaaggtagaaaacggcttcttagagcacacaacaggcaggattttcgaatctgaggtgaggtatcagtgtaatcctggttacaagagtgtcgggtcccctgtatttgtgtgccaggctaataggcactggcattccgagtcacccctaatgtgtgtgccgctggactgcgggaaaccgccacccatacagaacggatttatgaagggggagaacttcgaggtgggaagcaaggtgcagttcttctgcaatgaggggtatgagctggtgggcgattcctcctggacctgtcagaagtctggaaaatggaacaaaaaaagcaatccgaagtgtatgcctgccaaatgtccggagccccctttgctggagaaccagttagtccttaaagagttaaccactgaggttggtgtggttacattttcgtgtaaggaagggcacgtgctgcagggaccaagtgtgctgaaatgtttgcctagccagcagtggaatgacagtttccccgtatgcaaaattgtgctgtgcacacctcctcctctgatatcctttggagttcctatcccatcttcagcgctgcactttggcagtaccgtcaagtactcttgcgtgggggggttttttcttcgcggaaattccacaactttgtgtcaacccgacggtacctggagcagtccactccccgagtgcgtgcccgttgagtgcccccagccagaggaaatccctaatggcattattgatgtgcagggactcgcgtacctctccaccgctctctacacctgcaaacccggttttgagctggtggggaataccacaacgctgtgcggggaaaacggtcactggctcgggggtaaaccaacatgcaaggcaatagagtgcctcaagccaaaggaaattttgaatgggaagttctcttataccgacttgcattacggccaaactgtgacttacagttgtaaccggggcttccggctcgaggggccatccgctctgacctgcctggaaaccggggattgggacgtggatgcgccgtcatgcaacgccattcattgtgattccccacagcctatcgaaaatggatttgtcgaaggggcagattactcctacggtgccatcataatctatagctgttttccaggctttcaggttgcgggccatgctatgcagacctgcgaagaatctggctggtcctcatcgatcccgacttgcatgcctatcgattgtggcctgcctcctcacatcgactttggcgactgtacaaagcttaaagatgatcagggatatttcgagcaggaggacgacatgatggaggttccctatgtgacacctcatccaccataccaccttggagcggtggccaaaacgtgggagaataccaaggaatccccggccacccacagctctaattttctctatggaacaatggtcagctacacatgcaacccgggatacgaactcctgggtaaccccgtcctcatatgtcaggaggatggaacctggaatgggtctgcacctagttgcatcagcatcgaatgcgacctgccaacagcccccgagaacgggttcctgcggtttactgagacttcaatgggatcagccgtgcagtactcatgtaaacccggacacatcttggcaggaagcgatcttcgactgtgcctggagaataggaagtggagcggggcttcaccaagatgcgaggccattagctgcaagaagcctaatccagtgatgaatggatccatcaaggggtcgaattacacctaccttagcacgttgtactacgagtgcgacccagggtatgtgttgaacggtacagagcgccggacctgtcaggatgacaaaaactgggatgaggacgagcccatctgtatcccagtggactgttcctccccaccagtgagtgcaaatgggcaggtgaggggggacgaatacactttccagaaggagatagagtacacttgcaatgagggatttctcctggagggagctcggtcccgtgtctgtctagctaatggctcctggtccggggcaactcctgactgtgtcccggtgagatgtgctacgcccccacagctcgctaacggcgtgactgagggtctggattacgggttcatgaaggaggtgactttccattgccacgagggctacatcctgcacggcgcccctaagttaacctgccagtccgatgggaactgggacgctgagattcctttgtgcaagcctgtcaattgcggcccacccgaagatctggcccatgggttccccaatggattctcatttatccatgggggccacattcagtatcagtgtttcccaggttataagcttcacgggaatagttcgcgtcggtgcctgagcaacggctcatggtccggaagtagcccctcctgcctgccttgtcggtgcagtacccccgttattgagtatggtaccgtaaatggaactgactttgactgtgggaaagctgcaagaatccagtgcttcaagggattcaagcttctgggtctatcagaaataacctgcgaagctgacggccagtggtcctctgggtttccgcattgtgaacacacatcatgcggtagtttaccaatgattccaaatgcatttatttctgaaacctcaagctggaaagaaaacgtaatcacgtattcttgccggtcaggctatgtgattcaggggagcagcgatctgatatgcactgagaagggcgtgtggtcgcaaccgtatcctgtttgtgaacccctgtcctgtggcagccctcctagtgtcgccaacgccgtggcaaccggtgaggcccacacctatgaatcagaagtcaaacttcgctgcttagaaggctatactatggacaccgataccgataccttcacctgccagaaagacggccggtggtttcccgaaaggattagctgcagccctaagaagtgtcccctgcctgagaatattacccacattctggtacacggcgacgatttttctgtgaatcggcaggtgagcgtctcatgtgcagaggggtatacgttcgagggagtaaacattagcgtgtgtcaattagacggcacctgggaacctcccttctctgacgagagttgctccccagtaagttgtggcaagcccgagagccccgagcacggattcgttgtgggatctaagtacacatttgagagcactatcatttatcagtgcgaaccaggttatgagctggaaggcaaccgcgagcgggtatgtcaggagaataggcagtggtctgggggggtggcgatttgcaaagaaacgcgatgcgagactccactggaatttctaaacggtaaagctgatatcgagaaccgaacaactggacctaatgtagtgtacagttgcaacagaggatacagcctcgagggtccttccgaggcgcattgcaccgagaatggcacctggtcacacccagtgcccctgtgcaagcccaacccatgccccgttccatttgtgattcccgagaatgcactgttgagcgaaaaggaattctacgtagatcaaaacgttagtattaaatgccgggaggggtttctcctccaaggccacgggataattacctgtaatccagacgagacctggacccagacatcggcaaagtgcgagaaaatttcatgcgggccccccgcccatgtggaaaacgcaatcgcgcgcggcgttcactaccagtatggggacatgatcacctattcttgctattcgggttacatgttggaagggtttctgcggtcagtatgtctcgagaatggaacatggacgtccccacctatttgtcgagccgtgtgtcgcttcccatgccagaatggcggtatttgtcagcgccccaatgcctgctcatgtcctgagggctggatgggtcgcttatgcgaggagccaatctgtatcttgccatgtctgaatggcggcagatgcgtggccccttatcaatgcgattgcccccccggttggactggctcgcgctgtcacacagccgtatgtcagtccccctgtctaaatggaggcaagtgcgtgagacctaaccgctgccactgcctgtcatcatggactgggcataactgcagccgtaagcggagaaccggcttttag

SEQ ID NO: 245879 - DNA, 4494 bp, Artificial Sequence
  derived and/or modified sequence
atgccccgttgcatagcgcacttttgcgagaaaccaccttcggtgtcttactcaattcttgagtcagtgagcaaagctaagtttgccgcaggcagcgtagtaagcttcaaatgtatggaggggtttgtactcaacacaagcgccaagattgaatgcatgaggggcggacagtggaaccctagtccaatgtcaatccagtgcattccagtacggtgtggggaaccaccgtccatcatgaacggatatgccagtgggagcaactacagcttcggagccatggtcgcctacagttgtaataagggcttttatataaaaggggagaagaaaagcacctgtgaggcaacaggacagtggtcatctcctattcccacttgtcacccagtttcatgtggggaacccccaaaagtcgagaacgggtttctggagcacacaaccgggagaatctttgaatctgaggtaaggtaccagtgcaatcccggttacaaaagcgtggggagccctgtgttcgtctgccaagccaaccgccattggcacagcgagagtcccctgatgtgcgtgccacttgattgcggaaagcccccacccatccaaaacggttttatgaaaggggagaacttcgaagtgggatccaaggtgcagttcttctgcaacgaggggtatgaattggtgggagactcttcctggacatgtcaaaaatctggcaaatggaacaaaaaaagtaatccaaagtgcatgcctgccaagtgcccggagccaccgctactcgagaaccagcttgtcctaaaggaactcactactgaggtgggcgtcgttactttttcatgcaaggaggggcacgtgctgcaaggcccatccgtcctaaaatgtttgccctctcagcagtggaatgactccttccctgtgtgcaagatcgtgctctgtactcccccaccactgatctctttcggagtgcctattccctcgtctgctctgcatttcgggagcaccgtgaaatactcctgcgtcggcggttttttcctgcggggaaatagtacaactctttgccagcccgatgggacatggtcgagtccattgccggagtgtgttccggtcgagtgcccacagcccgaagaaatccctaacggcatcatcgatgtgcagggtctggcctatctgtccacagcactatacacctgtaaacccggattcgagcttgtgggaaacaccaccacattgtgcggggaaaatggacattggttggggggaaaaccaacctgcaaggctattgaatgcctcaaaccaaaagaaattctaaacggcaaatttagttacacagacttacattacgggcagaccgttacgtactcctgcaatagaggcttccgtctggaagggccttctgctctcacctgcctggagaccggcgactgggacgttgatgctccctcttgtaatgcgatccattgcgatagccctcaacccatcgaaaacggattcgtggagggagctgattacagttatggagcaatcatcatttattcctgtttcccaggatttcaagtagctgggcacgcaatgcagacatgcgaggagtctggatggagcagttctatcccaacttgcatgcctatcgattgcggactgcccccacacatagactttggagattgtaccaagctaaaagacgaccaaggttacttcgaacaggaggatgatatgatggaggtgccttatgtgacaccacaccctccatatcacttgggcgctgtagccaagacttgggagaatacgaaagaaagccccgctactcattcatcgaattttttgtatggtactatggtttcatacacctgtaatcccggatacgagctcctgggtaatccagttctgatatgccaggaagacggcacatggaatggcagcgcacctagctgcatttccatcgagtgcgatctcccaacagctccagagaacggattcctgcgttttaccgagacatctatggggtctgctgtccagtactcgtgtaaacctgggcacatcctggcaggttccgatttaagactgtgtttggaaaaccgcaagtggtcgggagcttcgccgaggtgtgaggcaatttcctgcaagaagccaaatcctgtgatgaacggatccatcaaagggtcgaactacacgtatcttagtactctgtactacgaatgtgacccagggtacgttctgaacggaaccgagcgccgtacctgccaggatgacaaaaactgggatgaggatgaacctatctgtattccagttgactgtagcagtccgccagtatccgccaatgggcaagtgcggggtgacgaatatacctttcagaaggaaatagaatacacctgtaacgagggctttttactggagggcgctaggagcagggtgtgccttgcgaacggtagctggtccggggcaacaccagattgcgtccctgtcagatgcgccactcccccacaactggctaatggagtgaccgaggggctggactatgggtttatgaaggaagtgacctttcactgccacgaaggatacatcttgcatggcgctcctaagctgacttgccagtctgatggcaattgggacgccgaaatccctctgtgcaaaccagtgaactgtgggccaccagaagacttggcccatggatttccaaacggtttcagttttatccacggtggacacatccagtaccagtgcttcccagggtacaagctgcacgggaacagcagcaggcgctgcctcagtaacgggagctggtcaggaagcagtccctcctgcctcccatgtagatgcagtacgcccgtgatcgagtacggcaccgtgaacggcaccgacttcgattgtggaaaggcggctcgtatccagtgttttaaggggttcaagttgttgggcctgtctgagattacctgcgaagccgatggacaatggtcctctgggtttccccattgtgaacacacatcgtgcggaagcctgccaatgattccgaatgcctttattagcgaaacctcttcatggaaagagaacgtcatcacctatagctgcagatctggctatgtcatccaagggagttccgatctgatctgcacagagaaaggcgtatggagtcagccatatccagtctgcgagcccctttcctgtgggtccccgccaagcgtagccaatgccgtggcaaccggcgaggcgcacacatacgagtctgaggtcaagctccgctgcctggaaggctatacaatggacactgatactgacaccttcacatgtcagaaggatggacggtggttccccgaacgaatcagctgttctccaaagaagtgccctctccccgagaacataactcacatcctcgtccatggggacgattttagcgtgaatcggcaggtcagtgttagttgcgcagaggggtacacatttgagggagtgaatatttctgtctgtcagctagacgggacatgggagcctcctttttccgacgaatcctgctcccccgtatcttgcggaaagcctgagagtcccgagcacggtttcgtcgtaggatcaaagtacactttcgaatcaactatcatttatcaatgcgagccagggtacgaactagaaggtaatagggaaagagtctgccaagagaatagacagtggtcaggcggtgtcgcaatctgcaaagagaccaggtgcgagacacctctggaattcctcaatggtaaagctgacatcgagaatagaacaacaggtccaaatgtggtgtattcttgcaacaggggctactccctggagggacctagtgaggcacattgtaccgaaaatggcacatggtcacatcccgtcccactgtgcaaacccaatccatgcccagtgccgtttgttatacccgagaatgcactactcagcgagaaagaattttatgttgaccagaacgtgtctattaaatgccgggaaggcttcctgctccaaggacacgggatcattacttgcaaccccgacgagacatggacacaaactagcgctaagtgcgaaaaaatttcttgtgggccacccgcacacgtcgagaatgctatagcaaggggagtccattaccagtatggagacatgataacctactcctgttacagtggctatatgctggaaggcttccttaggagcgtctgcctggagaacggcacatggacctccccccctatctgtcgcgctgtgtgccgctttccatgtcagaacggtggtatttgtcagagacccaacgcttgttcctgccctgagggctggatgggaaggttatgtgaggaacctatttgcatcctgccttgcttgaatggtggccgatgcgtggccccttaccaatgtgactgtcctccaggatggaccgggagtagatgccataccgccgtgtgccagagcccctgtctgaacgggggaaaatgtgtccgtccgaatcgatgtcactgcctgagttcatggacgggacataattgcagccgtaaacgacgtaccggcttttag

SEQ ID NO: 245880 - DNA, 4650 bp, Artificial Sequence
  derived and/or modified sequence
atgtggccgagactggctttttgctgttggggcctcgcgctagtgagcgggtgggcaactttccagcaaatgtccccatcaagaaactttagcttcagacttttccccgagactgcgccaggagccccaggcagcattccagcgccacccgcacccggagatgaggctgcgggaagtagagtagagagattgggacaggcgtttaggcgacgtgtgcgcctgctgagagagctttctgaacgattagaactcgtctttcttgtagatgattcttccagcgtcggggaggtcaatttccgcagtgaactgatgttcgtgcggaagttgctgagcgatttcccagtggtgcccaccgccactagggtagccatcgtaactttctctagtaaaaactatgttgtccctcgggtcgattacattagtacacgcagagccagacagcacaagtgtgcattgctgcttcaggaaattccggctattagttatcggggaggcggaacttatactaagggggcattccagcaagcggcacagatcctgctccatgccagggagaatagtaccaaggtcgtctttctcataaccgatggatactctaatggcggtgaccctagacccattgccgcaagcctacgggacagcggtgtagaaatttttacgtttggcatctggcagggcaacattcgcgagctcaatgacatggcgtccaccccgaaggaggagcactgctatctcctccatagctttgaggaatttgaggcattggcaaggagggcactgcatgaagatctaccaagtgggagttttattcaggacgatatggtgcattgttcctacctgtgtgatgaaggtaaagactgttgcgaccggatgggctcctgtaagtgtggaacacacacagggcactttgaatgtatctgcgagaagggatactacggcaaagggctgcagtatgagtgcacggcttgcccgagcggtacctataaacccgagggcagtccaggaggcatatcctcttgcataccctgcccggatgagaaccatactagcccacccggatccacttctccagaggattgcgtgtgcagagaaggctatcgggcttcggggcagacttgtgagttggtgcactgccctgccctgaagcctcccgagaatggatatttcatccaaaacacatgtaataatcactttaacgctgcgtgcggagtgaggtgtcacccgggttttgacctggtggggagctcgatcattttgtgcctgccaaatggcctttggtcaggcagcgagagttattgccgcgtgcgaacctgccctcacctccgccagcctaagcatggtcacatttcctgtagtacaagagagatgctctacaaaaccacatgcctggtggcgtgcgatgagggctacaggctggagggatctgataaattgacctgtcaagggaattcccagtgggacggtcccgagcccaggtgcgtggagaggcactgctcgactttccagatgcccaaggacgtcataatatcaccacacaactgtggtaagcaaccggctaagtttgggaccatatgctacgtctcctgccggcaaggctttatcctgtccggagtaaaggaaatgcttagatgcaccacttccggcaagtggaatgttggtgtgcaggcggctgtctgtaaggatgtggaagcaccccagatcaattgcccaaaagacatagaggccaagaccctcgagcagcaggacagcgctaacgtgacttggcagattccgaccgcgaaggataattctggggagaaagtcagcgtgcatgtccaccctgcgttcaccccaccctatctatttcccatcggcgacgtagctattgtgtacactgccactgacctttccgggaatcaggccagctgtatattccatatcaaggtgatcgacgccgagccacccgtgattgattggtgtaggtccccacctcccgtgcaggtcagcgaaaaggtgcacgccgctagttgggacgaacctcaattttctgacaactctggagctgagttggttattacgagatcccatactcagggtgacctcttccctcaaggagaaacgatagtgcagtataccgcaacggacccttctggcaataaccgcacatgcgacatccacatagtaattaagggatctccttgtgagattccctttacaccagttaatggagactttatatgtactccagataacaccggggtgaattgtaccctgacctgtctagagggctacgattttacggagggttccacggacaaatattactgcgcctatgaagacggggtgtggaaacctacttacacaactgagtggcccgactgcgcaaaaaaacggttcgctaaccacgggttcaagtctttcgagatgttctacaaagccgcacggtgcgacgacactgatctcatgaaaaaattctcagaagccttcgagacaactctgggcaagatggttcccagcttttgctccgacgccgaagacattgactgtcgtttggaggagaacttgactaagaaatactgcctcgaatataactatgattacgagaacggcttcgctatcggtcccggaggctggggcgctgctaaccggctcgattactcctatgatgactttctggatactgtacaggagaccgctacaagtattggcaacgccaagtcctccagaattaaacgttccgcgccattgtctgattataaaattaaactaatcttcaatataactgcttccgttcccctccctgacgaacggaatgatactcttgaatgggagaatcagcaaagacttcttcaaaccttggaaacgattacgaacaagctgaagcggaccttgaacaaagaccccatgtattcatttcagttggcttccgagattttgatagccgactcgaattcccttgagaccaagaaggccagccctttttgccggcctggcagcgtgttaagaggccgaatgtgcgtgaactgtccactgggcacctattataatctcgaacatttcacctgcgagagctgtaggattgggtcttaccaggacgaggaaggacagttggagtgtaagttgtgcccatctggtatgtacacagaatatatacattcccgcaatattagtgattgtaaagcacaatgcaagcagggcacttactcttacagtggcctggagacatgtgaatcatgccctctgggaacctaccagccaaagttcggctcgagatcatgcttatcctgccccgagaatacttccacagttaagagaggggcagttaacatctctgcgtgcggagtaccgtgtccagaaggcaagttcagccgcagtggactgatgccgtgccacccttgtcccagggactattaccagcccaatgccggaaaagctttctgtctcgcatgtcccttttacggcacaactccttttgccggatctaggtccattaccgagtgttcgtcgttctcatcaacattcagtgcggctgaagagtcagtggttcccccagctagccttggccatataaagaaacggcacgagatctcaagccgggtgttccatgaatgtttttttaacccctgtcacaacagtgggacgtgccagcagctgggcagagggtatgtttgcctgtgccctctgggatacaccgggctgaaatgtgagacggatatcgacgaatgctctcccttaccctgccttaataacggagtgtgcaaagatttggtgggagagtttatatgcgaatgcccttcgggctacacaggacagcggtgtgaagaaaacatcaacgagtgctctagctctccttgcctcaataaaggtatttgcgtagatggcgtggctggctaccgctgcacgtgtgtcaaaggattcgtgggcctccattgcgaaaccgaagtaaacgaatgtcaaagcaatccttgcctcaataacgctgtctgtgaagaccaggtgggcggtttcctgtgcaagtgcccacctggatttttggggacccggtgcggcaagaatgttgatgagtgcctgtcccagccttgtaaaaacggtgctacatgcaaggacggcgctaactcatttcgctgcctttgcgctgccggattcacaggctcccactgtgaacttaacataaacgagtgccagtccaacccatgccgcaaccaggccacctgtgtcgacgagctgaactcatactcctgcaaatgccagccagggtttagcgggaagcgctgcgaaacagagcaatccacaggattcaatctggactttgaggtgtccggtatctatgggtatgtcatgctggatggcatgctgccgtcactgcatgcgctaacatgtacattctggatgaaatcatcagatgatatgaattacggtacccccatctcctatgctgtcgacaacgggagcgataacacgttactcctgaccgactacaatggttgggttctgtacgtgaatggcagggagaaaattactaactgtccttctgttaacgacggcagatggcaccatatcgccattacgtggacttctgccaatggaatctggaaggtgtacatcgatgggaagctttccgatggaggcgctgggctgtcagtggggctgcccatcccaggcatgttttag

SEQ ID NO: 245881 - DNA, 2538 bp, Artificial Sequence
  derived and/or modified sequence
atgagtccttcaagaaacttctcttttcgattatttcccgaaaccgcccctggggcacccggatcaataccagctcctcccgctcccggtgatgaggccgcaggaagcagggtggaacgtctgggtcaagcatttaggcgcagggtgaggctgctgcgtgaactgtccgagcgtctggaactagtcttcctcgtggacgactcttccagtgttggagaggtgaactttcggtctgaactcatgttcgtgaggaagctgctgtcggatttccctgtggtgccaaccgcaacccgcgtggcgattgtcaccttcagttccaaaaactatgtcgtaccgagggtggattacataagcacgcgcagggctcgtcagcacaagtgtgcactcttgctccaggagatcccggcaatatcctataggggcggtggcacctataccaaaggagctttccagcaagcggctcagattctgcttcatgctcgcgaaaattccaccaaagtggtgttccttataacagatggatactcaaacgggggagaccccaggcccattgcggcttctctcagagatagcggggtcgaaatcttcacctttggcatctggcagggaaatataagggagcttaatgatatggcctcaactcctaaagaggaacactgttatctcctacattctttcgaagagtttgaagcccttgccagaagggctctgcacgaggacctgccctccggcagcttcattcaggacgatatggtgcactgttcgtacctgtgcgacgagggaaaggactgttgtgaccgcatgggctcctgtaaatgcgggacgcatactggtcacttcgagtgtatatgtgaaaagggctactatggcaaggggctccaatatgaatgcaccgcttgcccttcaggaacttataagccagaggggagcccaggtggaatcagctcctgcatcccctgccccgatgagaatcatacaagccccccaggatcaactagccctgaggactgcgtctgccgcgagggttatcgggcaagtggtcagacctgtgaattagttcactgtcccgctctgaagcctcctgaaaacggctattttatccagaacacctgcaataatcatttcaacgctgcttgcggggtgcggtgtcacccagggtttgatttggttggctcctctataatcctttgtttacctaacggcctgtggagcggtagcgaatcctactgcagagtgcgaacatgccctcatctgcgccagcccaaacacgggcacatctcatgttctactagagaaatgctgtataagactacttgtttggtagcctgtgacgagggctataggttggagggtagcgataagcttacctgtcagggcaatagccagtgggatgggcctgaacctcgctgcgttgaacggcattgttccacattccagatgccaaaagacgtgatcattagccctcataattgtggcaaacaaccagctaaattcggaaccatctgctacgtgtcatgccgccagggcttcatcctctccggggtaaaggaaatgcttcgctgcactactagtggcaagtggaatgttggagtgcaagcggcagtttgtaaagatgtggaggcccctcagatcaactgccccaaggacatcgaggccaagactctggagcagcaggactccgccaatgtcacttggcagatcccaacggcaaaagacaattctggtgagaaggttagcgtacacgtacatcctgcctttactcctccatacctgttccccattggtgacgtcgcaattgtatatacagccacagacctgagcggtaaccaggccagttgtattttccacatcaaggtaattgacgcagagccccctgtcattgactggtgcaggagcccccctcctgtgcaggttagtgaaaaagtacacgctgccagctgggatgagccccagttctccgataacagcggtgctgaactagtcatcaccaggtcccacacccagggagatctatttccccagggggagactatagtccaatacactgccactgatccctccggtaataatagaacttgtgacatacatatcgttatcaaggggagtccctgcgagattcccttcacaccggtgaatggagatttcatctgtaccccagacaacaccggagttaactgtaccctgacgtgtctggagggatatgactttacagaaggctcaactgataagtactattgcgcatacgaagacggcgtctggaagccaacctacacaaccgagtggccagactgcgccaaaaaacggttcgcgaaccacggctttaaaagcttcgaaatgttctataaagccgctaggtgcgatgataccgacctgatgaagaaattcagtgaggcttttgagaccacactggggaagatggtgccgtcattctgctcagatgctgaggacatcgattgcaggctggaggagaacctgacaaagaagtactgtcttgaatataactacgattatgagaatggatttgccatcggtaattag

SEQ ID NO: 245882 - DNA, 1548 bp, Artificial Sequence
  derived and/or modified sequence
ctggagaaccagcttgtccttaaagagcttaccacagaagttggcgtcgtaacgttctcttgtaaagaagggcacgtgctccagggccctagtgtgctcaagtgtctgccatcccagcaatggaacgattcctttcctgtgtgtaaaatagtgctgtgtactcctccgcctctcatttcctttggggtgcctataccgtcaagtgcacttcattttgggagcacagtcaaatactcatgtgtcggtggatttttcctgcgtggcaacagcacaaccctgtgtcaacccgacggtacctggtccagtcctctgcccgagtgtgtgcccgtcgagtgtccacagcccgaagagatcccgaatggtattatcgatgtgcaaggactggcatatctgtcaaccgcactgtatacctgcaaacctggatttgagctggtcggcaacacgactacattatgcggcgaaaacggccattggctcggaggtaaacctacctgcaaagctattgagtgcctcaagccaaaagagattctgaacggaaaattcagctacactgatctgcattacggacaaactgtcacttacagttgcaacaggggcttcagactcgagggcccatccgctctgacctgtcttgagaccggcgactgggatgtagacgccccttcctgcaacgctatacactgcgattccccacagcccatagagaacggctttgtggaaggcgctgattacagttacggggctatcattatctatagttgtttcccgggatttcaggtcgccggacacgccatgcagacttgcgaggaatcgggttggtccagcagcattccaacctgcatgccgatagattgcggcttgccgccacacatagattttggggattgcaccaaattgaaagacgatcagggttatttcgagcaggaagacgacatgatggaagtgccatatgtgaccccacatccaccataccatctgggagctgtggcaaagacttgggaaaatacaaaagaatcgcccgctacacattccagcaattttctgtacggaaccatggtgtcttatacctgcaatccaggctacgagcttctcgggaatccagttctgatttgccaggaagacggaacgtggaatggcagtgccccttcttgcatctcaattgagtgcgatctgcccaccgctccggagaatgggttcttacgctttacggaaacatccatggggagcgcagtccagtatagctgcaagccaggtcacattctggccggttctgatctgcgcctgtgcctcgaaaataggaaatggagtggtgcttcccctcgctgtgaggcgatcagctgtaagaagccaaatcctgtgatgaatggttccattaaagggtctaactacacatatctctccacgctgtactatgagtgcgacccagggtatgttttgaacggtaccgagcgaagaacctgtcaggatgacaaaactggaatgagaatgagccctttcgccttcttatggacagctgttcacccacagagtcagccaatggccaggtag

SEQ ID NO: 245883 - DNA, 10647 bp, Artificial Sequence
  derived and/or modified sequence
atgtctccatcaaggaacttttcttttaggctcttccccgagactgcacctggggcacctggctccatccccgctcctcccgcaccgggagacgaggccgctggctctagagttgaaaggctgggccaggcatttcgtagaagggtacgcttattacgggagctgtccgaacggctagagttggtgtttctggttgatgactcctcatctgtgggggaggttaacttcaggagtgagctcatgttcgtgcgcaaactgctgagcgatttcccagtcgtcccaaccgccacccgcgtcgcaatagtcaccttttctagcaaaaattatgtggtgcctagagtcgattacatctcaaccaggagagcacgtcaacacaagtgcgccctactccttcaagagataccggctattagctacaggggaggaggaacgtatacgaagggtgcattccaacaagccgctcaaattctgctgcatgcccgagagaatagcacgaaggttgtatttctgatcacagacgggtattcaaatggtggcgaccctcgtccaatcgccgcaagcctgcgggacagcggcgtcgaaatctttacttttggcatctggcaaggaaacatcagagaattgaacgacatggccagcacccccaaggaagaacattgctacctcttgcattccttcgaggagtttgaggccctggcaaggagggcgctgcacgaggacctgcctagcggatcttttattcaggacgatatggtgcactgtagctatctctgtgatgaagggaaggattgttgcgaccgaatggggtcatgcaagtgcgggacacataccggccatttcgagtgtatatgcgaaaaaggctattatggtaagggtttacagtatgagtgtactgcttgtccaagcgggacctataaaccggaaggatctccagggggaattagcagttgtattccctgtcccgatgagaatcatactagccctcccggatcaaccagcccagaggactgcgtgtgtagggaggggtaccgggctagcggccagacctgcgaacttgtgcattgtcctgcactgaaaccccctgaaaacggatacttcatccagaatacctgtaacaaccatttcaatgccgcttgcggggtgagatgccacccaggcttcgacttggtggggtcaagtattattctgtgtcttccaaacggactttggtcagggagcgagagttattgcagggtacggacatgtccccatctgcgacaacccaagcatgggcatattagctgctcaactcgcgaaatgctgtataagacaacctgtctggtagcctgcgacgaggggtaccgactggaaggaagcgacaagctgacctgccagggaaattctcaatgggacggaccggagcccaggtgtgtcgaacgccactgctctacttttcagatgcccaaggacgtgatcatctcacctcacaactgcgggaaacaacccgcaaaattcggaactatttgctacgtgagctgcaggcagggttttatcttatcaggcgtcaaagaaatgctccgttgcacaacgtctggaaagtggaatgtgggggtgcaggcggcagtttgcaaggatgtggaagccccacagatcaactgccccaaggatatcgaagccaagacgctcgagcagcaggattcagcaaacgttacatggcaaattcctactgctaaagataacagtggggaaaaagtctcagtccatgtccatccagcttttactcccccttacctgttccccatcggggacgtggctatagtctataccgcaacagatctgtcagggaatcaggcaagttgtatctttcacatcaaggtcattgatgcagagccacctgtgattgactggtgtaggtctccccctcccgtgcaggtttccgaaaaagtacacgctgcaagttgggacgaaccacaattcagcgacaacagtggcgcagaattggtgatcactaggtcccacacccaaggtgatcttttcccccagggggagacaatcgtccagtacacagcaacagatccgtcaggtaacaacaggacctgtgacatacacatcgttattaaagggagcccttgtgagatccctttcacacccgttaacggcgactttatatgcacccctgacaacacgggggtcaattgcactctgacctgcctcgaaggctatgactttactgagggctctactgacaagtattattgcgcctacgaggacggggtttggaagccaacatacacaacagagtggccagactgcgctaagaaacgttttgccaaccacggctttaaatctttcgaaatgttctacaaggcagctaggtgcgacgatacagatctaatgaagaaattttcagaagcttttgagaccacactcgggaagatggtcccatccttttgctccgacgccgaggacatcgactgcaggctcgaggagaatctgactaaaaaatattgccttgaatataattatgactacgaaaacggattcgccataggaccaggcggatggggagccgcaaacagactggactatagctatgatgattttttggacactgtccaggaaaccgccacctccatagggaatgccaagagtagccgaatcaagcggagtgcacccctgtccgattacaagattaagctgatcttcaatatcacagcaagtgtgcccctgccggacgagagaaacgacaccctggaatgggagaatcagcagcggctgctacagactttggagaccatcacaaacaaactgaagcgaacacttaacaaggaccctatgtatagctttcaattggcttctgaaatcctcattgccgacagcaattccctggaaacaaagaaggccagccctttttgcaggccagggtcggttctccgtggacgcatgtgcgtaaactgccctttgggaacctactataatctggagcatttcacttgtgaatcatgcagaatcggctcctatcaggacgaagaaggacagttagagtgtaaattgtgcccaagcggcatgtataccgagtatattcactctaggaacattagcgattgtaaggcccagtgtaaacagggcacctattcatattccggcttggaaacatgtgaaagctgtccattaggtacataccagcctaagtttgggagcaggtcttgtctcagctgtccagagaacacctcaacagttaaaagaggcgctgtcaacataagcgcttgcggggtgccatgccccgaaggaaaattcagcagatccgggctgatgccttgtcacccatgcccccgagactattatcagcctaacgcagggaaggcgttttgtttggcgtgccccttttacggcacgactccatttgctggcagccgcagcattacagagtgtagctccttttcatcaacctttagcgcagcagaagagagtgtggtgcccccagcctcgctggggcatattaagaagaggcacgaaatctcatctcaggtcttccacgagtgctttttcaacccctgtcataacagcgggacatgtcagcagcttggcaggggatacgtgtgtctgtgccctctgggctacaccgggcttaagtgcgaaacggacattgacgaatgttcccccttgccttgcttgaataatggtgtttgtaaagatctcgtcggtgaattcatttgcgagtgtccatcggggtataccggacagcgctgtgaggagaacattaatgagtgttcatcctcaccatgcctgaataaaggcatatgcgtcgacggtgtggctggctaccggtgcacttgtgtgaaggggttcgtcggattgcactgcgagactgaggtaaacgagtgtcagagcaacccgtgtcttaacaacgctgtgtgtgaagatcaggtaggcggatttctctgtaaatgtcccccaggattcctggggacgagatgtggaaagaatgtcgacgaatgcctgagccagccgtgtaaaaatggcgctacctgcaaggatggagccaatagcttcaggtgcctgtgcgctgcagggtttactggttctcattgcgagctgaacattaatgagtgccagagtaatccgtgcagaaatcaggccacttgcgtggacgaactgaattcctattcctgcaagtgtcagccgggttttagcggtaagaggtgtgagaccgagcagagcactggcttcaacctcgactttgaggtgtctggaatttacggttatgtcatgctggatgggatgttgcccagcctacacgctctgacctgcacattttggatgaaaagttcagacgacatgaactatggaactcccatcagctacgctgtcgacaatggtagcgataatactctcttgctaaccgactataatggatgggtcctttatgtaaacggtcgcgagaaaattaccaattgcccgagcgtgaacgatggtaggtggcatcatatcgccataacctggacttcagccaatgggatttggaaggtatacattgacggcaagctatcagacggtggggctggtttgtcggtgggactgcctatcccgggaggaggcgcattagtcttagggcaggaacaagataagaaaggagaaggcttctctccagcagaatcctttgttggcagcatctctcaactgaatctctgggattacgtactgtcaccacagcaggtgaaatctcttgcaacctcttgtcctgaggagctgtctaaaggtaacgtcttggcctggccagattttttatctgggattgtgggtaaggtgaaaatagacagtaagagtattttctgttcagattgcccaagactcgggggatccgtgcctcacctaagaacagcctccgaggacctcaaacctggtagtaaggtgaacctgttctgcgatcccggttttcaactggtggggaacccagttcaatactgccttaatcagggccaatggacacagcccctgcctcattgtgagcgaattagttgtggcgtccccccacctctggaaaacgggtttcatagtgccgacgacttttacgccggttcaaccgtgacctaccagtgcaacaatgggtactaccttctgggggactccagaatgttttgcactgataacgggagttggaacggcgttagcccaagctgcctcgacgtagacgagtgcgctgtgggatcagactgtagtgagcatgcaagctgtcttaacgtggatggcagctatatatgctcttgtgtccctccctatacaggagatggtaagaattgtgcagagccaattaagtgcaaagctcccggtaatcccgagaatgggcactcttctggggagatctatacagtcggagccgaagttacctttagctgtcaggaaggataccagcttatgggtgttacaaaaattacatgccttgaaagcggagaatggaatcacctgatcccttattgtaaggcagtcagctgtggtaaacccgctattccagaaaacggttgtattgaggaacttgccttcactttcggtagcaaagtcacctatagatgtaataaggggtatacgctggctggtgataaagagtcttcctgtttggctaatagctcctggtctcacagcccccctgtctgcgaaccggtcaaatgttcatctcccgagaacatcaataatggaaagtacatccttagcggcctaacttacctcagcacagcaagctatagttgtgacaccgggtactccctccagggcccttctattatagagtgtacagcatcaggcatatgggaccgggctccgccagcttgccaccttgttttctgcggtgagccacctgctatcaaggatgccgtgataactggaaacaacttcacttttcgcaacacagtcacttatacatgcaaggaaggttacacactggccggtctcgataccatcgagtgcctcgctgacggtaaatggagtagaagcgaccaacagtgcctggccgtgtcttgtgacgaaccaccaatcgtggatcacgctagtccagagacagcacataggctgtttggggacattgccttttattactgctcggatggctactctctcgctgataattcacagttgctctgcaacgcccagggcaaatgggtacccccagagggtcaagatatgccccgatgcatcgcccatttctgcgaaaagcctccttccgttagttacagcatcctcgaatcagtgtcgaaagctaagttcgctgccggatccgtggtctcatttaaatgtatggaggggttcgtgcttaacacctcagctaagattgaatgcatgcgcggaggccagtggaatccctcgccaatgagcatccagtgcataccagtgagatgtggggagccgccatcaattatgaacggctatgcttccggtagtaactacagctttggcgctatggtcgcatatagttgcaataagggattttatattaagggcgagaagaaaagcacctgtgaagccacaggacagtggtcgtctccaatacccacttgtcatcctgtgagctgcggtgagccacctaaggtggaaaatggcttcctggagcataccaccggaaggatcttcgagtctgaggtacgttatcagtgtaaccccggttataagtcagtgggctcacccgtgtttgtctgtcaggccaatcgccactggcactctgaaagcccactgatgtgtgtgccactggactgtgggaaacctccccctatccagaacggtttcatgaaaggcgaaaactttgaggtggggagcaaagtccagtttttttgtaacgaagggtacgagctggtgggggactctagttggacatgtcaaaaaagcggtaaatggaacaagaaatccaatcctaaatgtatgcccgctaaatgtcctgaacctcccttgctggaaaatcagctcgtgttgaaagagctcacgaccgaagtaggtgtcgtgacattctcctgtaaggaaggacatgtcctacagggtccatccgtgctcaagtgcttgccttcacagcagtggaacgactcctttcctgtgtgcaagatcgtactgtgcacccctcccccactgatttcctttggagtgcccattccctccagcgcacttcactttggaagcacagtgaagtatagttgcgtgggcggattctttctccgagggaacagcacaaccctatgccagcctgacggcacgtggagctctcctctgcccgagtgcgttcctgttgagtgtccacaaccagaggaaattcctaatggtatcatagatgtccaggggctagcttaccttagcacagccctatatacgtgcaagcccggtttcgaactggtaggaaacactactacattgtgcggagaaaatggccactggcttgggggtaagcccacctgtaaggccattgagtgcctgaagcccaaggagattttgaatggaaaattcagctacactgacctgcattacgggcaaaccgttacttactcctgtaaccgcggattccgactggaaggcccttccgctctgacttgtctggagactggtgattgggatgttgatgctccctcatgtaatgcgatccactgcgacagccctcagccaattgaaaacggcttcgtggagggggctgactatagctatggagcaatcattatttactcatgctttccgggattccaggtggccggacacgccatgcaaacatgtgaagagagcggatggtccagtagcataccaacatgcatgccaatcgactgcgggctgccccctcatatcgattttggcgactgtacaaagctgaaagatgatcagggctattttgagcaagaggacgacatgatggaggtgccctatgtcactcctcatccaccgtaccatcttggagctgttgctaaaacgtgggagaatactaaggagtccccagccacccacagctccaatttcttatacggcaccatggtgtcctacacgtgtaaccccggatacgagttgctgggtaatcccgtactgatctgtcaggaggacggcacatggaatggctccgccccttcttgtatttctatcgaatgtgacctgcctactgccccagaaaatggatttctgcgctttacagagacatctatgggaagtgcggttcagtactcatgcaaacctggacatattctcgcaggaagcgatcttcggttatgtctagagaatagaaagtggtccggggcttccccacgctgcgaggctatcagttgtaagaagcccaatcccgtgatgaatgggagcattaaagggagtaactatacctacctatcaactctgtactatgaatgtgaccctggttatgtgttaaacgggacggaaagacggacatgccaagacgacaagaattgggacgaggacgaacccatttgcatccctgtggactgctcaagtccgcctgtgtccgctaacggccaggtgagaggggatgaatacactttccaaaaggagatcgagtacacatgtaacgagggatttctgctcgagggagcgcgtagccgggtgtgtctggccaacggcagctggagtggagccaccccggactgcgtacccgttcggtgtgcaactccacctcaacttgccaacggtgttaccgaaggactggattacggttttatgaaggaggtgacttttcactgtcatgaaggctacattttgcacggggctccaaagctgacatgccagtcagacggaaattgggatgctgaaatacctttgtgtaaacccgtcaattgcgggccaccagaggacctcgcgcacggtttcccaaacgggtttagctttattcatggaggacacatccagtaccagtgctttccaggctataagctccacgggaatagtagcagacggtgcctgtcaaatggctcctggtccggctccagcccttcatgtctcccctgcaggtgtagcacgcccgtgatagagtacggcaccgttaatggcacagattttgactgcggcaaggcagctaggatccaatgctttaaggggtttaagctactaggactgagtgaaatcacttgcgaggcagatggccagtggagcagcggtttcccccactgtgaacacacctcttgtggctcgctgcccatgattcctaacgccttcatctcagagacttcaagctggaaggaaaacgtcattacatatagctgccggtccggctatgtcatccaaggaagttctgaccttatctgtaccgagaagggcgtgtggagtcagccgtacccagtctgtgagcccctttcttgcggaagccccccatccgtggctaatgccgtcgcaacgggggaggcgcatacgtatgaaagcgaagtgaagctacgatgtctggaaggctacaccatggacactgataccgatactttcacttgtcaaaaagacgggaggtggttccctgaacggatttcatgttccccaaagaaatgcccgctaccggaaaacattactcacatcctggtacacggtgacgatttcagcgtgaaccgccaagtctctgttagctgtgcagagggatacactttcgaaggtgtgaatattagcgtttgtcaattggacggaacctgggagcccccattttccgatgagtcttgtagtccagtgtcctgcggtaaaccagagtctcctgagcacggctttgtggttggctccaaatacacctttgaatccacgataatctatcagtgtgagcctggatatgagctagagggcaatcgggaacgggtgtgccaggaaaatcgacagtggtctggtggagtggccatctgtaaagagacaaggtgtgaaacccctcttgaattcctcaatggaaaggccgatattgaaaaccgaacaaccggcccaaacgttgtgtattcttgtaatagggggtattctctggaaggacctagcgaggctcactgcacagagaacgggacctggtctcaccctgtacccctatgtaagccgaacccctgtccggtaccattcgtgatacccgagaatgccctgctgagtgaaaaagagttctacgtggatcagaacgtgtcgataaaatgtcgcgagggattcctgctgcagggtcacggaataattacctgcaaccctgacgaaacgtggacacagacgagcgcaaaatgcgaaaaaataagttgcggcccacccgctcacgtggagaacgcaattgctagaggcgtgcactatcagtatggtgatatgattacctactcttgctatagtggatatatgctggagggcttcctgcggtcggtctgtctggagaatggaacctggacatcacctcccatttgtagggctgtgtgccgctttccttgccaaaatggtggaatttgccagcggcctaacgcatgtagctgtccagaaggctggatgggacgactctgcgaggagcctatctgcatcctcccatgcctgaacggtggcaggtgtgtcgctccgtaccagtgtgactgtcccccaggatggaccgggtctagatgtcataccgccgtatgtcagtcaccctgtctcaacggaggaaagtgtgtgagacctaatcgttgccactgcttatcttcatggactgggcataactgctcccgaaaaaggagaacaggcttttaa

SEQ ID NO: 245884 - DNA, 10716 bp, Artificial Sequence
  derived and/or modified sequence
atgtggccgaggctggctttttgctgctgggggctcgcactagtctcaggctgggcaacctttcaacagatgagcccttcccggaacttttcattcaggttgtttccggaaactgcacccggtgctcccggttcgattcccgcacctcccgctcccggagacgaggctgccggtagcagagtcgaaagacttggtcaagcatttcgtcggcgtgttcggcttctgcgagaactgtccgagcgtttggaacttgtgttcctggtcgatgattcatcttctgtgggtgaagtcaacttccggtccgagcttatgtttgtaaggaaactattaagtgactttccggtggtgccaacagcaacaagagtcgccatagttacttttagcagcaagaattatgtcgtccccagggttgactacataagcaccagacgggctcgccagcacaagtgtgccctcctgttgcaggagattcccgcaatttcctataggggtggtggcacatataccaagggggctttccaacaggctgcacagatattgctccacgctcgagaaaactctaccaaggtggtgtttctgattaccgatgggtacagcaatggtggggaccctaggcccattgcggcatccctgcgtgactcgggagtggaaatctttacttttggaatttggcaggggaacatccgggagctgaatgatatggcaagcacacctaaagaggagcactgttatctgctgcactctttcgaggagttcgaagcattggcacggcgtgcgctgcacgaagaccttccttccgggagtttcattcaggacgacatggttcattgtagctatttatgtgacgaaggcaaggactgttgtgatcgaatggggagctgcaaatgtggtactcacactgggcactttgagtgtatctgcgaaaaggggtactacggaaagggattacagtatgagtgcacagcctgcccatccggcacatacaaaccagaaggttctccaggtggcatcagcagttgcattccttgcccggacgaaaatcatactagccccccaggaagtacttcaccagaagattgtgtttgccgagaagggtatagagcctctggtcaaacatgcgagttggtccactgccccgcactgaagccgcctgaaaatgggtattttattcaaaatacctgtaataatcacttcaatgctgcatgcggggttaggtgtcaccccggtttcgacctcgtgggtagttctatcattctatgcttgcccaatggcctgtggtcaggaagcgagagttactgtagagtgaggacatgccctcacctgaggcaacctaagcacggacatatttcttgctccacaagagagatgttgtacaagactacctgtctcgtcgcctgtgatgagggatatcggttggagggatcagataagttaacctgccagggtaacagccaatgggacggcccagagcccagatgtgtggagcgccattgctctaccttccagatgcccaaagacgtgattattagccctcataactgcgggaagcagcccgctaagttcggtacaatctgctatgtcagttgcaggcagggatttatcctttcaggtgtgaaggagatgttacgatgcaccacatccgggaagtggaacgtgggggttcaagccgctgtgtgcaaggatgtagaagcaccacagatcaattgccccaaggatatagaggcaaagacccttgagcagcaggactccgccaacgtgacatggcagatccccaccgcaaaagacaactctggcgaaaaggtgtccgttcacgtccaccccgcattcacaccgccttatcttttccctattggggatgtcgcaatcgtctataccgccacggatctgagtggaaaccaagcctcgtgtattttccacattaaagtaatagacgccgagcctcctgtgatcgattggtgtaggagtcctccccctgttcaggtaagcgaaaaggtgcatgccgcatcctgggacgagccccagttctccgataatagcggtgccgaactagtcataacgcgctcccatacacagggagatttatttccacagggagagacaatcgtacaatacacagccacagacccaagcggcaacaatcgcacgtgcgatatccacatagtgatcaaaggttccccttgtgaaattcctttcacccctgtaaacggggacttcatatgcacaccagacaacaccggagtgaattgcaccctcacatgcctcgagggatacgacttcacggagggaagcacggataagtactactgcgcctacgaagatggggtgtggaagcccacttatactacggaatggcctgattgtgccaaaaagcggtttgcgaaccacggattcaaaagtttcgaaatgttttataaggcggcaagatgcgacgatactgacctcatgaagaagttctctgaagctttcgagacaaccctcggcaaaatggtcccctccttctgttctgatgccgaagatatagactgtcggctggaagaaaacttgactaaaaaatactgtctggagtacaattatgactacgaaaacgggtttgctattggacctggaggctggggcgcagcaaaccgattggactattcttacgatgactttttagataccgtgcaggagaccgctacctcaatagggaatgccaaatcaagtagaattaaacggagcgccccattatccgactataaaatcaagctcatatttaatattacagctagcgtgcctctacccgatgagaggaatgatacactggagtgggagaatcagcaacgcctgctacaaacactggagaccataaccaacaaactcaagaggacactcaacaaagacccaatgtatagtttccagcttgcttcagagattctcatcgcggactctaactccctagaaactaaaaaagcatcgcccttctgtagacccggatctgtgctgagaggcaggatgtgtgtaaactgccctcttggcacgtactacaatttagagcattttacctgtgaatcctgcagaataggaagttaccaggacgaagaaggacaactggaatgtaagctgtgtccatccggcatgtatactgaatatattcactcaaggaacatctctgattgcaaggcacaatgtaaacagggcacttacagttattccggactggaaacctgcgagagctgtcctttggggacctatcagcctaagttcggatcacgctcctgcttgtcctgccccgaaaacacgagcactgttaagcggggtgccgtaaatattagtgcatgtggtgtgccttgccccgaggggaagttcagcagatccggcctcatgccttgccatccttgccccagagattattaccagcccaatgccggaaaagcattctgtttggcttgccctttctatgggaccacgccatttgctgggtcacggtccattacagagtgctcatcattcagttctacatttagcgctgcggaggagtctgtcgtacccccagccagtctaggccacatcaagaagcgtcacgaaatcagtagccaggtgtttcacgaatgcttcttcaatccctgtcataacagcggaacatgccagcaactgggaagaggttatgtctgtctttgccctttggggtatacaggcctaaagtgcgaaaccgatattgatgagtgttcaccgttgccttgcctgaataacggcgtgtgtaaagatctggtgggggaattcatttgcgaatgccccagcgggtacactggccaaagatgcgaggagaacatcaacgagtgtagctccagtccatgtctgaacaagggtatttgtgttgacggagtagctgggtatcgttgtacctgcgtcaaggggttcgtgggtctgcactgcgaaaccgaggtgaatgagtgtcaaagcaatccttgccttaacaatgccgtgtgcgaggatcaggtgggagggtttctctgcaaatgcccccctggtttcttgggcacacggtgtgggaagaatgtggacgaatgtttgagccagccttgcaaaaatggcgctacctgtaaagacggcgcaaactcttttcgttgtctatgcgctgcgggattcacagggtctcactgtgagcttaacattaacgagtgccagagcaatccctgccggaaccaggctacatgcgtagacgaactaaatagttattcatgtaaatgccagccaggattctccggcaaacggtgtgaaacagaacagtccacgggatttaatctagatttcgaggtcagtgggatctatggttacgtcatgctggatggcatgctgccttcactccatgctctcacgtgtaccttttggatgaaatctagcgacgatatgaactacggtacaccgatctcctacgctgttgataatggttctgataacactctcttgctcacagactacaacggctgggtgctatatgtcaatggaagggagaagatcacaaactgcccctctgtaaacgatgggcgatggcaccacatcgcaatcacctggacatccgctaacggtatctggaaagtgtacattgatgggaagttgagtgacggtggcgctggcttgagcgtcgggcttcctattcctggcggaggagcccttgtattgggccaggagcaggacaagaagggcgaaggattcagccctgcagagtcttttgtaggctccatctcccagttaaacctctgggactacgtcttatcaccacagcaggtgaaatccctggcgacttcttgtccagaggagttgagcaaaggcaacgtgttagcttggccggatttcctgtcaggcatcgtaggaaaggtaaaaattgacagtaagagcattttttgctcagactgccctcgactgggaggaagtgtcccccacttgcgaaccgcctcagaagacttaaaacccggttccaaagttaatttgttctgcgatccaggattccagcttgttggcaaccccgttcagtactgccttaatcagggccaatggactcagccccttccacattgtgaacggatctcctgtggcgtgccacctcccctggagaatggctttcattctgccgacgatttttacgccggatccactgtaacctatcagtgcaacaatggatactatcttctgggtgattctaggatgttttgcacagacaacgggtcttggaacggcgtgtcccccagttgccttgacgtggacgaatgtgctgtcggtagcgactgcagtgagcatgcgtcttgcctgaatgtggatggctcctacatatgcagttgtgtcccaccatatactggcgacggaaagaattgtgccgagccaattaagtgcaaagcacctggaaatcctgagaacggccattcctcgggggagatctatactgtcggagccgaggtgacctttagttgtcaggaagggtatcagttaatgggcgttaccaaaatcacttgcctcgaaagcggggaatggaaccacctgattccttactgtaaggctgtctcttgcgggaaacctgctatcccagagaacggttgcatcgaggagctggcctttactttcggctccaaagtgacttaccgctgtaacaaaggatataccctcgcgggagacaaagaatcctcctgtctggctaattcttcgtggagccattcccctccagtgtgcgagccagtaaagtgttctagtcccgaaaacatcaacaatgggaagtatattctctcgggtctgacatatctttctacggcaagctatagctgcgataccgggtactcgttgcaggggcctagtattattgaatgcacagcaagcggcatctgggatcgggctccaccagcttgccacctggtcttctgcggggagccacccgcaataaaggacgccgtgataacgggcaacaacttcacctttcggaacacagtgacctacacctgtaaagagggctatactttagctggactggataccatcgagtgtctggccgacggtaaatggtcgaggagtgatcagcaatgcctggctgtgagctgtgacgagccaccaatcgtagatcatgcttctccagagacagcgcaccgcctcttcggggacatagctttttactactgttctgacggctacagcctggcagataacagccaactgctgtgcaacgcacaaggcaagtgggtgccccctgagggccaggatatgccacgttgcattgcccacttttgcgaaaaaccaccctctgtgtcctacagcatactggagtccgtgtccaaggctaagttcgccgcaggcagtgtcgtgtcttttaaatgcatggaaggctttgtgttgaacaccagtgcaaagatcgagtgtatgagggggggacaatggaacccctcaccaatgtcgatacagtgcattccggtgaggtgtggcgagcccccatctatcatgaatggctacgccagtggatcaaattactcatttggcgcaatggtggcttatagttgcaataagggcttttacattaaaggagagaagaaaagcacatgtgaagctacgggccagtggagttccccaattccaacctgccaccccgtcagttgcggggaaccgccaaaggtggaaaatggctttctcgagcacaccactggccgaattttcgaaagcgaagtaagatatcagtgcaacccaggttacaagtcagttggtagccccgttttcgtatgtcaggcaaatcggcactggcatagtgaatcccccctgatgtgtgtccctctcgattgcgggaaacccccaccaatccagaacggttttatgaagggagagaactttgaggtggggtccaaggtgcaatttttttgtaacgaaggttatgagttggtcggtgacagctcttggacctgtcagaagtccggtaagtggaacaaaaaatccaatccaaaatgtatgccagctaaatgtccagagcccccactacttgaaaaccaactggttctcaaggaacttaccacggaggttggggtcgtaacattcagctgtaaagaaggacacgtcctccaggggccttccgtgcttaagtgtctgccatctcaacagtggaacgattcatttcccgtttgtaagatcgtcctgtgcacccccccaccattgatcagtttcggagtgcctatccccagctccgctctgcactttggcagcacagtgaaatacagttgtgtcggcggtttcttcctccggggtaattcaacgaccttgtgccagcctgacggtacctggagtagtcccttaccagagtgtgttcctgtcgagtgccctcagccagaggagatccctaacggcatcattgacgtgcaggggcttgcctatctgtcaactgcactttatacatgtaaaccagggttcgaactggtaggcaataccaccacactgtgcggtgagaacgggcactggttagggggtaaaccaacatgcaaggcgatcgagtgtctcaaacctaaggaaatactgaacggcaaattcagttacactgatctacactatggacagaccgtgacctatagctgcaaccggggatttaggctggaggggccaagcgccctgacatgtctggagacaggtgactgggacgttgatgctccaagttgtaatgccattcactgcgattctccgcagccgatcgaaaatggctttgttgagggcgcagattattcctatggcgcaattattatctattcatgttttccgggattccaggtcgccggacacgcaatgcagacctgcgaagaaagcggctggtcgtcttccattcctacgtgcatgcccatagattgcgggcttcctccacacatcgactttggcgactgcactaagctaaaggacgaccagggctattttgagcaggaagatgatatgatggaggttccatacgtgacaccgcaccctccctatcacctgggcgcagttgccaagacatgggaaaataccaaggagtcccctgccacgcattcctcaaactttctgtatgggaccatggtgagctacacctgcaaccccggttatgagctcttagggaatccagttctgatctgtcaggaagatggcacgtggaacggaagcgcgccaagttgcatctctattgagtgcgatctgcctaccgccccagagaatggattcctgcggtttacagaaacatctatgggcagtgccgtccagtacagttgtaagccgggacatatattggccggatcagacctccggctatgcttggagaaccgtaagtggagtggcgctagcccaaggtgcgaggcgatcagctgtaaaaagcctaacccagtcatgaacggcagtattaaaggttccaattacacctacctgtcaaccctgtactatgaatgtgatccaggctacgttctgaatgggaccgaacggcgtacctgtcaggacgacaagaactgggatgaggatgaaccaatttgcatccccgtagactgttcctcacctccagtatctgccaacgggcaggttcggggagatgaatacacgttccagaaagaaatcgagtatacttgcaatgaaggatttctcctcgaaggggctagatctagggtgtgtctggccaacgggtcctggagcggggcaacaccagactgcgttccagtgcgttgtgccacacctccacaattagctaacggcgtgaccgaagggctggattatggttttatgaaggaagtgaccttccactgtcacgagggttacattctccatggtgctcccaaattaacctgccagtccgacggaaattgggacgccgagatccccctctgcaagccggtgaattgtgggccaccagaggacctcgcccacgggtttcccaatgggttctcattcattcatggagggcacatacaatatcagtgctttccaggttataagctgcacggcaattcatctcgtcgttgtctttctaacgggagctggtctggctcgtccccatcttgtctcccttgtagatgttccactcccgttatagaatacgggactgtgaacggtacagattttgattgcgggaaggccgcaagaattcaatgtttcaagggcttcaagttgcttggcctatcggagataacatgtgaagccgacggccagtggtcgtccggatttccacactgcgagcatacaagctgcggaagtctccccatgattccaaacgccttcatcagcgaaacgagcagttggaaggaaaatgtgataacttactcttgcaggagcggatacgttatccagggtagttccgacttaatttgcacggagaagggagtttggtcacagccttaccctgtgtgcgaacctctcagctgtggatctcctccaagcgttgccaatgctgttgctaccggcgaagctcacacatacgagtcagaagtgaagcttaggtgtctcgagggctataccatggatacagacaccgacacctttacttgccagaaggacggacgctggtttcccgagcggatctcctgttcccctaagaagtgccccctgcccgaaaacattacacacatcctggtacatggagacgacttctcagtcaacagacaagtgtccgtcagctgcgcagagggatatacattcgaaggtgtgaatataagtgtgtgccaactggacggtacgtgggaaccccctttcagtgacgaatcttgtagcccagtgagttgtggaaaacccgagagtcctgaacatggattcgttgtaggctccaaatacaccttcgaatcaaccatcatctaccaatgtgagcctggttatgaactggaaggcaatcgcgagagggtctgtcaggagaaccggcagtggagcggaggagtggcgatatgcaaggaaacacgctgtgagacacctttagagttcttgaacgggaaggctgatattgagaacagaactactggccctaacgtggtttatagttgcaatcgcggatacagcttagaggggcctagcgaggcccactgtaccgaaaatggcacctggtcacaccctgtgccactgtgcaagccaaacccctgtccagtcccattcgtcatccctgaaaacgccctgctgtccgagaaagaattttatgtggaccagaatgtctccatcaagtgtagagagggatttctcctgcagggccacggaataatcacttgcaatcccgatgaaacttggacccagaccagtgcaaagtgcgagaagatctcttgcgggcctccagcgcacgtggaaaacgccattgccaggggggttcattaccaatacggggacatgatcacgtactcatgctattcgggctacatgcttgaagggtttttgagaagtgtatgtttagagaacggtacttggacctcccctccgatatgtcgtgcagtctgccggttcccctgtcaaaacggtggcatttgccaacgaccaaacgcgtgtagttgccccgaaggttggatggggagactgtgtgaggagcctatctgtattctcccgtgtctgaacggagggcgatgtgttgccccatatcagtgcgattgtcctccagggtggaccggttctcggtgccacacagccgtctgtcaatctccatgtctgaacggaggcaaatgtgtgcgcccaaaccgctgtcattgtttaagctcctggaccgggcacaactgttcacgtaagcgacgtaccggattctaa

SEQ ID NO: 245885 - DNA, 6192 bp, Artificial Sequence
  derived and/or modified sequence
cttacagggcccttccattattgaatgcacggcttctggcatctgggacagagcgccacctgcctgtcacctcgtcttctgtggagaaccacctgccatcaaagatgctgtcattacggggaataacttcactttcaggaacaccgtcacttacacttgcaaagaaggctatactcttgctggtcttgacaccattgaatgcctggccgacggcaagtggagtagaagtgaccagcagtgcctggctgtctcctgtgatgagccacccattgtggaccacgcctctccagagactgcccatcggctctttggagacattgcattctactactgctctgatggttacagcctagcagacaattcccagcttctctgcaatgcccagggcaagtgggtacccccagaaggtcaagacatgccccgttgtatagctcatttctgtgaaaaacctccatcggtttcctatagcatcttggaatctgtgagcaaagcaaaatttgcagctggctcagttgtgagctttaaatgcatggaaggctttgtactgaacacctcagcaaagattgaatgtatgagaggtgggcagtggaacccttcccccatgtccatccagtgcatccctgtgcggtgtggagagccaccaagcatcatgaatggctatgcaagtggatcaaactacagttttggagccatggtggcttacagctgcaacaaggggttctacatcaaaggggaaaagaagagcacctgcgaagccacagggcagtggagtagtcctataccgacgtgccacccggtatcttgtggtgaaccacctaaggttgagaatggctttctggagcatacaactggcaggatctttgagagtgaagtgaggtatcagtgtaacccgggctataagtcagtcggaagtcctgtatttgtctgccaagccaatcgccactggcacagtgaatcccctctgatgtgtgttcctctcgactgtggaaaacctcccccgatccagaatggcttcatgaaaggagaaaactttgaagtagggtccaaggttcagtttttctgtaatgagggttatgagcttgttggtgacagttcttggacatgtcagaaatctggcaaatggaataagaagtcaaatccaaagtgcatgcctgccaagtgcccagagccgcccctcttggaaaaccagctagtattaaaggagttgaccaccgaggtaggagttgtgacattttcctgtaaagaagggcatgtcctgcaaggcccctctgtcctgaaatgcttgccatcccagcaatggaatgactctttccctgtttgtaagattgttctttgtaccccacctcccctaatttcctttggtgtccccattccttcttctgctcttcattttggaagtactgtcaagtattcttgtgtaggtgggtttttcctaagaggaaattctaccaccctctgccaacctgatggcacctggagctctccactgccagaatgtgttccagtagaatgtccccaacctgaggaaatccccaatggaatcattgatgtgcaaggccttgcctatctcagcacagctctctatacctgcaagccaggctttgaattggtgggaaatactaccaccctttgtggagaaaatggtcactggcttggaggaaaaccaacatgtaaagccattgagtgcctgaaacccaaggagattttgaatggcaaattctcttacacggacctacactatggacagaccgttacctactcttgcaaccgaggctttcggctcgaaggtcccagtgccttgacctgtttagagacaggtgattgggatgtagatgccccatcttgcaatgccatccactgtgattccccacaacccattgaaaatggttttgtagaaggtgcagattacagctatggtgccataatcatctacagttgcttccctgggtttcaggtggctggtcatgccatgcagacctgtgaagagtcaggatggtcaagttccatcccaacatgtatgccaatagactgtggcctccctcctcatatagattttggagactgtactaaactcaaagatgaccagggatattttgagcaagaagacgacatgatggaagttccatatgtgactcctcaccctccttatcatttgggagcagtggctaaaacctgggaaaatacaaaggagtctcctgctacacattcatcaaactttctgtatggtaccatggtttcatacacctgtaatccaggatatgaacttctggggaaccctgtgctgatctgccaggaagatggaacttggaatggcagtgcaccatcctgcatttcaattgaatgtgacttgcctactgctcctgaaaatggctttttgcgttttacagagactagcatgggaagtgctgtgcagtatagctgtaaacctggacacattctagcaggctctgacttaaggctttgtctagagaatagaaagtggagtggtgcctccccacgctgtgaagccatttcatgcaaaaagccaaatccagtcatgaatggatccatcaaaggaagcaactacacatacctgagcacgttgtactatgagtgtgaccccggatatgtgctgaatggcactgagaggagaacatgccaggatgacaaaaactgggatgaggatgagcccatttgcattcctgtggactgcagttcacccccagtctcagccaatggccaggtgagaggagacgagtacacattccaaaaagagattgaatacacttgcaatgaagggttcttgcttgagggagccaggagtcgggtttgtcttgccaatggaagttggagtggagccactcccgactgtgtgcctgtcagatgtgccaccccgccacaactggccaatggggtgacggaaggcctggactatggcttcatgaaggaagtaacattccactgtcacgagggctacatcttgcacggtgctccaaaactcacctgtcagtcagatggcaactgggatgcagagattcctctctgtaaaccagtcaactgtggacctcctgaagatcttgcccatggtttccctaatggtttttcctttattcatgggggccatatacagtatcagtgctttcctggttataagctccatggaaattcatcaagaaggtgcctctccaatggctcctggagtggcagctcaccttcctgcctgccttgcagatgttccacaccagtaattgaatatggaactgtcaatgggacagattttgactgtggaaaggcagcccggattcagtgcttcaaaggcttcaagctcctaggactttctgaaatcacctgtgaagccgatggccagtggagctctgggttcccccactgtgaacacacttcttgtggttctcttccaatgataccaaatgcgttcatcagtgagaccagctcttggaaggaaaatgtgataacttacagctgcaggtctggatatgtcatacaaggcagttcagatctgatttgtacagagaaaggggtatggagccagccttatccagtctgtgagcccttgtcctgtgggtccccaccgtctgtcgccaatgcagtggcaactggagaggcacacacctatgaaagtgaagtgaaactcagatgtctggaaggttatacgatggatacagatacagatacattcacctgtcagaaagatggtcgctggttccctgagagaatctcctgcagtcctaaaaaatgtcctctcccggaaaacataacacatatacttgtacatggggacgatttcagtgtgaataggcaagtttctgtgtcatgtgcagaagggtatacctttgagggagttaacatatcagtatgtcagcttgatggaacctgggagccaccattctccgatgaatcttgcagtccagtttcttgtgggaaacctgaaagtccagaacatggatttgtggttggcagtaaatacacctttgaaagcacaattatttatcagtgtgagcctggctatgaactagaggggaacagggaacgtgtctgccaggagaacagacagtggagtggaggggtggcaatatgcaaagagaccaggtgtgaaactccacttgaatttctcaatgggaaagctgacattgaaaacaggacgactggacccaacgtggtatattcctgcaacagaggctacagtcttgaagggccatctgaggcacactgcacagaaaatggaacctggagccacccagtccctctctgcaaaccaaatccatgccctgttccttttgtgattcccgagaatgctctgctgtctgaaaaggagttttatgttgatcagaatgtgtccatcaaatgtagggaaggttttctgctgcagggccacggcatcattacctgcaaccccgacgagacgtggacacagacaagcgccaaatgtgaaaaaatctcatgtggtccaccagctcacgtagaaaatgcaattgctcgaggcgtacattatcaatatggagacatgatcacctactcatgttacagtggatacatgttggagggtttcctgaggagtgtttgtttagaaaatggaacatggacatcacctcctatttgcagagctgtctgtcgatttccatgtcagaatgggggcatctgccaacgcccaaatgcttgttcctgtccagagggctggatggggcgcctctgtgaagaaccaatctgcattcttccctgtctgaacggaggtcgctgtgtggccccttaccagtgtgactgcccgcctggctggacggggtctcgctgtcatacagctgtttgccagtctccctgcttaaatggtggaaaatgtgtaagaccaaaccgatgtcactgtctttcttcttggacgggacataactgttccaggaaaaggaggactgggttttaaccactgcacgaccatctggctctcccaaaagcaggatcatctctcctcggtagtgcctgggcatcctggaacttatgcaaagaaagtccaacatggtgctgggtcttgtttagtaaacttgttacttggggttactttttttattttgtgatatattttgttattccttgtgacatactttcttacatgtttccatttttaaatatgcctgtattttctatataaaaattatattaaatagatgctgctctaccctcacaaaatgtacatattctgctgtctattgggaaagttcctggtacacatttttattcagttacttaaaatgatttttccattaaagtatattttgctactaaataatattttgctggatagtaccattttatgaggtggccaagggattcatagagaggactcatgatctttcatctgtgccactggcaccacataggagaccccttacaataaaggagacccctttgttctggttccatcttctatacaatatgtgtaataataaaagctttttctttcatttaatcaatcagagagtaactgttggacctggtactctccaccacataattatgtcctggtacttagggtagcctggctaattcttttcacaacatttgaaaagccgtaggcattaacttcatggatgtggagaaacagcataatgaccttggttcacaatgaaagtgctagccttctttctcgtggctggaataagaaatgcaagaactggaagattaacaaagagctgatacccggactggtaatcccacaactcactattttgggaggaaggggaagacagggaaagagaaggaaaaaggcaaatgggaaacattccccagagctgtgctcctggtctcacctgcaaaaaagaattgcagccacctaagagaaagctgagctgcccctcagtcctcactgtcacctacctctatcacaacaattgtaccaagatgaagccttccccagacttcagaaaataaagtcaaaccctagattttgttttaaaataggaaactcagaatcaacttgcctccatcctctgggaaaactgctcccacacaggccttggagtgtgttgtagcactgtggaggaatgcagaaaggatgaaagagatcttgattctcctagtggttctcttcactaccgtaggcatccctcagccattgactcctccttctttctcttgacattcactttcttggccagtcttacatgcttatgagtctactttccaataaatttactcatagtccattaa

SEQ ID NO: 245886 - DNA, 5705 bp, Artificial Sequence
  derived and/or modified sequence
atgtggcctcgcctggccttttgttgctggggtctggcgctcgtttcgggctgggcgacctttcagcagatgtccccgtcgcgcaatttcagcttccgcctcttccccgagaccgcgcccggggcccccgggagtatccccgcgccgcccgctcctggcgacgaagcggcggggagcagagtggagcggctgggccaggcgttccggcgacgcgtgcggctgctgcgggagctcagcgagcgcctggagcttgtcttcctggtggatgattcgtccagcgtgggcgaagtcaacttccgcagcgagctcatgttcgtccgcaagctgctgtccgacttccccgtggtgcccacggccacgcgcgtggccatcgtgaccttctcgtccaagaactacgtggtgccgcgcgtcgattacatctccacccgccgcgcgcgccagcacaagtgcgcgctgctcctccaagagatccctgccatctcctaccgaggtggcggcacctacaccaagggcgccttccagcaagccgcgcaaattcttcttcatgctagagaaaactcaacaaaagttgtatttctcatcactgatggatattccaatgggggagaccctagaccaattgcagcgtcactgcgagattcaggagtggagatcttcacttttggcatatggcaagggaacattcgagagctgaatgacatggcttccaccccaaaggaggagcactgttacctgctacacagttttgaagaatttgaggctttagctcgccgggcattgcatgaagatctaccttctgggagttttattcaagatgatatggtccactgctcatatctttgtgatgaaggcaaggactgctgtgaccgaatgggaagctgcaaatgtgggacacacacaggccattttgagtgcatctgtgaaaaggggtattacgggaaaggtctgcagtatgaatgcacagcttgcccatcggggacatacaaacctgaaggctcaccaggaggaatcagcagttgcattccatgtcctgatgaaaatcacacctctccacctggaagcacatcccctgaagactgtgtctgcagagagggatacagggcatctggccagacctgtgaacttgtccactgccctgccctgaagcctcccgaaaatggttactttatccaaaacacttgcaacaaccacttcaatgcagcctgtggggtccgatgtcaccctggatttgatcttgtgggaagcagcatcatcttatgtctacccaatggtttgtggtccggttcagagagctactgcagagtaagaacatgtcctcatctccgccagccgaaacatggccacatcagctgttctacaagggaaatgttatataagacaacatgtttggttgcctgtgatgaagggtacagactagaaggcagtgataagcttacttgtcaaggaaacagccagtgggatgggccagaaccccggtgtgtggagcgccactgttccacctttcagatgcccaaagatgtcatcatatccccccacaactgtggcaagcagccagccaaatttgggacgatctgctatgtaagttgccgccaagggttcattttatctggagtcaaagaaatgctgagatgtaccacttctggaaaatggaatgtcggagttcaggcagctgtgtgtaaagacgtggaggctcctcaaatcaactgtcctaaggacatagaggctaagactctggaacagcaagattctgccaatgttacctggcagattccaacagctaaagacaactctggtgaaaaggtgtcagtccacgttcatccagctttcaccccaccttaccttttcccaattggagatgttgctatcgtatacacggcaactgacctatccggcaaccaggccagctgcattttccatatcaaggttattgatgcagaaccacctgtcatagactggtgcagatctccacctcccgtccaggtctcggagaaggtacatgccgcaagctgggatgagcctcagttctcagacaactcaggggctgaattggtcattaccagaagtcatacacaaggagaccttttccctcaaggggagactatagtacagtatacagccactgacccctcaggcaataacaggacatgtgatatccatattgtcataaaaggttctccctgtgaaattccattcacacctgtaaatggggattttatatgcactccagataatactggagtcaactgtacattaacttgcttggagggctatgatttcacagaagggtctactgacaagtattattgtgcttatgaagatggcgtctggaaaccaacatataccactgaatggccagactgtgccaaaaaacgttttgcaaaccacgggttcaagtcctttgagatgttctacaaagcagctcgttgtgatgacacagatctgatgaagaagttttctgaagcatttgagacgaccctgggaaaaatggtcccatcattttgtagtgatgcagaggacattgactgcagactggaggagaacctgaccaaaaaatattgcctagaatataattatgactatgaaaatggctttgcaattggaccaggtggctggggtgcagctaataggctggattactcttacgatgacttcctggacactgtgcaagaaacagccacaagcatcggcaatgccaagtcctcacggattaaaagaagtgccccattatctgactataaaattaagttaatttttaacatcacagctagtgtgccattacccgatgaaagaaatgatacccttgaatgggaaaatcagcaacgactccttcagacattggaaactatcacaaataaactgaaaaggactctcaacaaagaccccatgtattcctttcagcttgcatcagaaatacttatagccgacagcaattcattagaaacaaaaaaggcttcccccttctgcagaccaggctcagtgctgagagggcgtatgtgtgtcaattgccctttgggaacctattataatctggaacatttcacctgtgaaagctgccggatcggatcctatcaagatgaagaagggcaacttgagtgcaagctttgcccctctgggatgtacacggaatatatccattcaagaaacatctctgattgtaaagctcagtgtaaacaaggcacctactcatacagtggacttgagacttgtgaatcgtgtccactgggcacttatcagccaaaatttggttcccggagctgcctctcgtgtccagaaaacacctcaactgtgaaaagaggagccgtgaacatttctgcatgtggagttccttgtccagaaggaaaattctcgcgttctgggttaatgccctgtcacccatgtcctcgtgactattaccaacctaatgcagggaaggccttctgcctggcctgtcccttttatggaactaccccattcgctggttccagatccatcacagaatgttcaagttttagttcaactttctcagcggcagaggaaagtgtggtgccccctgcctctcttggacatattaaaaagaggcatgaaatcagcagcagagttttccatgaatgcttctttaacccttgccacaatagtggaacctgccagcaacttgggcgtggttatgtttgtctctgtccacttggatatacaggcttaaagtgtgaaacagacatcgatgagtgcagcccactgccttgcctcaacaatggagtttgtaaagacctagttggggaattcatttgtgagtgcccatcaggttacacaggtcagcggtgtgaagaaaatataaatgagtgtagctccagtccttgtttaaataaaggaatctgtgttgatggtgtggctggctatcgttgcacatgtgtgaaaggatttgtaggcctgcattgtgaaacagaagtcaatgaatgccagtcaaacccatgcttaaataatgcagtctgtgaagaccaggttgggggattcttgtgcaaatgcccacctggatttttgggtacccgatgtggaaagaacgtcgatgagtgtctcagtcagccatgcaaaaatggagctacctgtaaagacggtgccaatagcttcagatgcctgtgtgcagctggcttcacaggatcacactgtgaattgaacatcaatgaatgtcagtctaatccatgtagaaatcaggccacctgtgtggatgaattaaattcatacagttgtaaatgtcagccaggattttcaggcaaaaggtgtgaaacagaacagtctacaggctttaacctggattttgaagtttctggcatctatggatatgtcatgctagatggcatgctcccatctctccatgctctaacctgtaccttctggatgaaatcctctgacgacatgaactatggaacaccaatctcctatgcagttgataacggcagcgacaataccttgctcctgactgattataacggctgggttctttatgtgaatggcagggaaaagataacaaactgtccctcggtgaatgatggcagatggcatcatattgcaatcacttggacaagtgccaatggcatctggaaagtctatatcgatgggaaattatctgacggtggtgctggcctctctgttggtttgcccatacctggtatgttttaacaaaatgagtataattctgttggactctagaggtgatgctgcttaaatggacatcaggtttgctagcattgttgttcttggtttcaaacaaagattaacagctatctctcttatttcctactccctgattatcctaactgtgggttattagaagcttttttcctaagtaagctgtttgcctctctgtgtgagaaatgcctttgaagatctacattaagactaccaagaagcatgctgaattagcagctggttgctaaactgtcttctaaggagattaattactggtattttttgtttattttaaggattgttttgttttgtaatcagtatataagcaggaccactgctatccatcttttatggcccttttcaaatagatcttggcttgtcttctaaaaaatactttttaataaatatcccaggagttttagtttgaagaattgcaaactaaatttcattaggtgacccaggttctcagcattgtacatggcaataagcttgttctatctggatacatctatagaagtatatgcatatgacattattttttactttgctcatttgtttcaggtatactaaaagaaaattaaatagacaaaaatgaattaaagtattagaaactgactaatacattctagaagtaagttgtatgaaactaggatacgtatactaataaatatagcacaaaaatactaaacttcataaaaatgcggtgagatgacccttgcgaagcctcaaatacaatacttattttatttattagaaattattggccaggtacggtggctcacgcctgtaatcccagcactttggaaggctgaggagggtggatcacgaggtcaggagttggagaccgccctggacaatatggtgaagccctatctctactaaaaacgcacagaaaaattagccaggcatggtggtagatgcctgtaattccagctactcaggaggctgaggcaggagaatcgcttgaacccaggaggcgaagattgccgtgagccgagatcatgccactgcactccagcctgggcaatggagagaggctctgtctc

SEQ ID NO: 245887 - DNA, 3257 bp, Artificial Sequence
  derived and/or modified sequence
agggagagaaggagggaagcgggagatttttcttgactgccccctttccttcaaacattttataggcttcagggagagagaggaggaggagagagggaagaaaaaaagaggagagcgagaggggtagagagcgcgcgccgttccctccggagttcccgagctgctgaggagtctggattgtgtctgtccccagtgtcagatgaaagggcgctgaggctcttggccgctgccccgcgcccagctccgcgcacgcccctctgcgagtccggccgcccagcgcctcttcccgcccgagccgccgcctgcgctccggggcagccgctctgtctccagcgcgatgtggcctcgcctggccttttgttgctggggtctggcgctcgtttcgggctgggcgacctttcagcagatgtccccgtcgcgcaatttcagcttccgcctcttccccgagaccgcgcccggggcccccgggagtatccccgcgccgcccgctcctggcgacgaagcggcggggagcagagtggagcggctgggccaggcgttccggcgacgcgtgcggctgctgcgggagctcagcgagcgcctggagcttgtcttcctggtggatgattcgtccagcgtgggcgaagtcaacttccgcagcgagctcatgttcgtccgcaagctgctgtccgacttccccgtggtgcccacggccacgcgcgtggccatcgtgaccttctcgtccaagaactacgtggtgccgcgcgtcgattacatctccacccgccgcgcgcgccagcacaagtgcgcgctgctcctccaagagatccctgccatctcctaccgaggtggcggcacctacaccaagggcgccttccagcaagccgcgcaaattcttcttcatgctagagaaaactcaacaaaagttgtatttctcatcactgatggatattccaatgggggagaccctagaccaattgcagcgtcactgcgagattcaggagtggagatcttcacttttggcatatggcaagggaacattcgagagctgaatgacatggcttccaccccaaaggaggagcactgttacctgctacacagttttgaagaatttgaggctttagctcgccgggcattgcatgaagatctaccttctgggagttttattcaagatgatatggtccactgctcatatctttgtgatgaaggcaaggactgctgtgaccgaatgggaagctgcaaatgtgggacacacacaggccattttgagtgcatctgtgaaaaggggtattacgggaaaggtctgcagtatgaatgcacagcttgcccatcggggacatacaaacctgaaggctcaccaggaggaatcagcagttgcattccatgtcctgatgaaaatcacacctctccacctggaagcacatcccctgaagactgtgtctgcagagagggatacagggcatctggccagacctgtgaacttgtccactgccctgccctgaagcctcccgaaaatggttactttatccaaaacacttgcaacaaccacttcaatgcagcctgtggggtccgatgtcaccctggatttgatcttgtgggaagcagcatcatcttatgtctacccaatggtttgtggtccggttcagagagctactgcagagtaagaacatgtcctcatctccgccagccgaaacatggccacatcagctgttctacaagggaaatgttatataagacaacatgtttggttgcctgtgatgaagggtacagactagaaggcagtgataagcttacttgtcaaggaaacagccagtgggatgggccagaaccccggtgtgtggagcgccactgttccacctttcagatgcccaaagatgtcatcatatccccccacaactgtggcaagcagccagccaaatttgggacgatctgctatgtaagttgccgccaagggttcattttatctggagtcaaagaaatgctgagatgtaccacttctggaaaatggaatgtcggagttcaggcagctgtgtgtaaagacgtggaggctcctcaaatcaactgtcctaaggacatagaggctaagactctggaacagcaagattctgccaatgttacctggcagattccaacagctaaagacaactctggtgaaaaggtgtcagtccacgttcatccagctttcaccccaccttaccttttcccaattggagatgttgctatcgtatacacggcaactgacctatccggcaaccaggccagctgcattttccatatcaaggttattgatgcagaaccacctgtcatagactggtgcagatctccacctcccgtccaggtctcggagaaggtacatgccgcaagctgggatgagcctcagttctcagacaactcaggggctgaattggtcattaccagaagtcatacacaaggagaccttttccctcaaggggagactatagtacagtatacagccactgacccctcaggcaataacaggacatgtgatatccatattgtcataaaaggttctccctgtgaaattccattcacacctgtaaatggggattttatatgcactccagataatactggagtcaactgtacattaacttgcttggagggctatgatttcacagaagggtctactgacaagtattattgtgcttatgaagatggcgtctggaaaccaacatataccactgaatggccagactgtgccaaaaaacgttttgcaaaccacgggttcaagtcctttgagatgttctacaaagcagctcgttgtgatgacacagatctgatgaagaagttttctgaagcatttgagacgaccctgggaaaaatggtcccatcattttgtagtgatgcagaggacattgactgcagactggaggagaacctgaccaaaaaatattgcctagaatataattatgactatgaaaatggctttgcaattggtaattaaattctgtggcatcggtagttggcaagactaatctgcaaaataagaataattccagaaaagtgaggcaaactagaaacattaacttctattaatttattcatcaagtattttaggatggctaaataatttgataatgtgctgaaagatcattaaggttatatcaaattttagtaacaaataaattatttaaaattatttgccaggattcttaaaaatgacaaaaactaagaaaactaagtcacatatgctggtaaaattcaaatgttgatgtatcctaaaagagaatagtaataaagtcctaacagcaactttt

SEQ ID NO: 245888 - DNA, 4088 bp, Artificial Sequence
  derived and/or modified sequence
ttggaaaaccagctagtattaaaggagttgaccaccgaggtaggagttgtgacattttcctgtaaagaagggcatgtcctgcaaggcccctctgtcctgaaatgcttgccatcccagcaatggaatgactctttccctgtttgtaagattgttctttgtaccccacctcccctaatttcctttggtgtccccattccttcttctgctcttcattttggaagtactgtcaagtattcttgtgtaggtgggtttttcctaagaggaaattctaccaccctctgccaacctgatggcacctggagctctccactgccagaatgtgttccagtagaatgtccccaacctgaggaaatccccaatggaatcattgatgtgcaaggccttgcctatctcagcacagctctctatacctgcaagccaggctttgaattggtgggaaatactaccaccctttgtggagaaaatggtcactggcttggaggaaaaccaacatgtaaagccattgagtgcctgaaacccaaggagattttgaatggcaaattctcttacacggacctacactatggacagaccgttacctactcttgcaaccgaggctttcggctcgaaggtcccagtgccttgacctgtttagagacaggtgattgggatgtagatgccccatcttgcaatgccatccactgtgattccccacaacccattgaaaatggttttgtagaaggtgcagattacagctatggtgccataatcatctacagttgcttccctgggtttcaggtggctggtcatgccatgcagacctgtgaagagtcaggatggtcaagttccatcccaacatgtatgccaatagactgtggcctccctcctcatatagattttggagactgtactaaactcaaagatgaccagggatattttgagcaagaagacgacatgatggaagttccatatgtgactcctcaccctccttatcatttgggagcagtggctaaaacctgggaaaatacaaaggagtctcctgctacacattcatcaaactttctgtatggtaccatggtttcatacacctgtaatccaggatatgaacttctggggaaccctgtgctgatctgccaggaagatggaacttggaatggcagtgcaccatcctgcatttcaattgaatgtgacttgcctactgctcctgaaaatggctttttgcgttttacagagactagcatgggaagtgctgtgcagtatagctgtaaacctggacacattctagcaggctctgacttaaggctttgtctagagaatagaaagtggagtggtgcctccccacgctgtgaagccatttcatgcaaaaagccaaatccagtcatgaatggatccatcaaaggaagcaactacacatacctgagcacgttgtactatgagtgtgaccccggatatgtgctgaatggcactgagaggagaacatgccaggatgacaaaactgggatgaggatgagcccatttgcattcctgtggactgcagttcacccccagtctcagccaatggccaggtgagaggagacgagtacacattccaaaaagagattgaatacacttgcaatgaagggttcttgcttgagggagccaggagtcgggtttgtcttgccaatggaagttggagtggagccactcccgactgtgtgcctgtcagatgtgccaccccgccacaactggccaatggggtgacggaaggcctggactatggcttcatgaaggaagtaacattccactgtcacgagggctacatcttgcacggtgctccaaaactcacctgtcagtcagatggcaactgggatgcagagattcctctctgtaaaccagtcaactgtggacctcctgaagatcttgcccatggtttccctaatggtttttcctttattcatgggggccatatacagtatcagtgctttcctggttataagctccatggaaattcatcaagaaggtgcctctccaatggctcctggagtggcagctcaccttcctgcctgccttgcagatgttccacaccagtaattgaatatggaactgtcaatgggacagattttgactgtggaaaggcagcccggattcagtgcttcaaaggcttcaagctcctaggactttctgaaatcacctgtgaagccgatggccagtggagctctgggttcccccactgtgaacacacttcttgtggttctcttccaatgataccaaatgcgttcatcagtgagaccagctcttggaaggaaaatgtgataacttacagctgcaggtctggatatgtcatacaaggcagttcagatctgatttgtacagagaaaggggtatggagccagccttatccagtctgtgagcccttgtcctgtgggtccccaccgtctgtcgccaatgcagtggcaactggagaggcacacacctatgaaagtgaagtgaaactcagatgtctggaaggttatacgatggatacagatacagatacattcacctgtcagaaagatggtcgctggttccctgagagaatctcctgcagtcctaaaaaatgtcctctcccggaaaacataacacatatacttgtacatggggacgatttcagtgtgaataggcaagtttctgtgtcatgtgcagaagggtatacctttgagggagttaacatatcagtatgtcagcttgatggaacctgggagccaccattctccgatgaatcttgcagtccagtttcttgtgggaaacctgaaagtccagaacatggatttgtggttggcagtaaatacacctttgaaagcacaattatttatcagtgtgagcctggctatgaactagaggggaacagggaacgtgtctgccaggagaacagacagtggagtggaggggtggcaatatgcaaagagaccaggtgtgaaactccacttgaatttctcaatgggaaagctgacattgaaaacaggacgactggacccaacgtggtatattcctgcaacagaggctacagtcttgaagggccatctgaggcacactgcacagaaaatggaacctggagccacccagtccctctctgcaaaccaaatccatgccctgttccttttgtgattcccgagaatgctctgctgtctgaaaaggagttttatgttgatcagaatgtgtccatcaaatgtagggaaggttttctgctgcagggccacggcatcattacctgcaaccccgacgagacgtggacacagacaagcgccaaatgtgaaaaaatctcatgtggtccaccagctcacgtagaaaatgcaattgctcgaggcgtacattatcaatatggagacatgatcacctactcatgttacagtggatacatgttggagggtttcctgaggagtgtttgtttagaaaatggaacatggacatcacctcctatttgcagagctgtctgtcgatttccatgtcagaatgggggcatctgccaacgcccaaatgcttgttcctgtccagagggctggatggggcgcctctgtgaagaaccaatctgcattcttccctgtctgaacggaggtcgctgtgtggccccttaccagtgtgactgcccgcctggctggacggggtctcgctgtcatacagctgtttgccagtctccctgcttaaatggtggaaaatgtgtaagaccaaaccgatgtcactgtctttcttcttggacgggacataactgttccaggaaaaggaggactgggttttaaccactgcacgaccatctggctctcccaaaagcaggatcatctctcctcggtagtgcctgggcatcctggaacttatgcaaagaaagtccaacatggtgctgggtcttgtttagtaaacttgttacttggggttactttttttattttgtgatatattttgttattccttgtgacatactttcttacatgtttccatttttaaatatgcctgtattttctatataaaaattatattaaatagatgctgctctaccctcacaaaatgtacatattctgctgtctattgggaaagttcctggtacacatttttattcagttacttaaaatgatttttccattaaagtatattttgctact

SEQ ID NO: 245889 - DNA, 12194 bp, Artificial Sequence
  derived and/or modified sequence
ccctccggagttcccgagctgctgaggagtctggattgtgtctgtccccagtgtcagatgaaagggcgctgaggctcttggccgctgccccgcgcccagctccgcgcacgcccctctgcgagtccggccgcccagcgcctcttcccgcccgagccgccgcctgcgctccggggcagccgctctgtctccagcgcgatgtggcctcgcctggccttttgttgctggggtctggcgctcgtttcgggctgggcgacctttcagcagatgtccccgtcgcgcaatttcagcttccgcctcttccccgagaccgcgcccggggcccccgggagtatccccgcgccgcccgctcctggcgacgaagcggcggggagcagagtggagcggctgggccaggcgttccggcgacgcgtgcggctgctgcgggagctcagcgagcgcctggagcttgtcttcctggtggatgattcgtccagcgtgggcgaagtcaacttccgcagcgagctcatgttcgtccgcaagctgctgtccgacttccccgtggtgcccacggccacgcgcgtggccatcgtgaccttctcgtccaagaactacgtggtgccgcgcgtcgattacatctccacccgccgcgcgcgccagcacaagtgcgcgctgctcctccaagagatccctgccatctcctaccgaggtggcggcacctacaccaagggcgccttccagcaagccgcgcaaattcttcttcatgctagagaaaactcaacaaaagttgtatttctcatcactgatggatattccaatgggggagaccctagaccaattgcagcgtcactgcgagattcaggagtggagatcttcacttttggcatatggcaagggaacattcgagagctgaatgacatggcttccaccccaaaggaggagcactgttacctgctacacagttttgaagaatttgaggctttagctcgccgggcattgcatgaagatctaccttctgggagttttattcaagatgatatggtccactgctcatatctttgtgatgaaggcaaggactgctgtgaccgaatgggaagctgcaaatgtgggacacacacaggccattttgagtgcatctgtgaaaaggggtattacgggaaaggtctgcagtatgaatgcacagcttgcccatcggggacatacaaacctgaaggctcaccaggaggaatcagcagttgcattccatgtcctgatgaaaatcacacctctccacctggaagcacatcccctgaagactgtgtctgcagagagggatacagggcatctggccagacctgtgaacttgtccactgccctgccctgaagcctcccgaaaatggttactttatccaaaacacttgcaacaaccacttcaatgcagcctgtggggtccgatgtcaccctggatttgatcttgtgggaagcagcatcatcttatgtctacccaatggtttgtggtccggttcagagagctactgcagagtaagaacatgtcctcatctccgccagccgaaacatggccacatcagctgttctacaagggaaatgttatataagacaacatgtttggttgcctgtgatgaagggtacagactagaaggcagtgataagcttacttgtcaaggaaacagccagtgggatgggccagaaccccggtgtgtggagcgccactgttccacctttcagatgcccaaagatgtcatcatatccccccacaactgtggcaagcagccagccaaatttgggacgatctgctatgtaagttgccgccaagggttcattttatctggagtcaaagaaatgctgagatgtaccacttctggaaaatggaatgtcggagttcaggcagctgtgtgtaaagacgtggaggctcctcaaatcaactgtcctaaggacatagaggctaagactctggaacagcaagattctgccaatgttacctggcagattccaacagctaaagacaactctggtgaaaaggtgtcagtccacgttcatccagctttcaccccaccttaccttttcccaattggagatgttgctatcgtatacacggcaactgacctatccggcaaccaggccagctgcattttccatatcaaggttattgatgcagaaccacctgtcatagactggtgcagatctccacctcccgtccaggtctcggagaaggtacatgccgcaagctgggatgagcctcagttctcagacaactcaggggctgaattggtcattaccagaagtcatacacaaggagaccttttccctcaaggggagactatagtacagtatacagccactgacccctcaggcaataacaggacatgtgatatccatattgtcataaaaggttctccctgtgaaattccattcacacctgtaaatggggattttatatgcactccagataatactggagtcaactgtacattaacttgcttggagggctatgatttcacagaagggtctactgacaagtattattgtgcttatgaagatggcgtctggaaaccaacatataccactgaatggccagactgtgccaaaaaacgttttgcaaaccacgggttcaagtcctttgagatgttctacaaagcagctcgttgtgatgacacagatctgatgaagaagttttctgaagcatttgagacgaccctgggaaaaatggtcccatcattttgtagtgatgcagaggacattgactgcagactggaggagaacctgaccaaaaaatattgcctagaatataattatgactatgaaaatggctttgcaattggaccaggtggctggggtgcagctaataggctggattactcttacgatgacttcctggacactgtgcaagaaacagccacaagcatcggcaatgccaagtcctcacggattaaaagaagtgccccattatctgactataaaattaagttaatttttaacatcacagctagtgtgccattacccgatgaaagaaatgatacccttgaatgggaaaatcagcaacgactccttcagacattggaaactatcacaaataaactgaaaaggactctcaacaaagaccccatgtattcctttcagcttgcatcagaaatacttatagccgacagcaattcattagaaacaaaaaaggcttcccccttctgcagaccaggctcagtgctgagagggcgtatgtgtgtcaattgccctttgggaacctattataatctggaacatttcacctgtgaaagctgccggatcggatcctatcaagatgaagaagggcaacttgagtgcaagctttgcccctctgggatgtacacggaatatatccattcaagaaacatctctgattgtaaagctcagtgtaaacaaggcacctactcatacagtggacttgagacttgtgaatcgtgtccactgggcacttatcagccaaaatttggttcccggagctgcctctcgtgtccagaaaacacctcaactgtgaaaagaggagccgtgaacatttctgcatgtggagttccttgtccagaaggaaaattctcgcgttctgggttaatgccctgtcacccatgtcctcgtgactattaccaacctaatgcagggaaggccttctgcctggcctgtcccttttatggaactaccccattcgctggttccagatccatcacagaatgttcaagttttagttcaactttctcagcggcagaggaaagtgtggtgccccctgcctctcttggacatattaaaaagaggcatgaaatcagcagtcaggttttccatgaatgcttctttaacccttgccacaatagtggaacctgccagcaacttgggcgtggttatgtttgtctctgtccacttggatatacaggcttaaagtgtgaaacagacatcgatgagtgcagcccactgccttgcctcaacaatggagtttgtaaagacctagttggggaattcatttgtgagtgcccatcaggttacacaggtcagcggtgtgaagaaaatataaatgagtgtagctccagtccttgtttaaataaaggaatctgtgttgatggtgtggctggctatcgttgcacatgtgtgaaaggatttgtaggcctgcattgtgaaacagaagtcaatgaatgccagtcaaacccatgcttaaataatgcagtctgtgaagaccaggttgggggattcttgtgcaaatgcccacctggatttttgggtacccgatgtggaaagaacgtcgatgagtgtctcagtcagccatgcaaaaatggagctacctgtaaagacggtgccaatagcttcagatgcctgtgtgcagctggcttcacaggatcacactgtgaattgaacatcaatgaatgtcagtctaatccatgtagaaatcaggccacctgtgtggatgaattaaattcatacagttgtaaatgtcagccaggattttcaggcaaaaggtgtgaaacagaacagtctacaggctttaacctggattttgaagtttctggcatctatggatatgtcatgctagatggcatgctcccatctctccatgctctaacctgtaccttctggatgaaatcctctgacgacatgaactatggaacaccaatctcctatgcagttgataacggcagcgacaataccttgctcctgactgattataacggctgggttctttatgtgaatggcagggaaaagataacaaactgtccctcggtgaatgatggcagatggcatcatattgcaatcacttggacaagtgccaatggcatctggaaagtctatatcgatgggaaattatctgacggtggtgctggcctctctgttggtttgcccatacctggtggtggtgcgttagttctggggcaagagcaagacaaaaaaggagagggattcagcccagctgagtcttttgtgggctccataagccagctcaacctctgggactatgtcctgtctccacagcaggtgaagtcactggctacctcctgcccagaggaactcagtaaaggaaacgtgttagcatggcctgatttcttgtcaggaattgtggggaaagtgaagatcgattctaagagcatattttgttctgattgcccacgcttaggagggtcagtgcctcatctgagaactgcatctgaagatttaaagccaggttccaaagtcaatctgttctgtgatccaggcttccagctggtcgggaaccctgtgcagtactgtctgaatcaaggacagtggacacaaccacttcctcactgtgaacgcattagctgtggggtgccacctcctttggagaatggcttccattcagccgatgacttctatgctggcagcacagtaacctaccagtgcaacaatggctactatctattgggtgactcaaggatgttctgtacagataatgggagctggaacggcgtttcaccatcctgccttgatgtcgatgagtgtgcagttggatcagattgtagtgagcatgcttcttgcctgaacgtagatggatcctacatatgttcatgtgtcccaccgtacacaggagatgggaaaaactgtgcagaacctataaaatgtaaggctccaggaaatccggaaaatggccactcctcaggtgagatttatacagtaggtgccgaagtcacattttcgtgtcaggaaggataccagttgatgggagtaaccaaaatcacatgtttggagtctggagaatggaatcatctaataccatattgtaaagctgtttcatgtggtaaaccggctattccagaaaatggttgcattgaggagttagcatttacttttggcagcaaagtgacatataggtgtaataaaggatatactctggccggtgataaagaatcatcctgtcttgctaacagttcttggagtcattcccctcctgtgtgtgaaccagtgaagtgttctagtccggaaaatataaataatggaaaatatattttgagtgggcttacctacctttctactgcatcatattcatgcgatacaggatacagcttacagggcccttccattattgaatgcacggcttctggcatctgggacagagcgccacctgcctgtcacctcgtcttctgtggagaaccacctgccatcaaagatgctgtcattacggggaataacttcactttcaggaacaccgtcacttacacttgcaaagaaggctatactcttgctggtcttgacaccattgaatgcctggccgacggcaagtggagtagaagtgaccagcagtgcctggctgtctcctgtgatgagccacccattgtggaccacgcctctccagagactgcccatcggctctttggagacattgcattctactactgctctgatggttacagcctagcagacaattcccagcttctctgcaatgcccagggcaagtgggtacccccagaaggtcaagacatgccccgttgtatagctcatttctgtgaaaaacctccatcggtttcctatagcatcttggaatctgtgagcaaagcaaaatttgcagctggctcagttgtgagctttaaatgcatggaaggctttgtactgaacacctcagcaaagattgaatgtatgagaggtgggcagtggaacccttcccccatgtccatccagtgcatccctgtgcggtgtggagagccaccaagcatcatgaatggctatgcaagtggatcaaactacagttttggagccatggtggcttacagctgcaacaaggggttctacatcaaaggggaaaagaagagcacctgcgaagccacagggcagtggagtagtcctataccgacgtgccacccggtatcttgtggtgaaccacctaaggttgagaatggctttctggagcatacaactggcaggatctttgagagtgaagtgaggtatcagtgtaacccgggctataagtcagtcggaagtcctgtatttgtctgccaagccaatcgccactggcacagtgaatcccctctgatgtgtgttcctctcgactgtggaaaacctcccccgatccagaatggcttcatgaaaggagaaaactttgaagtagggtccaaggttcagtttttctgtaatgagggttatgagcttgttggtgacagttcttggacatgtcagaaatctggcaaatggaataagaagtcaaatccaaagtgcatgcctgccaagtgcccagagccgcccctcttggaaaaccagctagtattaaaggagttgaccaccgaggtaggagttgtgacattttcctgtaaagaagggcatgtcctgcaaggcccctctgtcctgaaatgcttgccatcccagcaatggaatgactctttccctgtttgtaagattgttctttgtaccccacctcccctaatttcctttggtgtccccattccttcttctgctcttcattttggaagtactgtcaagtattcttgtgtaggtgggtttttcctaagaggaaattctaccaccctctgccaacctgatggcacctggagctctccactgccagaatgtgttccagtagaatgtccccaacctgaggaaatccccaatggaatcattgatgtgcaaggccttgcctatctcagcacagctctctatacctgcaagccaggctttgaattggtgggaaatactaccaccctttgtggagaaaatggtcactggcttggaggaaaaccaacatgtaaagccattgagtgcctgaaacccaaggagattttgaatggcaaattctcttacacggacctacactatggacagaccgttacctactcttgcaaccgaggctttcggctcgaaggtcccagtgccttgacctgtttagagacaggtgattgggatgtagatgccccatcttgcaatgccatccactgtgattccccacaacccattgaaaatggttttgtagaaggtgcagattacagctatggtgccataatcatctacagttgcttccctgggtttcaggtggctggtcatgccatgcagacctgtgaagagtcaggatggtcaagttccatcccaacatgtatgccaatagactgtggcctccctcctcatatagattttggagactgtactaaactcaaagatgaccagggatattttgagcaagaagacgacatgatggaagttccatatgtgactcctcaccctccttatcatttgggagcagtggctaaaacctgggaaaatacaaaggagtctcctgctacacattcatcaaactttctgtatggtaccatggtttcatacacctgtaatccaggatatgaacttctggggaaccctgtgctgatctgccaggaagatggaacttggaatggcagtgcaccatcctgcatttcaattgaatgtgacttgcctactgctcctgaaaatggctttttgcgttttacagagactagcatgggaagtgctgtgcagtatagctgtaaacctggacacattctagcaggctctgacttaaggctttgtctagagaatagaaagtggagtggtgcctccccacgctgtgaagccatttcatgcaaaaagccaaatccagtcatgaatggatccatcaaaggaagcaactacacatacctgagcacgttgtactatgagtgtgaccccggatatgtgctgaatggcactgagaggagaacatgccaggatgacaaaaactgggatgaggatgagcccatttgcattcctgtggactgcagttcacccccagtctcagccaatggccaggtgagaggagacgagtacacattccaaaaagagattgaatacacttgcaatgaagggttcttgcttgagggagccaggagtcgggtttgtcttgccaatggaagttggagtggagccactcccgactgtgtgcctgtcagatgtgccaccccgccacaactggccaatggggtgacggaaggcctggactatggcttcatgaaggaagtaacattccactgtcacgagggctacatcttgcacggtgctccaaaactcacctgtcagtcagatggcaactgggatgcagagattcctctctgtaaaccagtcaactgtggacctcctgaagatcttgcccatggtttccctaatggtttttcctttattcatgggggccatatacagtatcagtgctttcctggttataagctccatggaaattcatcaagaaggtgcctctccaatggctcctggagtggcagctcaccttcctgcctgccttgcagatgttccacaccagtaattgaatatggaactgtcaatgggacagattttgactgtggaaaggcagcccggattcagtgcttcaaaggcttcaagctcctaggactttctgaaatcacctgtgaagccgatggccagtggagctctgggttcccccactgtgaacacacttcttgtggttctcttccaatgataccaaatgcgttcatcagtgagaccagctcttggaaggaaaatgtgataacttacagctgcaggtctggatatgtcatacaaggcagttcagatctgatttgtacagagaaaggggtatggagccagccttatccagtctgtgagcccttgtcctgtgggtccccaccgtctgtcgccaatgcagtggcaactggagaggcacacacctatgaaagtgaagtgaaactcagatgtctggaaggttatacgatggatacagatacagatacattcacctgtcagaaagatggtcgctggttccctgagagaatctcctgcagtcctaaaaaatgtcctctcccggaaaacataacacatatacttgtacatggggacgatttcagtgtgaataggcaagtttctgtgtcatgtgcagaagggtatacctttgagggagttaacatatcagtatgtcagcttgatggaacctgggagccaccattctccgatgaatcttgcagtccagtttcttgtgggaaacctgaaagtccagaacatggatttgtggttggcagtaaatacacctttgaaagcacaattatttatcagtgtgagcctggctatgaactagaggggaacagggaacgtgtctgccaggagaacagacagtggagtggaggggtggcaatatgcaaagagaccaggtgtgaaactccacttgaatttctcaatgggaaagctgacattgaaaacaggacgactggacccaacgtggtatattcctgcaacagaggctacagtcttgaagggccatctgaggcacactgcacagaaaatggaacctggagccacccagtccctctctgcaaaccaaatccatgccctgttccttttgtgattcccgagaatgctctgctgtctgaaaaggagttttatgttgatcagaatgtgtccatcaaatgtagggaaggttttctgctgcagggccacggcatcattacctgcaaccccgacgagacgtggacacagacaagcgccaaatgtgaaaaaatctcatgtggtccaccagctcacgtagaaaatgcaattgctcgaggcgtacattatcaatatggagacatgatcacctactcatgttacagtggatacatgttggagggtttcctgaggagtgtttgtttagaaaatggaacatggacatcacctcctatttgcagagctgtctgtcgatttccatgtcagaatgggggcatctgccaacgcccaaatgcttgttcctgtccagagggctggatggggcgcctctgtgaagaaccaatctgcattcttccctgtctgaacggaggtcgctgtgtggccccttaccagtgtgactgcccgcctggctggacggggtctcgctgtcatacagctgtttgccagtctccctgcttaaatggtggaaaatgtgtaagaccaaaccgatgtcactgtctttcttcttggacgggacataactgttccaggaaaaggaggactgggttttaaccactgcacgaccatctggctctcccaaaagcaggatcatctctcctcggtagtgcctgggcatcctggaacttatgcaaagaaagtccaacatggtgctgggtcttgtttagtaaacttgttacttggggttactttttttattttgtgatatattttgttattccttgtgacatactttcttacatgtttccatttttaaatatgcctgtattttctatataaaaattatattaaatagatgctgctctaccctcacaaaatgtacatattctgctgtctattgggaaagttcctggtacacatttttattcagttacttaaaatgatttttccattaaagtatattttgctactaaataatattttgctggatagtaccattttatgaggtggccaagggattcatagagaggactcatgatctttcatctgtgccactggcaccacataggagaccccttacaataaaggagacccctttgttctggttccatcttctatacaatatgtgtaataataaaagctttttctttcatttaatcaatcagagagtaactgttggacctggtactctccaccacataattatgtcctggtacttagggtagcctggctaattcttttcacaacatttgaaaagccgtaggcattaacttcatggatgtggagaaacagcataatgaccttggttcacaatgaaagtgctagccttctttctcgtggctggaataagaaatgcaagaactggaagattaacaaagagctgatacccggactggtaatcccacaactcactattttgggaggaaggggaagacagggaaagagaaggaaaaaggcaaatgggaaacattccccagagctgtgctcctggtctcacctgcaaaaaagaattgcagccacctaagagaaagctgagctgcccctcagtcctcactgtcacctacctctatcacaacaattgtaccaagatgaagccttccccagacttcagaaaataaagtcaaaccctagattttgttttaaaataggaaactcagaatcaacttgcctccatcctctgggaaaactgctcccacacaggccttggagtgtgttgtagcactgtggaggaatgcagaaaggatgaaagagatcttgattctcctagtggttctcttcactaccgtaggcatccctcagccattgactcctccttctttctcttgacattcactttcttggccagtcttacatgcttatgagtctactttccaataaatttactcatagtccattaa

SEQ ID NO: 245890 - DNA, 12341 bp, Artificial Sequence
  derived and/or modified sequence
agggagagaaggagggaagcgggagatttttcttgactgccccctttccttcaaacattttataggcttcagggagagagaggaggaggagagagggaagaaaaaaagaggagagcgagaggggtagagagcgcgcgccgttccctccggagttcccgagctgctgaggagtctggattgtgtctgtccccagtgtcagatgaaagggcgctgaggctcttggccgctgccccgcgcccagctccgcgcacgcccctctgcgagtccggccgcccagcgcctcttcccgcccgagccgccgcctgcgctccggggcagccgctctgtctccagcgcgatgtggcctcgcctggccttttgttgctggggtctggcgctcgtttcgggctgggcgacctttcagcagatgtccccgtcgcgcaatttcagcttccgcctcttccccgagaccgcgcccggggcccccgggagtatccccgcgccgcccgctcctggcgacgaagcggcggggagcagagtggagcggctgggccaggcgttccggcgacgcgtgcggctgctgcgggagctcagcgagcgcctggagcttgtcttcctggtggatgattcgtccagcgtgggcgaagtcaacttccgcagcgagctcatgttcgtccgcaagctgctgtccgacttccccgtggtgcccacggccacgcgcgtggccatcgtgaccttctcgtccaagaactacgtggtgccgcgcgtcgattacatctccacccgccgcgcgcgccagcacaagtgcgcgctgctcctccaagagatccctgccatctcctaccgaggtggcggcacctacaccaagggcgccttccagcaagccgcgcaaattcttcttcatgctagagaaaactcaacaaaagttgtatttctcatcactgatggatattccaatgggggagaccctagaccaattgcagcgtcactgcgagattcaggagtggagatcttcacttttggcatatggcaagggaacattcgagagctgaatgacatggcttccaccccaaaggaggagcactgttacctgctacacagttttgaagaatttgaggctttagctcgccgggcattgcatgaagatctaccttctgggagttttattcaagatgatatggtccactgctcatatctttgtgatgaaggcaaggactgctgtgaccgaatgggaagctgcaaatgtgggacacacacaggccattttgagtgcatctgtgaaaaggggtattacgggaaaggtctgcagtatgaatgcacagcttgcccatcggggacatacaaacctgaaggctcaccaggaggaatcagcagttgcattccatgtcctgatgaaaatcacacctctccacctggaagcacatcccctgaagactgtgtctgcagagagggatacagggcatctggccagacctgtgaacttgtccactgccctgccctgaagcctcccgaaaatggttactttatccaaaacacttgcaacaaccacttcaatgcagcctgtggggtccgatgtcaccctggatttgatcttgtgggaagcagcatcatcttatgtctacccaatggtttgtggtccggttcagagagctactgcagagtaagaacatgtcctcatctccgccagccgaaacatggccacatcagctgttctacaagggaaatgttatataagacaacatgtttggttgcctgtgatgaagggtacagactagaaggcagtgataagcttacttgtcaaggaaacagccagtgggatgggccagaaccccggtgtgtggagcgccactgttccacctttcagatgcccaaagatgtcatcatatccccccacaactgtggcaagcagccagccaaatttgggacgatctgctatgtaagttgccgccaagggttcattttatctggagtcaaagaaatgctgagatgtaccacttctggaaaatggaatgtcggagttcaggcagctgtgtgtaaagacgtggaggctcctcaaatcaactgtcctaaggacatagaggctaagactctggaacagcaagattctgccaatgttacctggcagattccaacagctaaagacaactctggtgaaaaggtgtcagtccacgttcatccagctttcaccccaccttaccttttcccaattggagatgttgctatcgtatacacggcaactgacctatccggcaaccaggccagctgcattttccatatcaaggttattgatgcagaaccacctgtcatagactggtgcagatctccacctcccgtccaggtctcggagaaggtacatgccgcaagctgggatgagcctcagttctcagacaactcaggggctgaattggtcattaccagaagtcatacacaaggagaccttttccctcaaggggagactatagtacagtatacagccactgacccctcaggcaataacaggacatgtgatatccatattgtcataaaaggttctccctgtgaaattccattcacacctgtaaatggggattttatatgcactccagataatactggagtcaactgtacattaacttgcttggagggctatgatttcacagaagggtctactgacaagtattattgtgcttatgaagatggcgtctggaaaccaacatataccactgaatggccagactgtgccaaaaaacgttttgcaaaccacgggttcaagtcctttgagatgttctacaaagcagctcgttgtgatgacacagatctgatgaagaagttttctgaagcatttgagacgaccctgggaaaaatggtcccatcattttgtagtgatgcagaggacattgactgcagactggaggagaacctgaccaaaaaatattgcctagaatataattatgactatgaaaatggctttgcaattggaccaggtggctggggtgcagctaataggctggattactcttacgatgacttcctggacactgtgcaagaaacagccacaagcatcggcaatgccaagtcctcacggattaaaagaagtgccccattatctgactataaaattaagttaatttttaacatcacagctagtgtgccattacccgatgaaagaaatgatacccttgaatgggaaaatcagcaacgactccttcagacattggaaactatcacaaataaactgaaaaggactctcaacaaagaccccatgtattcctttcagcttgcatcagaaatacttatagccgacagcaattcattagaaacaaaaaaggcttcccccttctgcagaccaggctcagtgctgagagggcgtatgtgtgtcaattgccctttgggaacctattataatctggaacatttcacctgtgaaagctgccggatcggatcctatcaagatgaagaagggcaacttgagtgcaagctttgcccctctgggatgtacacggaatatatccattcaagaaacatctctgattgtaaagctcagtgtaaacaaggcacctactcatacagtggacttgagacttgtgaatcgtgtccactgggcacttatcagccaaaatttggttcccggagctgcctctcgtgtccagaaaacacctcaactgtgaaaagaggagccgtgaacatttctgcatgtggagttccttgtccagaaggaaaattctcgcgttctgggttaatgccctgtcacccatgtcctcgtgactattaccaacctaatgcagggaaggccttctgcctggcctgtcccttttatggaactaccccattcgctggttccagatccatcacagaatgttcaagttttagttcaactttctcagcggcagaggaaagtgtggtgccccctgcctctcttggacatattaaaaagaggcatgaaatcagcagtcaggttttccatgaatgcttctttaacccttgccacaatagtggaacctgccagcaacttgggcgtggttatgtttgtctctgtccacttggatatacaggcttaaagtgtgaaacagacatcgatgagtgcagcccactgccttgcctcaacaatggagtttgtaaagacctagttggggaattcatttgtgagtgcccatcaggttacacaggtcagcggtgtgaagaaaatataaatgagtgtagctccagtccttgtttaaataaaggaatctgtgttgatggtgtggctggctatcgttgcacatgtgtgaaaggatttgtaggcctgcattgtgaaacagaagtcaatgaatgccagtcaaacccatgcttaaataatgcagtctgtgaagaccaggttgggggattcttgtgcaaatgcccacctggatttttgggtacccgatgtggaaagaacgtcgatgagtgtctcagtcagccatgcaaaaatggagctacctgtaaagacggtgccaatagcttcagatgcctgtgtgcagctggcttcacaggatcacactgtgaattgaacatcaatgaatgtcagtctaatccatgtagaaatcaggccacctgtgtggatgaattaaattcatacagttgtaaatgtcagccaggattttcaggcaaaaggtgtgaaacagaacagtctacaggctttaacctggattttgaagtttctggcatctatggatatgtcatgctagatggcatgctcccatctctccatgctctaacctgtaccttctggatgaaatcctctgacgacatgaactatggaacaccaatctcctatgcagttgataacggcagcgacaataccttgctcctgactgattataacggctgggttctttatgtgaatggcagggaaaagataacaaactgtccctcggtgaatgatggcagatggcatcatattgcaatcacttggacaagtgccaatggcatctggaaagtctatatcgatgggaaattatctgacggtggtgctggcctctctgttggtttgcccatacctggtggtggtgcgttagttctggggcaagagcaagacaaaaaaggagagggattcagcccagctgagtcttttgtgggctccataagccagctcaacctctgggactatgtcctgtctccacagcaggtgaagtcactggctacctcctgcccagaggaactcagtaaaggaaacgtgttagcatggcctgatttcttgtcaggaattgtggggaaagtgaagatcgattctaagagcatattttgttctgattgcccacgcttaggagggtcagtgcctcatctgagaactgcatctgaagatttaaagccaggttccaaagtcaatctgttctgtgatccaggcttccagctggtcgggaaccctgtgcagtactgtctgaatcaaggacagtggacacaaccacttcctcactgtgaacgcattagctgtggggtgccacctcctttggagaatggcttccattcagccgatgacttctatgctggcagcacagtaacctaccagtgcaacaatggctactatctattgggtgactcaaggatgttctgtacagataatgggagctggaacggcgtttcaccatcctgccttgatgtcgatgagtgtgcagttggatcagattgtagtgagcatgcttcttgcctgaacgtagatggatcctacatatgttcatgtgtcccaccgtacacaggagatgggaaaaactgtgcagaacctataaaatgtaaggctccaggaaatccggaaaatggccactcctcaggtgagatttatacagtaggtgccgaagtcacattttcgtgtcaggaaggataccagttgatgggagtaaccaaaatcacatgtttggagtctggagaatggaatcatctaataccatattgtaaagctgtttcatgtggtaaaccggctattccagaaaatggttgcattgaggagttagcatttacttttggcagcaaagtgacatataggtgtaataaaggatatactctggccggtgataaagaatcatcctgtcttgctaacagttcttggagtcattcccctcctgtgtgtgaaccagtgaagtgttctagtccggaaaatataaataatggaaaatatattttgagtgggcttacctacctttctactgcatcatattcatgcgatacaggatacagcttacagggcccttccattattgaatgcacggcttctggcatctgggacagagcgccacctgcctgtcacctcgtcttctgtggagaaccacctgccatcaaagatgctgtcattacggggaataacttcactttcaggaacaccgtcacttacacttgcaaagaaggctatactcttgctggtcttgacaccattgaatgcctggccgacggcaagtggagtagaagtgaccagcagtgcctggctgtctcctgtgatgagccacccattgtggaccacgcctctccagagactgcccatcggctctttggagacattgcattctactactgctctgatggttacagcctagcagacaattcccagcttctctgcaatgcccagggcaagtgggtacccccagaaggtcaagacatgccccgttgtatagctcatttctgtgaaaaacctccatcggtttcctatagcatcttggaatctgtgagcaaagcaaaatttgcagctggctcagttgtgagctttaaatgcatggaaggctttgtactgaacacctcagcaaagattgaatgtatgagaggtgggcagtggaacccttcccccatgtccatccagtgcatccctgtgcggtgtggagagccaccaagcatcatgaatggctatgcaagtggatcaaactacagttttggagccatggtggcttacagctgcaacaaggggttctacatcaaaggggaaaagaagagcacctgcgaagccacagggcagtggagtagtcctataccgacgtgccacccggtatcttgtggtgaaccacctaaggttgagaatggctttctggagcatacaactggcaggatctttgagagtgaagtgaggtatcagtgtaacccgggctataagtcagtcggaagtcctgtatttgtctgccaagccaatcgccactggcacagtgaatcccctctgatgtgtgttcctctcgactgtggaaaacctcccccgatccagaatggcttcatgaaaggagaaaactttgaagtagggtccaaggttcagtttttctgtaatgagggttatgagcttgttggtgacagttcttggacatgtcagaaatctggcaaatggaataagaagtcaaatccaaagtgcatgcctgccaagtgcccagagccgcccctcttggaaaaccagctagtattaaaggagttgaccaccgaggtaggagttgtgacattttcctgtaaagaagggcatgtcctgcaaggcccctctgtcctgaaatgcttgccatcccagcaatggaatgactctttccctgtttgtaagattgttctttgtaccccacctcccctaatttcctttggtgtccccattccttcttctgctcttcattttggaagtactgtcaagtattcttgtgtaggtgggtttttcctaagaggaaattctaccaccctctgccaacctgatggcacctggagctctccactgccagaatgtgttccagtagaatgtccccaacctgaggaaatccccaatggaatcattgatgtgcaaggccttgcctatctcagcacagctctctatacctgcaagccaggctttgaattggtgggaaatactaccaccctttgtggagaaaatggtcactggcttggaggaaaaccaacatgtaaagccattgagtgcctgaaacccaaggagattttgaatggcaaattctcttacacggacctacactatggacagaccgttacctactcttgcaaccgaggctttcggctcgaaggtcccagtgccttgacctgtttagagacaggtgattgggatgtagatgccccatcttgcaatgccatccactgtgattccccacaacccattgaaaatggttttgtagaaggtgcagattacagctatggtgccataatcatctacagttgcttccctgggtttcaggtggctggtcatgccatgcagacctgtgaagagtcaggatggtcaagttccatcccaacatgtatgccaatagactgtggcctccctcctcatatagattttggagactgtactaaactcaaagatgaccagggatattttgagcaagaagacgacatgatggaagttccatatgtgactcctcaccctccttatcatttgggagcagtggctaaaacctgggaaaatacaaaggagtctcctgctacacattcatcaaactttctgtatggtaccatggtttcatacacctgtaatccaggatatgaacttctggggaaccctgtgctgatctgccaggaagatggaacttggaatggcagtgcaccatcctgcatttcaattgaatgtgacttgcctactgctcctgaaaatggctttttgcgttttacagagactagcatgggaagtgctgtgcagtatagctgtaaacctggacacattctagcaggctctgacttaaggctttgtctagagaatagaaagtggagtggtgcctccccacgctgtgaagccatttcatgcaaaaagccaaatccagtcatgaatggatccatcaaaggaagcaactacacatacctgagcacgttgtactatgagtgtgaccccggatatgtgctgaatggcactgagaggagaacatgccaggatgacaaaaactgggatgaggatgagcccatttgcattcctgtggactgcagttcacccccagtctcagccaatggccaggtgagaggagacgagtacacattccaaaaagagattgaatacacttgcaatgaagggttcttgcttgagggagccaggagtcgggtttgtcttgccaatggaagttggagtggagccactcccgactgtgtgcctgtcagatgtgccaccccgccacaactggccaatggggtgacggaaggcctggactatggcttcatgaaggaagtaacattccactgtcacgagggctacatcttgcacggtgctccaaaactcacctgtcagtcagatggcaactgggatgcagagattcctctctgtaaaccagtcaactgtggacctcctgaagatcttgcccatggtttccctaatggtttttcctttattcatgggggccatatacagtatcagtgctttcctggttataagctccatggaaattcatcaagaaggtgcctctccaatggctcctggagtggcagctcaccttcctgcctgccttgcagatgttccacaccagtaattgaatatggaactgtcaatgggacagattttgactgtggaaaggcagcccggattcagtgcttcaaaggcttcaagctcctaggactttctgaaatcacctgtgaagccgatggccagtggagctctgggttcccccactgtgaacacacttcttgtggttctcttccaatgataccaaatgcgttcatcagtgagaccagctcttggaaggaaaatgtgataacttacagctgcaggtctggatatgtcatacaaggcagttcagatctgatttgtacagagaaaggggtatggagccagccttatccagtctgtgagcccttgtcctgtgggtccccaccgtctgtcgccaatgcagtggcaactggagaggcacacacctatgaaagtgaagtgaaactcagatgtctggaaggttatacgatggatacagatacagatacattcacctgtcagaaagatggtcgctggttccctgagagaatctcctgcagtcctaaaaaatgtcctctcccggaaaacataacacatatacttgtacatggggacgatttcagtgtgaataggcaagtttctgtgtcatgtgcagaagggtatacctttgagggagttaacatatcagtatgtcagcttgatggaacctgggagccaccattctccgatgaatcttgcagtccagtttcttgtgggaaacctgaaagtccagaacatggatttgtggttggcagtaaatacacctttgaaagcacaattatttatcagtgtgagcctggctatgaactagaggggaacagggaacgtgtctgccaggagaacagacagtggagtggaggggtggcaatatgcaaagagaccaggtgtgaaactccacttgaatttctcaatgggaaagctgacattgaaaacaggacgactggacccaacgtggtatattcctgcaacagaggctacagtcttgaagggccatctgaggcacactgcacagaaaatggaacctggagccacccagtccctctctgcaaaccaaatccatgccctgttccttttgtgattcccgagaatgctctgctgtctgaaaaggagttttatgttgatcagaatgtgtccatcaaatgtagggaaggttttctgctgcagggccacggcatcattacctgcaaccccgacgagacgtggacacagacaagcgccaaatgtgaaaaaatctcatgtggtccaccagctcacgtagaaaatgcaattgctcgaggcgtacattatcaatatggagacatgatcacctactcatgttacagtggatacatgttggagggtttcctgaggagtgtttgtttagaaaatggaacatggacatcacctcctatttgcagagctgtctgtcgatttccatgtcagaatgggggcatctgccaacgcccaaatgcttgttcctgtccagagggctggatggggcgcctctgtgaagaaccaatctgcattcttccctgtctgaacggaggtcgctgtgtggccccttaccagtgtgactgcccgcctggctggacggggtctcgctgtcatacagctgtttgccagtctccctgcttaaatggtggaaaatgtgtaagaccaaaccgatgtcactgtctttcttcttggacgggacataactgttccaggaaaaggaggactgggttttaaccactgcacgaccatctggctctcccaaaagcaggatcatctctcctcggtagtgcctgggcatcctggaacttatgcaaagaaagtccaacatggtgctgggtcttgtttagtaaacttgttacttggggttactttttttattttgtgatatattttgttattccttgtgacatactttcttacatgtttccatttttaaatatgcctgtattttctatataaaaattatattaaatagatgctgctctaccctcacaaaatgtacatattctgctgtctattgggaaagttcctggtacacatttttattcagttacttaaaatgatttttccattaaagtatattttgctactaaataatattttgctggatagtaccattttatgaggtggccaagggattcatagagaggactcatgatctttcatctgtgccactggcaccacataggagaccccttacaataaaggagacccctttgttctggttccatcttctatacaatatgtgtaataataaaagctttttctttcatttaatcaatcagagagtaactgttggacctggtactctccaccacataattatgtcctggtacttagggtagcctggctaattcttttcacaacatttgaaaagccgtaggcattaacttcatggatgtggagaaacagcataatgaccttggttcacaatgaaagtgctagccttctttctcgtggctggaataagaaatgcaagaactggaagattaacaaagagctgatacccggactggtaatcccacaactcactattttgggaggaaggggaagacagggaaagagaaggaaaaaggcaaatgggaaacattccccagagctgtgctcctggtctcacctgcaaaaaagaattgcagccacctaagagaaagctgagctgcccctcagtcctcactgtcacctacctctatcacaacaattgtaccaagatgaagccttccccagacttcagaaaataaagtcaaaccctagattttgttttaaaataggaaactcagaatcaacttgcctccatcctctgggaaaactgctcccacacaggccttggagtgtgttgtagcactgtggaggaatgcagaaaggatgaaagagatcttgattctcctagtggttctcttcactaccgtaggcatccctcagccattgactcctccttctttctcttgacattcactttcttggccagtcttacatgcttatgagtctactttccaataaatttactcatagtccattaacttcc

SEQ ID NO: 245891 - protein, 518 aa, Artificial Sequence
  derived and/or modified sequence
MLCASFLGLGLSVAIVGPTFQDLATNVNRNISSLSFIFVGRALGYLSGSVIGGFLVDVMNYFLLLGISMSATTVGLYLVPFCKTAILLTVMMSIFGVSIGILDTGGNVLILAIWGDKGAPHMQALHFSFALGAFLAPLLAKLALGPTASAENHTESDFHPALNQSSDADSEALFGVPNDKNLLWAYAVIGTYMFLVSVIFFCLFLKNSSKQEKARASAETFRRAKYHNALLCLLFLFFFFYVGAEVTYGSYVFSFATTHAGMKESEAAGLNSIFWGTFAACRGLAIFFATCLQPGTMIVLSNIGSLTSSLFLVLFDKNPICLWIATSVYGASMATTFPSGVSWIEQYTTIHGKSAAFFVIGASLGEMAIPAVIGILQGKYPDLPVVLYTSLGASIATGILFPVLYKLATSPLDRQRKEDRKSEDQKALLSSSGLNEYEEENEEEDAEKWNEMDFEMIETNDTMRHSIIETSRSSLTEPTAEVYNQYPSNALVFESSPFNTGSAHVKHLPETRTKGTNV

SEQ ID NO: 245892 - DNA, 1557 bp, Artificial Sequence
  derived and/or modified sequence
atgctgtgcgccagcttcctgggcctgggcctgagcgtggccatcgtgggccccaccttccaggacctggccaccaacgtgaacagaaacatcagcagcctgagcttcatcttcgtgggcagagccctgggctacctgagcggcagcgtgatcggcggcttcctggtggacgtgatgaactacttcctgctgctgggcatcagcatgagcgccaccaccgtgggcctgtacctggtgcccttctgcaagaccgccatcctgctgaccgtgatgatgagcatcttcggcgtgagcatcggcatcctggacaccggcggcaacgtgctgatcctggccatctggggcgacaagggcgccccccacatgcaggccctgcacttcagcttcgccctgggcgccttcctggcccccctgctggccaagctggccctgggccccaccgccagcgccgagaaccacaccgagagcgacttccaccccgccctgaaccagagcagcgacgccgacagcgaggccctgttcggcgtgcccaacgacaagaacctgctgtgggcctacgccgtgatcggcacctacatgttcctggtgagcgtgatcttcttctgcctgttcctgaagaacagcagcaagcaggagaaggccagagccagcgccgagaccttcagaagagccaagtaccacaacgccctgctgtgcctgctgttcctgttcttcttcttctacgtgggcgccgaggtgacctacggcagctacgtgttcagcttcgccaccacccacgccggcatgaaggagagcgaggccgccggcctgaacagcatcttctggggcaccttcgccgcctgcagaggcctggccatcttcttcgccacctgcctgcagcccggcaccatgatcgtgctgagcaacatcggcagcctgaccagcagcctgttcctggtgctgttcgacaagaaccccatctgcctgtggatcgccaccagcgtgtacggcgccagcatggccaccaccttccccagcggcgtgagctggatcgagcagtacaccaccatccacggcaagagcgccgccttcttcgtgatcggcgccagcctgggcgagatggccatccccgccgtgatcggcatcctgcagggcaagtaccccgacctgcccgtggtgctgtacaccagcctgggcgccagcatcgccaccggcatcctgttccccgtgctgtacaagctggccaccagccccctggacagacagagaaaggaggacagaaagagcgaggaccagaaggccctgctgagcagcagcggcctgaacgagtacgaggaggagaacgaggaggaggacgccgagaagtggaacgagatggacttcgagatgatcgagaccaacgacaccatgagacacagcatcatcgagaccagcagaagcagcctgaccgagcccaccgccgaggtgtacaaccagtaccccagcaacgccctggtgttcgagagcagccccttcaacaccggcagcgcccacgtgaagcacctgcccgagaccagaaccaagggcaccaacgtgtag

SEQ ID NO: 245893 - DNA, 1557 bp, Artificial Sequence
  derived and/or modified sequence
atgctatgtgcctcatttctgggattagggctgagcgtcgctatcgtcgggccgacctttcaggacctcgcgaccaatgtgaataggaacatatcgagtctttcttttatcttcgtgggccgcgccctgggttatctgagcgggtcagtcattggtggttttctcgtagatgtgatgaactatttcctgttgctgggcatttcaatgagcgctaccacagtgggtctctaccttgtccctttttgcaaaactgctatcctgctcactgttatgatgtctatctttggcgttagcatcggaattcttgacaccgggggaaacgtattaatcttggcaatctggggagacaagggcgccccgcatatgcaggccctgcacttttcgtttgccctaggggccttcctggccccactgctggcaaaactggccctaggaccgactgcgagcgctgaaaatcacacagagtcggactttcacccagcactgaatcagtcatctgacgcagactctgaggctctcttcggagttcctaacgataagaatttattgtgggcctatgccgtaataggaacatacatgttcctcgtatctgtgatcttcttctgcctgttcctgaagaattcgtccaaacaggagaaagctagagcctccgctgaaacattccggcgcgctaaatatcacaatgcactgctctgtctcctgtttctgttcttcttcttttatgtcggggccgaagtcacatatggaagctacgttttcagctttgctaccacacatgctggcatgaaggagtcagaggcggccgggctgaactccatcttttggggaactttcgctgcctgcaggggtctggccattttctttgccacgtgcctgcagcccgggactatgatcgtgctgagcaatatcggtagcctgaccagctctctgtttttggttctctttgacaagaaccctatttgcttatggatcgccacctctgtttatggggccagcatggcaaccactttcccgtctggggtctcttggattgagcagtacactaccattcacggaaagagcgccgccttctttgttatcggtgcgtctcttggtgagatggccattcccgccgttatcggcattctccagggtaaatacccagacttgcctgtggtgctctacacatccttgggcgcttctatcgcgacaggcattctcttccccgtgctctataaactggcgacgtccccattggatagacaacgcaaagaggatcgcaaatccgaagatcaaaaggctttactgtcaagtagtggacttaacgagtatgaggaggagaacgaggaggaagacgcggaaaagtggaacgagatggattttgaaatgattgagactaacgacacaatgcgccatagcatcattgagacaagcaggtccagcctgacggagccaacggcagaggtctataaccagtaccctagcaatgccctggttttcgaatcatcccctttcaatacgggctcagcacacgtcaaacaccttcccgaaactagaacaaagggaacgaacgtatag

SEQ ID NO: 245894 - DNA, 5958 bp, Artificial Sequence
  derived and/or modified sequence
gcgtcttttgccacgaacacctgcggcgtgccgaagttcctcttctctgccccggttccgggcggtccgctgggaggtggcgcccggagggacacccgtgcctggggtcggggccagtgctcttctcggagctccagaagttctgctgagaagcgcggcggcagcaagacgacttctccggagccgccgagctggagttagaggtggagctccgtggggccgggcccccggctgcggggcagcggctcctgcaggcggaggccccggcggagaatgagccggagccggaggtggtggtggtctcctggcagagcggtgggaccgggagcaagctgcggtggttcaccaccttgatgctgtgtgcctccttcctggggctgggattgagtgttgctatagtgggacccacgtttcaagatttggcaacaaacgtgaaccgaaatatcagtagtctgtctttcatttttgtgggtcgtgccttgggatatttgagtggctctgtgattggtggatttcttgtcgatgtcatgaattattttttacttttgggaatctcaatgtcggctaccaccgttggtctttatcttgttcctttttgcaagacagcaatattactcactgtcatgatgtctatcttcggtgtttcaattggcattctggatacaggtggtaacgtccttatcttggctatttggggggacaaaggagccccacatatgcaggccttacacttctcttttgccttgggtgcctttttggctccactgctagctaaactggctttgggtccgacagcgtctgctgaaaaccacacagagtctgacttccatcctgcactcaaccaatcatctgatgctgactcagaagctctgtttggagtacctaatgataagaatttactgtgggcttatgctgttatcggtacttacatgttcttagtttctgtcatttttttttgtctgtttttaaagaatagctcaaagcaagaaaaagcaagagcatctgctgagacatttcgaagagcaaaatatcacaacgcccttctttgtctcctttttctgttcttctttttttatgttggagctgaggtaacatatggctcttatgttttctcatttgcaaccacccatgctggcatgaaagaaagtgaagctgctgggttgaactccatcttctgggggacatttgcagcctgcaggggcctggcaatcttttttgctacctgtttacagcctggaaccatgattgtgttgagcaacattggcagcctgacttcatctttatttctggtgctttttgacaagaacccaatttgtctctggatagcaacttcagtgtatggggcttcaatggcaaccacatttccgagtggtgtttcttggattgagcagtacacgaccatccatgggaaatctgcagcattttttgtaattggtgcttccctgggagaaatggctattcctgcagtcattggaattcttcaaggaaaataccctgatttgcctgtagttctgtatacctctttgggagcatcaatagctactggtattttatttcctgtgctatataaattagccacttcacctcttgatcgccagcgaaaagaagacagaaagagtgaggaccagaaagctctgctctctagctccgggctaaatgaatatgaggaagagaatgaagaggaggatgcagaaaaatggaatgaaatggattttgaaatgattgaaacgaatgatacaatgaggcattctataatagagacatctagaagtagtctgacggagcccacagctgaagtctataatcaatacccatcaaatgcactggtgtttgagtcttctccttttaatactggcagtgcccatgtgaagcacttgccagaaaccaggacaaaagggactaacgtttagagaagatggattactcactgacatctttgaataactgccacttctaaggacgccattcagagcagagcattagcagaatttcaccatgctttggggattaaaatttttaggtccatattatagcaaatgctaaaaatttttgaaatgttctgtaattcccagagtcttccataaataaccaaatggtctcatacacgtacaataggatcttgttataacgctatcatttgacatgtgactgattaggaaatattttatggtctccacccctcagagcacccaaagaaggcattgtttttgagaaggggggtattctcagaatgagaccatgtaggagttgaattgattggttgaacaaattatcaggtatcaatatttttccaggaaagttgaggagaatagtttcataaaagagaaatgggccgggtgcagtggctaaagcctgtaatcccagcactttgggaggccgagacgggcagatcacgaggtcaggagatcgagaccatcctggctaacacagtgaaaccctgtctctactaaaaatacaaaaaattagccaggcgtggtggcaggcacctgtagtcccagctacttgggaggctgaggcaggagaatggcgtgaacccgggaggtggagcttgcagtgagccgagatcatgccacaccgtactccagcctgggcgacatctagactccgtctcaaaaaagaaatggagaggtatttttattaattgctttaccttatctgtagggttggatcaaagaatgtaatgactcatttgatttctaatttcaatgaagagaacacagaacagggcccaaggggtcgggcttcaagccttgacttcttctagccctgcactctgtcacttaacgtaggccttgtttatctcgcctcctgatctgtgattctagaaatgaaaatgagatgatttccaaattgggaatctgtaagttttaaagtttgtgcaaaatgtctgctagaaattagtacaagtgacagcatgttcttcatttcaaatgagaagtgaaaccaaaatgataaatagctttaagaatgtgctaatgataaatgattacatgtcaatttaatgtacttaatgtttaataccttatttgaataattacctgaagaatatattttttagtactgcatttcattgattctaagttgcactttttacccccatactgttaacatatctgaaatcagaatgtgtcttacaatcagtgatcgtttaacattgtgacaaagtttaatggacagttttttcccatatgtatatataaaataatgtgttttacaatcagtggcttagattcagtgaaatacagtaattcattcaattatgatagtatctttacagacattttaaaaataagttatttttatatgctaatattctatgttcaagtggaatttggagacactatgttctaattttaagaactgtttcagtgttattagattagtagtagggctgtagatggggtctttcgaggtcctttgcctacctcagtaacagaggctgggtctgagccttgctcgagattagctcttcaccaggtctgtgtggtaatcatatcgtagttaccgtaggtcacgctgcaagtgtaatttacagtgaggcatagtcttttccagtgattggaatacttgtgtcaccgatccagggtttctctttcctgagtctgaaatacctgggaaaccagttagaaggtgactgggtagcctaggagtcaaggatcagaaagggtacttcatatatatgtggcagaattggtgcaggtgatcctttgaaaaatgacaagaattgatgaaattttgtttacttcctccaattttttgctgaataacatctcctttctacctgattggagtaggcttgctttctcttacttaatttctataaatttgccattgttttgtctcaagtaaaatacagtgtctttcttgaccactgcccgcccattcaccttatatgcctgccacagtcttggttcatgtaataacctaacagctttggagatggcggtggagaagttaatggtaaaaaccttcttgctctttttatttttatttatttattaggggtgggggatggtgtctcactctgtcactcaggctggagtgcaatgacgtgatctcagctcactgcaacctctgcctccctggttcaagcgattcttctgcctcggcctcctgagtagctgggattacaggcatgcgccaccatgcccagctaatttttgtgtttttagtagagagggggtttcatcatgttacctaggctgatctcaaactcctgatctcaagtgatctgcccacctcagcctcccaaagtgttgagattacaggcatgagccactgtgcccagcccttttgctctttttatagtgtaaatttccctcagttagaacttggaaattacttctgcttcacttactgccttttctcaggttgttggaatctaggcagtagcagttacttggcagctaggaggcttgctagaataggaattccaccttcagcatttactgttacagggtagaagatgcagctcagggagagaaggatgatgataagaacatggcagaaaatctcaaaatctactctggaaaattcactatgtttccacacaccaacatgtgaatcgtcatgagatcatagggcattgttaaagttccatattggaaggaaaagacttagtacaattctaagaattagcatttatcctgctgatcagttcttagctaagtgtctgctgatacctaagtaaccaatatacccaagtgttctattgctgggtaacacagtaccacacattgaacaccttaaaacaatagacatttggtaatgtctgtacaggctgtactgaagcggcctgtacagggccgcttcagtacaggaccttacctatgtagactgaggtacgtgtttcttgctgactgtcagctgggcaccactcagcttcgagaggcctcccacagttcttgccatgtggccttctcacagatgcctctcacaacatggcagtttcttcaaagcaagcaggagaatctctaaatgagtcttgtatgacattacgtcattatgggaataacatcccatcacctttgccatattctagcgtctagaagcaaggtatgagttccaacaaaactcaagggtagaggctagaacagggatgtgactcattgcggatcaccttagagcatgcctgccacactcgggtacctgcagaatagagattctcaaaagttctaaaaactgagctaagagcaggacatgatggctcacacctgtaatcccagctactcaggaagctggggtggaagtatctcctgaggtcaggagtttgagaccagcctgggcaatatagtgagacctctgtctctaaaaaatttttaaaagagaccccttctctaaaaaacaggaaggctgggcgcggtggctcacacctgtaatcccagcactttgggaggccgaggtgggcggatcacaaggtcaggagatcaagaccatcctggctaacacggtgaaaccccatctctactaaaaatacaaaaaattagccgggcgggcgtggtggcgggtgcctgtagtcccagctactcgggaggctgaggcaggagaatggcgtgaacccaggaggcggagcttgcagtgagccgagatggtgccactgcactccagcctgggtgacagagcgagactgtctcaaaaaaaaaaaacaaaaatattcaactatgagctggggaaaaaagcttcagcggtcactgaaagtgcttacaggtacagctagtatggggatggaatatgccccattagccaggccaacagatctcatataggagaatctgttttatgtttgttggacagtgggtgagttatcgcagagttatgccttttttttctgtcactattttatgtcccttatcactgtgcctttaacctactgaaatgcagttgaggccgggtgcggtggctcacgccaagatggcgccactacactccagcctgggcaacagagggagactccatctc

SEQ ID NO: 245895 - DNA, 1557 bp, Artificial Sequence
  derived and/or modified sequence
atgctgtgtgccagcttcctgggcctgggcctgtctgtggccatcgtgggccccaccttccaggacctggccaccaacgtgaacagaaacatcagcagcctgtccttcatctttgtgggccgggccctgggctacctgagcggctctgtgattggaggcttcctggtggatgtgatgaactacttcctgctgctgggcatctccatgtctgccaccaccgtgggcctgtacctggtgcccttctgcaagacagccatcctgctgactgtgatgatgagcatctttggagtgtccatcggcatcctggacaccggcggcaatgtgctgatcctggccatctggggagacaagggggccccccacatgcaggccctgcacttctcctttgccctgggcgccttcctggcccccctgctggccaagctggccctgggccccacagccagcgctgagaaccacacagaaagtgacttccacccagccctgaaccagagcagtgatgctgacagcgaggccctgtttggagtgcccaatgacaagaacctgctgtgggcctatgctgtgattggcacctacatgttcctggtgtctgtcatcttcttctgcctcttcctgaagaacagcagcaagcaggagaaggcccgggccagcgctgagaccttccggcgggccaagtaccacaatgccctgctgtgcctgctcttcctgttcttcttcttctacgtgggcgctgaggtgacctacggcagctatgtgttctcctttgccaccacccacgccggcatgaaggagagcgaggccgccggcctgaacagcatcttctggggcacctttgctgcctgccggggcctggccatcttctttgccacctgcctgcagcccggcaccatgattgtgctgagcaacatcggcagcctgaccagcagcctcttcctggtgctgtttgacaagaaccccatctgcctgtggatcgccacctctgtgtatggagcctccatggccaccaccttccccagcggcgtgtcctggattgagcagtacaccaccatccacggcaagtctgctgccttcttcgtcatcggggccagcctgggggagatggccatcccagctgtgattggcatcctgcagggcaagtacccagacctgcctgtggtgctgtacaccagcctgggcgccagcatcgccaccggcatcctcttccctgtgctgtacaagctggccaccagccccctggaccggcagaggaaggaggacaggaagtctgaggaccagaaggccctgctgagcagcagcggcctgaatgaatatgaggaggagaatgaggaggaggatgctgagaagtggaatgagatggactttgagatgattgagaccaatgacaccatgaggcacagcatcatcgagaccagccgcagcagcctgacagagcccacagctgaggtgtacaaccagtaccccagcaatgccctggtgtttgagagcagccccttcaacacaggcagcgcccacgtgaagcacctgcctgagaccaggaccaagggcaccaacgtgtag

SEQ ID NO: 245896 - DNA, 1557 bp, Artificial Sequence
  derived and/or modified sequence
atgctgtgcgccagcttcctgggcctgggcctgagcgtggccatcgttgggccaacattccaggatctggcaacgaatgttaaccggaatatttccagcctatctttcatctttgttggcagagccctcgggtacctgtctggaagcgtgattggagggtttctggtcgatgttatgaattacttcctactgttagggatctccatgtccgccaccaccgtaggactctacttggttccattttgtaaaacagccatcttgcttacagtgatgatgtcaattttcggcgtttctatcggtatccttgacacaggtgggaacgtgctgatcctggctatttggggcgataagggagcgcctcatatgcaggctctccattttagcttcgctctgggtgccttcttggctcccctgttagcgaagttggcactgggccctaccgccagcgcagagaaccatacagaatccgatttccaccccgccctgaatcagtcctctgacgcagatagtgaagcgctgttcggcgtcccgaacgataagaacctgctctgggcttacgctgttattgggacctacatgttcttggtgtctgtgatctttttctgtctcttcctgaaaaattccagtaagcaggagaaagcacgggcatccgccgaaacctttcggagggctaaataccataacgcgctactgtgcctgctgtttttgtttttcttcttctatgtgggcgcagaagtgacctacggaagttatgtgttcagtttcgccaccacccatgctggaatgaaagagagtgaagcagccggtctgaactccatattctggggaacttttgcagcctgcagggggctcgccatcttcttcgccacatgcttgcaacccggcaccatgatcgtgctgtctaatattggatcacttacctcatctctatttctggtgttgttcgataaaaaccctatctgcctgtggattgctacgtcagtgtatggcgctagcatggctaccacattcccgtccggcgtctcgtggatcgagcagtacacaacaatccacggtaagagcgctgcgtttttcgtcataggcgcctctctgggggagatggccattccagctgtcattggaatcctacagggcaagtatcctgacttacccgtcgtcctatatacctcattaggggcctcaatagctacgggcattcttttcccggtgttatataagctcgccaccagcccccttgacaggcaaagaaaagaggacagaaagtcggaggaccaaaaggccctgttgtccagctcgggcctcaacgagtatgaggaggagaatgaggaggaggatgcggagaagtggaacgagatggactttgagatgatcgaaaccaacgacaccatgcgacactccatcattgaaacgtcacgatccagcctgactgaacctaccgcggaggtgtacaaccagtacccctctaacgccctggttttcgagagctcccccttcaatacaggttctgcccacgttaagcatctccccgagaccaggacaaaagggaccaatgtctag

SEQ ID NO: 245897 - DNA, 1557 bp, Artificial Sequence
  derived and/or modified sequence
atgctatgcgcaagcttcctcggcctcggacttagtgtagcgattgtcggccctacttttcaagacctcgctaccaatgtgaacagaaatatcagttccctcagcttcatctttgtggggagagccctggggtacctctccggctccgtgattgggggatttctggtggacgttatgaactactttcttctgctcggcatcagtatgagtgcaacaaccgtggggctgtacctggtgccattctgtaaaaccgccatcttacttaccgtgatgatgtcaattttcggagtgagtataggcattctggacacagggggtaacgttctcattctggccatctggggagataagggtgcgccacatatgcaagcattgcatttctcattcgccctgggcgcatttctggcccctctcttggcgaaacttgcactgggacctaccgcctcagcagagaatcatacggagtcggatttccatccagctctaaatcagagttcagacgcagatagtgaagccctgttcggggtaccgaacgacaagaacctgctgtgggcgtacgccgtgatcggaacatatatgttcctcgtctccgtgattttcttttgtctgttcctcaagaactcaagcaagcaggaaaaagccagggctagtgctgaaaccttccgaagagcgaagtatcacaatgcccttctttgtctgctgttcctgttcttcttcttttacgtcggggcagaggtcacatacggaagctacgtattctctttcgcaaccactcatgccggaatgaaagagtcagaggctgccggactgaactccatattctggggcaccttcgcagcatgccgaggactggcaattttctttgctacatgtctgcagcccggaaccatgatcgtgctgtccaatatcggcagtttgaccagcagccttttcttagtgctctttgataaaaaccccatctgcctgtggatcgctacatctgtgtacggcgcttccatggcaactactttcccatcaggagtctcctggatagagcagtacactactattcatggcaaatctgctgccttctttgtaatcggcgcttctctcggagaaatggccatacctgctgtcatcgggatcctgcagggcaagtacccagatctcccagttgttctgtatacatcgctgggcgcatccatcgctacaggcattctgttcccggtactatataaattggctacctcccctctggacaggcagcggaaagaggataggaaaagtgaggatcagaaagctctattatccagcagtgggttgaacgaatacgaagaggagaatgaagaggaagatgccgagaaatggaatgagatggacttcgagatgatcgagaccaacgatacaatgaggcatagcattatagaaacatctagatcatccttgactgagccgactgccgaggtgtataaccagtacccctccaatgccctggttttcgagtcctcgccattcaacactggtagtgcccacgttaaacacctgccagaaacacgtaccaaaggtaccaacgtctag

SEQ ID NO: 245898 - protein, 690 aa, Artificial Sequence [sequence omitted]

SEQ ID NO: 245899 - DNA, 2073 bp, Artificial Sequence
  derived and/or modified sequence
atgggcacaacaagtgatgagatggtttctgtggaacagactagttcctctagtctcaatcctctgtgcttcgaatgcggccagcagcactggacaagagaaaaccatctgtataactaccagaatgaggtggacgatgacctggtgtgccatatctgccttcaaccgttactgcaaccccttgatactccgtgcggccatactttctgctacaagtgccttcgcaatttcctgcaggagaaagacttctgcccactggaccgaaaacgactacactttaaactgtgcaaaaagtcgtcaatccttgtacataaattgctggataaactactggtcttgtgccccttcagcagcgtctgcaaagacgtgatgcaacggtgtgaccttgaggcacacctgaagaacaggtgcccgggagctagccatcgtcgggtggccctcgagcggcggaagacttcccgaacccaggcagaaattgagaacgagaatggacccacactgctggacccggccgggacactttctccggaggcagattgtctcggaaccggagcagtgccagtggagcggcacctaacatccgcttcgctcagtacttggtccgaagaacctggactcgacaatccagcgtttgaggagtctgcaggcgcagacaccactcagcagccgctgtctctgcccgaaggggaaattaccacaattgagatacatagatccaatccttacatccaactcggcatcagcattgtgggtggtaacgaaaccccactgatcaatattgtgatccaggaggtttaccgggacggagtgatcgctcgcgacggacgtttgctggcgggagaccaaattctccaggtgaacaactataacatcagcaatgtatcacataattacgcacgggctgtcctcagccagccctgtaatacgctccatctcacagtgttgcgggagaggcgcttcgggaaccgagcacataaccactccgactctaactccccaagggaggagattttccaagtggctttgcataaacgcgactctggcgagcaactcggcatcaaactggtaaggcgaaccgacgagccaggggttttcatccttgatctcctggagggtggcttggccgcgcaggacggaagactgtcttccaatgacagggtgctcgcaattaacgggcacgatctcaagtatggcaccccggaactggctgcccagattattcaggcctcaggagagcgcgtaaatcttaccatcgcccggccagggaagcctcagccaggtaataccatcagggaggcaggcaatcactccagttctagccagcaccatactccccctccttattactcacgcccttcttcacacaaagatctgactcagtgcgtaacatgtcaggagaagcacatcacggtgaaaaaagagccccacgaatccctaggaatgacagtagccggaggcaggggctcaaaaagtggtgagcttccaatttttgtgacatctgtaccacctcatggctgtctggcgagagacggaaggatcaagcggggtgatgttttactgaatatcaacggaattgacttgaccaacctcagccatagtgaggcagtggcaatgctgaaagcctcagccgcgtccccagccgtcgctctgaaggccctggaagtgcagattgttgaggaggccacacagaatgctgaagaacagccctctacattctccgagaacgaatatgatgcatcttggtccccatcctgggtgatgtggctgggtttaccgagcacattacattcctgccacgacattgtgctccggagaagttacctcgggtcatggggattcagtattgtggggggctacgaggagaaccatacaaaccaacccttcttcatcaaaactattgtgctgggaacacctgcctactacgacggccggctgaagtgcggagatatgattgtggcagtgaacgggctctccactgtggggatgtcacatagcgctctggtgcccatgctcaaggagcagcgaaataaggtgactctcaccgtgatttgctggccaggaagcctggtttag

SEQ ID NO: 245900 - DNA, 2073 bp, Artificial Sequence
  derived and/or modified sequence
atgggcaccaccagtgatgagatggtgtctgtggagcagaccagcagcagcagcctgaaccccctgtgctttgaatgtggccagcagcactggacccgggagaaccacctgtacaactaccagaatgaggtggatgatgacctggtgtgccacatctgcctgcagcccctgctgcagcccctggacaccccctgtggccacaccttctgctacaagtgcctgaggaacttcctgcaggagaaggacttctgccccctggacaggaagaggctgcacttcaagctgtgcaagaagagcagcatcctggtgcacaagctgctggacaagctgctggtgctgtgccccttcagctctgtgtgcaaggatgtgatgcagagatgtgacctggaggcccacctgaagaaccgctgccctggggccagccacagaagagtggccctggagaggaggaagaccagcaggacccaggccgagattgaaaatgaaaatggccccaccctgctggaccctgctggcaccctgagccctgaggccgactgcctgggcactggagctgtgcctgtggagcggcacctgaccagcgccagcctgagcacctggagcgaggagcccggcctggacaacccagcctttgaggagagcgctggagctgacaccacccagcagcccctgagcctgcctgagggggagatcaccaccatcgagatccacaggagcaacccctacatccagctgggcatcagcatcgtgggcggcaatgagacccccctcatcaacatcgtcatccaggaggtgtacagagatggagtgattgccagagatggccgcctgctggccggggaccagatcctgcaggtgaacaactacaacatcagcaatgtgagccacaactatgcccgggctgtgctgagccagccctgcaacaccctgcacctgactgtgctgcgggagcggcgcttcggcaacagagcccacaaccacagcgacagcaacagcccccgggaggagatcttccaggtggccctgcacaagagggacagcggggagcagctgggcatcaagctggtgagaagaacagatgagcccggggtcttcatcctggacctgctggagggcggcctggccgcccaggacggccgcctgagcagcaatgacagagtgctggccatcaatggacatgacctgaagtatggcaccccagagctggccgcccagatcatccaggccagcggggagcgggtgaacctgaccatcgcccggcctgggaagccccagcccggcaacaccatccgggaggccggcaaccacagcagcagcagccagcaccacaccccaccaccctactacagccggcccagcagccacaaggacctgacccagtgtgtgacctgccaggagaagcacatcaccgtgaagaaggagccccatgagagcctgggcatgacagtggccggcggccggggcagcaagtctggagagctgcccatctttgtgacctctgtgcccccccacggctgcctggccagagatggccgcatcaagagaggagatgtgctgctgaacatcaatggaattgacctgaccaacctgagccacagcgaggccgtggccatgctgaaggccagcgctgccagccctgctgtggccctgaaggccctggaggtgcagatcgtggaggaggccacccagaatgctgaggagcagcccagcaccttctctgaaaatgaatatgatgcctcctggagccccagctgggtgatgtggctgggcctgcccagcaccctgcacagctgccacgacatcgtgctgcggcgcagctacctgggctcctggggcttcagcatcgtgggcggctatgaggagaaccacaccaaccagcccttcttcatcaagaccatcgtgctgggcaccccagcctactatgatggccgcctgaagtgtggggacatgattgtggccgtgaatggcctgagcacagtgggcatgagccacagcgccctggtgcccatgctgaaggagcagaggaacaaggtgaccctgaccgtcatctgctggccaggcagcctggtgtag

SEQ ID NO: 245901 - DNA, 4625 bp, Artificial Sequence
  derived and/or modified sequence
gtgcgcggcccgggcagccgcgctttcccaaaaaacacaccttgactttagtcagatacatcactgtctgttaaaggaaaccaagcgtgaagtggaagtctaacacatgaggatacagaattgattcaaaatgggaacaacaagtgatgagatggtgtctgtggaacagacctcctcctcttctctaaaccccctgtgttttgaatgtggccaacagcactggacaagagaaaaccatttgtacaattaccagaatgaagtggatgatgacctagtctgccatatttgccttcaacctctgctgcagccactagacacaccctgtggacatacattctgctacaagtgcctcagaaactttttacaagagaaagatttctgtccgttggaccggaaaagacttcattttaagttgtgcaagaagtctagtattctagttcataaactcctagacaaattattagttttatgtccattttcttcagtgtgcaaagatgtaatgcaacgttgtgatctggaggcacatctcaaaaacagatgtcctggagcttctcatcggagagttgccctggagagaaggaaaactagtagaactcaagcagagattgagaatgaaaatgggcccactctactagatcctgcaggtaccttatctccagaagcagactgtttggggacaggcgcagtgcctgtggagcggcacttgacatcagcgtctctttccacatggagtgaggagcctggccttgacaaccctgcctttgaggagagcgctggagctgacaccacacaacagccacttagtttaccagaaggagaaatcaccacgattgaaattcatcggtccaatccttacattcagttaggaatcagcattgtgggtggcaacgaaacacctttgattaacattgtcatccaggaggtctatcgggatggggtcattgccagagacgggagacttcttgctggagaccagattcttcaggtcaacaactacaatatcagcaatgtgtcccataactatgcccgagctgtcctttcccagccctgcaacacactgcatcttactgtgcttcgagagaggcgctttggcaaccgagcacacaaccattctgatagtaactctccacgagaagagattttccaagtggctcttcataaacgggactctggtgaacagcttggcattaaattggtgcgaaggacagatgagccaggggtttttattcttgacctgttggaaggggggttggctgcccaggacggcaggctaagcagcaatgaccgagtgctggccatcaatgggcacgacctgaagtatggaactccggagcttgctgcccagattattcaggccagtggagagagagtgaatttaacaattgctagaccagggaaaccccagcctggtaacaccattagagaagcaggaaatcatagcagcagcagccagcaccacacaccaccaccgtattatagcagaccaagctcacataaggatcttactcagtgtgttacatgccaagaaaaacacattactgtaaagaaggaaccacatgaatcccttggcatgaccgttgctgggggcaggggaagtaagagtggtgagctgcccatctttgtgaccagtgtgccaccccatggctgccttgcacgagatggcagaataaagagaggtgatgtgttgctaaatatcaacggcattgatttgaccaatttaagtcacagtgaggcagttgcaatgctgaaagccagtgccgcgtcccctgctgttgcccttaaagcacttgaggtccagattgttgaggaggcgactcagaacgcggaggagcagccgagtactttcagcgaaaatgagtatgatgccagttggtccccatcatgggtcatgtggcttgggcttcccagcacacttcatagctgccacgatatagttttacgaagaagttacttgggaagttggggctttagtatcgttggtggatatgaagagaaccacaccaatcagccttttttcattaaaactattgtcttgggaactcctgcttattatgatggaagattaaagtgtggtgacatgattgtggccgtaaatgggctgtcaaccgtgggcatgagccactctgcactagttcccatgttgaaggagcagaggaacaaagtcactctgaccgttatttgttggcctggcagccttgtatagattttggaaattggtttcaaatcttgcatcttccttttttagatttttgaaagaaaaccctttggtttcattgtgtttgtggtttaggagctgctgacactgctggtatacacagggccaaaacccactaagattgtccgtttatgtttatttaaatggtttcctaagttagttacatttcttttagcttggaaacagtcttccactaacctttgtgagtttatattttcagaattcagacttagttgttaaaatgttacctatggtaatgagcaaagctcacccaaactgtgccccagatggagtaaagaccttctggtgggtctttgttttcagtaactgaatcatagaacgagttctgtatccctcaggcctgatgtcagcaaagccagtaacaacagcgtgtactgccactgtcataaccaataccatgaatgaatatactttaaattttggtgataactgttccccatttttttttgaaccacagtctcactctcacccaggctggagtgcagtggcacaatctcagctcactgcaagctccgcctcctgggttcacgccattctcccacctcagcctcccgagtagctgggactacaggcgtgtgccaccatgcccagctaattttttgtacttttagtagagacggggtttcaccgtgttagccaggatggtctcgatctcctgaccttgtgatctgcccgcctcagcctcccaaagtgctgggattacaggtgtgagctgccgcacccggccgttcccattttttattggtgccaacatttcaaaacttcatactgtttataaactgattttctggtttatttctactgtaatctctcaatattcatagaagatgaagaaataagtctgacaacactaaagaaatttcttaatatactattattagaatagtagaggataaaagataatgttatccagttacaaaggaatttggatgataattataacttaatgttagagatggtaaagctgcacttacttgaacagcccaaaagcattaaaaatctatttccagaggaatgttttgctatgtagggaaattttgaagtagtttttgctaaaaaattatttctagagttgtgttattcttagcagtaatcttggctagaaatgtttttgtgatttatgcgattaaacgaaatgataaagataaaaccatattattaaatacctatatatcacagctaagtaggagaaagggagacctttttattttgttcaggtaggagtatttcttgtgtattttagaaacaattatttttcccattatttcttatgagattagttgtttcaagtaggagacagaaaagttctgttttgttggaaatgtaggttttagatgtatctttcagtcagctctcagtcactagactatttcatattttttgaaatgtttttgaaaattatgactagcccattttttgtcctttattcaacatacttatcctctgaacacataaataagtgaataagataaaaatatctttaccttattaatattatacatacttgaaaaaaatttcatttagaaacctagttcagaatctgagcaaatttacaagtgacctctgtaataaatggtattgataatcagagaatgtatttcagaatactacagtacaatatattatgaagcatgaccactttattttgaaacttagcaattgtattgctggggtttattgtatctgtagcatgtcactgattatttcagttagttttataatgatttttaaaaaacatatctatttggaataagatacagcaacaatcattgctactgacttgttcaaccccttagttacactgtatgatcaacatataacaagatacagtggaatggcccatacagtatattactgttgtgtgatgattggctttggaagcagtttgattttgaaatgctttgatattctaattgacatggaacaagttttttccctgctccccaaatagaattttgtaaccaactttgctatttttttaaagtttgtaagaatgtgtcatttcttggggagtagccatccatcaacaaatatcctgactgctactttgttatatacaaaatacttacattgaacctggtggcataatgagtattttgaaagaagaaatttcttcactctcatttttatagaaatcttggaatcagcttaagctgtagcttttatgacaaaagacagtcatttttggtcagagtgatatttggtgacggaaacttgttcataatttattgttactatagaactatttggattttctcatttttagttctgatagttaaatattttggtttgttctgtgccttcagtttaaattatttcaggatttttcagatgtttaaataatggtgtgaatcattcaggatggaaataaaagtcatcctttctgtaa

SEQ ID NO: 245902 - DNA, 2073 bp, Artificial Sequence
  derived and/or modified sequence
atgggcaccaccagcgacgagatggtgagcgtggagcagaccagcagttcttccttaaacccactgtgttttgagtgcgggcaacagcactggactagggagaaccacctctataattaccaaaacgaagttgatgatgacctggtctgtcatatctgtctacagcctctattgcaacccttggacacaccgtgcggacataccttttgttataaatgccttcgtaattttctacaggagaaggatttctgtcctctggacagaaaacggctgcacttcaagctctgtaagaagagttccatcctcgtgcataagcttcttgacaaactgctggtgctctgtcctttcagctcagtgtgtaaggatgtgatgcaacgctgtgatctcgaggcccacctcaagaataggtgtccaggcgcttcccatcggagagtggcactggaacgtaggaagaccagtaggactcaagccgagatcgagaacgagaatgggccaacactcctggacccagctggaaccctgagtcctgaagccgactgcttgggcaccggcgctgtgcccgtggaacggcacctgacatctgcatccctctcaacctggtccgaggaacctgggctagataatccagcattcgaggaatcagctggcgcagacactacacagcaacccctctcactgccagagggcgaaattacaacaatcgaaatacacaggagcaatccttacattcagctcggcatctccatcgtaggcggtaatgaaacacccctaattaacatcgtaattcaggaggtgtaccgggacggtgtcatagcaagagatggacgcctgctggccggagatcagatcctccaggtaaacaattacaatatcagcaacgtgtcccataattatgcccgcgctgtcctctcacaaccatgcaatactctgcatctaactgtcctgcgagagagacgctttggcaacagagcccataatcatagcgactcgaatagtcctagggaggagatcttccaagtcgccttacacaagagggactctggggagcagctggggattaagctcgtcagacgcaccgatgaacccggggtgttcatcctcgatctcctggagggcggactagccgcccaggacggccgtctgagcagcaacgatagggtgttagcaattaacggtcatgatttgaagtacggcacaccggaactagcagcgcagataatccaggcatccggcgagcgggtgaatttgaccatcgcccgaccaggaaagcctcagcctgggaataccattcgggaagctgggaaccattcaagttccagccaacatcatacaccacccccatactattcaaggccatcctctcacaaagacctgacccagtgtgtgacatgccaagagaagcacattacagtgaaaaaagagccacatgagagcctcggtatgacggtggcgggtggacggggtagcaagagtggagagctgcctatctttgtgacatccgtgccgcctcacgggtgtcttgccagggacggtaggatcaagaggggtgacgtcctgctaaatataaacggaatagacctgactaacctcagccatagcgaagcggtggccatgcttaaggccagcgccgcctcacccgctgttgctttgaaggctctcgaggtgcagatagtggaggaagcgacacagaatgcagaggagcaaccctctacattctcggaaaatgaatacgacgcaagctggagccccagttgggtgatgtggctaggcctcccttccaccctccatagttgccatgacatcgtgctcagacgctcatacttgggcagttgggggtttagcatagtgggcgggtatgaggaaaaccacacaaaccagcctttcttcatcaagactatcgtcctcgggaccccagcatattatgacggacgtctgaagtgtggcgatatgattgtggctgttaacgggctgtcaaccgtaggaatgagccattccgctctagtaccgatgctgaaggagcagcgcaataaggttactcttacagtcatctgctggcccggcagcctcgtgtag

SEQ ID NO: 245903 - DNA, 2073 bp, Artificial Sequence
  derived and/or modified sequence
atgggaacaacatcagatgagatggtgtccgtcgagcagacgtctagcagttccctaaaccccctctgttttgagtgcgggcagcaacattggactcgggagaatcatctgtacaactatcagaacgaagtggatgatgatctcgtgtgtcacatctgtctgcaaccactgttgcagcctctggacaccccctgtggccacaccttctgttataaatgtcttcggaacttcttacaagagaaggacttctgccctctagataggaaacgcctgcacttcaagctgtgcaagaaatcctccatcctcgtgcacaagctcctggataagctgctggtcctgtgtccattctcttccgtgtgcaaagatgtcatgcagagatgcgatctggaggcccacttaaagaaccggtgtcctggtgcgtctcacagacgtgttgcattagagcgcaggaaaacctccagaacacaggcagagatagaaaatgagaacgggccaaccctgcttgacccagcagggacactgagccctgaggcagactgtctgggtactggggcagtgcccgtggaacggcaccttaccagcgccagtttgtctacctggagtgaggagccgggactcgacaatccagcattcgaagagtcagccggagccgataccacacagcagcccctgagtctgccagagggagaaataaccacaatcgagatccatagatctaacccctatattcagttaggcatttctatagttggcggaaatgaaactcccctgatcaatatcgttatccaagaggtctaccgcgatggcgtgatcgctcgggatggcagacttctggctggggaccagatcctgcaggttaataattataacatctctaatgtgtcccataactatgcacgagctgtgttatctcagccatgcaatacactgcacctgaccgtgttaagggagcgcagatttgggaatagggctcataatcactcagacagtaattctccccgtgaggaaatcttccaggtggcactgcacaagagggattctggagagcagctggggatcaagcttgtccggaggacagatgaaccaggagtgtttattctggaccttctcgaggggggactcgccgctcaagacgggagactgtctagtaacgaccgagtgctggcaattaatggtcatgaccttaagtatggcacccctgaactcgccgcacagatcatacaggcttccggtgaacgagtgaatctgactatagccagacccggaaagccacaaccaggcaatactatacgcgaagctggaaatcattcctcttctagccagcatcataccccaccaccctactacagtcgcccttctagccacaaggacttgacgcagtgtgtgacctgtcaagaaaagcacattaccgttaaaaaggaaccccacgaaagtctgggcatgaccgtagcgggtgggaggggttctaaaagcggtgagctgcctatatttgtgacgtctgtacctcctcacggctgtcttgcccgtgatgggcgtatcaagcggggagatgtgctgctgaatatcaatgggattgatctgaccaatctttctcactccgaagcggtggctatgttgaaggcatctgctgcttctccagccgtggcattaaaggccctggaagtgcaaattgtagaggaggccacgcagaatgccgaagagcagccatcgacgtttagcgagaacgagtacgacgcttcatggagtccatcgtgggttatgtggctgggtttgccgtccacattacattcctgccacgacatcgtgctaaggcggagttatctgggtagctggggattttctattgtcggcggatatgaggaaaatcacactaatcagccattcttcattaagacaattgtgctgggaacccctgcatactatgacggcaggttgaaatgcggcgatatgatcgttgcagtgaacgggctgagcaccgtgggtatgagccacagcgccttggttccgatgctcaaggaacaaagaaataaggtcaccttgactgtaatctgctggccagggtcgctcgtctag

SEQ ID NO: 245904 - DNA, 2073 bp, Artificial Sequence
  derived and/or modified sequence
atgggcaccaccagcgacgagatggtgagcgtggagcagaccagcagcagcagcctgaaccccctgtgcttcgagtgcggccagcagcactggaccagagagaaccacctgtacaactaccagaacgaggtggacgacgacctggtgtgccacatctgcctgcagcccctgctgcagcccctggacaccccctgcggccacaccttctgctacaagtgcctgagaaacttcctgcaggagaaggacttctgccccctggacagaaagagactgcacttcaagctgtgcaagaagagcagcatcctggtgcacaagctgctggacaagctgctggtgctgtgccccttcagcagcgtgtgcaaggacgtgatgcagagatgcgacctggaggcccacctgaagaacagatgccccggcgccagccacagaagagtggccctggagagaagaaagaccagcagaacccaggccgagatcgagaacgagaacggccccaccctgctggaccccgccggcaccctgagccccgaggccgactgcctgggcaccggcgccgtgcccgtggagagacacctgaccagcgccagcctgagcacctggagcgaggagcccggcctggacaaccccgccttcgaggagagcgccggcgccgacaccacccagcagcccctgagcctgcccgagggcgagatcaccaccatcgagatccacagaagcaacccctacatccagctgggcatcagcatcgtgggcggcaacgagacccccctgatcaacatcgtgatccaggaggtgtacagagacggcgtgatcgccagagacggcagactgctggccggcgaccagatcctgcaggtgaacaactacaacatcagcaacgtgagccacaactacgccagagccgtgctgagccagccctgcaacaccctgcacctgaccgtgctgagagagagaagattcggcaacagagcccacaaccacagcgacagcaacagccccagagaggagatcttccaggtggccctgcacaagagagacagcggcgagcagctgggcatcaagctggtgagaagaaccgacgagcccggcgtgttcatcctggacctgctggagggcggcctggccgcccaggacggcagactgagcagcaacgacagagtgctggccatcaacggccacgacctgaagtacggcacccccgagctggccgcccagatcatccaggccagcggcgagagagtgaacctgaccatcgccagacccggcaagccccagcccggcaacaccatcagagaggccggcaaccacagcagcagcagccagcaccacaccccccccccctactacagcagacccagcagccacaaggacctgacccagtgcgtgacctgccaggagaagcacatcaccgtgaagaaggagccccacgagagcctgggcatgaccgtggccggcggcagaggcagcaagagcggcgagctgcccatcttcgtgaccagcgtgcccccccacggctgcctggccagagacggcagaatcaagagaggcgacgtgctgctgaacatcaacggcatcgacctgaccaacctgagccacagcgaggccgtggccatgctgaaggccagcgccgccagccccgccgtggccctgaaggccctggaggtgcagatcgtggaggaggccacccagaacgccgaggagcagcccagcaccttcagcgagaacgagtacgacgccagctggagccccagctgggtgatgtggctgggcctgcccagcaccctgcacagctgccacgacatcgtgctgagaagaagctacctgggcagctggggcttcagcatcgtgggcggctacgaggagaaccacaccaaccagcccttcttcatcaagaccatcgtgctgggcacccccgcctactacgacggcagactgaagtgcggcgacatgatcgtggccgtgaacggcctgagcaccgtgggcatgagccacagcgccctggtgcccatgctgaaggagcagagaaacaaggtgaccctgaccgtgatctgctggcccggcagcctggtgtag

SEQ ID NO: 245905 - protein, 450 aa, Artificial Sequence
  derived and/or modified sequence
MAADQRPKADTLALRQRLISSSCRLFFPEDPVKIVRAQGQYMYDEQGAEYIDCISNVAHVGHCHPLVVQAAHEQNQVLNTNSRYLHDNIVDYAQRLSETLPEQLCVFYFLNSGSEANDLALRLARHYTGHQDVVVLDHAYHGHLSSLIDISPYKFRNLDGQKEWVHVAPLPDTYRGPYREDHPNPAMAYANEVKRVVSSAQEKGRKIAAFFAESLPSVGGQIIPPAGYFSQVAEHIRKAGGVFVADEIQVGFGRVGKHFWAFQLQGKDFVPDIVTMGKSIGNGHPVACVAATQPVARAFEATGVEYFNTFGGSPVSCAVGLAVLNVLEKEQLQDHATSVGSFLMQLLGQQKIKHPIVGDVRGVGLFIGVDLIKDEATRTPATEEAAYLVSRLKENYVLLSTDGPGRNILKFKPPMCFSLDNARQVVAKLDAILTDMEEKVRSCETLRLQP

SEQ ID NO: 245906 - DNA, 1353 bp, Artificial Sequence
  derived and/or modified sequence
atggccgccgaccagagacccaaggccgacaccctggccctgagacagagactgatcagcagcagctgcagactgttcttccccgaggaccccgtgaagatcgtgagagcccagggccagtacatgtacgacgagcagggcgccgagtacatcgactgcatcagcaacgtggcccacgtgggccactgccaccccctggtggtgcaggccgcccacgagcagaaccaggtgctgaacaccaacagcagatacctgcacgacaacatcgtggactacgcccagagactgagcgagaccctgcccgagcagctgtgcgtgttctacttcctgaacagcggcagcgaggccaacgacctggccctgagactggccagacactacaccggccaccaggacgtggtggtgctggaccacgcctaccacggccacctgagcagcctgatcgacatcagcccctacaagttcagaaacctggacggccagaaggagtgggtgcacgtggcccccctgcccgacacctacagaggcccctacagagaggaccaccccaaccccgccatggcctacgccaacgaggtgaagagagtggtgagcagcgcccaggagaagggcagaaagatcgccgccttcttcgccgagagcctgcccagcgtgggcggccagatcatcccccccgccggctacttcagccaggtggccgagcacatcagaaaggccggcggcgtgttcgtggccgacgagatccaggtgggcttcggcagagtgggcaagcacttctgggccttccagctgcagggcaaggacttcgtgcccgacatcgtgaccatgggcaagagcatcggcaacggccaccccgtggcctgcgtggccgccacccagcccgtggccagagccttcgaggccaccggcgtggagtacttcaacaccttcggcggcagccccgtgagctgcgccgtgggcctggccgtgctgaacgtgctggagaaggagcagctgcaggaccacgccaccagcgtgggcagcttcctgatgcagctgctgggccagcagaagatcaagcaccccatcgtgggcgacgtgagaggcgtgggcctgttcatcggcgtggacctgatcaaggacgaggccaccagaacccccgccaccgaggaggccgcctacctggtgagcagactgaaggagaactacgtgctgctgagcaccgacggccccggcagaaacatcctgaagttcaagccccccatgtgcttcagcctggacaacgccagacaggtggtggccaagctggacgccatcctgaccgacatggaggagaaggtgagaagctgcgagaccctgagactgcagccctag

SEQ ID NO: 245907 - DNA, 1353 bp, Artificial Sequence
  derived and/or modified sequence
atggctgctgaccagaggccaaaagcggatacgctggccttacgtcaacgcctcatttcgagttcctgccggctcttcttccccgaggaccccgttaaaattgtcagagcccagggtcagtatatgtacgacgaacagggcgcggaatacattgactgcatttcaaatgtggcccacgtggggcactgccacccacttgtcgtgcaggccgctcacgagcagaaccaggtgctgaacaccaacagcagatacctgcatgataacatcgtggactacgcccagcgcttgagtgagaccctgccagaacagctgtgcgtattttacttccttaactcagggtcagaagcaaatgacctggcactgcgcctagctaggcactacacaggccatcaagatgtagtcgtgctggaccatgcgtaccacgggcatctgtcctctttgattgatattagcccctataaattccgcaaccttgatggtcagaaggagtgggtacatgtcgcaccactgccagacacatacagaggaccttacagagaggaccaccccaatcccgccatggcttatgctaacgaggtaaaacgagtcgtgagcagtgcccaggagaaagggcgtaagatcgctgctttctttgcggaaagcctcccctccgttgggggccaaattattcccccagctgggtatttttctcaggtggctgagcacatcaggaaagcagggggggtgttcgtggccgacgaaatccaagtcgggttcggcagggtaggaaaacacttttgggcatttcaactgcaagggaaagatttcgtcccagatatcgtcactatgggcaagagtatcggcaatggacatcctgtcgcgtgcgttgcagcaacacagccagtggccagggcattcgaggccacaggtgtggagtacttcaacacatttggcggctctcccgtatcctgcgccgtgggattagcggtgctgaacgtgctcgaaaaagagcagctccaggaccatgctacttctgtgggttccttcttgatgcagctgttaggccagcagaagatcaagcatcctattgtcggcgatgtccgtggggttggtctgtttataggggttgatctcatcaaagacgaggccaccagaaccccagcgaccgaggaggcagcctatctcgtgtctcgactcaaagaaaactatgtactcctgtctactgacggcccagggcgtaacattctgaaatttaagccacccatgtgcttttccctggataacgccagacaagtcgtcgcgaagcttgacgctatcctgacagacatggaagaaaaggtgagatcctgtgagacactccgcctgcagccctag

SEQ ID NO: 245908 - DNA, 1353 bp, Artificial Sequence
  derived and/or modified sequence
atggctgctgaccagaggcccaaggctgacaccctggccctgcggcagaggctcatcagcagcagctgccgcctcttcttcccagaagatcctgtgaagatcgtgcgggcccagggccagtacatgtatgatgagcagggcgctgagtacatcgactgcatcagcaatgtggcccacgtgggccactgccaccccctggtggtgcaggccgcccacgagcagaaccaggtgctgaacaccaacagccgctacctgcatgacaacatcgtggactatgcccagaggctgtctgagaccctgcctgagcagctgtgtgtgttctacttcctgaacagcggcagcgaggccaatgacctggccctgcggctggcccggcactacacaggccaccaggatgtggtggtgctggaccacgcctaccacggccacctgagcagcctgattgacatcagcccctacaagttcaggaacctggatggccagaaggagtgggtgcacgtggcccccctgcctgacacctaccggggcccctaccgggaggaccaccccaacccagccatggcctatgccaatgaggtgaagagggtggtgtcctctgcccaggagaagggcaggaagattgctgccttctttgctgagagcctgcccagcgtgggcggccagatcatccccccagctggctacttcagccaggtggccgagcacatcaggaaggccggcggcgtgtttgtggctgatgagatccaggtgggcttcggccgggtgggcaagcacttctgggccttccagctgcagggcaaggactttgtgcctgacatcgtgaccatgggcaagagcattggaaatggccaccctgtggcctgtgtggccgccacccagcctgtggcccgggcctttgaggccaccggggtggagtacttcaacaccttcggcggcagccctgtgtcctgtgctgtgggcctggccgtgctgaatgtgctggagaaggagcagctgcaggaccacgccacctctgtgggcagcttcctgatgcagctgctgggccagcagaagatcaagcaccccatcgtgggagatgtgcggggcgtgggcctcttcatcggcgtggacctgatcaaggatgaggccaccaggaccccagccacagaggaggccgcctacctggtgtcccggctgaaggagaactacgtgctgctgagcacagatggccctggcaggaacatcctgaagttcaagccacccatgtgcttcagcctggacaatgcccggcaggtggtggccaagctggatgccatcctgacagacatggaggagaaggtgcgcagctgtgagaccctgcggctgcagccctag

SEQ ID NO: 245909 - DNA, 2038 bp, Artificial Sequence
  derived and/or modified sequence
agttcctgcgcgggactgccaaggcacgaccacgggccggaaggctgccaggcccagtgggcaagcgaagaaatgaaccaccgcaacgcgggcgcttcggggcggggccgagtgcgaacctgagccccaaatcccgacccaggcaggggcggggcccggagcggggccttggaggcccagcccgcgcggcgacgtctccgcgtggcgtcacggcaccgactgacggccacccaccatggccgcagaccagcgcccgaaggccgacacgctggccctgaggcaacggctcatcagctcttcctgcagactcttttttcccgaggatcctgttaagattgtccgggcccaagggcagtacatgtacgatgaacagggggcagaatacatcgattgcatcagcaatgtggcgcacgttgggcactgccaccctctcgtggtccaagcagcacatgagcagaaccaggtgctcaacaccaacagccggtacctgcatgacaacatcgtggactatgcgcagaggctgtcagagaccctgccggagcagctctgtgtgttctatttcctgaattctgggtcagaagccaatgacctggccctgaggctggctcgccactacacgggacaccaggacgtggtggtattagatcatgcgtatcacggccacctgagctccctgattgacatcagtccctacaagttccgcaacctggatggccagaaggagtgggtccacgtggcacctctcccagacacctaccggggcccctaccgggaggaccaccccaacccagctatggcctatgccaacgaggtgaaacgtgtggtcagcagtgcacaggagaagggcaggaagattgcagccttcttcgctgagtctctgcccagtgtgggagggcagatcattccccctgctggctacttctcccaagtggcagagcacatccgcaaggccggaggggtctttgttgcagatgagatccaggttggctttggccgggtaggcaagcacttctgggccttccagctccagggaaaagacttcgtccctgacatcgtcaccatgggcaagtccattggcaacggccaccctgttgcctgcgtggccgcaacccagcctgtggcgagggcatttgaagccaccggcgttgagtacttcaacacgtttgggggcagcccagtgtcctgcgctgtggggctggccgtcctgaatgtcttggagaaggagcagctccaggatcatgccaccagtgtaggcagcttcctgatgcagctcctcgggcagcaaaaaatcaaacatcccatcgtcggggatgtcaggggtgttgggctcttcattggtgtggatctgatcaaagatgaggccacaaggacaccagcaactgaagaggctgcctacttggtatcaaggctgaaggagaactacgttttgctgagcactgatggccctgggaggaacatcctgaagtttaagcccccaatgtgcttcagcctggacaatgcacggcaggtggtggcaaagctggatgccattctgactgacatggaagagaaggtgagaagttgtgaaacgctgaggctccagccctaagccagccctgctctgcctaagtgtactccagaagaaactcatctcatccaaatacacgctattgagaaggcgagcctgacctccctcttacagataaagtcagctttcagaggctcagggtgggggggcctgcccgaggccataatgctacccaccccctcctcctaaccactggtctgttggaataacccagatgtctgcatcccctcaagtcagtcaatttcctttctgtccactgggggtggaatggggtagggtgggatactttaaagtgctcctgcttaaataaattagaccagaccagtgtatttctaaagaaaatcctgacatgcacacccattaaaaatagtacattttacagtgtcccagtcatacttttaattggcaaattaaaataatgcaatctgatatattctatcctactaaattaaaaatactgaatataaccaa

SEQ ID NO: 245910 - DNA, 1353 bp, Artificial Sequence
  derived and/or modified sequence
atggccgccgaccagcggcccaaggccgacaccctggccctgcggcagagacttatctcaagttcctgccggctcttttttccagaagaccctgtgaaaatcgttcgcgcccagggacaatatatgtatgatgagcagggagctgagtatatcgattgtataagcaatgttgctcacgttggtcactgtcatccgctcgtggtacaggcagctcacgagcagaaccaggttctgaacacaaactcgcggtacttgcacgacaatatcgtggactatgcacagcgcctgtcggagaccttacctgaacaactctgtgtgttctacttcttgaactccggaagcgaggccaacgatctggccctgaggctcgcccggcactatactggacaccaagatgtagtggtcctggatcacgcctaccatggacacctgtcctctctcatcgatatcagcccttacaagttccggaacctggacggccagaaagagtgggtgcatgtcgcccccctcccagatacgtatcggggcccatatcgggaagatcatccaaaccccgccatggcatatgcgaacgaggttaaaagagtagtgtctagtgcccaagagaaaggtagaaaaatagcagcatttttcgcagagtctctgcccagcgtggggggccagatcataccgcccgccggctacttctctcaggtggccgagcacattcgcaaggcagggggggtgttcgtcgcggatgaaatccaggtgggcttcggccgcgtgggcaagcacttttgggcctttcagctccagggcaaggatttcgtccccgatatagtgacgatgggcaaaagcatcggaaatggccaccccgtggcctgcgttgctgccacacaaccagtggcacgcgcatttgaggccaccggtgtggaatatttcaacaccttcgggggttcccctgtaagttgcgcagttggcctcgcggtgttgaatgtcctggagaaagaacagctgcaggatcacgctacaagtgtggggtcgtttctcatgcagctcctgggacagcagaaaatcaagcatccaattgtgggcgatgtgcgcggggtgggcctgttcattggggtcgatctgatcaaggatgaggcgaccagaacaccagccacagaagaagccgcttatttggtttctcgactaaaagagaactacgtcttgctgagcaccgatggccccggcagaaacatcctgaagtttaagccacccatgtgtttcagtttggataatgccaggcaggtggtcgccaagttggacgccattctgaccgacatggaagaaaaagtgagaagctgtgagaccttaagattgcagccttag

SEQ ID NO: 245911 - DNA, 1353 bp, Artificial Sequence
  derived and/or modified sequence
atggcagctgatcagagacctaaggctgacactttggctttgcgccagcgcctcatctcttctagctgcagactgttcttccctgaggatcccgtgaagattgttagggcgcaaggacagtacatgtatgatgagcagggtgcagagtatattgactgtatttcaaacgtcgcccatgtggggcactgccatccactcgttgtgcaggctgcgcacgagcagaaccaagtgctgaacactaacagccgatacctgcatgacaatattgtcgattatgcccagcgcctgtctgagacacttccagaacagttgtgcgttttttactttctgaactcaggctccgaggctaacgacctagcactgagactggctcggcactacacaggacaccaagatgttgtcgtcctcgaccatgcctatcatggtcatctgagttctctaatcgacattagtccctacaagttccgcaatctcgacggccagaaagagtgggtgcacgttgccccactccctgatacctacagaggcccttatcgcgaggaccatcccaaccctgctatggcttatgcaaatgaagttaaaagagtggtgagctcagcacaggagaaaggaaggaagattgcagcttttttcgctgaaagtttgccaagcgtgggcggacagatcatacctccagcaggttatttttcgcaggtcgccgagcacatccgtaaggcgggaggcgtctttgtggctgatgaaattcaggtgggtttcggcagagtgggtaagcatttctgggcgtttcagctgcagggcaaggattttgttcccgatattgtcacgatggggaaaagcatcggcaatggccatcctgtggcgtgtgtggccgctacacagccagtggccagagcgtttgaggccaccggcgtggagtactttaatactttcggaggttctccagtcagttgcgctgttgggcttgctgtgcttaatgtgctggagaaagagcagttgcaagatcacgccactagcgttggctccttcctcatgcaattgttaggccagcaaaaaatcaaacaccctatcgtgggcgacgtgagaggggtgggtctgttcattggagtcgacctcataaaggacgaggcgactcgcaccccagcgacagaggaggccgcatacctcgtatctcgacttaaggagaactacgtactgctctccactgacggtcctgggaggaatatactgaaatttaagccacccatgtgtttcagtttagataatgcaagacaagtggttgcaaagttggacgccatactgaccgacatggaggagaaagtgagaagttgtgaaaccctccgtctgcaaccttag

SEQ ID NO: 245912 - protein, 1119 aa, Artificial Sequence
  derived and/or modified sequence
MSAPSLRARAAGLGLLLCAVLGRAGRSDSGGRGELGQPSGVAAERPCPTTCRCLGDLLDCSRKRLARLPEPLPSWVARLDLSHNRLSFIKASSMSHLQSLREVKLNNNELETIPNLGPVSANITLLSLAGNRIVEILPEHLKEFQSLETLDLSSNNISELQTAFPALQLKYLYLNSNRVTSMEPGYFDNLANTLLVLKLNRNRISAIPPKMFKLPQLQHLELNRNKIKNVDGLTFQGLGALKSLKMQRNGVTKLMDGAFWGLSNMEILQLDHNNLTEITKGWLYGLLMLQELHLSQNAINRISPDAWEFCQKLSELDLTFNHLSRLDDSSFLGLSLLNTLHIGNNRVSYIADCAFRGLSSLKTLDLKNNEISWTIEDMNGAFSGLDKLRRLILQGNRIRSITKKAFTGLDALEHLDLSDNAIMSLQGNAFSQMKKLQQLHLNTSSLLCDCQLKWLPQWVAENNFQSFVNASCAHPQLLKGRSIFAVSPDGFVCDDFPKPQITVQPETQSAIKGSNLSFICSAASSSDSPMTFAWKKDNELLHDAEMENYAHLRAQGGEVMEYTTILRLREVEFASEGKYQCVISNHFGSSYSVKAKLTVNMLPSFTKTPMDLTIRAGAMARLECAAVGHPAPQIAWQKDGGTDFPAARERRMHVMPEDDVFFIVDVKIEDIGVYSCTAQNSAGSISANATLTVLETPSFLRPLLDRTVTKGETAVLQCIAGGSPPPKLNWTKDDSPLVVTERHFFAAGNQLLIIVDSDVSDAGKYTCEMSNTLGTERGNVRLSVIPTPTCDSPQMTAPSLDDDGWATVGVVIIAVVCCVVGTSLVWVVIIYHTRRRNEDCSITNTDETNLPADIPSYLSSQGTLADRQDGYVSSESGSHHQFVTSSGAGFFLPQHDSSGTCHIDNSSEADVEAATDLFLCPFLGSTGPMYLKGNVYGSDPFETYHTGCSPDPRTVLMDHYEPSYIKKKECYPCSHPSEESCERSFSNISWPSHVRKLLNTSYSHNEGPGMKNLCLNKSSLDFSANPEPASVASSNSFMGTFGKALRRPHLDAYSSFGQPSDCQPRAFYLKAHSSPDLDSGSEEDGKERTDFQEENHICTFKQTLENYRTPNFQSYDLDT

SEQ ID NO: 245913 - DNA, 3360 bp, Artificial Sequence
  derived and/or modified sequence
atgagcgcccccagcctgagagccagagccgccggcctgggcctgctgctgtgcgccgtgctgggcagagccggcagaagcgacagcggcggcagaggcgagctgggccagcccagcggcgtggccgccgagagaccctgccccaccacctgcagatgcctgggcgacctgctggactgcagcagaaagagactggccagactgcccgagcccctgcccagctgggtggccagactggacctgagccacaacagactgagcttcatcaaggccagcagcatgagccacctgcagagcctgagagaggtgaagctgaacaacaacgagctggagaccatccccaacctgggccccgtgagcgccaacatcaccctgctgagcctggccggcaacagaatcgtggagatcctgcccgagcacctgaaggagttccagagcctggagaccctggacctgagcagcaacaacatcagcgagctgcagaccgccttccccgccctgcagctgaagtacctgtacctgaacagcaacagagtgaccagcatggagcccggctacttcgacaacctggccaacaccctgctggtgctgaagctgaacagaaacagaatcagcgccatcccccccaagatgttcaagctgccccagctgcagcacctggagctgaacagaaacaagatcaagaacgtggacggcctgaccttccagggcctgggcgccctgaagagcctgaagatgcagagaaacggcgtgaccaagctgatggacggcgccttctggggcctgagcaacatggagatcctgcagctggaccacaacaacctgaccgagatcaccaagggctggctgtacggcctgctgatgctgcaggagctgcacctgagccagaacgccatcaacagaatcagccccgacgcctgggagttctgccagaagctgagcgagctggacctgaccttcaaccacctgagcagactggacgacagcagcttcctgggcctgagcctgctgaacaccctgcacatcggcaacaacagagtgagctacatcgccgactgcgccttcagaggcctgagcagcctgaagaccctggacctgaagaacaacgagatcagctggaccatcgaggacatgaacggcgccttcagcggcctggacaagctgagaagactgatcctgcagggcaacagaatcagaagcatcaccaagaaggccttcaccggcctggacgccctggagcacctggacctgagcgacaacgccatcatgagcctgcagggcaacgccttcagccagatgaagaagctgcagcagctgcacctgaacaccagcagcctgctgtgcgactgccagctgaagtggctgccccagtgggtggccgagaacaacttccagagcttcgtgaacgccagctgcgcccacccccagctgctgaagggcagaagcatcttcgccgtgagccccgacggcttcgtgtgcgacgacttccccaagccccagatcaccgtgcagcccgagacccagagcgccatcaagggcagcaacctgagcttcatctgcagcgccgccagcagcagcgacagccccatgaccttcgcctggaagaaggacaacgagctgctgcacgacgccgagatggagaactacgcccacctgagagcccagggcggcgaggtgatggagtacaccaccatcctgagactgagagaggtggagttcgccagcgagggcaagtaccagtgcgtgatcagcaaccacttcggcagcagctacagcgtgaaggccaagctgaccgtgaacatgctgcccagcttcaccaagacccccatggacctgaccatcagagccggcgccatggccagactggagtgcgccgccgtgggccaccccgccccccagatcgcctggcagaaggacggcggcaccgacttccccgccgccagagagagaagaatgcacgtgatgcccgaggacgacgtgttcttcatcgtggacgtgaagatcgaggacatcggcgtgtacagctgcaccgcccagaacagcgccggcagcatcagcgccaacgccaccctgaccgtgctggagacccccagcttcctgagacccctgctggacagaaccgtgaccaagggcgagaccgccgtgctgcagtgcatcgccggcggcagccccccccccaagctgaactggaccaaggacgacagccccctggtggtgaccgagagacacttcttcgccgccggcaaccagctgctgatcatcgtggacagcgacgtgagcgacgccggcaagtacacctgcgagatgagcaacaccctgggcaccgagagaggcaacgtgagactgagcgtgatccccacccccacctgcgacagcccccagatgaccgcccccagcctggacgacgacggctgggccaccgtgggcgtggtgatcatcgccgtggtgtgctgcgtggtgggcaccagcctggtgtgggtggtgatcatctaccacaccagaagaagaaacgaggactgcagcatcaccaacaccgacgagaccaacctgcccgccgacatccccagctacctgagcagccagggcaccctggccgacagacaggacggctacgtgagcagcgagagcggcagccaccaccagttcgtgaccagcagcggcgccggcttcttcctgccccagcacgacagcagcggcacctgccacatcgacaacagcagcgaggccgacgtggaggccgccaccgacctgttcctgtgccccttcctgggcagcaccggccccatgtacctgaagggcaacgtgtacggcagcgaccccttcgagacctaccacaccggctgcagccccgaccccagaaccgtgctgatggaccactacgagcccagctacatcaagaagaaggagtgctacccctgcagccaccccagcgaggagagctgcgagagaagcttcagcaacatcagctggcccagccacgtgagaaagctgctgaacaccagctacagccacaacgagggccccggcatgaagaacctgtgcctgaacaagagcagcctggacttcagcgccaaccccgagcccgccagcgtggccagcagcaacagcttcatgggcaccttcggcaaggccctgagaagaccccacctggacgcctacagcagcttcggccagcccagcgactgccagcccagagccttctacctgaaggcccacagcagccccgacctggacagcggcagcgaggaggacggcaaggagagaaccgacttccaggaggagaaccacatctgcaccttcaagcagaccctggagaactacagaacccccaacttccagagctacgacctggacacctag

SEQ ID NO: 245914 - DNA, 3360 bp, Artificial Sequence
  derived and/or modified sequence
atgagtgccccgagtttaagagcccgggccgctggcctcgggctgctcctttgtgcagtgctgggcagagccggcaggagtgactctggaggtagaggagagctgggacagccgtcaggggtggcggctgagcgtccatgcccaacaacctgtaggtgcttgggagatctgctggattgtagtagaaagcgattggcccgcctgccggaacctttaccgtcatgggttgcgcggctggacctatctcataacagactgagctttatcaaggcctcatcgatgagccatctgcaaagtctgcgggaggtgaaactcaacaacaatgagcttgaaacaattcccaaccttggtcctgtgagtgctaacattactcttttaagcttggccgggaatcgcatcgtggagatcttgcccgaacatttgaaagaattccagtcattggaaacgcttgatttgtcctcgaataacatctccgagttgcaaacagcgtttcctgctctgcagctgaagtacttgtacctgaatagtaaccgcgtcacttctatggagccaggatatttcgacaatctggccaatactctcctggtgcttaagttgaataggaaccggatatcagctatcccgcccaagatgttcaaacttccccaactgcagcatttggaactcaaccgaaataaaatcaaaaatgtagacggactcacattccagggtcttggcgcacttaaaagtctcaagatgcagagaaatggtgtgactaagttaatggatggtgcattctggggtttgtccaatatggaaatccttcagttagatcacaacaatctgaccgaaattactaaaggctggctctacggactgctaatgctgcaagagttacatctgtcccagaatgccatcaataggatatcccccgacgcatgggagttctgccagaagctgagcgagctcgatctcacttttaatcacctgagcaggctcgacgatagtagctttttggggttgtccctgttgaacacccttcatatcggtaacaaccgagtcagttacatagccgactgcgcttttagaggactgtctagtctgaaaaccctggatttgaagaacaacgagatatcctggaccatcgaagatatgaacggcgcgtttagcggactggataagctcaggagattgatcttgcagggcaacaggatccgctctatcacaaaaaaagctttcacagggctggacgctctagagcacctagacctgagtgacaacgctatcatgtctcttcaaggcaacgctttcagccagatgaagaaactccaacagctccatctgaacacaagttctctcctctgcgactgtcagcttaaatggttgccgcagtgggtcgcagagaacaacttccagagtttcgtgaatgctagctgtgcccacccccaattgctcaagggtaggtccatctttgccgtgtccccggacggcttcgtgtgtgatgatttccccaaacctcagattacagtgcagccggaaacccagagcgcgatcaagggatccaacttgtcttttatctgttccgctgcttcaagctccgattctcctatgaccttcgcctggaagaaagataatgagcttcttcatgatgctgagatggaaaactatgctcatctacgggctcaggggggggaagttatggaatatactaccattttgcggcttagggaggtggagttcgcctctgaggggaagtatcagtgtgtgatctcaaaccactttggtagcagctatagcgtcaaagctaaacttacagtaaatatgctgcctagttttacaaagacaccgatggatctgaccatcagggcaggtgcaatggctagattggaatgcgcagccgtggggcatcctgcgcctcaaattgcatggcaaaaggatggtgggactgactttccagctgctcgtgagcgaagaatgcacgtcatgcccgaagacgacgtcttctttatcgtagatgttaagattgaagacatcggtgtgtacagttgtactgcccagaactccgctggatctatttctgctaacgccacgctaacagtgctggagactccaagcttccttaggcccctgctcgaccgcactgtcacaaaaggggaaacagccgtccttcagtgcatcgctggaggtagtccgcctcccaagctcaactggaccaaggacgattcacccttggttgtcactgagagacatttcttcgccgctggaaaccagctgctgattattgtagacagcgatgtctcagatgctggcaagtacacttgcgagatgtcaaataccctcgggaccgaacgcggaaatgtgagacttagcgtgataccaacccctacatgcgactcgccccagatgacagcacccagtctagacgacgatggatgggcaaccgtcggcgtcgttattatagccgtggtgtgttgtgtcgttggaacgtctctggtgtgggtggtaattatctatcacaccaggcggcgaaacgaggactgtagcattacgaacaccgacgagacaaaccttcctgccgacataccatcctacctgagtagtcagggaacgctggccgatcgccaggacggctatgtgtcttccgagtctggaagtcatcaccagtttgtcacttccagtggggccggattctttttgccacagcacgactcttcagggacatgccatattgacaattcttccgaggcagatgtggaggccgccactgacctgtttctctgcccattcctggggagtaccggtcccatgtatttgaaagggaatgtttacggtagcgatccctttgaaacttaccatacgggctgctctcctgacccccgcacagtgcttatggaccactatgaaccatcttatataaagaaaaaggaatgctatccctgcagccacccctcagaagagtcatgcgagcggtcctttagcaatatatcatggccaagtcatgtgaggaaactgctgaatactagctacagccacaacgagggacccggtatgaagaacctgtgcctgaacaaaagctctctggacttcagcgccaatccggagcctgcttccgtagcttcctccaattcttttatgggcacctttgggaaagcattgcgacggccacatctggacgcatactctagcttcgggcaaccaagcgactgccaaccaagggcattctacttaaaggctcattcaagtccggatctggactctggtagtgaggaagacggaaaagaacgaaccgacttccaggaggagaatcatatctgtactttcaagcagacactcgagaattaccggactccaaattttcagagttacgacttggacacatag

SEQ ID NO: 245915 - DNA, 4070 bp, Artificial Sequence
  derived and/or modified sequence
ggcgaaaaagtttcttttgcagacaagaaggggcttcggcgagccgacgctgctcaagctgcaactctgttgcagttggcagttcttttcggtttccctcctgctgtttgggggcatgaaagggcttcgccgccgggagtaaaagaaggaattgaccgggcagcgcgagggaggagcgcgcacgcgaccgcgagggcgggcgtgcaccctcggctggaagtttgtgccgggccccgagcgcgcgccggctgggagcttcgggtagagacctaggccgctggaccgcgatgagcgcgccgagcctccgtgcgcgcgccgcggggttggggctgctgctgtgcgcggtgctggggcgcgctggccggtcagacagcggcggtcgcggggaactcgggcagccctctggggtagccgccgagcgcccatgccccactacctgccgctgcctcggggacctgctggactgcagtcgtaagcggctagcgcgtcttcccgagccactcccgtcctgggtcgctcggctggacttaagtcacaacagattatctttcatcaaggcaagttccatgagccaccttcaaagccttcgagaagtgaaactgaacaacaatgaattggagaccattccaaatctgggaccagtctcggcaaatattacacttctctccttggctggaaacaggattgttgaaatactccctgaacatctgaaagagtttcagtcccttgaaactttggaccttagcagcaacaatatttcagagctccaaactgcatttccagccctacagctcaaatatctgtatctcaacagcaaccgagtcacatcaatggaacctgggtattttgacaatttggccaacacactccttgtgttaaagctgaacaggaaccgaatctcagctatcccacccaagatgtttaaactgccccaactgcaacatctcgaattgaaccgaaacaagattaaaaatgtagatggactgacattccaaggccttggtgctctgaagtctctgaaaatgcaaagaaatggagtaacgaaacttatggatggagctttttgggggctgagcaacatggaaattttgcagctggaccataacaacctaacagagattaccaaaggctggctttacggcttgctgatgctgcaggaacttcatctcagccaaaatgccatcaacaggatcagccctgatgcctgggagttctgccagaagctcagtgagctggacctaactttcaatcacttatcaaggttagatgattcaagcttccttggcctaagcttactaaatacactgcacattgggaacaacagagtcagctacattgctgattgtgccttccgggggctttccagtttaaagactttggatctgaagaacaatgaaatttcctggactattgaagacatgaatggtgctttctctgggcttgacaaactgaggcgactgatactccaaggaaatcggatccgttctattactaaaaaagccttcactggtttggatgcattggagcatctagacctgagtgacaacgcaatcatgtctttacaaggcaatgcattttcacaaatgaagaaactgcaacaattgcatttaaatacatcaagccttttgtgcgattgccagctaaaatggctcccacagtgggtggcggaaaacaactttcagagctttgtaaatgccagttgtgcccatcctcagctgctaaaaggaagaagcatttttgctgttagcccagatggctttgtgtgtgatgattttcccaaaccccagatcacggttcagccagaaacacagtcggcaataaaaggttccaatttgagtttcatctgctcagctgccagcagcagtgattccccaatgacttttgcttggaaaaaagacaatgaactactgcatgatgctgaaatggaaaattatgcacacctccgggcccaaggtggcgaggtgatggagtataccaccatccttcggctgcgcgaggtggaatttgccagtgaggggaaatatcagtgtgtcatctccaatcactttggttcatcctactctgtcaaagccaagcttacagtaaatatgcttccctcattcaccaagacccccatggatctcaccatccgagctggggccatggcacgcttggagtgtgctgctgtggggcacccagccccccagatagcctggcagaaggatgggggcacagacttcccagctgcacgggagagacgcatgcatgtgatgcccgaggatgacgtgttctttatcgtggatgtgaagatagaggacattggggtatacagctgcacagctcagaacagtgcaggaagtatttcagcaaatgcaactctgactgtcctagaaacaccatcatttttgcggccactgttggaccgaactgtaaccaagggagaaacagccgtcctacagtgcattgctggaggaagccctccccctaaactgaactggaccaaagatgatagcccattggtggtaaccgagaggcacttttttgcagcaggcaatcagcttctgattattgtggactcagatgtcagtgatgctgggaaatacacatgtgagatgtctaacacccttggcactgagagaggaaacgtgcgcctcagtgtgatccccactccaacctgcgactcccctcagatgacagccccatcgttagacgatgacggatgggccactgtgggtgtcgtgatcatagccgtggtttgctgtgtggtgggcacgtcactcgtgtgggtggtcatcatataccacacaaggcggaggaatgaagattgcagcattaccaacacagatgagaccaacttgccagcagatattcctagttatttgtcatctcagggaacgttagctgacaggcaggatgggtacgtgtcttcagaaagtggaagccaccaccagtttgtcacatcttcaggtgctggatttttcttaccacaacatgacagtagtgggacctgccatattgacaatagcagtgaagctgatgtggaagctgccacagatctgttcctttgtccgtttttgggatccacaggccctatgtatttgaagggaaatgtgtatggctcagatccttttgaaacatatcatacaggttgcagtcctgacccaagaacagttttaatggaccactatgagcccagttacataaagaaaaaggagtgctacccatgttctcatccttcagaagaatcctgcgaacggagcttcagtaatatatcgtggccttcacatgtgaggaagctacttaacactagttactctcacaatgaaggacctggaatgaaaaatctgtgtctaaacaagtcctctttagattttagtgcaaatccagagccagcgtcggttgcctcgagtaattctttcatgggtacctttggaaaagctctcaggagacctcacctagatgcctattcaagctttggacagccatcagattgtcagccaagagccttttatttgaaagctcattcttccccagacttggactctgggtcagaggaagatgggaaagaaaggacagattttcaggaagaaaatcacatttgtacctttaaacagactttagaaaactacaggactccaaattttcagtcttatgacttggacacatagactgaatgagaccaaaggaaaagcttaacatactacctcaagtgaacttttatttaaaagagagagaatcttatgttttttaaatggagttatgaattttaaaaggataaaaatgctttatttatacagatgaaccaaaattacaaaaagttatgaaaatttttatactgggaatgatgctcatataagaatacctttttaaactattttttaactttgttttatgcaaaaaagtatcttacgtaaattaatgatataaatcatgattattttatgtatttttataatgccagatttctttttatggaaaatgagttactaaagcattttaaataatacctgccttgtaccattttttaaatagaagttacttcattatattttgcacattatatttaataaaatgtgtcaatttgatgccaa

SEQ ID NO: 245916 - DNA, 3360 bp, Artificial Sequence
  derived and/or modified sequence
atgtctgcccccagcctgcgggcccgggctgctggcctgggcctgctgctgtgtgctgtgctgggccgggccggccgcagtgacagcggcggccgcggggagctgggccagcccagcggcgtggccgctgagcggccctgccccaccacctgccgctgcctgggggacctgctggactgcagcaggaagaggctggcccggctgcctgagcccctgcccagctgggtggcccggctggacctgagccacaaccggctgtccttcatcaaggccagctccatgagccacctgcagagcctgcgggaggtgaagctgaacaacaatgagctggagaccatccccaacctgggccctgtgtctgccaacatcaccctgctgagcctggccggcaacagaattgtggagatcctgcctgagcacctgaaggagttccagagcctggagaccctggacctgagcagcaacaacatcagcgagctgcagacagccttccctgccctgcagctgaagtacctgtacctgaacagcaacagagtgacctccatggagcccggctactttgacaacctggccaacaccctgctggtgctgaagctgaacagaaaccgcatcagcgccatcccccccaagatgttcaagctgccccagctgcagcacctggagctgaacagaaacaagatcaagaatgtggatggcctgaccttccagggcctgggcgccctgaagagcctgaagatgcagagaaatggagtgaccaagctgatggatggagccttctggggcctgagcaacatggagatcctgcagctggaccacaacaacctgacagagatcaccaagggctggctgtatggcctgctgatgctgcaggagctgcacctgagccagaatgccatcaaccgcatcagcccagatgcctgggagttctgccagaagctgtctgagctggacctgaccttcaaccacctgagccggctggatgacagcagcttcctgggcctgagcctgctgaacaccctgcacatcggcaacaacagagtgtcctacatcgctgactgtgccttccggggcctgagcagcctgaagaccctggacctgaagaacaatgagatctcctggaccatcgaggacatgaatggagccttcagcggcctggacaagctgcggcggctcatcctgcagggcaaccgcatccgcagcatcaccaagaaggccttcaccggcctggatgccctggagcacctggacctgagtgacaatgccatcatgagcctgcagggcaatgccttcagccagatgaagaagctgcagcagctgcacctgaacaccagcagcctgctgtgtgactgccagctgaagtggctgccccagtgggtggccgagaacaacttccagagctttgtgaatgccagctgtgcccacccccagctgctgaagggccgcagcatctttgctgtgtccccagatggctttgtgtgtgatgacttccccaagccccagatcaccgtgcagcctgagacccagagcgccatcaagggcagcaacctgtccttcatctgcagcgctgccagcagcagtgacagccccatgacctttgcctggaagaaggacaatgagctgctgcatgatgctgagatggagaactatgcccacctgcgggcccagggcggggaggtgatggagtacaccaccatcctgcggctgcgggaggtggagtttgccagcgagggcaagtaccagtgtgtgatcagcaaccacttcggcagcagctacagcgtgaaggccaagctgactgtgaacatgctgcccagcttcaccaagacccccatggacctgaccatccgggccggggccatggcccggctggagtgtgccgctgtgggccacccagccccccagatcgcctggcagaaggatggcggcacagacttccctgctgcccgggagaggaggatgcacgtgatgccagaagatgatgtgttcttcatcgtggatgtgaagattgaagatattggagtgtacagctgcacagcccagaacagcgctggcagcatcagcgccaatgccaccctgactgtgctggagacccccagcttcctgcggcccctgctggacagaacagtgaccaagggggagacagctgtgctgcagtgcatcgccggcggcagccccccacccaagctgaactggaccaaggatgacagccccctggtggtgacagagcggcacttctttgctgctggcaaccagctgctgatcatcgtggacagtgatgtgtctgatgctgggaagtacacctgtgagatgagcaacaccctgggcacagaaagaggaaatgtgcggctgagcgtcatccccacccccacctgtgacagcccccagatgacagcccccagcctggatgatgatggctgggccaccgtgggcgtggtgatcatcgctgtggtgtgctgcgtggtgggcaccagcctggtgtgggtggtgatcatctaccacaccaggagaagaaatgaagactgcagcatcaccaacacagatgagaccaacctgcctgctgacatccccagctacctgagcagccagggcaccctggccgaccggcaggacggctacgtgagcagcgagagcggcagccaccaccagtttgtgaccagcagcggggccggcttcttcctgccccagcacgacagcagcggcacctgccacatcgacaacagcagcgaggctgatgtggaggccgccacagacctcttcctgtgccccttcctgggcagcacaggccccatgtacctgaagggaaatgtgtatggcagtgacccctttgagacctaccacacaggctgcagcccagaccccaggacagtgctgatggaccactatgagcccagctacatcaagaagaaggagtgctacccctgcagccaccccagcgaggagagctgtgagaggagcttcagcaacatctcctggcccagccacgtgaggaagctgctgaacaccagctacagccacaatgaaggacctggcatgaagaacctgtgcctgaacaagagcagcctggacttcagcgccaaccctgagcccgcctctgtggccagcagcaacagcttcatgggcaccttcggcaaggccctgcggcggccccacctggatgcctacagcagctttggccagcccagcgactgccagccccgggccttctacctgaaggcccacagcagcccagacctggacagcggctctgaagaagatggcaaggagaggacagacttccaggaggagaaccacatctgcaccttcaagcagaccctggagaactaccgcacccccaacttccagagctatgacctggacacctag

SEQ ID NO: 245917 - DNA, 3360 bp, Artificial Sequence
  derived and/or modified sequence
atgagcgcccccagcctgcgggcccgggccgccggcctgggcctgttactatgtgcagtccttgggcgggccggcaggtccgattcagggggcaggggcgaattgggccaaccgtcgggcgtcgcggccgagagaccgtgccccaccacctgccggtgcttgggtgacctgctggactgttcccgaaagagactcgctcgtttgccagaaccactcccctcttgggtggccagactcgacctctcccacaatcgactgtcattcatcaaggcgagctccatgtctcatctgcagtctctgcgcgaggtgaagctgaataataatgaactggaaacaatcccaaaccttgggccagtgtcagcgaatattacccttctgagtctggctggtaatagaatcgtggaaatcctgcctgaacacttaaaagaatttcaaagtctggagaccctggacctgtcctcaaataacatttccgagctgcagactgcctttcctgctcttcagcttaagtacctttacctcaattcaaacagggtcacaagcatggagcctggctatttcgacaacctggccaatactctgctggtgttgaagttgaacaggaacaggattagtgccattcctccaaagatgtttaaactcccccaactgcaacatctcgagctgaataggaacaagatcaaaaatgttgatgggctcactttccagggcctaggcgcactgaagtctctgaaaatgcagaggaatggcgttactaagttgatggacggcgccttctggggcctcagcaacatggagatcctgcagctggatcataataacctgactgagattacgaaagggtggctctatggcttattgatgctccaggaactccacctttcgcagaatgccatcaataggatcagtcccgacgcttgggaattttgccagaagctttctgaactggatcttacctttaaccatctgtcccgcctggacgacagctctttcctgggcctgagcctgctcaacactctgcacataggcaacaacagagtcagttatatcgccgattgtgcctttcgcgggttatcaagcctcaagaccttggatctgaagaacaatgaaatctcttggactatcgaggatatgaacggagcctttagtggactggacaaactgaggcggttgatcctacaggggaatcggatccggtccatcaccaagaaagcctttacagggctggacgcccttgagcacctggacttatcagataatgccattatgtcgcttcaaggaaacgcattctcacagatgaagaagctacagcagttgcatctgaacacatcctcgctcctgtgtgattgtcagctgaagtggctgcctcagtgggtagcagaaaataacttccagtctttcgtgaacgctagttgcgcccacccccagttgctgaagggcagaagcatattcgcagtgtccccagacgggtttgtgtgcgacgactttccaaagccccagattactgtgcagcctgagactcagtctgcaattaaaggatccaatctaagctttatatgcagtgcggccagctctagtgattcaccgatgacatttgcttggaagaaggacaacgagctcctgcacgatgctgaaatggagaattatgctcacctgagggcccagggcggtgaagtgatggagtataccactatcctgcggcttagagaagtcgagtttgccagcgaaggaaaatatcagtgtgtaatctccaaccatttcggctccagctacagcgtaaaggctaagttaaccgtcaacatgctcccttcattcaccaagactcctatggatttaactataagggccggagcaatggctcgcttggagtgtgccgccgtgggacatcctgcccctcagatcgcctggcagaaagatggagggaccgatttcccagctgcccgtgagagaagaatgcacgtgatgccagaagatgacgtgttctttattgtggacgttaagattgaggacatcggggtttattcctgcacagcccagaatagcgctggaagtattagtgccaacgccactctcacagtcctcgaaaccccctctttcttgcgacctctgctggaccgaactgtaacgaagggggagactgctgttctgcagtgcattgccggtggtagcccccctccgaaactcaattggacgaaagatgatagccccttggttgtaaccgagcgacatttttttgctgccgggaaccagctgctgattatcgtcgacagtgacgtctcagatgcgggcaagtatacctgtgagatgagcaacacactgggtactgaacggggtaatgtccggctgtcagttattcccacaccgacctgcgacagcccgcagatgaccgccccaagcctcgatgacgatggttgggccactgtgggcgtagttattatcgccgtcgtatgttgtgttgtaggcacttccctggtctgggtcgtgattatataccacacgagacggcgtaatgaggattgctctattactaatacagatgagacaaatcttccagccgacattcccagttacctgtccagtcagggaactctcgccgataggcaggacggatacgtcagcagcgaaagtggctctcatcaccagttcgtgacgtccagcggagccggcttttttctgcctcaacacgactcaagcggaacctgccatatagataactcctctgaggctgacgtggaggcagcaaccgatttgttcctatgtccattcttgggaagcaccggacctatgtatctgaaagggaatgtgtatggtagcgaccctttcgaaacataccacacggggtgttcaccagacccccggaccgtgctaatggatcactacgagccttcctacattaagaaaaaagaatgctatccatgttctcatccatcagaggagtcgtgtgaaaggtccttctctaacatcagttggccgagtcacgtgaggaaacttctgaatacctcatattcgcacaatgagggtcctggcatgaaaaacctgtgtctcaataaatcctccctagactttagcgctaaccccgagcccgccagcgtggccagcagcaatagcttcatgggaaccttcggaaaggccctgcgccgcccccacctcgatgcctactcatcctttggccagcctagcgactgccagccaagagcattttatctgaaagcacactcctcaccagatctcgactccggcagcgaggaggacgggaaggagcggacagactttcaggaggagaaccacatctgtacctttaagcagaccctcgagaactacaggacaccaaattttcaatcctacgacctggatacatag

SEQ ID NO: 245918 - DNA, 3360 bp, Artificial Sequence
  derived and/or modified sequence
atgtcggccccttccctcagggcccgtgcggctggtctgggactgttgctttgcgcagtactgggccgtgccggacgcagtgattccggtggaaggggcgagttagggcagcccagtggagtggctgctgaacgcccttgtcctacgacatgtagatgtctgggagatcttctggattgtagccgaaagcggctggcccgactgcctgagccacttccttcttgggtggctcgccttgacctttcacacaaccgactctctttcataaaagctagctccatgtcacaccttcagtcactgcgggaggtgaagcttaataacaacgaattggagaccatacctaacctcgggcctgttagtgctaacattaccctgctgagtctcgctggaaatcgcattgtggagattttacccgagcaccttaaagagtttcagtctctcgaaaccctggatctcagttctaataatatctctgagcttcaaaccgccttccctgcccttcaactcaagtatctgtacctcaattctaaccgtgtcacctccatggagcccggatatttcgataacctggctaataccctgctcgtcctcaaactgaatcgaaatagaatctcagccattcccccaaagatgtttaaactgcctcagttgcaacacctggaattgaaccggaacaaaataaagaatgttgacggactgaccttccagggattaggtgcattgaagtccctgaagatgcagaggaatggcgtgactaaacttatggatggcgctttctggggtctgtctaatatggagattctgcagttggatcacaacaacctgaccgagataacaaaggggtggctgtacggccttctgatgctccaggagttacatctgagtcagaatgcaattaataggatctccccagatgcctgggagttttgccagaagctatccgaactggaccttacgtttaatcacttgagccgccttgatgatagctcctttttggggctttcgctcctgaacacattgcacattggtaataaccgggtaagctatattgctgactgcgcctttcgaggtctgtcgtccttgaagactctggatcttaagaataatgagatcagctggactatagaggacatgaacggagcgttctctggcttggataagttgcgccgactgatcctgcaggggaataggattaggagcatcaccaagaaagccttcaccggtctggacgcccttgagcatttggacctaagtgacaatgccattatgtcgctccagggaaacgccttctcacagatgaagaagctccagcagttacacctgaacaccagtagtctcctgtgtgattgccaactcaaatggttgccccagtgggtggctgagaataacttccagtcattcgtgaacgcatcttgtgcgcacccccaacttctcaaggggcgatctatctttgctgtgtctcctgacggctttgtatgcgatgattttccgaagcctcaaataactgtccagccagaaacacaaagcgccattaaaggatccaacctgtcctttatttgttccgcagccagcagcagcgattcgcctatgacttttgcatggaaaaaagataatgaactccttcacgatgcagagatggaaaattatgcccacttacgagcccagggtggggaagtgatggaatacacaaccatactgcggctgcgcgaagtggagttcgccagtgagggaaagtatcaatgtgtgattagcaatcactttggtagttcctatagcgttaaggctaagctcaccgtgaatatgctaccctcttttactaaaactccaatggatttaaccattcgggcaggggcaatggcgaggttggagtgcgctgctgtaggtcacccagccccacagatagcctggcaaaaggatggtggaacagatttcccggctgccagggaacgacggatgcacgtaatgcctgaggatgacgtcttcttcatcgtcgacgtgaagatcgaggacataggggtctatagctgtaccgcacaaaatagcgcaggcagcatcagtgccaatgcgacactgactgtcctggaaaccccatctttcttgagaccactcctcgaccgcacggtaacaaaaggagaaacggccgtccttcagtgtatagccggaggctcaccacctccaaagctgaattggaccaaggatgattcacccctggtcgtcacggaaaggcacttcttcgccgcaggcaaccagctcctcatcatagtcgactcagatgtgagcgacgccggaaagtacacgtgcgagatgagcaacactctcggaaccgaacgtgggaatgtccggctcagcgtgattccaacccctacttgtgatagcccccaaatgacagcgcctagtttggatgacgatgggtgggcaaccgtgggggtagtaataattgctgtggtgtgctgtgtcgttggtacaagtctggtgtgggttgtgatcatctaccatacgaggcgccgtaatgaggactgctcaatcaccaacacagatgagactaacctgccagctgatattccttcatatctctcttctcagggcacacttgccgaccgccaggacggatacgtgagctctgagtccgggtcccaccaccagttcgtgaccagctctggagctggcttcttcctaccccagcatgactcctccgggacgtgccatatagacaacagcagtgaggcagacgtggaagcggcaacagatctttttctatgcccttttttgggttctacaggaccgatgtacctcaagggcaatgtctacggttccgaccctttcgaaacctaccacactggctgtagtcccgaccccaggacagtactcatggatcattacgagccctcctatatcaagaagaaggagtgctacccctgttcacaccctagtgaggaaagttgtgaaagaagtttttcaaatattagctggccttctcacgtcagaaaactcctcaacacatcgtattctcacaacgaaggacccggaatgaagaatttgtgtctcaataaatctagccttgactttagcgcaaacccagagcctgcaagtgttgctagttctaactcattcatgggaacctttgggaaagctcttagacggcctcatcttgacgcttactcaagttttgggcagccctcagattgccagcctcgggcattctatctgaaggctcattctagtcctgatctggactcagggagcgaagaggacggcaaagagagaaccgacttccaagaggaaaaccatatttgcactttcaaacagaccctggaaaactatcgcacccccaattttcagtcatatgatttagatacctag

SEQ ID NO: 245919 - DNA, 999 bp, Artificial Sequence
  derived and/or modified sequence
atggaatggacggcggctagagccaggcctctggtgatgacccttaattccctgggcttcagtttcgggcacggccttacagccgctgtcgcatacggggtgagggactggaccctgcttcaactggttgttagtgtgccctttttcctctgcttcctgtactcctggtggctggctgaaagtgcccggtggctcctgaccactggcaggctcgattgggggctccaggagctgtggcgtgtcgccgctatcaacggtaagggagctgtgcaggacacacttaccccagaagtgctactgagtgccatgcgcgaggaattaagcatgggacagcctccggccagccttgggaccctgctcagaatgcccgggctgcggttcaggacttgcatatcaacactatgttggttcgccttcggattcacattcttcgggcttgcgctcgatctgcaggctctagggtctaacatctttttgctgcagatgttcattggcgtcgtcgacatccctgccaagatgggagccctcctcctgttgagtcatttaggccgtcgtccaaccctggccgcatcgcttctactggctggcctgtgcatcctcgcaaacacactcgttccccacgagatgggggctctcagatctgcacttgcagtgctgggtcttggtggggtgggtgccgcttttacatgtataaccatttactcgtccgagctgttcccaactgtgctcaggatgaccgccgtggggctgggccagatggcagcccgtggcggggcaatcctcgggccattggtgcggctcctgggggtccacggcccctggctcccgcttctagtgtacggaaccgtacctgtgctgtctggactggccgccctgctgctgccggagactcagtccttaccacttccggacactattcaggatgtgcagaaccaggccgtcaaaaaggcgactcatggcacactggggaacagtgtcctgaaatccacccagttttag

SEQ ID NO: 245920 - DNA, 999 bp, Artificial Sequence
  derived and/or modified sequence
atggagtggacagctgcccgggcccggcccctggtgatgaccctgaacagcctgggcttctcctttggccacggcctgacagctgctgtggcctacggcgtgcgggactggaccctgctgcagctggtggtgtctgtgcccttcttcctgtgcttcctgtacagctggtggctggccgagagcgcccgctggctgctgaccaccggccgcctggactggggcctgcaggagctgtggagggtggccgccatcaatggaaaaggagctgtgcaggacaccctgaccccagaggtgctgctgagcgccatgagggaggagctgtccatgggccagcccccagccagcctgggcaccctgctgaggatgcctggcctgcgcttccgcacctgcatcagcaccctgtgctggtttgccttcggcttcaccttcttcggcctggccctggacctgcaggccctgggcagcaacatcttcctgctgcagatgttcatcggcgtggtggacatcccagccaagatgggcgccctgctgctgctgagccacctgggccggcggcccaccctggccgccagcctgctgctggccggcctgtgcatcctggccaacaccctggtgccccatgagatgggcgccctgcggagcgccctggccgtgctgggcctgggcggcgtgggcgccgccttcacctgcatcaccatctacagcagcgagctgttccccaccgtgctgaggatgacagctgtgggcctgggccagatggccgcccggggcggggccatcctgggccccctggtgcggctgctgggcgtgcacggcccctggctgcccctgctggtgtatggcaccgtgcctgtgctgagcggcctggccgccctgctgctgcctgagacccagagcctgcccctgcctgacaccatccaggatgtgcagaaccaggccgtgaagaaggccacccacggcaccctgggcaacagcgtgctgaagagcacccagttctag

SEQ ID NO: 245921 - DNA, 999 bp, Artificial Sequence
  derived and/or modified sequence
atggagtggaccgccgcccgggcccggcccctggtgatgaccctgaactccctgggtttctcctttgggcacggcctcacagccgctgtagcctatggagtcagagattggactttgctgcagctggtggtgtccgtgccattttttctgtgctttttatatagctggtggctggccgaaagtgccagatggttgctcaccactggccgcctggattggggtctgcaggagctttggcgagtagctgccatcaatggaaaaggagccgtccaggacactctaacacccgaagtcttgctgagcgcgatgagagaggagctttccatgggccagccccccgcaagtctcgggaccctgctacgcatgcctggactgaggtttagaacctgcatttctaccttgtgctggttcgctttcggatttaccttttttggcttggcccttgacctccaggcgttggggagtaatatctttctgctgcagatgttcattggagtggtggacatccccgctaagatgggtgcacttttgctgctttctcacctggggagacgtccaacgctcgcagcatccttactcctggctggcctgtgtattctggcaaacaccctggttccccatgagatgggagcattgcgaagcgctctggctgtactggggttaggcggagtaggggctgcttttacctgtatcacgatttatagcagtgagcttttcccgacggtcctcaggatgaccgccgtggggcttggtcagatggcagcgcgcggaggtgccattctgggaccactcgtgcgtctactaggagtgcatggcccctggctgcccctcctcgtctatgggaccgttcccgttctgtcaggcttggccgcattactgttacctgagacccaatcactgcctctccctgatacaattcaggatgtgcagaaccaggccgtgaagaaggccacccatggcaccctcggcaatagcgtcctcaagagtacgcagttctag

SEQ ID NO: 245922 - DNA, 999 bp, Artificial Sequence
  derived and/or modified sequence
atggaatggaccgcggctagagcgaggccccttgtcatgacgctcaactctctcggtttctcatttggacacggcctgaccgctgcagtggcctacggggtgagggactggactctgctgcagctggtagtgtctgtgccctttttcttgtgttttctgtattcctggtggctggcagagagcgcgagatggcttctcaccaccggacgactggattggggtcttcaggagctgtggcgggtggctgcgataaatgggaagggagctgtacaggatacattaactcccgaggtccttcttagcgcaatgcgcgaagaactcagcatgggccagccacccgcatccctcggtacacttctgcgtatgcctgggcttcgctttaggacatgtatatctacgctgtgctggttcgcatttggctttactttttttgggcttgccctggatctgcaagctcttggtagtaatatatttctccttcaaatgttcataggagtggttgacattccagccaaaatgggggcactgctgctgctgtcccacctcgggagacggccaaccttagctgcttccctgctgctggcaggactgtgcattctcgcaaatacactcgtgccgcatgaaatgggagctctgcgaagcgctctggctgtgctaggtttgggaggggtgggcgctgccttcacttgtattacaatctattccagcgagctctttccaaccgtgctccgtatgactgcggtgggactcgggcaaatggcggcaaggggcggagccatactggggccactggttcggctactgggagtgcacgggccatggctgcccttgctcgtgtacggcactgtacctgtgctttctggattggcagccctactcctgcctgagacccagtctctaccattaccagatacgattcaggacgtacagaaccaggccgtgaaaaaagcgacacacgggaccctgggcaattctgtgcttaaatccacgcagttctag

SEQ ID NO: 245923 - DNA, 2522 bp, Artificial Sequence
  derived and/or modified sequence
attaaagtcttcagtctccacattccctactttccaaattcagctttcccgggaggtctggagcagctgcctctctggggagatgctggaggtctcggaatcacctcacgcggcctcagggcccagttggagccaccccaagtgacaccagcaggcagatgaccagagagcctgagcctccggccccgagtctgtgaagcctagccgctgggctggagaagccactgtgggcaccaccgtgggggaaacaggcccgttgccctggcctctttgccctgggccagcctttgtgaagtgggcccctcttctgggccccttgaagcatgctggagaacttctcggccgccgtgcccagccaccgctgctgggcacccctcctggacaacagcacggctcaggccagcatcctagggagcttgagtcctgaggccctcctggctatttccatcccgccgggccccaaccagaggccccaccagtgccgccgcttccgccagccacagtggcagctcttggaccccaatgccacggccaccagctggagcgaggccgacacggagccgtgtgtggatggctgggtctatgaccgcagcatcttcacctccacaatcgtggccaagtggaacctcgtgtgtgactctcatgctctgaagcccatggcccagtccatctacctggctgggattctggtgggagctgctgcgtgcggccctgcctcagacagtgatggagtggacggcggcacgggcccgacccttggtgatgaccttgaactctctgggcttcagcttcggccatggcctgacagctgcagtggcctacggtgtgcgggactggacactgctgcagctggtggtctcggtccccttcttcctctgctttttgtactcctggtggctggcagagtcggcacgatggctcctcaccacaggcaggctggattggggcctgcaggagctgtggagggtggctgccatcaacggaaagggggcagtgcaggacaccctgacccctgaggtcttgctttcagccatgcgggaggagctgagcatgggccagcctcctgccagcctgggcaccctgctccgcatgcccggactgcgcttccggacctgtatctccacgttgtgctggttcgcctttggcttcaccttcttcggcctggccctggacctgcaggccctgggcagcaacatcttcctgctccaaatgttcattggtgtcgtggacatcccagccaagatgggcgccctgctgctgctgagccacctgggccgccgccccacgctggccgcatccctgttgctggcagggctctgcattctggccaacacgctggtgccccacgaaatgggggctctgcgctcagccttggccgtgctggggctgggcggggtgggggctgccttcacctgcatcaccatctacagcagcgagctcttccccactgtgctcaggatgacggcagtgggcttgggccagatggcagcccgtggaggagccatcctggggcctctggtccggctgctgggtgtccatggcccctggctgcccttgctggtgtatgggacggtgccagtgctgagtggcctggccgcactgcttctgcccgagacccagagcttgccgctgcccgacaccatccaagatgtgcagaaccaggcagtaaagaaggcaacacatggcacgctggggaactctgtcctaaaatccacacagttttagcctcctggggaacctgcgatgggacggtcagaggaagagacttcttctgttctctggagaaggcaggaggaaagcaaagacctccatttccagaggcccagaggctgccctctgaggtccccactctcccccagggctgcccctccaggtgagccctgcccctctcacagtccaaggggcccccttcaatactgaaggggaaaaggacagtttgattggcaggaggtgacccagtgcaccatcaccctgccctgccctcgtggcttcggagagcagaggggtcaggcccaggggaacgagctggccttgccaaccctctgcttgactccgcactgccacttgtccccccacacccgtccacctgcccagagctcagagctaaccaccatccatggtcaagacctctcctagctccacacaagcagtagagtctcagctccacagctttacccagaagccctgtaagcctggcccctggcccctccccatgtccctccaggcctcagccacctgcccgccacatcctctgcctgctgtccccttcccaccctcatccctgaccgactccacttaacccccaaacccagccccccttccaggggtccagggccagcctgagatgcccgtgaaactcctacccacagttacagccacaagcctgcctcctcccaccctgccagcctatgagttcccagagggttggggcagtcccatgaccccatgtcccagctccccacacagcgctgggccagagaggcattggtgcgagggattgaataaagaaacaaatgaatggc

SEQ ID NO: 245924 - DNA, 999 bp, Artificial Sequence
  derived and/or modified sequence
atggagtggaccgccgccagagccagacccctggtgatgaccctgaacagcctgggcttcagcttcggccacggcctgaccgccgccgtggcctacggcgtgagagactggaccctgctgcagctggtggtgagcgtgcccttcttcctgtgcttcctgtacagctggtggctggccgagagcgccagatggctgctgaccaccggcagactggactggggcctgcaggagctgtggagagtggccgccatcaacggcaagggcgccgtgcaggacaccctgacccccgaggtgctgctgagcgccatgagagaggagctgagcatgggccagccccccgccagcctgggcaccctgctgagaatgcccggcctgagattcagaacctgcatcagcaccctgtgctggttcgccttcggcttcaccttcttcggcctggccctggacctgcaggccctgggcagcaacatcttcctgctgcagatgttcatcggcgtggtggacatccccgccaagatgggcgccctgctgctgctgagccacctgggcagaagacccaccctggccgccagcctgctgctggccggcctgtgcatcctggccaacaccctggtgccccacgagatgggcgccctgagaagcgccctggccgtgctgggcctgggcggcgtgggcgccgccttcacctgcatcaccatctacagcagcgagctgttccccaccgtgctgagaatgaccgccgtgggcctgggccagatggccgccagaggcggcgccatcctgggccccctggtgagactgctgggcgtgcacggcccctggctgcccctgctggtgtacggcaccgtgcccgtgctgagcggcctggccgccctgctgctgcccgagacccagagcctgcccctgcccgacaccatccaggacgtgcagaaccaggccgtgaagaaggccacccacggcaccctgggcaacagcgtgctgaagagcacccagttctag

SEQ ID NO: 245925 - protein, 779 aa, Artificial Sequence
  derived and/or modified sequence
MAANGDSPPWSPALAAEGRGSSCEASVSFEDVTVDFSKEEWQHLDPAQRRLYWDVTLENYSHLLSVGYQIPKSEAAFKLEQGEGPWMLEGEAPHQSCSGEAIGKMQQQGIPGGIFFHCERFDQPIGEDSLCSILEELWQDNDQLEQRQENQNNLLSHVKVLIKERGYEHKNIEKIIHVTTKLVPSIKRLHNCDTILKHTLNSHNHNRNSATKNLGKIFGNGNNFPHSPSSTKNENAKTGANSCEHDHYEKHLSHKQAPTHHQKIHPEEKLYVCTECVMGFTQKSHLFEHQRIHAGEKSRECDKSNKVFPQKPQVDVHPSVYTGEKPYLCTQCGKVFTLKSNLITHQKIHTGQKPYKCSECGKAFFQRSDLFRHLRIHTGEKPYECSECGKGFSQNSDLSIHQKTHTGEKHYECNECGKAFTRKSALRMHQRIHTGEKPYVCADCGKAFIQKSHFNTHQRIHTGEKPYECSDCGKSFTKKSQLHVHQRIHTGEKPYICTECGKVFTHRTNLTTHQKTHTGEKPYMCAECGKAFTDQSNLIKHQKTHTGEKPYKCNGCGKAFIWKSRLKIHQKSHIGERHYECKDCGKAFIQKSTLSVHQRIHTGEKPYVCPECGKAFIQKSHFIAHHRIHTGEKPYECSDCGKCFTKKSQLRVHQKIHTGEKPNICAECGKAFTDRSNLITHQKIHTREKPYECGDCGKTFTWKSRLNIHQKSHTGERHYECSKCGKAFIQKATLSMHQIIHTGKKPYACTECQKAFTDRSNLIKHQKMHSGEKRYKASD

SEQ ID NO: 245926 - DNA, 1629 bp, Artificial Sequence
  derived and/or modified sequence
acaggagcaaattcctgtgaacatgaccactatgaaaaacatctcagccacaaacaagctcccacccaccatcagaaaattcatcctgaggagaagctttatgtgtgtactgaatgtgtaatgggcttcactcagaagtcacatctgtttgagcatcagagaattcatgctggagaaaagtcccgtgaatgtgacaaaagcaacaaagtcttcccccagaaaccccaggttgatgtacatccaagtgtttatacaggagaaaaaccctatctgtgtactcaatgtgggaaagtctttaccctcaaatcaaacctcattacacatcaaaaaattcataccgggcagaaaccctacaaatgcagtgaatgtggaaaagcctttttccagagatcagacctctttagacatctgagaattcatacaggagaaaaaccttatgaatgcagtgaatgtggaaaaggcttctcccagaactcagacctcagtatacatcagaaaactcataccggagagaaacactatgaatgcaatgaatgtgggaaggctttcacaagaaaatcagcactcaggatgcatcagagaatccacacgggagagaaaccttatgtatgcgctgactgtgggaaggccttcatccagaaatcacatttcaacacacatcagagaattcatactggagaaaagccgtatgaatgcagtgactgtgggaaatccttcactaagaagtcacaactccatgtgcatcaaagaattcacaccggagagaaaccctatatatgtacagaatgtggaaaggtcttcactcacaggacaaacctcaccacacatcagaaaactcatactggggaaaaaccctatatgtgtgctgaatgtggaaaggcttttactgaccagtcaaatctcattaaacaccagaaaactcacactggagagaaaccctataagtgcaatggctgtggaaaagccttcatatggaagtcgcgcctcaaaatacatcagaaatctcatattggagagagacactatgaatgcaaggactgcgggaaagccttcatccagaaatcaacactaagcgtgcatcagagaatccatacaggagagaaaccgtacgtttgtcctgaatgcgggaaggcctttatccagaaatcgcacttcattgcgcatcatagaatccatactggagagaagccttatgaatgcagcgactgtgggaaatgcttcactaagaagtcacaactccgtgtgcatcagaaaatccacacaggtgagaagcccaatatatgtgctgaatgtggaaaggccttcactgaccgatcaaatctcataacacatcagaaaatccacactagggagaaaccctatgaatgtggtgactgcgggaaaaccttcacctggaagtcacgcctcaatatacatcagaagtctcatactggagaaagacactatgaatgtagtaaatgtgggaaagctttcatccagaaagccacactaagtatgcatcagataattcatacaggaaagaaaccttatgcttgtacagaatgtcagaaggcctttactgacagatcgaatctcattaaacaccagaaaatgcatagtggagaaaaacgctataaagccagtgactga

SEQ ID NO: 245927 - DNA, 2340 bp, Artificial Sequence
  derived and/or modified sequence
atggccgccaacggcgacagccccccctggagccccgccctggccgccgagggcagaggcagcagctgcgaggccagcgtgagcttcgaggacgtgaccgtggacttcagcaaggaggagtggcagcacctggaccccgcccagagaagactgtactgggacgtgaccctggagaactacagccacctgctgagcgtgggctaccagatccccaagagcgaggccgccttcaagctggagcagggcgagggcccctggatgctggagggcgaggccccccaccagagctgcagcggcgaggccatcggcaagatgcagcagcagggcatccccggcggcatcttcttccactgcgagagattcgaccagcccatcggcgaggacagcctgtgcagcatcctggaggagctgtggcaggacaacgaccagctggagcagagacaggagaaccagaacaacctgctgagccacgtgaaggtgctgatcaaggagagaggctacgagcacaagaacatcgagaagatcatccacgtgaccaccaagctggtgcccagcatcaagagactgcacaactgcgacaccatcctgaagcacaccctgaacagccacaaccacaacagaaacagcgccaccaagaacctgggcaagatcttcggcaacggcaacaacttcccccacagccccagcagcaccaagaacgagaacgccaagaccggcgccaacagctgcgagcacgaccactacgagaagcacctgagccacaagcaggcccccacccaccaccagaagatccaccccgaggagaagctgtacgtgtgcaccgagtgcgtgatgggcttcacccagaagagccacctgttcgagcaccagagaatccacgccggcgagaagagcagagagtgcgacaagagcaacaaggtgttcccccagaagccccaggtggacgtgcaccccagcgtgtacaccggcgagaagccctacctgtgcacccagtgcggcaaggtgttcaccctgaagagcaacctgatcacccaccagaagatccacaccggccagaagccctacaagtgcagcgagtgcggcaaggccttcttccagagaagcgacctgttcagacacctgagaatccacaccggcgagaagccctacgagtgcagcgagtgcggcaagggcttcagccagaacagcgacctgagcatccaccagaagacccacaccggcgagaagcactacgagtgcaacgagtgcggcaaggccttcaccagaaagagcgccctgagaatgcaccagagaatccacaccggcgagaagccctacgtgtgcgccgactgcggcaaggccttcatccagaagagccacttcaacacccaccagagaatccacaccggcgagaagccctacgagtgcagcgactgcggcaagagcttcaccaagaagagccagctgcacgtgcaccagagaatccacaccggcgagaagccctacatctgcaccgagtgcggcaaggtgttcacccacagaaccaacctgaccacccaccagaagacccacaccggcgagaagccctacatgtgcgccgagtgcggcaaggccttcaccgaccagagcaacctgatcaagcaccagaagacccacaccggcgagaagccctacaagtgcaacggctgcggcaaggccttcatctggaagagcagactgaagatccaccagaagagccacatcggcgagagacactacgagtgcaaggactgcggcaaggccttcatccagaagagcaccctgagcgtgcaccagagaatccacaccggcgagaagccctacgtgtgccccgagtgcggcaaggccttcatccagaagagccacttcatcgcccaccacagaatccacaccggcgagaagccctacgagtgcagcgactgcggcaagtgcttcaccaagaagagccagctgagagtgcaccagaagatccacaccggcgagaagcccaacatctgcgccgagtgcggcaaggccttcaccgacagaagcaacctgatcacccaccagaagatccacaccagagagaagccctacgagtgcggcgactgcggcaagaccttcacctggaagagcagactgaacatccaccagaagagccacaccggcgagagacactacgagtgcagcaagtgcggcaaggccttcatccagaaggccaccctgagcatgcaccagatcatccacaccggcaagaagccctacgcctgcaccgagtgccagaaggccttcaccgacagaagcaacctgatcaagcaccagaagatgcacagcggcgagaagagatacaaggccagcgactag

SEQ ID NO: 245928 - DNA, 2340 bp, Artificial Sequence
  derived and/or modified sequence
atggctgccaatggcgatagtcctccctggagccccgccctcgctgccgaagggagggggtcgtcatgcgaggccagcgtctcctttgaggatgtgacagtggatttctctaaggaggaatggcagcacttggaccccgctcagcgcagactgtactgggacgttactctagaaaattactctcacctcttgtctgtgggctatcagatcccaaaatccgaagcggcatttaaactggagcagggggagggtccctggatgctggaaggcgaagcaccccatcagagctgtagtggcgaggccatcggcaaaatgcagcagcagggcattccaggtggcatattcttccactgtgagcgatttgatcagccaattggagaggactcactttgtagcattttggaggaattgtggcaggacaatgaccaactggaacagcggcaggaaaaccagaataacctactctcgcacgtcaaggtgctcattaaagagcgaggatacgagcataaaaatatagagaaaattattcacgttactaccaagctggtgccttccatcaagcggctgcacaattgtgacacgatcctaaaacacactctcaattcccacaatcataaccggaacagcgcaacgaagaacctggggaaaatattcggcaacgggaacaactttccgcattctccctcgagcacaaagaacgaaaatgcaaagaccggtgcaaattcgtgtgaacacgaccactacgaaaagcacctgagccacaaacaggccccaacccatcaccagaaaatccaccccgaggagaagctctacgtctgtaccgagtgtgtaatgggctttactcaaaagtcgcatctttttgagcaccagcgcatccacgctggtgagaaaagtcgggaatgtgacaaatctaataaagtgttccctcagaaaccccaggtggacgtgcaccccagcgtgtacacaggtgaaaaaccttatctgtgtactcaatgcggcaaggtcttcacgctgaagtctaacctgatcacacatcagaaaattcataccggacagaaaccatacaagtgttcagaatgtggaaaggcattttttcagcgaagtgatctgttccgtcatcttcgcattcacaccggagaaaagccctatgagtgttccgagtgtggcaaaggattctctcaaaacagtgatctctctattcaccaaaagactcacacaggcgagaaacattacgagtgcaacgagtgcggcaaagcgttcacccgaaaatccgctctgcggatgcaccaacggatccatactggggaaaaaccctacgtgtgcgccgactgtggcaaggccttcattcagaagtcgcactttaacactcaccagaggattcacacaggagagaagccgtacgaatgttccgactgcggtaagtcctttacaaagaaaagccagttgcatgtgcaccagaggatccacacgggcgaaaagccatacatttgcaccgagtgtggaaaagtcttcacccaccgtactaacctcacaacccaccagaagacgcataccggcgagaagccttacatgtgcgctgagtgtggaaaagcgtttaccgaccaatccaacctgattaaacaccagaaaacgcataccggagaaaaaccctataagtgcaatggttgtggcaaggcgttcatctggaagagtcggctcaaaattcaccagaagtcccacattggcgaacgccattacgaatgtaaagactgcggaaaagcgttcatccagaagagcacgctaagcgtgcaccagcgaattcatacaggtgaaaaaccatacgtgtgccctgaatgtggcaaagccttcatccaaaaatcacactttatcgcacatcaccggattcacacgggagagaaaccctacgagtgctccgattgtggaaaatgtttcactaagaagtcccagctccgggtgcaccagaaaattcacaccggggagaaaccaaacatatgcgcggaatgcggcaaggcgtttactgacaggtcgaacctaattactcatcagaagattcatacgagggaaaaaccttacgaatgtggcgattgcggaaaaactttcacgtggaaaagcaggttgaatatccaccagaagtcacacaccggcgagcgccattacgagtgctctaaatgcggaaaagccttcatccaaaaggccactctgtccatgcatcagatcatacacaccggcaagaagccgtatgcatgtacagagtgtcagaaagcttttactgaccgctccaacttgataaaacatcaaaagatgcatagcggggagaaaaggtacaaagctagcgactag

SEQ ID NO: 245929 - DNA, 2340 bp, Artificial Sequence
  derived and/or modified sequence
atggctgctaatggggactcccccccatggagccccgctctggccgccgaagggcgcggttcctcttgtgaggcctcagtgtctttcgaagacgttactgtagatttctcgaaggaagaatggcagcaccttgacccagcccagcgacgactctactgggatgttaccctggagaattatagccacctcttatctgtgggctaccagattcccaaatcagaggccgccttcaaactcgagcagggtgaggggccctggatgctggaaggcgaagctcctcatcagtcttgcagtggagaagctatcgggaagatgcaacagcagggtatacccgggggaatcttcttccactgcgaaagattcgaccagcccataggggaagactcattgtgttccattctggaggaattgtggcaagacaatgaccagttagagcagaggcaggaaaaccaaaacaatcttctcagtcatgtgaaagtattaatcaaagagcgcggttacgaacataaaaacattgaaaagatcatccacgttacaaccaagctggtgcccagtataaagcggctgcacaattgcgataccatactgaagcacacactcaacagccacaaccacaaccgtaactccgccacgaagaatctgggtaagatctttggcaatgggaataacttcccccactcgcctagttccactaagaacgagaacgctaaaacaggtgccaactcctgcgagcacgatcactacgagaagcatctctcccacaagcaggctccaacacatcaccaaaagatccatcctgaagagaaactctatgtatgcaccgagtgcgtgatgggattcacccagaaatctcatctgtttgaacatcaaagaatccacgcgggagagaagtccagagagtgcgataagagcaacaaggtctttcctcagaagccacaggttgatgttcacccatccgtatatactggagagaaaccttacctttgtacacagtgtggaaaggtttttacgctgaagagcaacctcatcacccaccagaagatacacactggacagaagccctacaaatgcagtgagtgcgggaaggccttcttccagagaagcgacctctttagacatctgcgcatacataccggagaaaagccatacgaatgctcagagtgcggcaaggggtttagccagaatagcgacctgtccattcaccagaagacccacactggggagaaacactatgaatgcaacgagtgcggtaaggcattcactcggaaaagtgccctaaggatgcatcagagaatacatactggggagaaaccctatgtctgcgctgattgtggcaaggcattcattcaaaagtcccacttcaatactcatcagcgtatccacaccggagaaaaaccctatgagtgtagtgactgcgggaagagctttactaagaaaagccagctacatgtgcaccagagaatccatacaggcgaaaaaccctatatctgcaccgagtgtgggaaggtgttcacacacagaaccaacctgacgactcatcagaaaacacataccggggaaaaaccctatatgtgtgctgagtgtggtaaggcctttacagaccaatccaacctgataaagcatcagaaaactcacacaggagagaagccctataagtgcaatggctgcgggaaggccttcatctggaaatcacggctcaaaatccaccagaagtcccatataggggagcgccactacgagtgcaaggattgcggcaaggcattcatccagaagtccacactttctgtccaccagaggatacataccggagaaaaaccttatgtgtgtccggagtgtggaaaagcttttattcagaaatcacacttcattgcccatcaccgcatccacaccggtgagaaaccatatgagtgcagcgattgcgggaaatgcttcacgaaaaagtcacagctgagggtccaccaaaagattcacactggagagaaacccaatatttgcgccgaatgcggcaaggcgtttacggataggtcgaacctcatcactcaccagaaaatccacaccagagagaaaccctacgagtgcggcgattgcggaaagacatttacttggaagtctagattaaacatccatcaaaaatcgcacaccggggagagacattatgagtgctctaagtgtgggaaagcattcatacagaaagcaacactctctatgcatcagattattcacaccggaaagaaaccatacgcttgtacggagtgccagaaggccttcacggacagaagcaacttgatcaaacaccagaaaatgcattcaggcgaaaagagatataaagccagcgactag

SEQ ID NO: 245930 - DNA, 2340 bp, Artificial Sequence
  derived and/or modified sequence
atggccgccaacggggacagccccccctggagccctgccctggccgctgagggccggggcagcagctgtgaggcctctgtgtcctttgaagatgtgacagtggacttcagcaaggaggagtggcagcacctggaccctgcccagaggcggctgtactgggatgtgaccctggagaactacagccacctgctgtctgtgggctaccagatccccaagtctgaggccgccttcaagctggagcagggcgagggcccctggatgctggagggggaggccccccaccagagctgcagcggggaggccatcggcaagatgcagcagcagggcatccctgggggcatcttcttccactgtgaaagatttgaccagcccatcggggaggacagcctgtgcagcatcctggaggagctgtggcaggacaatgaccagctggagcagaggcaggagaaccagaacaacctgctgagccacgtgaaggtgctgatcaaggagcggggctatgagcacaagaacatcgagaagatcatccacgtgaccaccaagctggtgcccagcatcaagaggctgcacaactgtgacaccatcctgaagcacaccctgaacagccacaaccacaacagaaattctgccaccaagaacctgggcaagatctttggaaatggaaacaacttcccccacagccccagcagcaccaagaatgaaaatgccaagacaggagccaacagctgtgaacatgaccactatgagaagcacctgagccacaagcaggcccccacccaccaccagaagatccaccctgaggagaagctgtatgtgtgcacagaatgtgtgatgggcttcacccagaagagccacctgtttgagcaccagagaattcatgctggggagaagagccgggagtgtgacaagagcaacaaggtgttcccccagaagccccaggtggatgtgcaccccagcgtgtacaccggggagaagccctacctgtgcacccagtgtgggaaggtgttcaccctgaagagcaacctgatcacccaccagaagatccacacaggccagaagccctacaagtgcagtgaatgtgggaaggccttcttccagaggagtgacctcttccgccacctgcgcatccacactggagagaagccctatgagtgcagtgaatgtgggaagggcttcagccagaacagcgacctgagcatccaccagaagacccacactggagagaagcactatgagtgcaatgaatgtgggaaggccttcaccaggaagagcgccctgaggatgcaccagaggatccacactggagagaagccctacgtgtgtgccgactgtgggaaggccttcatccagaagagccacttcaacacccaccagaggatccacactggagagaagccctatgagtgcagcgactgtgggaagagcttcaccaagaagagccagctgcacgtgcaccagaggatccacactggagagaagccctacatctgcacagaatgtgggaaggtgttcacccacaggaccaacctgaccacccaccagaagacccacactggagagaagccctacatgtgtgctgaatgtgggaaggccttcacagaccagagcaacctgatcaagcaccagaagacccacactggagagaagccctacaagtgcaatggctgtgggaaggccttcatctggaagagccggctgaagatccaccagaagagccacatcggggagcggcactatgagtgcaaggactgtgggaaggccttcatccagaagagcaccctgtctgtgcaccagaggatccacactggagagaagccctacgtgtgcccagaatgtgggaaggccttcatccagaagagccacttcatcgcccaccaccgcatccacactggagagaagccctatgagtgcagcgactgtgggaagtgcttcaccaagaagagccagctgcgggtgcaccagaagatccacactggagagaagcccaacatctgtgctgaatgtgggaaggccttcacagacaggagcaacctgatcacccaccagaagatccacacccgggagaagccctatgaatgtggggactgtgggaagaccttcacctggaagagccggctgaacatccaccagaagagccacactggagagcggcactatgagtgcagcaaatgtgggaaggccttcatccagaaggccaccctgtccatgcaccagatcatccacacaggcaagaagccctatgcctgcacagagtgccagaaggccttcacagacaggagcaacctgatcaagcaccagaagatgcacagcggggagaagcgctacaaggccagtgactag

SEQ ID NO: 245931 - DNA, 2340 bp, Artificial Sequence
  derived and/or modified sequence
atggccgccaacggcgacagccccccctggagccccgccctggccgccgaaggacgtggtagttcctgcgaggcttcagtgtcttttgaagacgtgactgtggacttcagcaaggaagaatggcagcatctggatcctgcccaacggagactatattgggatgtgacactcgaaaattactcccacctcttgagtgtgggctaccagattcccaagtccgaggcagctttcaaactggaacaaggcgaaggcccatggatgctggaaggagaggctccacatcagagctgctccggtgaagctattggaaagatgcagcaacaaggcattcctggcggcatattcttccattgcgagcggttcgaccaaccaataggcgaagattccttgtgctccattctcgaagagctttggcaagataacgaccagctagagcagcggcaggaaaaccagaacaacctcctatctcatgttaaagttctgattaaagaaagaggctacgaacacaagaacattgagaagataattcacgtcacgaccaagctggtgccttccataaagcgcctgcataactgtgatacgatccttaagcacactctgaattcacataaccataacaggaatagcgccaccaagaatttgggtaagatcttcgggaatggaaacaacttccctcattccccatcgtccactaagaacgaaaacgcaaagaccggtgctaattcttgtgaacacgatcactacgaaaagcacctatcacataaacaggctcccacacaccaccagaagatacaccccgaggaaaagttatacgtgtgcaccgaatgcgtgatgggatttactcagaaatcgcacctgtttgagcaccaacgaatacatgccggtgagaagtcacgagagtgcgataagtccaacaaagtcttcccccagaagccccaggtcgatgtgcacccttcagtatacaccggtgagaaaccatatttatgtactcagtgcggaaaggtttttacactgaaatctaacctgattacacaccagaagattcatacagggcagaaaccctataagtgcagcgagtgcggaaaggctttcttccagcgctcggacctgttccggcacctgaggatacataccggggagaaaccatacgagtgttcagagtgcggaaaaggttttagtcagaattccgatctttcaatccaccaaaaaacacataccggagagaagcattacgagtgcaatgagtgcggaaaagcctttactagaaaatcagctctgcgaatgcaccagcggattcacaccggagagaagccatatgtgtgtgccgattgcggtaaggccttcatacagaaaagccatttcaacacccaccaacgaattcacactggcgaaaagccttacgagtgcagtgattgcggaaagagttttacaaaaaaatctcaactccacgtccaccagcgcatccataccggcgagaagccgtacatctgcactgaatgcggaaaggtgtttacccaccgcaccaacctcactacacaccagaagacccacacaggcgagaagccttatatgtgtgccgaatgcggaaaggctttcactgatcagtcaaaccttattaagcatcaaaaaacacacacgggggaaaaaccttataagtgtaatggatgcggaaaagcattcatttggaagtctcgccttaagatacaccagaaatcccatatcggagagcgccattacgaatgtaaagattgcggaaaggcctttatacaaaagagcacgttgagcgtccaccagcgaatccatacaggtgaaaaaccttatgtgtgtcccgaatgcgggaaagccttcatacaaaaaagtcacttcatcgcccaccatcgcattcacaccggtgaaaaaccatacgagtgttcagactgcggcaagtgttttacgaaaaaatctcaactgagggtccaccagaaaatacatacaggcgaaaagccaaacatttgtgctgagtgtgggaaagcatttacagacaggagtaacctaattacacaccagaagattcataccagggagaaaccatacgaatgcggtgactgcggtaagaccttcacctggaagtctcgcctgaatattcaccaaaagagtcataccggcgaaaggcactacgagtgttcaaagtgcggaaaggcatttattcagaaagccaccctatccatgcaccagatcattcataccggcaaaaaaccttatgcctgtacggagtgtcagaaggctttcaccgacaggagcaacctgatcaaacatcagaagatgcatagcggagagaagcgttacaaggcttctgattag

SEQ ID NO: 245932 - DNA, 2340 bp, Artificial Sequence
  derived and/or modified sequence
atggccgccaacggcgacagccccccctggagccccgccctggccgccgagggccgaggaagctcgtgcgaagcctccgtctcattcgaggacgtaacggtggatttttccaaagaggagtggcaacacctggacccagcacaacggcggctgtactgggacgtaaccctggaaaattacagccacctgctctccgtgggctatcaaatacccaagtccgaagctgcattcaaactggagcagggtgaaggcccatggatgttagagggggaggcccctcatcagagctgcagcggcgaagctattggcaagatgcagcagcagggcatccctggagggatctttttccactgcgaacgcttcgaccaacctattggtgaagatagtctgtgttctatacttgaagagctgtggcaagataatgaccaacttgaacagcgacaggagaatcagaacaatctgctgagtcacgtgaaggtcctgatcaaggaacgaggatacgagcacaaaaatattgagaaaataatacacgttaccaccaaactggttccctctattaagcgcctccataactgcgatactatcctaaagcacaccttaaactcccacaaccataatcggaacagcgccactaaaaacttgggaaagattttcggaaatggcaacaactttcctcatagcccgtcctccactaaaaacgaaaatgctaaaaccggggccaattcctgtgagcacgaccattacgaaaagcacctaagtcacaaacaagctcccacacaccatcagaagattcatcctgaagaaaagctgtacgtctgcacagaatgcgtcatgggttttacacaaaaatctcacctctttgagcaccagcggatacatgcaggcgaaaagtctagagaatgtgataagtctaataaggtctttccacagaaaccacaggtcgacgtgcaccccagcgtgtacaccggagaaaagccgtacttgtgcacacagtgtggaaaggtctttacattgaaatctaacctcattacgcatcagaaaattcacactggacaaaagccttataagtgctcagagtgcggcaaagccttttttcagaggtctgacctctttcgtcacctgagaatacacacaggcgagaaaccctacgaatgcagcgagtgcggtaagggattctcgcagaattctgacctgtccattcaccagaaaacccacacgggtgaaaaacattatgaatgtaacgagtgcggcaaggccttcacacgtaaaagcgcgcttcgcatgcatcaaaggattcacacaggagaaaagccctatgtatgtgccgattgcggaaaggcgttcatccaaaagagccattttaatactcaccaacggattcacactggggaaaaaccttatgaatgctccgattgtggaaagtctttcactaagaaatcccagctgcacgtgcaccaaagaattcatacaggcgagaaaccttacatttgtacggagtgcggaaaggtctttacccaccgcacaaatcttactacacaccaaaaaacacatacaggcgaaaagccctacatgtgtgctgagtgcgggaaagcgttcactgaccaatccaacctaatcaaacatcaaaagacccataccggtgagaaaccttataagtgcaacggttgtggaaaggccttcatctggaagagcaggctgaagattcaccaaaaatcccacataggagagcggcattacgagtgtaaggattgtggaaaggcattcatccagaagtcgactctgtcggtgcaccagcggatccacactggcgagaaaccatatgtgtgccccgagtgtggcaaagctttcatccagaagtcacacttcattgcacatcaccgaattcacaccggggaaaagccgtacgaatgcagtgattgcggcaaatgctttaccaagaaatctcaattacgggtgcaccagaaaatacacacgggcgagaagcccaatatctgtgctgagtgtgggaaggcctttaccgaccggagcaatttgattacacaccagaagattcacaccagagagaagccttacgagtgcggggactgcgggaagacctttacatggaaatcgaggctgaacattcatcagaaatcacatacaggcgaaaggcactacgagtgttctaaatgtgggaaggctttcatccaaaaagccaccctaagcatgcaccaaatcattcataccggaaaaaaaccatacgcatgcacagagtgccagaaagctttcactgatcgaagcaatctgattaagcatcaaaaaatgcacagtggggaaaagcggtataaggcctctgattag

SEQ ID NO: 245933 - DNA, 2340 bp, Artificial Sequence
  derived and/or modified sequence
atggctgccaacggagattcccctccgtggtcgcctgctcttgctgccgaagggaggggctccagttgtgaggctagcgtgtccttcgaagatgtgaccgtggacttctctaaggaggagtggcagcatctggacccagctcagagacgtctgtactgggacgtgacgctggaaaactacagccacctgctctcggtcggatatcagattcctaaatccgaggcagctttcaagctggagcaaggtgaggggccatggatgctcgaaggggaagccccacatcagagctgcagcggggaagccatcggcaagatgcagcagcaggggataccaggcggaatttttttccactgtgagcgcttcgatcaacccattggcgaagactcactctgcagtatcctcgaagaactttggcaggataacgaccagcttgagcagcgacaagagaatcagaataatcttctgagccatgtgaaagttctgataaaggaacgcggatatgagcataaaaatatcgagaagattatccacgtcaccacgaagctggttccttccataaagcgcctgcataactgtgatacaatattaaagcacacattaaattcccacaaccacaatcgcaattctgccacgaaaaatctgggtaaaatatttggtaacgggaataatttcccacactctccatcttcaacaaagaacgagaacgcaaagacaggggcaaatagttgtgagcatgaccactatgagaaacacctgtcacataaacaggcccctacccaccatcagaagatccatcctgaggaaaaactgtacgtgtgcacagaatgcgtcatggggtttactcagaaaagccacctgttcgagcaccagcggatacatgcaggggaaaagtcccgcgaatgtgataagagcaataaggtgtttcctcagaagcctcaggtagatgtgcatcccagcgtgtacacaggggagaaaccctatctgtgtacacagtgtggcaaggtgttcacactgaagtcaaacctcatcactcaccaaaaaattcatacagggcagaaaccatacaagtgttcagaatgtggcaaagccttctttcaacgctccgatctgttccgacatttacgcatccacacaggcgagaaaccttacgaatgctctgagtgcgggaagggcttctctcagaattctgatcttagcatacatcaaaagactcacactggcgagaagcactacgaatgcaatgagtgcgggaaagcatttacacgaaagtcagcccttaggatgcatcagaggattcacacaggcgaaaagccttatgtgtgtgcggattgcgggaaggccttcatccagaaatcccacttcaacactcaccagcggatacatacgggagagaagccttacgagtgttctgattgcggaaagagttttacgaaaaagtcccagttgcacgtgcatcagcgcattcacacgggggaaaaaccctacatctgtacggagtgtggaaaagtctttacccatagaacaaacctcacgacccatcagaagacacatacaggtgagaaaccctacatgtgcgctgagtgcggtaaggcattcactgaccagtcaaacctgatcaaacatcagaaaacacacaccggagagaaaccatacaagtgtaatgggtgcggcaaggccttcatatggaagagtcggctgaagatccaccagaaatctcatattggggaaaggcactatgaatgcaaggactgtgggaaagcatttattcagaaatcgacactctccgttcatcaaaggattcacacaggggagaaaccttatgtatgccctgagtgcggaaaggctttcatccagaaaagtcacttcatcgcccaccatagaattcacaccggagagaaaccatatgagtgctcagactgcggtaaatgcttcactaagaagtctcagctgcgtgtccatcagaagatccatactggagagaagccgaatatttgtgcagaatgtggcaaggctttcactgataggagtaacctgattacccaccagaagatccatacgcgtgaaaagccttacgagtgcggtgactgcggtaaaacgtttacctggaagtcccggctcaacatccaccagaagtctcacacgggcgagagacactatgagtgctccaaatgcggcaaagcgtttattcaaaaagccactcttagtatgcaccagataatccatacaggcaagaaaccatacgcatgcacagagtgtcagaaggccttcacagaccggtctaacctaatcaaacaccagaagatgcactctggcgaaaagagatacaaggctagtgattag

SEQ ID NO: 245934 - DNA, 2340 bp, Artificial Sequence
  derived and/or modified sequence
atggctgctaatggcgacagcccgccttggagtccggcactggctgccgagggacgaggcagcagctgcgaggcatccgtatcattcgaagatgtcactgtagacttttctaaggaggaatggcaacatcttgatcccgctcagcggcgattatactgggacgtgacactggagaactactcacacctgctgagtgtgggctatcagatccctaagtctgaggccgctttcaaactagaacaaggcgagggaccctggatgctcgagggggaagctccccatcagtcctgtagtggtgaggccataggtaagatgcagcagcagggtatccccggtggaatcttcttccactgcgagcgatttgaccagcccattggcgaggacagcctgtgttctatcttggaggagctctggcaagataatgatcagctggaacagcggcaagagaaccagaataatcttctatcacatgtaaaggtgctcatcaaagagaggggatacgaacacaagaacattgagaagattattcacgtgactactaagttggtgccttcaattaagcgtctccacaactgcgacacgatcctgaaacacaccctgaacagtcataaccataaccgaaatagcgccacgaaaaaccttggcaagattttcggcaacggaaacaacttcccccactcgccgagctcaacaaagaacgagaatgccaagactggcgcaaattcttgcgagcacgatcactacgagaagcacttgtcccacaagcaagcccctactcatcaccagaaaattcacccagaagagaaactgtatgtatgcaccgaatgtgtcatgggcttcactcagaaatcccacctgttcgaacatcagagaatacatgccggtgagaagagccgcgagtgcgataagtctaacaaagtttttcctcaaaaacctcaggtggatgtgcaccctagcgtgtataccggagagaaaccttacctgtgcactcagtgcggaaaagtttttacactgaagtctaacctgataactcatcagaaaattcatactggacagaagccctataagtgtagtgaatgtgggaaagctttctttcagcgatccgatctttttagacacttgcgcatccatactggcgagaagccctatgagtgctccgagtgtggcaagggatttagtcagaacagcgatctttctatccaccaaaaaacccacacaggcgaaaagcactacgaatgtaatgaatgcggcaaggcattcacgcgcaaatctgccctgcgaatgcaccaaagaattcacaccggtgaaaaaccttatgtctgtgccgattgcggcaaggccttcatacagaagtcacactttaacacccatcagaggattcacaccggcgagaaaccttatgagtgcagcgattgtggcaaaagtttcacaaaaaagtctcagctgcatgtccatcaaagaatccacaccggcgaaaagccctatatttgcaccgagtgtggaaaagtctttactcacaggaccaatttaaccacacaccaaaaaacacatactggtgagaagccctatatgtgtgccgagtgcggtaaggcatttacggatcaatctaacctgatcaagcaccagaaaacccataccggcgaaaagccttataagtgcaacggttgcgggaaagcatttatatggaaaagtagacttaagatccatcagaagtcccacatcggcgagaggcactatgagtgcaaggattgcggaaaggccttcatacagaagtctactctgtccgtgcaccagcgcattcataccggtgagaagccctatgtttgtcccgagtgcggaaaagccttcatccagaagagccactttattgcgcaccacagaatccataccggggaaaaaccttacgagtgttcagactgtggaaaatgctttacaaagaaaagccagctgagggtgcatcagaagatccataccggagaaaaacccaatatctgcgccgagtgcggcaaggcttttaccgaccgctcaaacctcatcacacaccagaagattcacactagagaaaaaccttatgagtgtggagactgcggtaagacgttcacgtggaaaagtcggctcaatattcaccagaagagccacaccggcgaaaggcactacgaatgtagtaagtgtgggaaagccttcatccaaaaagccacactgtctatgcatcagatcatccacacaggcaaaaagccctatgcgtgtaccgagtgccagaaagccttcactgatagaagcaatttgatcaagcaccaaaagatgcacagcggcgagaagaggtacaaagcgtctgactag

SEQ ID NO: 245935 - DNA, 4297 bp, Artificial Sequence
  derived and/or modified sequence
gtaagggcacccaccaggtgtaattgtgggcgagcggccgcttcggagctgacactaagcatgtgcagatcaagtccagaagcgccggggttcctcgaagcagttttcaggacttaaggctctgggacatccagcacagtgagcggcccctgggcaccaccagaaaacatttgtgagtgaacgtggagtgatgaccatgtggacactgtctttccagggtttcttggagcctctgcagagtctgggggccaggcttcttagtggaaactgcaggatcttccttctgacccctgcttgcctcgccccagcagctccggttgagtccacagatgccagctcagcttccagcttggggaagagtggggttgtcagcaggagagcctgagggctgaggcccagcgtgaacatggcagctaatggggactctcccccatggtccccggccctggctgcagagggacgtggcagctcatgtgaggcttcagtgtcatttgaggacgtgactgtggacttcagcaaggaggagtggcagcacttggaccctgcccagagacgcctgtactgggatgtgacactagagaactacagccacctgctctcagtggggtaccaaattcccaagtcagaggctgccttcaagttggagcaaggagaggggccatggatgctggagggggaagccccacatcagagctgttcaggtgaggctattgggaaaatgcagcaacagggaattcctggaggaattttcttccactgtgagagatttgatcaacccataggagaagattcattatgttctattttagaagaactgtggcaagataatgaccagctagagcaacgtcaggaaaaccagaataaccttttaagtcatgtgaaagtattgattaaggagaggggctatgaacataaaaacattgaaaaaataattcatgtgactaccaagcttgttccttcaattaaaagactccataactgtgacacaattttgaagcatactttaaactcacataatcataatagaaacagtgcaacaaagaaccttggcaagatttttggaaatggtaacaatttcccccatagcccttcctctactaagaatgagaatgctaaaacaggagcaaattcctgtgaacatgaccactatgaaaaacatctcagccacaaacaagctcccacccaccatcagaaaattcatcctgaggagaagctttatgtgtgtactgaatgtgtaatgggcttcactcagaagtcacatctgtttgagcatcagagaattcatgctggagaaaagtcccgtgaatgtgacaaaagcaacaaagtcttcccccagaaaccccaggttgatgtacatccaagtgtttatacaggagaaaaaccctatctgtgtactcaatgtgggaaagtctttaccctcaaatcaaacctcattacacatcaaaaaattcataccgggcagaaaccctacaaatgcagtgaatgtggaaaagcctttttccagagatcagacctctttagacatctgagaattcatacaggagaaaaaccttatgaatgcagtgaatgtggaaaaggcttctcccagaactcagacctcagtatacatcagaaaactcataccggagagaaacactatgaatgcaatgaatgtgggaaggctttcacaagaaaatcagcactcaggatgcatcagagaatccacacgggagagaaaccttatgtatgcgctgactgtgggaaggccttcatccagaaatcacatttcaacacacatcagagaattcatactggagaaaagccgtatgaatgcagtgactgtgggaaatccttcactaagaagtcacaactccatgtgcatcaaagaattcacaccggagagaaaccctatatatgtacagaatgtggaaaggtcttcactcacaggacaaacctcaccacacatcagaaaactcatactggggaaaaaccctatatgtgtgctgaatgtggaaaggcttttactgaccagtcaaatctcattaaacaccagaaaactcacactggagagaaaccctataagtgcaatggctgtggaaaagccttcatatggaagtcgcgcctcaaaatacatcagaaatctcatattggagagagacactatgaatgcaaggactgcgggaaagccttcatccagaaatcaacactaagcgtgcatcagagaatccatacaggagagaaaccgtacgtttgtcctgaatgcgggaaggcctttatccagaaatcgcacttcattgcgcatcatagaatccatactggagagaagccttatgaatgcagcgactgtgggaaatgcttcactaagaagtcacaactccgtgtgcatcagaaaatccacacaggtgagaagcccaatatatgtgctgaatgtggaaaggccttcactgaccgatcaaatctcataacacatcagaaaatccacactagggagaaaccctatgaatgtggtgactgcgggaaaaccttcacctggaagtcacgcctcaatatacatcagaagtctcatactggagaaagacactatgaatgtagtaaatgtgggaaagctttcatccagaaagccacactaagtatgcatcagataattcatacaggaaagaaaccttatgcttgtacagaatgtcagaaggcctttactgacagatcgaatctcattaaacaccagaaaatgcatagtggagaaaaacgctataaagccagtgactgagaaagtcttcacctggaaatcacaactgggtatgcatcaggtatctaatagcagggaggaggaaggcctgttgctgcaatcattgtacagggggaaatgggtatgagagactgaggcttgagtgaactgaaggcaaacagagccaagtatccttcagtccactggaaagacaagttcctgcatcaccacagtgtatatgcaattctatgcataggaagagcctttagagaaagcatttgagcgaaagtcatgtttggtgacatgattcatacagacctcttgagctcctggaaatagtagaattaagacctgaggagatgactcgtcatctcttatgcttcactttttggataaagaactttttaaattcagtactgattggttcagcatatcctgggacataaaaatactcactactgggaaaaactttttcaaatttctaggttgaggagaagagttttcattgtccaaacactggcagggcactgacatcaaggcagaaaacctacttgggaatgcagatatctgtttttgtgatcattggcacttaagacatagaaaagatttccatgaaaaacttttttcttttcccttgggaagtcctcatggtatatatattttaagtgcaatggaatttttaaatttaaagatataactttatgaattgagaaattaggcctagctctaggctatgttacagaaatatagtcattgaatgatacagacatataaaggtagtagttgtctcattattaattccctgctgggagagcagatgagtcataccctataagaagtatgcatgccttctaacctatgtccccaaagctgtcatttgcataagctgcaggccatagattcctgattccctcagtaactgaccctacgacaatggaactgatccacggcactctagattttcaggctaacccaccaacacccctgctttccttgggatttcctgaaaaagaatggttgaaaaattgagtttcacttcctaatattttgtttttcttcctatttggttaaggtatattcatttcctacatgcacattaagggtagttttgtgtagactgctatgtgataaagtcatgttgcattgcaattagttattctaagacataattacagtttatcatagttgaataactggaagacttctcaagaaagagcactgctcttttttaacactgatatatagacacgttctcattttcccttaaacattttttacaatactcataaaaaggaactttctttctagcatgcaattgtatttttattttattttaaaatctttttattaaactataatgtatacagaaaatgcatatatcataaacatacagctcagtgcattctcaaaaactgaacatactcagatcaagaaacagaacatgaccagcaccccagaagccttccccactttcccttccaggcaagcccccaagggtatacattatcctggcttctcacagcatagattcattttgcctgttttgtattttatataaattgagtcaattatatatcatataattgagccata

SEQ ID NO: 245936 - DNA, 4531 bp, Artificial Sequence
  derived and/or modified sequence
cggaggctccccggtagggacggcctgaggccgagggcaccctgagggcggaagaggcaaagcgcctcgcccgccggggcctcggaggtgactaactcctagaggctgcggcggaggggagaagcctggtggtacattccatggcccagtgcctcggccactggaaaatcccacaggggtatatcgagtaggggaccgcgggctccgcggcagaaatgaccgcccttccaagatggcggctcccgtagagacactcccaaggagacagccatgttccttgcctgagagtcactgaaggaaattggaaagcccgcctctccttcgacgcacacgcgcacgcgcacgcacgcaccggcgcggtcatccagcacagtgagcggcccctgggcaccaccagaaaacatttgtgagtgaacgtggagtgatgaccatgtggacactgtctttccagggtttcttggagcctctgcagagtctgggggccaggcttcttagtggaaactgcaggatcttccttctgacccctgcttgcctcgccccagcagctccggttgagtccacagatgccagctcagcttccagcttggggaagagtggggttgtcagcaggagagcctgagggctgaggcccagcgtgaacatggcagctaatggggactctcccccatggtccccggccctggctgcagagggacgtggcagctcatgtgaggcttcagtgtcatttgaggacgtgactgtggacttcagcaaggaggagtggcagcacttggaccctgcccagagacgcctgtactgggatgtgacactagagaactacagccacctgctctcagtggggtaccaaattcccaagtcagaggctgccttcaagttggagcaaggagaggggccatggatgctggagggggaagccccacatcagagctgttcaggtgaggctattgggaaaatgcagcaacagggaattcctggaggaattttcttccactgtgagagatttgatcaacccataggagaagattcattatgttctattttagaagaactgtggcaagataatgaccagctagagcaacgtcaggaaaaccagaataaccttttaagtcatgtgaaagtattgattaaggagaggggctatgaacataaaaacattgaaaaaataattcatgtgactaccaagcttgttccttcaattaaaagactccataactgtgacacaattttgaagcatactttaaactcacataatcataatagaaacagtgcaacaaagaaccttggcaagatttttggaaatggtaacaatttcccccatagcccttcctctactaagaatgagaatgctaaaacaggagcaaattcctgtgaacatgaccactatgaaaaacatctcagccacaaacaagctcccacccaccatcagaaaattcatcctgaggagaagctttatgtgtgtactgaatgtgtaatgggcttcactcagaagtcacatctgtttgagcatcagagaattcatgctggagaaaagtcccgtgaatgtgacaaaagcaacaaagtcttcccccagaaaccccaggttgatgtacatccaagtgtttatacaggagaaaaaccctatctgtgtactcaatgtgggaaagtctttaccctcaaatcaaacctcattacacatcaaaaaattcataccgggcagaaaccctacaaatgcagtgaatgtggaaaagcctttttccagagatcagacctctttagacatctgagaattcatacaggagaaaaaccttatgaatgcagtgaatgtggaaaaggcttctcccagaactcagacctcagtatacatcagaaaactcataccggagagaaacactatgaatgcaatgaatgtgggaaggctttcacaagaaaatcagcactcaggatgcatcagagaatccacacgggagagaaaccttatgtatgcgctgactgtgggaaggccttcatccagaaatcacatttcaacacacatcagagaattcatactggagaaaagccgtatgaatgcagtgactgtgggaaatccttcactaagaagtcacaactccatgtgcatcaaagaattcacaccggagagaaaccctatatatgtacagaatgtggaaaggtcttcactcacaggacaaacctcaccacacatcagaaaactcatactggggaaaaaccctatatgtgtgctgaatgtggaaaggcttttactgaccagtcaaatctcattaaacaccagaaaactcacactggagagaaaccctataagtgcaatggctgtggaaaagccttcatatggaagtcgcgcctcaaaatacatcagaaatctcatattggagagagacactatgaatgcaaggactgcgggaaagccttcatccagaaatcaacactaagcgtgcatcagagaatccatacaggagagaaaccgtacgtttgtcctgaatgcgggaaggcctttatccagaaatcgcacttcattgcgcatcatagaatccatactggagagaagccttatgaatgcagcgactgtgggaaatgcttcactaagaagtcacaactccgtgtgcatcagaaaatccacacaggtgagaagcccaatatatgtgctgaatgtggaaaggccttcactgaccgatcaaatctcataacacatcagaaaatccacactagggagaaaccctatgaatgtggtgactgcgggaaaaccttcacctggaagtcacgcctcaatatacatcagaagtctcatactggagaaagacactatgaatgtagtaaatgtgggaaagctttcatccagaaagccacactaagtatgcatcagataattcatacaggaaagaaaccttatgcttgtacagaatgtcagaaggcctttactgacagatcgaatctcattaaacaccagaaaatgcatagtggagaaaaacgctataaagccagtgactgagaaagtcttcacctggaaatcacaactgggtatgcatcaggtatctaatagcagggaggaggaaggcctgttgctgcaatcattgtacagggggaaatgggtatgagagactgaggcttgagtgaactgaaggcaaacagagccaagtatccttcagtccactggaaagacaagttcctgcatcaccacagtgtatatgcaattctatgcataggaagagcctttagagaaagcatttgagcgaaagtcatgtttggtgacatgattcatacagacctcttgagctcctggaaatagtagaattaagacctgaggagatgactcgtcatctcttatgcttcactttttggataaagaactttttaaattcagtactgattggttcagcatatcctgggacataaaaatactcactactgggaaaaactttttcaaatttctaggttgaggagaagagttttcattgtccaaacactggcagggcactgacatcaaggcagaaaacctacttgggaatgcagatatctgtttttgtgatcattggcacttaagacatagaaaagatttccatgaaaaacttttttcttttcccttgggaagtcctcatggtatatatattttaagtgcaatggaatttttaaatttaaagatataactttatgaattgagaaattaggcctagctctaggctatgttacagaaatatagtcattgaatgatacagacatataaaggtagtagttgtctcattattaattccctgctgggagagcagatgagtcataccctataagaagtatgcatgccttctaacctatgtccccaaagctgtcatttgcataagctgcaggccatagattcctgattccctcagtaactgaccctacgacaatggaactgatccacggcactctagattttcaggctaacccaccaacacccctgctttccttgggatttcctgaaaaagaatggttgaaaaattgagtttcacttcctaatattttgtttttcttcctatttggttaaggtatattcatttcctacatgcacattaagggtagttttgtgtagactgctatgtgataaagtcatgttgcattgcaattagttattctaagacataattacagtttatcatagttgaataactggaagacttctcaagaaagagcactgctcttttttaacactgatatatagacacgttctcattttcccttaaacattttttacaatactcataaaaaggaactttctttctagcatgcaattgtatttttattttattttaaaatctttttattaaactataatgtatacagaaaatgcatatatcataaacatacagctcagtgcattctcaaaaactgaacatactcagatcaagaaacagaacatgaccagcaccccagaagccttccccactttcccttccaggcaagcccccaagggtatacattatcctggcttctcacagcatagattcattttgcctgttttgtattttatataaattgagtcaattatatatcatataattgagccata

SEQ ID NO: 245937 - protein, 317 aa, Artificial Sequence
  derived and/or modified sequence
METNCRKLVSACVQLGVQPAAVECLFSKDSEIKKVEFTDSPESRKEAASSKFFPRQHPGANEKDKSQQGKNEDVGAEDPSKKKRQRRQRTHFTSQQLQELEATFQRNRYPDMSTREEIAVWTNLTEARVRVWFKNRRAKWRKRERNQQAELCKNGFGPQFNGLMQPYDDMYPGYSYNNWAAKGLTSASLSTKSFPFFNSMNVNPLSSQSMFSPPNSISSMSMSSSMVPSAVTGVPGSSLNSLNNLNNLSSPSLNSAVPTPACPYAPPTPPYVYRDTCNSSLASLRLKAKQHSSFGYASVQNPASNLSACQYAVDRPV

SEQ ID NO: 245938 - protein, 290 aa, Artificial Sequence
  derived and/or modified sequence
METNCRKLVSACVQLGVQPAAVECLFSKDSEIKKVEFTDSPESRKEAASSKFFPRQHPGANEKDKSQQGKNEDVGAEDPSKKKRQRRQRTHFTSQQLQELEATFQRNRYPDMSTREEIAVWTNLTEARVRVWFKNRRAKWRKRERNQQAELCKNGFGPQFNGLMQPYDDMYPGYSYNNWAAKGLTSASLSTKSFPFFNSMNVNPLSSQSMFSPPNSISSMSMSSSMVPSAVTGVPGSSLNSLNNLNNLSSPSLNSAVPTPACPYAPPTPPYVYRDTCNSSLASLRLKAKQ

SEQ ID NO: 245939 - DNA, 954 bp, Artificial Sequence
  derived and/or modified sequence
atggagacaaactgtagaaagctcgtgtcggcatgcgttcagctcggagtgcaacctgccgccgtggagtgcttgttcagtaaagactctgaaattaagaaggtggagtttactgatagcccggagtcccggaaggaagcagctagctctaaattttttccaaggcagcatcccggagccaacgagaaggacaaatcccagcagggcaagaacgaagatgtcggcgctgaggacccatctaagaaaaagcgacagaggcgacagagaactcactttactagtcaacagctgcaagagcttgaggcgacatttcagcgcaaccgataccctgacatgtctactcgagaagaaatagctgtgtggacaaatttaactgaggcaagagtgagagtgtggtttaaaaacagacgcgctaagtggcgcaagcgggaacgtaaccaacaggccgagctgtgcaagaatggcttcggaccacagtttaacggtttgatgcagccatacgacgacatgtaccccgggtactcatacaataactgggccgcaaagggcttgacaagcgcgagcctgtcaactaaatcctttccattcttcaacagcatgaatgttaacccactgtccagtcaaagcatgttttcaccaccaaattcaatatcttctatgtcaatgtctagtagcatggtgccctccgccgtcactggcgttcccggcagcagtctgaatagcctgaacaatctcaataacttgtcaagcccctctttgaatagtgccgtgcctactcccgcttgcccatatgcccccccaacccccccttacgtttacagggatacatgcaattcctcccttgcaagtctccgcctcaaagccaagcagcactcttcattcggatacgctagcgtccagaaccctgcaagtaatctgtccgcatgtcagtacgccgtagaccgaccagtgtag

SEQ ID NO: 245940 - DNA, 954 bp, Artificial Sequence
  derived and/or modified sequence
atggagaccaactgtcggaaactcgtgtctgcttgcgtccagctgggcgttcagccagcagccgtggagtgcctatttagtaaagattcagagatcaaaaaggtggagtttacagactcaccagagtccaggaaagaagcggcctcctcaaaatttttccctagacaacacccaggggccaatgaaaaagacaagtcccagcagggtaagaatgaagacgtgggcgcagaagatccgtcaaagaagaaaaggcagagaagacagaggacccactttactagccaacagctgcaggagctggaagcaacctttcagcggaacaggtacccggacatgtcgaccagggaggagatagccgtctggaccaacctgacggaggccagagtccgcgtctggtttaaaaatcgtagggcaaaatggcgaaagcgtgaacggaaccaacaggcggagctgtgcaagaatggattcggcccccagttcaatgggcttatgcaaccttacgacgacatgtacccaggatactcatacaataactgggcagccaagggactgacctcagcatccttgtccaccaaatcttttcccttttttaattcgatgaatgtcaaccccctctcctcacagagtatgtttagtccacctaacagcatatcaagcatgtccatgtcctcaagcatggtgccatctgccgtgacgggggtgccaggctcaagcctgaactcactcaacaacctcaataatttgtcttccccgtccctcaattctgctgttccaactcctgcatgtccttatgcaccacctactcctccatatgtttaccgtgacacttgcaattcatctctggcttccctgcgactgaaagctaagcagcacagttccttcggctatgcatccgtgcagaatccggcgtccaatctgtctgcctgccagtacgctgtggaccgcccagtctag

SEQ ID NO: 245941 - DNA, 873 bp, Artificial Sequence
  derived and/or modified sequence
atggagacaaactgccgcaagctggtcagcgcctgtgttcaactgggagtccagccggccgctgtggagtgcctgttttccaaggatagcgagataaagaaagtcgaatttaccgacagccccgagtctcgtaaggaagcagcctcatctaagttctttccccgtcagcacccaggagctaacgaaaaggataaaagccagcaaggaaaaaacgaggatgtcggcgcggaagatccatcaaagaagaagaggcaacgcaggcagagaactcacttcacaagtcagcagctgcaggagctggaagctacatttcaacgtaaccgttatccagatatgtctaccagagaagagattgccgtgtggaccaacctgactgaggcacgggttagggtgtggttcaaaaatagacgcgccaagtggcgaaaaagggagcggaatcagcaggccgaactgtgcaaaaacggattcgggccacaattcaacggactcatgcagccctacgacgatatgtacccaggatactcctacaataactgggcagctaagggacttacatccgcctcgttaagtactaaatcctttccctttttcaattctatgaacgtgaatcctctcagttctcaatctatgttttccccccctaacagcattagcagtatgtctatgagcagttccatggttcctagcgctgtcactggcgtgcctggctccagtctgaacagtctgaacaacctgaataacctctcctccccttccctgaatagtgctgttcccacaccagcctgtccatatgctccgccaaccccgccctacgtgtaccgtgatacatgcaactcatccttagctagtctgcggcttaaggcaaaacagtag

SEQ ID NO: 245942 - DNA, 954 bp, Artificial Sequence
  derived and/or modified sequence
atggagaccaactgcaggaagctggtgtctgcctgtgtgcagctgggcgtgcagcctgctgctgtggagtgcctcttcagcaaggacagcgagatcaagaaggtggagttcacagacagccctgagagcaggaaggaggccgccagcagcaagttcttcccccggcagcaccctggggccaatgagaaggacaagagccagcagggcaagaatgaagatgtgggcgctgaggaccccagcaagaagaagaggcagaggcggcagaggacccacttcaccagccagcagctgcaggagctggaggccaccttccagaggaaccgctacccagacatgagcacccgggaggagattgctgtgtggaccaacctgacagaggcccgggtgcgggtgtggttcaagaacagaagagccaagtggaggaagcgggagaggaaccagcaggccgagctgtgcaagaatggcttcggcccccagttcaacggcctgatgcagccctatgatgacatgtacccaggctacagctacaacaactgggccgccaagggcctgaccagcgccagcctgagcaccaagagcttccccttcttcaacagcatgaatgtgaaccccctgagcagccagagcatgttcagcccccccaacagcatcagctccatgtccatgagcagctccatggtgcccagcgctgtgactggagtgcccggcagcagcctgaacagcctgaacaacctgaacaacctgagcagccccagcctgaacagcgctgtgcccaccccagcctgcccctatgccccacccaccccaccctacgtgtacagagacacctgcaacagcagcctggccagcctgcggctgaaggccaagcagcacagcagctttggctacgcctctgtgcagaacccagccagcaacctgagcgcctgccagtatgctgtggacaggcctgtgtag

SEQ ID NO: 245943 - DNA, 873 bp, Artificial Sequence
  derived and/or modified sequence
atggagaccaactgcaggaagctggtgtctgcctgtgtgcagctgggcgtgcagcctgctgctgtggagtgcctcttcagcaaggacagcgagatcaagaaggtggagttcacagacagccctgagagcaggaaggaggccgccagcagcaagttcttcccccggcagcaccctggggccaatgagaaggacaagagccagcagggcaagaatgaagatgtgggcgctgaggaccccagcaagaagaagaggcagaggcggcagaggacccacttcaccagccagcagctgcaggagctggaggccaccttccagaggaaccgctacccagacatgagcacccgggaggagattgctgtgtggaccaacctgacagaggcccgggtgcgggtgtggttcaagaacagaagagccaagtggaggaagcgggagaggaaccagcaggccgagctgtgcaagaatggcttcggcccccagttcaacggcctgatgcagccctatgatgacatgtacccaggctacagctacaacaactgggccgccaagggcctgaccagcgccagcctgagcaccaagagcttccccttcttcaacagcatgaatgtgaaccccctgagcagccagagcatgttcagcccccccaacagcatcagctccatgtccatgagcagctccatggtgcccagcgctgtgactggagtgcccggcagcagcctgaacagcctgaacaacctgaacaacctgagcagccccagcctgaacagcgctgtgcccaccccagcctgcccctatgccccacccaccccaccctacgtgtacagagacacctgcaacagcagcctggccagcctgcggctgaaggccaagcagtag

SEQ ID NO: 245944 - DNA, 954 bp, Artificial Sequence
  derived and/or modified sequence
atggagaccaactgccggaagctggtgagcgcctgcgtgcagctgggagtccagccggctgccgtcgaatgtctattttcgaaagatagcgaaatcaaaaaggtcgagttcacagatagccccgagagcaggaaagaggcagcctctagtaaattttttccgagacagcaccccggggcaaacgaaaaggataaatcccagcagggtaaaaacgaggacgttggcgccgaagatcctagtaagaagaaaaggcagaggaggcagaggacccattttactagccagcagctgcaggaactggaggccacgtttcagaggaatcggtatccagatatgagcactagggaagaaatcgcagtctggaccaatttgactgaagctagagtgagggtttggtttaagaatcgaagggccaaatggcggaagagagagaggaatcagcaagctgaattgtgcaagaatggttttggcccgcagttcaatgggctgatgcagccttacgatgatatgtaccctggatactcttacaataactgggcagctaagggactgacgagcgccagcttgtccacaaaatcctttcctttctttaactctatgaatgtgaacccgctgtcgtcacagtcaatgtttagcccgcctaatagtatctccagcatgtcgatgagttcatcaatggtgccctcggcagtcaccggcgttcccggatccagcctcaattcactcaataatctgaataaccttagtagcccaagccttaactccgccgtaccaacccctgcttgcccttatgcgccgcctacaccaccctatgtataccgtgatacctgtaattccagtctcgcttccctgcgattgaaagctaaacagcattccagtttcggctacgcctctgtccagaatcccgcaagcaatctttccgcctgtcagtacgccgtggatagaccagtgtag

SEQ ID NO: 245945 - DNA, 954 bp, Artificial Sequence
  derived and/or modified sequence
atggagaccaactgccggaagctggtgagcgcctgcgtgcagctgggagtgcagcctgctgcagtggagtgtcttttttctaaggactctgagataaagaaggtggagtttaccgacagtcccgagagccgaaaagaggccgcgagtagtaaatttttcccccggcagcatccaggggcaaacgagaaggataaatcgcaacagggcaaaaacgaggacgtcggtgcagaggacccctccaaaaagaagaggcaacgacggcaacggacccacttcactagtcaacaactccaggagttggaagccaccttccagcggaatcgctaccctgatatgtccaccagggaagagatcgccgtctggacaaatctgactgaggccagggtccgagtctggttcaagaaccgccgagccaaatggagaaaaagagaacggaatcaacaggcagaactgtgtaagaatggttttgggccccagtttaatggacttatgcagccctatgacgatatgtaccctgggtatagctacaataactgggccgccaaggggctcacttcagccagcctttctaccaagtcattcccctttttcaactccatgaatgtaaaccctctctcctcccaaagcatgttttccccccctaacagcattagctctatgtctatgtccagtagcatggtgccaagcgcagtgacaggtgtccctgggtccagccttaacagcttgaacaacttgaacaatctatccagccccagcctgaacagtgctgtgccaacacctgcttgtccgtatgcccctcctactcccccgtacgtgtatagggacacatgtaattcttcgcttgcaagcctgcgcctgaaagctaagcagcactccagtttcggctatgcatcggtacagaacccggcctccaatttgtctgcctgccagtacgccgttgaccgccctgtatag

SEQ ID NO: 245946 - DNA, 873 bp, Artificial Sequence
  derived and/or modified sequence
atggagaccaactgccggaagctggtgagcgcctgcgtgcagctgggtgtccagcctgcagccgtggagtgcctttttagcaaggactccgagatcaagaaggtggagtttacagacagcccagagagtagaaaagaagcagcctcttctaagttcttccctcgccagcatccgggcgccaacgagaaggacaagagccagcagggcaaaaatgaggatgtaggcgccgaagacccttccaaaaagaaaaggcagcggcggcagagaacccacttcaccagtcagcaacttcaggagctggaggctacttttcaacgcaatcgataccctgacatgtccactagagaggagatcgcagtttggacaaacctaaccgaggccagggtgagggtttggtttaagaatcgacgcgctaagtggcggaaacgggaacgtaaccagcaggcagagctgtgcaagaatgggttcgggccccaatttaacggcctgatgcagccttacgatgacatgtaccccggatattcctacaacaattgggcagctaagggattaaccagcgcatctctcagcactaaaagcttcccgttttttaatagtatgaatgtaaatcccctgtcctcccagagcatgttttcgccacccaattcaatcagtagtatgagcatgtcctcctccatggttcccagtgcagtgaccggagtgcccgggtcgtcactgaactcactcaataatttgaacaatttgtcatctccatccctgaactcagccgtgcccactccagcatgtccttatgcccctcctaccccaccttatgtgtacagggatacttgtaattccagcttggcttctctcagactcaaagctaagcaatag

SEQ ID NO: 245947 - DNA, 3359 bp, Artificial Sequence
  derived and/or modified sequence
tcagagggatcaatatacaggccctaccacggaaaggcggggaaaaggttcgaatagaaaactgctgcagaagggaagccactgagaggagcaaatgtggacttgagggaaactctctcccccacccccacttctatcccgtgcaatttaataccatcctcgccaggaaccttaacctcgtcattttaaaaaatgagatatccgtgacccagggtgaacttgttgaatgtaggtacagcagaggaaattctagactctatgagcgtctgagccttgtccagtgcaaacccttcgtgaacactgggtcagtgcgtggccgtgcccacctgtgcgccgacactctcagcatgcctggtccacccgccttgacctcgggcgcggtgtcccagctaagctgggcccagcgtcccggccttccccagctgacaagcctagctcgttcgctcccggctgtggccctcccaccctctcccactagctcactccattcttctagatttctcttcactcatcctctcccatccccaccgcgcccacctccactcccgccctctaccggtctctcactttcctccctccgcagtccctctttgctgtgacctctttcctcaactctgcaggcctgaaagaaggtcacacacgcacgctcacacccacactccacacgcctcgtcccaaacaaccccatgaacattgtcctttgttccgtctcttgggccactttccctgtcgcttcctcccagcccgtcctgatttgctccccaaaagtacgtttctgtctccccgctgccctggcgctccccctttgatttattagggctgccgggttggcgcagattgctttttcttctcttccatcccatcctcccttctggtcctcctttccacagtgggagtccgtgctcctgctcctcggttggctcctaagtgccccgccaggtcccctctcctttcgctctcccggctccggctcccgactcttcggcccgctggcatctgcttccctcccctgcctcgtttctcgtcgcccctgctcgctccccccggcgctcgcccgggcgctgtgctcgctcctggatcgccagccgcgcagccgggctcggccggccgcccgcgcgccactgtgcagtggagtttggtggaatctctgctgacgtcacgtcactccccacacggagtaggagcagagggaagagagagggatgagagggagggagaggagagagagtgcgagaccgagcgagaaagctggagaggagcagaaagaaactgccagtggcggctagatttcggaggccccagtgcacccgtggactccttcggaacttggcaccctcaggagccctgcagtcctctcaggcccggctttcgggcgcttgccgtgcagccggaggctcggctcgctggaaatcgccccgggaagcagtgggacgcggagacagcagctctctcccggtagccgaatcactaaatctggagccgccaaactgctacttctgggcccacgggcccacaaggatcgaatcggcagagtccccgcccgcgttctcgctagcgggtgggggaaccgcctggccgtccccaccctggatccccacgccacagcgccgggcagcccctcctgtaggcagcgaccttggccagaggctccccagggcccagctcccttcaggagaggccgagacgcagggaaacgataacggggaatggagaccaactgccgcaaactggtgtcggcgtgtgtgcaattaggcgtgcagccggcggccgttgaatgtctcttctccaaagactccgaaatcaaaaaggtcgagttcacggactctcctgagagccgaaaagaggcagccagcagcaagttcttcccgcggcagcatcctggcgccaatgagaaagataaaagccagcaggggaagaatgaggacgtgggcgccgaggacccgtctaagaagaagcggcaaaggcggcagcggactcactttaccagccagcagctccaggagctggaggccactttccagaggaaccgctacccggacatgtccacacgcgaagaaatcgctgtgtggaccaaccttacggaagcccgagtccgggtttggttcaagaatcgtcgggccaaatggagaaagagggagcgcaaccagcaggccgagctatgcaagaatggcttcgggccgcagttcaatgggctcatgcagccctacgacgacatgtacccaggctattcctacaacaactgggccgccaagggccttacatccgcctccctatccaccaagagcttccccttcttcaactctatgaacgtcaaccccctgtcatcacagagcatgttttccccacccaactctatctcgtccatgagcatgtcgtccagcatggtgccctcagcagtgacaggcgtcccgggctccagtctcaacagcctgaataacttgaacaacctgagtagcccgtcgctgaattccgcggtgccgacgcctgcctgtccttacgcgccgccgactcctccgtatgtttatagggacacgtgtaactcgagcctggccagcctgagactgaaagcaaagcagcactccagcttcggctacgccagcgtgcagaacccggcctccaacctgagtgcttgccagtatgcagtggaccggcccgtgtgagccgcacccacagcgccgggatcctaggaccttgccggatggggcaactccgcccttgaaagactgggaattatgctagaaggtcgtgggcactaaagaaagggagagaaagagaagctatatagagaaaaggaaaccactgaatcaaagagagagctcctttgatttcaaagggatgtcctcagtgtctgacatctttcactacaagtatttctaacagttgcaaggacacatacacaaacaaatgtttgactggatatgacattttaacattactataagcttgttattttttaagtttagcattgttaacatttaaatgactgaaaggatgtatatatatcgaaatgtcaaattaattttataaaagcagttgttagtaatatcacaacagtgtttttaaaggttaggctttaaaataaagcatgttatacagaagcgattaggatttttcgcttgcgagcaagggagtgtatatactaaatgccacactgtatgtttctaacatattattattattataaaaaatgtgtgaatatcagttttagaatagtttctctggtggatgcaatgatgtttctgaaactgctatgtacaacctaccctgtgtataacatttcgtacaatattattgttttacttttcagcaaatatgaaacaaatgtgttttatttcatgggagtaaaatatactgcatac

SEQ ID NO: 245948 - DNA, 1906 bp, Artificial Sequence
  derived and/or modified sequence
agagagtgcgagaccgagcgagaaagctggagaggagcagaaagaaactgccagtggcggctagatttcggaggccccagtgcacccgtggactccttcggaacttggcaccctcaggagccctgcagtcctctcaggcccggctttcgggcgcttgccgtgcagccggaggctcggctcgctggaaatcgccccgggaagcagtgggacgcggagacagcagctctctcccggtagccgataacggggaatggagaccaactgccgcaaactggtgtcggcgtgtgtgcaattaggcgtgcagccggcggccgttgaatgtctcttctccaaagactccgaaatcaaaaaggtcgagttcacggactctcctgagagccgaaaagaggcagccagcagcaagttcttcccgcggcagcatcctggcgccaatgagaaagataaaagccagcaggggaagaatgaggacgtgggcgccgaggacccgtctaagaagaagcggcaaaggcggcagcggactcactttaccagccagcagctccaggagctggaggccactttccagaggaaccgctacccggacatgtccacacgcgaagaaatcgctgtgtggaccaaccttacggaagcccgagtccgggtttggttcaagaatcgtcgggccaaatggagaaagagggagcgcaaccagcaggccgagctatgcaagaatggcttcgggccgcagttcaatgggctcatgcagccctacgacgacatgtacccaggctattcctacaacaactgggccgccaagggccttacatccgcctccctatccaccaagagcttccccttcttcaactctatgaacgtcaaccccctgtcatcacagagcatgttttccccacccaactctatctcgtccatgagcatgtcgtccagcatggtgccctcagcagtgacaggcgtcccgggctccagtctcaacagcctgaataacttgaacaacctgagtagcccgtcgctgaattccgcggtgccgacgcctgcctgtccttacgcgccgccgactcctccgtatgtttatagggacacgtgtaactcgagcctggccagcctgagactgaaagcaaagcagcactccagcttcggctacgccagcgtgcagaacccggcctccaacctgagtgcttgccagtatgcagtggaccggcccgtgtgagccgcacccacagcgccgggatcctaggaccttgccggatggggcaactccgcccttgaaagactgggaattatgctagaaggtcgtgggcactaaagaaagggagagaaagagaagctatatagagaaaaggaaaccactgaatcaaagagagagctcctttgatttcaaagggatgtcctcagtgtctgacatctttcactacaagtatttctaacagttgcaaggacacatacacaaacaaatgtttgactggatatgacattttaacattactataagcttgttattttttaagtttagcattgttaacatttaaatgactgaaaggatgtatatatatcgaaatgtcaaattaattttataaaagcagttgttagtaatatcacaacagtgtttttaaaggttaggctttaaaataaagcatgttatacagaagcgattaggatttttcgcttgcgagcaagggagtgtatatactaaatgccacactgtatgtttctaacatattattattattataaaaaatgtgtgaatatcagttttagaatagtttctctggtggatgcaatgatgtttctgaaactgctatgtacaacctaccctgtgtataacatttcgtacaatattattgttttacttttcagcaaatatgaaacaaatgtgttttatttcatgggagtaaaatatactgcatacaaa

SEQ ID NO: 245949 - DNA, 1085 bp, Artificial Sequence
  derived and/or modified sequence
gcagtctgtgtaagttttcatatctctgagtgtgtgcacacagtggagagggtggagcctgccatcctcaaatctgaaaagattgagagatttcagagggcccagatgtgccaaaggtcagagggatcaatatacaggccctaccacggaaaggcggggaaaaggttcgaatagaaaactgctgcagaagggaagccactgagagataacggggaatggagaccaactgccgcaaactggtgtcggcgtgtgtgcaattaggcgtgcagccggcggccgttgaatgtctcttctccaaagactccgaaatcaaaaaggtcgagttcacggactctcctgagagccgaaaagaggcagccagcagcaagttcttcccgcggcagcatcctggcgccaatgagaaagataaaagccagcaggggaagaatgaggacgtgggcgccgaggacccgtctaagaagaagcggcaaaggcggcagcggactcactttaccagccagcagctccaggagctggaggccactttccagaggaaccgctacccggacatgtccacacgcgaagaaatcgctgtgtggaccaaccttacggaagcccgagtccgggtttggttcaagaatcgtcgggccaaatggagaaagagggagcgcaaccagcaggccgagctatgcaagaatggcttcgggccgcagttcaatgggctcatgcagccctacgacgacatgtacccaggctattcctacaacaactgggccgccaagggccttacatccgcctccctatccaccaagagcttccccttcttcaactctatgaacgtcaaccccctgtcatcacagagcatgttttccccacccaactctatctcgtccatgagcatgtcgtccagcatggtgccctcagcagtgacaggcgtcccgggctccagtctcaacagcctgaataacttgaacaacctgagtagcccgtcgctgaattccgcggtgccgacgcctgcctgtccttacgcgccgccgactcctccgtatgtttatagggacacgtgtaactcgagcctggccagcctgagactgaaagcaaagcag

SEQ ID NO: 245950 - DNA, 954 bp, Artificial Sequence
  derived and/or modified sequence
atggagacgaattgtagaaagttagttagtgcatgtgtccagttgggcgtccagccagctgctgtggagtgtctgttttctaaagattccgagatcaagaaagtcgagttcactgatagtcctgagagtaggaaagaagctgcctccagcaaattcttcccccgtcagcatccaggggcaaacgagaaagacaagagtcagcaggggaaaaatgaggacgtgggcgcagaagatcccagcaagaagaagagacagaggaggcagcggacccattttactagccaacagttgcaagagctggaggcaacttttcagcggaatcggtatccggacatgagtacaagagaggaaattgctgtatggacgaacttgacggaggccagagtcagagtgtggttcaaaaatagacgcgctaaatggcggaaacgtgaacggaaccagcaggccgagttgtgcaagaatggcttcggcccacagtttaatggcctgatgcaaccatatgatgacatgtatcccggatatagttacaacaactgggctgcaaagggtctgacatcagcatccttgtcaaccaaaagctttcctttctttaactctatgaacgtaaatcccctatcttcccagtctatgttttcgccacccaactccatctcttctatgtcaatgagctcgagcatggtcccgtccgccgtgacaggcgtgcctggttctagcctcaactcccttaataacctgaataacctctccagcccttccctcaactccgcagtcccaactcctgcctgcccatatgcaccccctaccccaccgtacgtttacagagatacctgtaactcctcgttggcctccctgagacttaaggctaaacaacattcctcatttgggtacgcttcagtgcagaatcctgcgtctaacctcagcgcttgccagtacgccgtcgatcggcctgtatag

SEQ ID NO: 245951 - DNA, 954 bp, Artificial Sequence
  derived and/or modified sequence
atggaaaccaattgcaggaaattggtcagtgcttgtgtacaattgggagtgcagccggcagcggtcgaatgtttgttctcaaaagattccgaaataaagaaggtcgagtttacggactcgcccgagagccgcaaagaagccgcatcctccaaatttttcccacgacagcaccccggagctaatgagaaagataaaagtcaacagggtaaaaacgaggacgttggggcagaagatccctctaagaagaagcgtcagcgcagacagcgtacccatttcacttcacaacaactgcaggaactcgaagcaacctttcagaggaatcgataccccgacatgagtacgagggaggagatagccgtgtggaccaacctgacagaggcccgagtacgggtctggttcaaaaaccgcagggccaagtggagaaagcgcgaaaggaatcaacaagctgaattgtgtaagaacggttttggtcctcagttcaatggactgatgcagccctacgatgacatgtaccctgggtactcttacaacaactgggccgctaagggcctgacctccgcgagcctatctactaagagtttccccttcttcaatagcatgaatgtaaatcctctcagctcccaatccatgttttcgcctccaaactctatcagctctatgtcaatgagttcgtccatggtgcccagcgctgtgaccggagttcctggaagttctctgaattctctcaataatctaaacaacttgtctagccccagcttaaactctgctgtgcctacaccagcctgtccatatgcccctcccaccccaccatacgtctacagagacacatgcaattcttctctggcatcccttcgcctcaaggcaaaacagcacagctcttttggatatgcttccgtccagaatccggcttctaatttgagtgcctgccagtacgcagtcgacaggcccgtgtag

SEQ ID NO: 245952 - DNA, 873 bp, Artificial Sequence
  derived and/or modified sequence
atggaaacaaattgtcggaagctggtttccgcttgcgtacaactcggggttcagccagccgcagtcgagtgtctcttcagcaaggactccgaaatcaagaaagtcgagttcacggactcccctgaatctaggaaagaagccgctagctctaagttctttcctcgccaacaccccggtgccaatgaaaaagacaaaagccagcaggggaaaaacgaggacgttggcgctgaagatccatccaagaagaaaaggcagaggcggcagcggactcactttacaagccagcagttgcaggaactcgaggcaactttccagaggaacaggtatccagacatgagcacacgggaggagattgccgtctggacgaatcttactgaggccagagttagagtttggttcaaaaaccggcgtgccaaatggagaaaaagggagcgcaaccagcaggctgagctgtgtaaaaacgggtttggccctcagttcaatggactgatgcagccatatgatgacatgtacccagggtattcttataataactgggcggcaaaggggctgacctccgcctccttgtccactaagtccttcccttttttcaactctatgaatgtcaacccgctgtctagccagagcatgttcagcccgccaaactccatatcgagcatgtctatgtcctcttccatggttcctagcgccgttacaggcgtccccggatcgagcctgaactccctcaataaccttaacaatctgagttctcccagccttaactccgcagtgccaacacccgcatgcccatacgccccacctaccccaccttatgtgtatagagatacttgcaatagctcactggcttcccttcggctcaaggccaaacaatag

SEQ ID NO: 245953 - DNA, 954 bp, Artificial Sequence
  derived and/or modified sequence
atggagaccaactgcagaaagctggtgagcgcctgcgtgcagctgggcgtgcagcccgccgccgtggagtgcctgttcagcaaggacagcgagatcaagaaggtggagttcaccgacagccccgagagcagaaaggaggccgccagcagcaagttcttccccagacagcaccccggcgccaacgagaaggacaagagccagcagggcaagaacgaggacgtgggcgccgaggaccccagcaagaagaagagacagagaagacagagaacccacttcaccagccagcagctgcaggagctggaggccaccttccagagaaacagataccccgacatgagcaccagagaggagatcgccgtgtggaccaacctgaccgaggccagagtgagagtgtggttcaagaacagaagagccaagtggagaaagagagagagaaaccagcaggccgagctgtgcaagaacggcttcggcccccagttcaacggcctgatgcagccctacgacgacatgtaccccggctacagctacaacaactgggccgccaagggcctgaccagcgccagcctgagcaccaagagcttccccttcttcaacagcatgaacgtgaaccccctgagcagccagagcatgttcagcccccccaacagcatcagcagcatgagcatgagcagcagcatggtgcccagcgccgtgaccggcgtgcccggcagcagcctgaacagcctgaacaacctgaacaacctgagcagccccagcctgaacagcgccgtgcccacccccgcctgcccctacgccccccccacccccccctacgtgtacagagacacctgcaacagcagcctggccagcctgagactgaaggccaagcagcacagcagcttcggctacgccagcgtgcagaaccccgccagcaacctgagcgcctgccagtacgccgtggacagacccgtgtag

SEQ ID NO: 245954 - DNA, 873 bp, Artificial Sequence
  derived and/or modified sequence
atggagaccaactgcagaaagctggtgagcgcctgcgtgcagctgggcgtgcagcccgccgccgtggagtgcctgttcagcaaggacagcgagatcaagaaggtggagttcaccgacagccccgagagcagaaaggaggccgccagcagcaagttcttccccagacagcaccccggcgccaacgagaaggacaagagccagcagggcaagaacgaggacgtgggcgccgaggaccccagcaagaagaagagacagagaagacagagaacccacttcaccagccagcagctgcaggagctggaggccaccttccagagaaacagataccccgacatgagcaccagagaggagatcgccgtgtggaccaacctgaccgaggccagagtgagagtgtggttcaagaacagaagagccaagtggagaaagagagagagaaaccagcaggccgagctgtgcaagaacggcttcggcccccagttcaacggcctgatgcagccctacgacgacatgtaccccggctacagctacaacaactgggccgccaagggcctgaccagcgccagcctgagcaccaagagcttccccttcttcaacagcatgaacgtgaaccccctgagcagccagagcatgttcagcccccccaacagcatcagcagcatgagcatgagcagcagcatggtgcccagcgccgtgaccggcgtgcccggcagcagcctgaacagcctgaacaacctgaacaacctgagcagccccagcctgaacagcgccgtgcccacccccgcctgcccctacgccccccccacccccccctacgtgtacagagacacctgcaacagcagcctggccagcctgagactgaaggccaagcagtag

SEQ ID NO: 245955 - protein, 271 aa, Artificial Sequence
  derived and/or modified sequence
METNCRKLVSACVQLEKDKSQQGKNEDVGAEDPSKKKRQRRQRTHFTSQQLQELEATFQRNRYPDMSTREEIAVWTNLTEARVRVWFKNRRAKWRKRERNQQAELCKNGFGPQFNGLMQPYDDMYPGYSYNNWAAKGLTSASLSTKSFPFFNSMNVNPLSSQSMFSPPNSISSMSMSSSMVPSAVTGVPGSSLNSLNNLNNLSSPSLNSAVPTPACPYAPPTPPYVYRDTCNSSLASLRLKAKQHSSFGYASVQNPASNLSACQYAVDRPV

SEQ ID NO: 245956 - protein, 118 aa, Artificial Sequence
  derived and/or modified sequence
METNCRKLVSACVQLEKDKSQQGKNEDVGAEDPSKKKRQRRQRTHFTSQQLQELEATFQRNRYPDMSTREEIAVWTNLTEARVRVWFKNRRAKWRKRERNQQAELCKNGFGPQFNGLM

SEQ ID NO: 245957 - DNA, 816 bp, Artificial Sequence
  derived and/or modified sequence
atggaaacaaattgtcgcaagctggttagtgcatgcgtacagttggagaaggataaatcccagcagggcaagaatgaggatgtcggggccgaagatccttcaaaaaagaagaggcagcgacgtcagcgaacacactttactagtcagcaactgcaggaactggaagcgacattccagcggaacagataccccgacatgtcaacaagggaggagatagcagtttggacaaacctgacagaggcgcgggtccgcgtatggtttaaaaacagacgagctaaatggcgaaaacgagagaggaatcaacaggccgagctgtgcaagaatgggttcgggccccagtttaatgggctgatgcagccttatgacgacatgtaccctgggtactcatacaacaactgggctgctaaaggattgactagcgcttctttaagcaccaaatccttccccttctttaattctatgaacgtcaatcctctgtccagtcaaagtatgttttctcctccaaattctatcagctcaatgtcgatgagcagttcaatggtcccatccgctgtgactggtgtcccgggatctagtctcaattccctcaacaatctgaacaacctgtcttctccatcgttgaacagcgcagtgcctacaccagcatgcccgtatgcacctccaactccaccttacgtgtatcgagacacctgtaacagctcactggcatcactccgacttaaggcaaagcagcatagctcctttggatatgcgagcgtgcagaacccagcaagtaacttatcagcctgtcagtacgcggtcgacaggcctgtgtag

SEQ ID NO: 245958 - DNA, 357 bp, Artificial Sequence
  derived and/or modified sequence
atggaaaccaactgtagaaagctggtctcggcttgcgtccagctcgagaaagacaagtctcagcaggggaagaacgaagacgtgggtgccgaggatccgagcaaaaaaaaacggcagcggagacaaagaacacactttacttcccagcagctccaggaactggaagctacctttcagcgtaatcgctatcccgatatgtcaaccagggaagagatagcagtgtggactaatctgacagaagctagggtgagggtctggttcaagaacaggagagccaaatggcgcaagcgcgagagaaaccagcaggcggaactgtgcaaaaacgggttcggtccacagttcaacggcctgatgtag

SEQ ID NO: 245959 - DNA, 816 bp, Artificial Sequence
  derived and/or modified sequence
atggagaccaactgcaggaagctggtgtctgcctgtgtgcagctggagaaggacaagagccagcagggcaagaatgaagatgtgggcgctgaggaccccagcaagaagaagaggcagaggcggcagaggacccacttcaccagccagcagctgcaggagctggaggccaccttccagaggaaccgctacccagacatgagcacccgggaggagattgctgtgtggaccaacctgacagaggcccgggtgcgggtgtggttcaagaacagaagagccaagtggaggaagcgggagaggaaccagcaggccgagctgtgcaagaatggcttcggcccccagttcaacggcctgatgcagccctatgatgacatgtacccaggctacagctacaacaactgggccgccaagggcctgaccagcgccagcctgagcaccaagagcttccccttcttcaacagcatgaatgtgaaccccctgagcagccagagcatgttcagcccccccaacagcatcagctccatgtccatgagcagctccatggtgcccagcgctgtgactggagtgcccggcagcagcctgaacagcctgaacaacctgaacaacctgagcagccccagcctgaacagcgctgtgcccaccccagcctgcccctatgccccacccaccccaccctacgtgtacagagacacctgcaacagcagcctggccagcctgcggctgaaggccaagcagcacagcagctttggctacgcctctgtgcagaacccagccagcaacctgagcgcctgccagtatgctgtggacaggcctgtgtag

SEQ ID NO: 245960 - DNA, 357 bp, Artificial Sequence
  derived and/or modified sequence
atggagaccaactgcaggaagctggtgtctgcctgtgtgcagctggagaaggacaagagccagcagggcaagaatgaagatgtgggcgctgaggaccccagcaagaagaagaggcagaggcggcagaggacccacttcaccagccagcagctgcaggagctggaggccaccttccagaggaaccgctacccagacatgagcacccgggaggagattgctgtgtggaccaacctgacagaggcccgggtgcgggtgtggttcaagaacagaagagccaagtggaggaagcgggagaggaaccagcaggccgagctgtgcaagaatggcttcggcccccagttcaacggcctgatgtag

SEQ ID NO: 245961 - DNA, 816 bp, Artificial Sequence
  derived and/or modified sequence
atggagaccaactgccggaagctggtgagcgcctgcgtgcagctggaaaaggacaagtcccagcagggtaagaacgaagatgttggtgccgaggatccgtcaaagaagaagcgccaacggcggcaacgcacacattttacctctcagcaacttcaggagctggaggctacatttcagcgcaaccgatacccagacatgtcaactcgcgaagaaattgccgtctggactaatctgactgaagctagggtgagggtgtggtttaagaacagacgcgcgaaatggagaaaaagagagaggaatcagcaggctgagctatgcaagaacggattcggcccccagttcaacgggctaatgcaaccctacgacgacatgtaccctggctacagttacaataattgggctgctaagggcctcacctccgcttctcttagtactaaaagttttccattttttaactctatgaatgttaatccactgtccagccagagcatgtttagcccaccaaattccattagtagcatgtctatgtccagcagtatggtgcccagcgcggtaacaggcgttccaggaagtagccttaactcactgaacaatctcaacaacctctcttccccgtcacttaactcagctgtgcctaccccagcttgtccgtatgcaccacccaccccaccatatgtttaccgtgacacttgcaattcatcgcttgcgtcgctgcgactgaaggctaagcaacactcatcttttggatacgccagcgtccagaacccagcatctaacctgtccgcctgtcagtatgccgtagaccgccccgtatag

SEQ ID NO: 245962 - DNA, 357 bp, Artificial Sequence
  derived and/or modified sequence
atggagaccaactgccggaagctggtgagcgcctgcgtgcagctggaaaaggacaagtcccagcaaggtaagaacgaggatgtgggggccgaggatcccagtaaaaaaaaaagacagaggcgccagcgcacccattttacatcacagcaactgcaagaactggaggccactttccagcggaatagataccccgacatgtccacaagagaggaaatcgccgtttggacaaacctcacagaggcccgtgtccgggtgtggttcaaaaaccgaagggccaagtggcgaaagagggaacgaaaccagcaggctgagctgtgtaaaaatgggttcgggccacagttcaacggcctgatgtag

SEQ ID NO: 245963 - DNA, 2100 bp, Artificial Sequence
  derived and/or modified sequence
tgggagtccgtgctcctgctcctcggttggctcctaagtgccccgccaggtcccctctcctttcgctctcccggctccggctcccgactcttcggcccgctggcatctgcttccctcccctgcctcgtttctcgtcgcccctgctcgctccccccggcgctcgcccgggcgctgtgctcgctcctggatcgccagccgcgcagccgggctcggccggccgcccgcgcgccactgtgcagtggagtttggtggaatctctgctgacgtcacgtcactccccacacggagtaggagcagagggaagagagagggatgagagggagggagaggagagagagtgcgagaccgagcgagaaagctggagaggagcagaaagaaactgccagtggcggctagatttcggaggccccagtgcacccgtggactccttcggaacttggcaccctcaggagccctgcagtcctctcaggcccggctttcgggcgcttgccgtgcagccggaggctcggctcgctggaaatcgccccgggaagcagtgggacgcggagacagcagctctctcccggtagccgataacggggaatggagaccaactgccgcaaactggtgtcggcgtgtgtgcaattagagaaagataaaagccagcaggggaagaatgaggacgtgggcgccgaggacccgtctaagaagaagcggcaaaggcggcagcggactcactttaccagccagcagctccaggagctggaggccactttccagaggaaccgctacccggacatgtccacacgcgaagaaatcgctgtgtggaccaaccttacggaagcccgagtccgggtttggttcaagaatcgtcgggccaaatggagaaagagggagcgcaaccagcaggccgagctatgcaagaatggcttcgggccgcagttcaatgggctcatgcagccctacgacgacatgtacccaggctattcctacaacaactgggccgccaagggccttacatccgcctccctatccaccaagagcttccccttcttcaactctatgaacgtcaaccccctgtcatcacagagcatgttttccccacccaactctatctcgtccatgagcatgtcgtccagcatggtgccctcagcagtgacaggcgtcccgggctccagtctcaacagcctgaataacttgaacaacctgagtagcccgtcgctgaattccgcggtgccgacgcctgcctgtccttacgcgccgccgactcctccgtatgtttatagggacacgtgtaactcgagcctggccagcctgagactgaaagcaaagcagcactccagcttcggctacgccagcgtgcagaacccggcctccaacctgagtgcttgccagtatgcagtggaccggcccgtgtgagccgcacccacagcgccgggatcctaggaccttgccggatggggcaactccgcccttgaaagactgggaattatgctagaaggtcgtgggcactaaagaaagggagagaaagagaagctatatagagaaaaggaaaccactgaatcaaagagagagctcctttgatttcaaagggatgtcctcagtgtctgacatctttcactacaagtatttctaacagttgcaaggacacatacacaaacaaatgtttgactggatatgacattttaacattactataagcttgttattttttaagtttagcattgttaacatttaaatgactgaaaggatgtatatatatcgaaatgtcaaattaattttataaaagcagttgttagtaatatcacaacagtgtttttaaaggttaggctttaaaataaagcatgttatacagaagcgattaggatttttcgcttgcgagcaagggagtgtatatactaaatgccacactgtatgtttctaacatattattattattataaaaaatgtgtgaatatcagttttagaatagtttctctggtggatgcaatgatgtttctgaaactgctatgtacaacctaccctgtgtataacatttcgtacaatattattgttttacttttcagcaaatatgaaacaaatgtgttttatttcatgggagtaaaatatactgcatacaaa

SEQ ID NO: 245964 - DNA, 463 bp, Artificial Sequence
  derived and/or modified sequence
gtgccaaaggtcagagggatcaatatacaggccctaccacggaaaggcggggaaaaggttcgaatagaaaactgctgcagaagggaagccactgagagataacggggaatggagaccaactgccgcaaactggtgtcggcgtgtgtgcaattagagaaagataaaagccagcaggggaagaatgaggacgtgggcgccgaggacccgtctaagaagaagcggcaaaggcggcagcggactcactttaccagccagcagctccaggagctggaggccactttccagaggaaccgctacccggacatgtccacacgcgaagaaatcgctgtgtggaccaaccttacggaagcccgagtccgggtttggttcaagaatcgtcgggccaaatggagaaagagggagcgcaaccagcaggccgagctatgcaagaatggcttcgggccgcagttcaatgggctcatgc

SEQ ID NO: 245965 - DNA, 816 bp, Artificial Sequence
  derived and/or modified sequence
atggagaccaattgtagaaagctcgtcagcgcatgtgtacagctggaaaaagacaagtcgcagcaagggaagaacgaagatgtgggcgctgaggacccctctaagaaaaagaggcagcgcaggcagagaacacacttcacaagccagcaactgcaggagttggaggccacatttcaacgcaaccgctacccagacatgagcacgcgggaagagattgcagtgtggaccaatttgacagaggctcgagtaagggtgtggtttaagaatcggagagcgaagtggcgaaagcgggaacgcaatcagcaagcagaactctgcaagaacggattcggaccacagttcaacgggcttatgcagccttacgacgacatgtatcccggttactcatataacaattgggccgcaaagggattgacaagtgcgtctctgtctactaagtcattccccttcttcaactctatgaacgtaaatccgctcagctctcagtctatgtttagcccgccaaatagtatctcctccatgtctatgtcgtcctctatggtgccatccgcagtaacgggagtgccaggaagcagcttaaattcactgaataaccttaataacctgagctccccgagcctcaactccgccgttccgacgcccgcttgtccatatgctccccctaccccaccttatgtttacagagacacatgcaactccagcttggctagtctcagacttaaagctaagcagcactctagttttgggtacgcctcagtgcaaaaccccgcaagtaaccttagcgcatgccagtacgcggtcgacaggcccgtatag

SEQ ID NO: 245966 - DNA, 357 bp, Artificial Sequence
  derived and/or modified sequence
atggagaccaattgtcgaaagctggttagcgcgtgcgtccagctggagaaggataagtcccagcagggcaaaaatgaggatgtgggtgctgaggacccctctaagaaaaagcgccagcggagacaaaggacccattttacctctcagcagttgcaagagttggaagctactttccagcggaaccgttatcccgatatgtccacccgcgaggaaatcgctgtgtggaccaacctgaccgaagcaagagtcagggtctggttcaaaaacagaagggccaagtggagaaaacgcgaaagaaatcagcaggccgagttgtgtaaaaatggctttggccctcaattcaacgggttgatgtag

SEQ ID NO: 245967 - DNA, 816 bp, Artificial Sequence
  derived and/or modified sequence
atggagaccaactgcagaaagctggtgagcgcctgcgtgcagctggagaaggacaagagccagcagggcaagaacgaggacgtgggcgccgaggaccccagcaagaagaagagacagagaagacagagaacccacttcaccagccagcagctgcaggagctggaggccaccttccagagaaacagataccccgacatgagcaccagagaggagatcgccgtgtggaccaacctgaccgaggccagagtgagagtgtggttcaagaacagaagagccaagtggagaaagagagagagaaaccagcaggccgagctgtgcaagaacggcttcggcccccagttcaacggcctgatgcagccctacgacgacatgtaccccggctacagctacaacaactgggccgccaagggcctgaccagcgccagcctgagcaccaagagcttccccttcttcaacagcatgaacgtgaaccccctgagcagccagagcatgttcagcccccccaacagcatcagcagcatgagcatgagcagcagcatggtgcccagcgccgtgaccggcgtgcccggcagcagcctgaacagcctgaacaacctgaacaacctgagcagccccagcctgaacagcgccgtgcccacccccgcctgcccctacgccccccccacccccccctacgtgtacagagacacctgcaacagcagcctggccagcctgagactgaaggccaagcagcacagcagcttcggctacgccagcgtgcagaaccccgccagcaacctgagcgcctgccagtacgccgtggacagacccgtgtag

SEQ ID NO: 245968 - DNA, 357 bp, Artificial Sequence
  derived and/or modified sequence
atggagaccaactgcagaaagctggtgagcgcctgcgtgcagctggagaaggacaagagccagcagggcaagaacgaggacgtgggcgccgaggaccccagcaagaagaagagacagagaagacagagaacccacttcaccagccagcagctgcaggagctggaggccaccttccagagaaacagataccccgacatgagcaccagagaggagatcgccgtgtggaccaacctgaccgaggccagagtgagagtgtggttcaagaacagaagagccaagtggagaaagagagagagaaaccagcaggccgagctgtgcaagaacggcttcggcccccagttcaacggcctgatgtag

SEQ ID NO: 245969 - protein, 337 aa, Artificial Sequence
  derived and/or modified sequence
MNSWDAGLAGLLVGTMGVSLLSNALVLLCLLHSADIRRQAPALFTLNLTCGNLLCTVVNMPLTLAGVVAQRQPAGDRLCRLAAFLDTFLAANSMLSMAALSIDRWVAVVFPLSYRAKMRLRDAALMVAYTWLHALTFPAAALALSWLGFHQLYASCTLCSRRPDERLRFAVFTGAFHALSFLLSFVVLCCTYLKVLKVARFHCKRIDVITMQTLVLLVDLHPSVRERCLEEQKRRRQRATKKISTFIGTFLVCFAPYVITRLVELFSTVPIGSHWGVLSKCLAYSKAASDPFVYSLLRHQYRKSCKEILNRLLHRRSIHSSGLTGDSHSQNILPVSE

SEQ ID NO: 245970 - DNA, 7514 bp, Artificial Sequence
  derived and/or modified sequence
cgccatggcggcgccgggttgcggaccctgagcgccggcgcggggcgcgcaccatgaactcgtgggacgcgggcctggcggggctactggtgggcacgatgggcgtctcgctgctgtccaacgcgctggtgctgctctgcctgctgcacagcgcggacatccgccgccaggcgccggcgctcttcaccctgaacctcacgtgcgggaacctgctgtgcaccgtggtcaacatgccgctcacgctggccggcgtcgtggcgcagcggcagccggcgggcgaccgcctgtgccgcctggctgccttcctcgacaccttcctggctgccaactccatgctcagcatggccgcgctcagcatcgaccgctgggtggccgtggtcttcccgctgagctaccgggccaagatgcgcctccgcgacgcggcgctcatggtggcctacacgtggctgcacgcgctcaccttcccagccgccgcgctcgccctgtcctggctcggcttccaccagctgtacgcctcgtgcacgctgtgcagccggcggccagacgagcgcctgcgcttcgccgtcttcactggcgccttccacgctctcagcttcctgctctccttcgtcgtgctctgctgcacgtacctcaaggtgctcaaggtggcccgcttccattgcaagcgcatcgacgtgatcaccatgcagacgctggtgctgctggtggacctgcaccccagtgtgcgggaacgctgtctggaggagcagaagcggaggcgacagcgagccaccaagaagatcagcaccttcatagggaccttccttgtgtgcttcgcgccctatgtgatcaccaggctagtggagctcttctccacggtgcccatcggctcccactggggggtgctgtccaagtgcttggcgtacagcaaggccgcatccgacccctttgtgtactccttactgcgacaccagtaccgcaaaagctgcaaggagattctgaacaggctcctgcacagacgctccatccactcctctggcctcacaggcgactctcacagccagaacattctgccggtgtctgagtgaaggaccgcgctcctgctgaagagtttagaatgaggcagcggtgagaagaagggtgggagggcgtgggggcccctgggtggacaccaccagccaccagtccctggcatgcccagtgatcctggttccctggcttgtaggggctccagagcctgcttcctggttcctcaagggcagatattggacactccttatttgtcaccaaaggatgactgtaggccgtgtgctggcctttctttctaagaagctgctttgagctcctggactcacctgaggctccctgggggatgacactcagttctgtcactgtcaaggatgcagagagctggtggtaggtgggaagcatggtgtccacctgcctgctgaccactggacgctgctccatgctgaagaaaagtgacagtctccaggggacatttcagccatgctgaaagggaggctggcagtggtcatttggcccggatctaacatggcacctcgtctccacagggtagtggtggctgcttcaacccaaatattattcagctggtactaacgacattgtgcccagctgggactcttgggctctgtgcctgagggaaaatgtttcacaactagtggctgcccaattgctgctgaccagttgtcttagaaatggtcaattggattcaactttagtcctctccttccccctaaaagcgaatgtttgtgtgtgcagacaatcttagcatgaaaatggtttaaataggctggtcctacatgtattaggttctttcaagtttgactgggaggtcacctttttctgatttacaagtcctaattgttggagctcagtaaaggtaggaggaaggtggctggttggtcctcccttccccctgtttgtgacctgaatttacaggaagtgtttcaacttgtcttatgcatcttatctggcatgtcctgggagatggatgggcaagaactggcctgagcagggatttttgccttgattttaagtcactgggttccattgtcctggcacctccatttccttagtttctgtaagcctgttaacagaaagtagaggctattcaaggttatcaagaaagtgccctgtgctaatgatgagacagtgaattttttttttttttcgagatgggagtttcactcttattgcccaggctagagtgcaatggtgcgatctaggctcaccacaacctctgccttccaggttcaagtgattagagacagtgaaatttttatggaatactgcacctataaaacacatgccaatctgttagcagtcctgacttgatttaataaaaaccaaggagagccacccctgctttctggccatctcttctttgtctaccatttcaaattgacttgtgaatactcagagcagttatttttcaatcctccactctaagtgattcctccagggtgggaagcacggggagcaatggaatcagatggctcattctctccttccagctctttacatcctaactttggaggtatagaaggaaggatgtggtccaacgggaaggaagtgaagagtctattggtttttacttctaggcagtcccaatttttaaaggcagagaagtatctgcatctttatttgaaaagacgtcttattaactcttagctcctcagttagaaaacaattcacctggcttagtcttgtctagtttcaaagttaccatggagactagaatggagacaggtgtagcttccaaggaggccttggcatcttgcagttgctgtcagagatgggctcatatctgcttggggaagccaatggggcacaatccttcccaatttcatgatctggggcatcatgtcggtagctgaagtcagccacggtgggagtgtttataccatgaaaatcagcaagtgctgtaaatcaggccttttgccccacagagagctgattgtgaaacatctactagcacaccactgccagacatgactgtgtgtgtccctgaaacaaaattgctctggctcagagctcctttggccactcatattacaatagcaacagacatttgcttcctggtggcaagtaactgtgcaccctccaacatcccaaccccagaggaaccagtgggattgaaaaccagcagaagccaagacaggatgcacagctgaattggaggagagtagctcccttctcacacaaacgctttcaaagttgggcaaaagtggcccagtgcgtgaggtcagtcaacagccaaattccagcagcaaaatacattttcatcaatatcactttgggagaataactgtggcacatgctctttctgctttctctgtactgtataggcaacatgttgtactcccagtagcaactagatctcttttacctcttctttagccaagaagcaagatctgtcacccacaacaccacatatcttgaaaagatgcttttcataattttcactatacctctaaaaccaattgtaccgacatcacgtagacaaaaactccagataaatccattgattgggtattttcattattatttggacacatgaattaaatcccaagggaaagtgagaagaaaattaatgtattagcaaccagtgttagccaactctgctgtaattacctttagataaatgtttattttcatctctatacagtctatcaaatttgccccctggctttattactcccaattgaattatctacctcattttgttaatttaatttatcaaaggtaacattgttttctcaggtataacacatagaaacaccaagattttcagcatctgaatcaaactaaaattacttgcttgacttcactccagggtgagacttgacctttaaggcccaaactctggtgaactgttggactgggtagaaatctttcaagaagcttgaaaataaggccataaaggaggggctttcaaattcctaaatccacatatagggctgagttcctagtcctacacaatcagaatttgcctttttaagtcacgctgcaactattccggctttttatatggcacctttctgagggaggggattttacagccgagggacctccaaagggaacgtccatttgcatgtgtgccctggtatttagggtttgtctcatggtcagctcgcctctcaaagatggctcaccaatcacctgcctgtttttacttagaaagcaggcttgggcaggaggggaaatggatttgaaccatctcagaccaactctatctcttctagcactcagctcagcctcctgtccccatgagcaataaaactctctccttatgtctgtgaaattcgttttctttttcatggtgcctttctttctaagaaaagatagaaagaatggggccaggttcatgtcccagttgtcacccttttacatgcttgggtgcaggtagatgaggccttcccatggctacagtgtgacccttggaggaaccaaaggctgtgcattgttagaatttagcccagatgcaggataaactagcttgcctgagtttaatgaggatattatatcaggtgccaggaatcccttgggtcagctcctatcctctggacggggagcatcatgggaaaaagaggtccgagtcatatttagggcttcatgtgtctggaagggagccattagctcttaaattattcacagaagtcaccacggaaggttgtttaagatgcagattccagcatcccctcctcagagatcaatttcagcagggccaggcaggacctgggtttccgcacttttaatcatcgatgcccaggtaactgataggagttttcttcaaaccatcccctaaggagaaatgatcttagacacttggataaactctatagaaaattgagtgtttctattaataactatctaggtttcaattgtcttgtatctttccctaattctccaaacagttcaatctccagctttattcaatggctgggccattttgttcttggagggacaaaattgacctctccatgaaattgcaaaaacccatcttcattcctttttatggggctccaggtcataaggatgagatatatttggggtactggcagaggatggcagagctggctggctctgagccaggaagccttgttagaggaaggaactctggcattcagaggtgtccccttgggggcacttgcttgggtcttggatcaaactctactggggcagcctggctgtgggaggtgatgacatctgccacctctgccactacccagagcttgtcctgccctcttcccagccagcctcacacacaggagctgagccaggctgaggcaaggtcagcgagagacagttctccatgccagtatctgggtgtgggtctcttgttggctcccagctcatcccgtgtggctgacccttccaggtcacttggagcagccagtaatgacagtgtcctaacagctggtgggtatggaggaaagactagacatcaggctatggactcacatggagggccctggtgttggctctgggacctgggctgggccggacctggggagagggtgggtggagcttggcctctgcagtttgcgcttgcaggttcaggggagaaagttgtttgagatcagggtttaggggtagtgtttcccattaatcttcatcataatcttttgatgtaggtgctgttattatctctacgttacacatctgggaggatttgaaagtcctggagacagggaggttttggggagaatgcaaaacagggcagggctctcaaggagggtggaccagtgaccatggggaaactgagtgtttctattaataagtatctaagtttcaattgtcttgtatctttccctaattctccaaacggttcaatctccagttttattcagggactgggccattttgttctcagagggacaaaactgatctctccatgaaatcccctgcacctcactctgggcagctctaggctcagcagatgtttttctgccattaggaaacagccccttactctcagctcctgtgctaacacccatacccaccagctgggcgttgggacctctcccgtcatatggctgccacttgcttgggaaggaattctccagactccttttactttgtatgtgtttctaggggaattctgagggaagaagctttgcagcaacctctgtgcccagaacatacggctcacaagtcctttgtgccgacagggaatctatctaattgttttagtgtgtgaggctcattgtcagcctagatttccctgaaactctgggccagcagcccccaggagcatcagtaggacccagcatttcccctggcaccaaagtggacctctttgcaccttgcagccgggagaactgacttagagggccctggtgttggctctggaacctgggctgagatggattcggggagaggctgggtggagcttggcctctacggtctgttcttgcagattcaggagagaaagtggtatgagagcagtgtggtttgtaagttccccaacttccccgctggctcacactgtctccccagaccaatggcctattagcccccaaaaagttagtccaaccccaggccagctgcctttgctctgctgtggcctaagttctggcctggtcaaaggaaggtggcaggaactccaggcttgctcctgcctcctcacacctcattccacaaatgcggagtgaaagagcaggagccagacacatttgggggttgactgtctagaaaggaggaatcagaggtcccaaggaacacaatcgtgcaacttcctagggaatctgcatcaggagaaagaagcggctaggacacacagtggcttcgctcagcctggccacgacatcactgtgcagaagaagagatctgtcaggggtccagaggagcggagtcctggagcctctgggagggtggcatgtggcagctgcaggctgtggtccagaactatgagcagacttgcctgtcactctccaaacatttactgaacacctactgtgtgccaggccctgtgctttgtcaggctctgggggagacaggtcattactctgcagtgtgggaagcggggctgccctggaagtgtgtactcagtgctgtgggggtacagagggagggctggagaacttagctggtgggaaaggagggttctggaaggcttctcagaggtagtggcattgggccagaacttacagtagggaagagcatgtggcaaggcacagaggagatgggagcctgcctggtgaggggtccagtggtgacagagctcagtgtgggtccagagatggtgtcaggtgagggctgagaggggagggcaagtgccccttgagatgggctgaacgtgatgatgatctgtggccagtgggagatgatagaagtcttgaggttgggaatataagaattaggtctcttttagaaagagaggacatggagaaaatccatatatttttagctaccaaaaaagagaaggaagaaagaaaagaaataagaagagaagcaagacagaaaagaaggaagagagaaggaagaatggcaaaggaaggaagaaggag

SEQ ID NO: 245971 - DNA, 1014 bp, Artificial Sequence
  derived and/or modified sequence
atgaattcttgggacgccggcttggccggacttttggtggggactatgggcgttagcttgttgtctaatgcccttgtactcttatgccttctacacagtgccgatattcgaagacaggcccctgctctgtttacattaaatctcacttgcgggaacctgctctgcacagtagtaaacatgccactcaccctcgccggggttgtcgcgcaacggcagcccgcgggggataggctgtgccgtctggccgccttccttgacactttcctggctgccaatagcatgctgagtatggctgctctaagcatcgatcgatgggtggcggtcgtattccccctctcttatagggccaagatgcgactcagggacgctgcactgatggtggcctacacctggttgcatgcactgacgtttcctgctgctgccctggcgttgtcctggctcggatttcatcagctttatgcatcttgcacgctatgttccagaaggcctgatgagcggcttaggtttgccgtgttcaccggcgcgtttcacgcactctctttcttgctctcattcgtagtcctgtgttgtacctacctgaaagttctgaaagtcgcacgcttccactgtaagaggattgacgtgataactatgcagaccttggtgcttctggtcgacctgcacccctcagtgcgagaaaggtgtttggaggagcaaaagaggaggcggcagcgggctaccaagaaaatatcaactttcataggcacattcctcgtctgcttcgccccttatgtaataactagactggtggagctcttctcaacagtccccataggttcgcactggggagtgcttagcaagtgcctcgcatactctaaagctgcctccgacccctttgtgtacagcctccttagacatcagtaccggaagtcttgcaaagagattctgaatcgccttctgcatcgccgcagcatccatagctctggtctgactggggactcccactctcaaaatatcctgcccgtcagcgagtag

SEQ ID NO: 245972 - DNA, 1014 bp, Artificial Sequence
  derived and/or modified sequence
atgaacagctgggatgctggcctggccggcctgctggtgggcaccatgggcgtgtccctgctgagcaatgccctggtgctgctgtgcctgctgcacagcgctgacatccggcggcaggccccagccctcttcaccctgaacctgacctgtggcaacctgctgtgcaccgtggtgaacatgcccctgaccctggccggcgtggtggcccagaggcagcctgctggggaccggctgtgccgcctggccgccttcctggacaccttcctggccgccaacagcatgctgtccatggccgccctgagcattgaccgctgggtggccgtggtgttccccctgagctaccgggccaagatgaggctgagagatgctgccctgatggtggcctacacctggctgcacgccctgaccttccctgctgctgccctggccctgtcctggctgggcttccaccagctgtatgccagctgcaccctgtgcagcagaagaccagatgagcggctgcgctttgctgtgttcaccggggccttccacgccctgtccttcctgctgagctttgtggtgctgtgctgcacctacctgaaggtgctgaaggtggcccgcttccactgcaagagaattgatgtgatcaccatgcagaccctggtgctgctggtggacctgcaccccagcgtgcgggagcgctgcctggaggagcagaagagaagacggcagagggccaccaagaagatcagcaccttcatcggcaccttcctggtgtgctttgccccctacgtgatcacccggctggtggagctgttcagcacagtgcccatcggcagccactggggcgtgctgagcaagtgcctggcctacagcaaggccgccagtgacccctttgtgtacagcctgctgcggcaccagtacaggaagagctgcaaggagatcctgaaccggctgctgcacagaagaagcatccacagcagcggcctgaccggggacagccacagccagaacatcctgcctgtgtctgagtag

SEQ ID NO: 245973 - DNA, 1014 bp, Artificial Sequence
  derived and/or modified sequence
atgaacagctgggacgccggcctggccggcctgctggtgggcaccatgggtgtcagcctcctctcgaatgcactcgtgctgctctgcctactccactccgccgacatccggcgccaggctccagcgctcttcacccttaatcttacatgcggcaacctcctttgtacggtcgtcaacatgcccctaacactcgcaggggtggtggcacagcgtcaaccggccggcgatcgcctctgtaggttggctgcgtttctggatacgttcctggccgccaacagtatgctcagtatggcagcgctctcaatagatcgttgggtcgccgtagtgtttcccctgtcatatagagccaaaatgcgactgcgggacgccgcccttatggtggcgtacacctggttacatgccctcaccttccccgccgcggccctggccctgagctggctgggcttccatcagctttatgcctcctgcacgctgtgttccaggcgcccagacgagcgcctgagattcgcggtgtttactggcgcatttcatgcactcagttttttactatctttcgtagtgctatgctgtacgtatctgaaagtgctgaaagtggccagatttcattgtaagaggatcgacgtaatcaccatgcaaacactcgtgcttctcgtggaccttcatccttctgtccgtgaaaggtgtttagaggagcagaaaagacgccgccagagggctactaaaaaaatctcgacatttatcggaactttcctagtgtgttttgccccgtatgttatcactcgactcgtggaactgttcagtacagtaccaatcgggagccattggggcgtactaagcaagtgcctagcctactcaaaggcggcaagcgaccctttcgtttactccctattacgacaccagtaccgcaagtcctgcaaggagattctgaatcgcctgctgcacaggagatccatccactcctccggattgactggagactctcacagccagaacatactgcctgtaagtgagtag

SEQ ID NO: 245974 - DNA, 1014 bp, Artificial Sequence
  derived and/or modified sequence
atgaactcatgggatgctggactggccggtctgctggtgggtaccatgggagtgtccttactgtccaatgcattggtcctgctctgtttgctccacagcgccgatattcgcaggcaagctccggcactctttaccttgaatttaacgtgcggcaatctcctctgcactgttgtgaacatgcccctcaccttggctggcgtcgtggcccagagacaacccgctggagataggctgtgtcggctggctgcctttctggacaccttccttgctgccaacagcatgctgtcaatggcagccctgtccatagatagatgggtggccgttgtcttccctttaagctaccgcgctaagatgcgccttagggacgctgcgctaatggtcgcctacacgtggttacatgctctgactttcccggcagcagcactcgcgctttcctggctaggcttccaccagctgtacgcttcctgtacgctgtgttcaagacgaccagatgagcgcctgagattcgcagtgttcaccggtgcgtttcacgcgttatctttcctgctgagcttcgtagtcctatgctgcacttacttgaaagtgttaaaagtggcccgtttccactgtaagcggatagatgtgattacaatgcagactttggtactgttagttgatttacacccctctgtgagggagcggtgcctggaggagcaaaagcggcgtaggcaaagggctacgaagaagattagcactttcattggtactttcctggtgtgcttcgccccatatgttatcaccagactggtggagctttttagcacagtgcccatagggtcccactggggagtgctgagcaagtgtctcgcatacagcaaggcagcatcagatcccttcgtgtacagtctgctgcgccatcagtataggaaatcttgcaaggaaatcttgaaccgcctgctgcaccgcaggtcaatacactcgagcggacttacaggggactcccactctcagaacatccttcccgtctctgaatag

SEQ ID NO: 245975 - DNA, 1014 bp, Artificial Sequence
  derived and/or modified sequence
atgaacagctgggacgccggcctggccggcctgctggtgggcaccatgggcgtgagcctgctgagcaacgccctggtgctgctgtgcctgctgcacagcgccgacatcagaagacaggcccccgccctgttcaccctgaacctgacctgcggcaacctgctgtgcaccgtggtgaacatgcccctgaccctggccggcgtggtggcccagagacagcccgccggcgacagactgtgcagactggccgccttcctggacaccttcctggccgccaacagcatgctgagcatggccgccctgagcatcgacagatgggtggccgtggtgttccccctgagctacagagccaagatgagactgagagacgccgccctgatggtggcctacacctggctgcacgccctgaccttccccgccgccgccctggccctgagctggctgggcttccaccagctgtacgccagctgcaccctgtgcagcagaagacccgacgagagactgagattcgccgtgttcaccggcgccttccacgccctgagcttcctgctgagcttcgtggtgctgtgctgcacctacctgaaggtgctgaaggtggccagattccactgcaagagaatcgacgtgatcaccatgcagaccctggtgctgctggtggacctgcaccccagcgtgagagagagatgcctggaggagcagaagagaagaagacagagagccaccaagaagatcagcaccttcatcggcaccttcctggtgtgcttcgccccctacgtgatcaccagactggtggagctgttcagcaccgtgcccatcggcagccactggggcgtgctgagcaagtgcctggcctacagcaaggccgccagcgaccccttcgtgtacagcctgctgagacaccagtacagaaagagctgcaaggagatcctgaacagactgctgcacagaagaagcatccacagcagcggcctgaccggcgacagccacagccagaacatcctgcccgtgagcgagtag

SEQ ID NO: 245976 - protein, 410 aa, Artificial Sequence
  derived and/or modified sequence
MSLMVVSMACVGFFLLEGPWPHVGGQDKPFLSAWPGTVVSEGQHVTLQCRSRLGFNEFSLSKEDGMPVPELYNRIFRNSFLMGPVTPAHAGTYRCCSSHPHSPTGWSAPSNPVVIMVTGVHRKPSLLAHPGPLVKSGETVILQCWSDVRFERFLLHREGITEDPLRLVGQLHDAGSQVNYSMGPMTPALAGTYRCFGSVTHLPYELSAPSDPLDIVVVGLYGKPSLSAQPGPTVQAGENVTLSCSSRSLFDIYHLSREAEAGELRLTAVLRVNGTFQANFPLGPVTHGGNYRCFGSFRALPHAWSDPSDPLPVSVTGNSRHLHVLIGTSVVIIPFAILLFFLLHRWCANKKNAVVMDQEPAGNRTVNREDSDEQDPQEVTYAQLNHCVFTQRKITRPSQRPKTPPTDTSV

SEQ ID NO: 245977 - protein, 410 aa, Artificial Sequence
  derived and/or modified sequence
MSLMVVSMACVGFFLLEGPWPHVGGQDKPFLSAWPGTVVSEGQHVTLQCRSRLGFNEFSLSKEDGMPVPELYNRIFRNSFLMGPVTPAHAGTYRCCSSHPHSPTGWSAPSNPVVIMVTGVHRKPSLLAHPGPLVKSGETVILQCWSDVRFERFLLHREGITEDPLRLIGQLHDAGSQVNYSMGPMTPALAGTYRCFGSVTHLPYELSAPSDPLDIVVVGLYGKPSLSAQPGPTVQAGENVTLSCSSRSLFDIYHLSREAEAGELRLTAVLRVNGTFQANFPLGPVTHGGNYRCFGSFRALPHAWSDPSDPLPVSVTGNSRYLHALIGTSVVIIPFAILLFFLLHRWCANKKNAVVMDQEPAGNRTVNREDSDEQDPQEVTYAQLNHCVFTQRKITRPSQRPKTPPTDTSV

SEQ ID NO: 245978 - DNA, 1233 bp, Artificial Sequence
  derived and/or modified sequence
atgagcctgatggtggtgagcatggcctgcgtgggcttcttcctgctggagggcccctggccccacgtgggcggccaggacaagcccttcctgagcgcctggcccggcaccgtggtgagcgagggccagcacgtgaccctgcagtgcagaagcagactgggcttcaacgagttcagcctgagcaaggaggacggcatgcccgtgcccgagctgtacaacagaatcttcagaaacagcttcctgatgggccccgtgacccccgcccacgccggcacctacagatgctgcagcagccacccccacagccccaccggctggagcgcccccagcaaccccgtggtgatcatggtgaccggcgtgcacagaaagcccagcctgctggcccaccccggccccctggtgaagagcggcgagaccgtgatcctgcagtgctggagcgacgtgagattcgagagattcctgctgcacagagagggcatcaccgaggaccccctgagactggtgggccagctgcacgacgccggcagccaggtgaactacagcatgggccccatgacccccgccctggccggcacctacagatgcttcggcagcgtgacccacctgccctacgagctgagcgcccccagcgaccccctggacatcgtggtggtgggcctgtacggcaagcccagcctgagcgcccagcccggccccaccgtgcaggccggcgagaacgtgaccctgagctgcagcagcagaagcctgttcgacatctaccacctgagcagagaggccgaggccggcgagctgagactgaccgccgtgctgagagtgaacggcaccttccaggccaacttccccctgggccccgtgacccacggcggcaactacagatgcttcggcagcttcagagccctgccccacgcctggagcgaccccagcgaccccctgcccgtgagcgtgaccggcaacagcagacacctgcacgtgctgatcggcaccagcgtggtgatcatccccttcgccatcctgctgttcttcctgctgcacagatggtgcgccaacaagaagaacgccgtggtgatggaccaggagcccgccggcaacagaaccgtgaacagagaggacagcgacgagcaggacccccaggaggtgacctacgcccagctgaaccactgcgtgttcacccagagaaagatcaccagacccagccagagacccaagaccccccccaccgacaccagcgtgtag

SEQ ID NO: 245979 - DNA, 1233 bp, Artificial Sequence
  derived and/or modified sequence
atgagtctgatggtggtctctatggcctgcgtgggttttttcctgctagaggggccctggccacacgtaggaggccaggacaagccattcctgtccgcctggcctggaaccgtagtgtccgagggccaacatgtgaccctacagtgtaggtcccggctggggttcaatgagttctccctctcgaaagaagacggcatgcccgtgccggaactgtacaacaggattttccgaaacagtttcctgatgggacctgttactcctgctcacgcagggacctacagatgttgctcttcccatcctcatagcccgacaggctggagcgctccaagcaatcctgtggtgataatggttaccggagtacaccggaaaccttcattactggctcaccccggcccattggtgaaatcaggggagacagttattctccagtgttggtcagatgtaaggttcgaacgctttttgcttcatagagaggggatcacggaagatccactacgtctcgttggacagctgcacgacgccggcagccaggtgaactactcaatgggtccaatgacgccggccctcgccggcacttatcgctgttttggatctgtcacccaccttccctacgaactgtccgccccctctgatccgctcgatattgtggtggtaggcctgtacggaaaacctagcctgagcgcgcagccaggccccacagtgcaggccggagagaacgtgaccctgtcgtgctcttcacgttccttatttgacatctaccacctctcccgggaggcagaggccggtgagctccggttgactgccgtcctccgcgtgaatggcactttccaggctaacttcccactgggacccgtgacacatggtggcaactataggtgctttggtagttttagggcgctccctcatgcctggtcagacccatccgaccctctccccgtatccgtgaccggaaactcaaggcacctgcacgtacttattgggactagcgtggtgatcataccttttgccatcctgttgttttttttactacatcgctggtgtgccaacaaaaagaacgccgtagtgatggatcaggagcctgcgggcaaccgcacagtcaatcgtgaggacagcgacgagcaggatccacaagaggtgacctatgcgcaactgaatcattgtgtgttcacacaaagaaagatcacacgtcctagtcagaggcctaagaccccccccaccgatacctctgtgtag

SEQ ID NO: 245980 - DNA, 1691 bp, Artificial Sequence
  derived and/or modified sequence
gtctgcaccggcagcaccatgtcgctcatggtcgtcagcatggcgtgtgttgggttcttcttgctggaggggccctggccacatgtgggtggtcaggacaagcccttcctctctgcctggcccggcactgtggtgtctgaaggacaacatgtgactcttcagtgtcgctctcgtcttgggtttaacgaattcagtctgtccaaagaagacgggatgcctgtccctgagctctacaacagaatattccggaacagctttctcatgggccctgtgaccccagcacatgcagggacctacagatgttgcagttcacacccacactcccccactgggtggtcggcacccagcaaccctgtggtgatcatggtcacaggagtccacagaaaaccttccctcctggcccacccaggtcccctggtgaaatcgggagagacggtcatcctgcaatgttggtcagatgtcaggtttgagcgcttccttctgcacagagaggggatcactgaggaccccttgcgcctcgttggacagctccacgatgcgggttcccaggtcaactattccatgggtcccatgacacctgcccttgcagggacctacagatgctttggttctgtcactcacttaccctatgagttgtcggctcccagtgaccctctggacatcgtggtcgtaggtctatatgggaaaccttctctctcagcccagccgggccccacggttcaggcaggagagaatgtgaccttgtcctgcagctcccggagcttgtttgacatttaccatctatccagggaggcagaggccggtgaacttaggctcactgcggtgctgagggtcaatggaacattccaggccaacttccctctgggccctgtgacccacggagggaactacagatgcttcggctctttccgtgccctgccccacgcgtggtcagacccgagtgacccactgcccgtttctgtcacaggtaactccagacacctgcacgttctgattgggacctcagtggtcatcatcccctttgctatcctcctcttctttctccttcatcgctggtgtgccaacaaaaagaatgctgttgtaatggaccaagagcctgcagggaacagaacagtgaacagggaggactctgatgaacaagaccctcaggaggtgacatacgcacagttgaatcactgcgttttcacacagagaaaaatcactcgcccttctcagaggcccaagacacccccaacagataccagcgtgtaacacggaacttccaaatgctgagcgcagatccaaagttgtcttctgtccactagcaccacagtcaggccttgatgggatcttctagggagacaatagccctgtctcaaaaccgggttgccagctcccatgtaccagcagctggactctgaaggcgtgagtctgcatcttagggcatcgctcttcctcacaccacgaatctgaacatgcctctctcttgcttacaaatgtctaaggtccccactgcctgctggagagaaaacacacttgcttagcccacaattctccatttcacttgacccctgcccacctctccaacctaactggcttacttcctagtctacttgaggctgcgatcacactgaggaactcacaattccaaacatataagaggctccctcttaacacggcacttagatacgtgctattccacctttcctcag

SEQ ID NO: 245981 - DNA, 1233 bp, Artificial Sequence
  derived and/or modified sequence
atgagcctgatggtggtgtccatggcctgtgtgggcttcttcctgctggagggcccctggccccacgtgggcggccaggacaagcccttcctgagcgcctggccaggcaccgtggtgtctgagggccagcacgtgaccctgcagtgccgcagccggctgggcttcaatgagttcagcctgagcaaagaagatggcatgcctgtgcctgagctgtacaaccgcatcttcagaaattccttcctgatgggccctgtgaccccagcccacgccggcacctaccgctgctgcagcagccacccccacagccccaccggctggagcgcccccagcaaccctgtggtgatcatggtgactggagtgcacaggaagcccagcctgctggcccaccctggccccctggtgaagagcggggagaccgtcatcctgcagtgctggagcgatgtgcgctttgagcgcttcctgctgcaccgggagggcatcacagaggaccccctgcggctggtgggccagctgcatgatgctggcagccaggtgaactacagcatgggccccatgaccccagccctggccggcacctaccgctgcttcggctctgtgacccacctgccctatgagctgagcgcccccagcgaccccctggacatcgtggtggtgggcctgtatggcaagcccagcctgagcgcccagcccggccccaccgtgcaggccggggagaatgtgaccctgagctgcagcagccgcagcctgtttgacatctaccacctgagccgggaggccgaggccggggagctgcggctgacagctgtgctgcgggtgaatggcaccttccaggccaacttccccctgggccctgtgacccatggaggcaactaccgctgcttcggcagcttccgggccctgccccacgcctggagcgaccccagcgaccccctgcctgtgtctgtgacaggcaacagccgccacctgcacgtgctgattggcacctctgtggtgatcatcccctttgccatcctgctcttcttcctgctgcaccgctggtgtgccaacaagaagaatgctgtggtgatggaccaggagcctgctggcaacagaacagtgaacagagaagattctgatgagcaggacccccaggaggtgacctacgcccagctgaaccactgtgtgttcacccagaggaagatcacccggcccagccagaggcccaagaccccacccacagacacctctgtgtag

SEQ ID NO: 245982 - DNA, 1233 bp, Artificial Sequence
  derived and/or modified sequence
atgagcctgatggtggtgagcatggcctgcgtgggcttcttcctgctggaaggcccctggccccacgttggcggacaagacaagccctttctgtcggcctggccaggcaccgtcgtgtcggagggccagcacgtgactctgcagtgtagatctagacttggattcaatgagttctcactctctaaggaggatggaatgccggtcccagaactttacaatagaatcttccgcaattcattcttgatgggcccagtaacacctgcacatgcaggaacttacaggtgttgttcatctcaccctcattctcccacagggtggtctgcaccttccaatcccgtggttatcatggttactggggtccaccggaaacccagcctactggcccacccaggacccttagtcaagagtggggagaccgtgatcctgcagtgttggtcagacgtgaggtttgagcgatttctgctccaccgcgagggcattaccgaggatcccctaagactcgtcggtcagttgcatgatgcaggctcacaggtcaattactctatgggacccatgacccctgccttggctggcacataccggtgtttcggttcggtaacgcacctaccctacgagttaagcgctccttcggatccactggacattgttgtggttgggttgtatggtaagcctagcctctccgcccagccaggcccaacagtacaggccggcgaaaatgtgacgttatcctgctcttctaggtcgctgtttgatatctaccacctgagccgcgaggccgaagctggcgagttgagattaaccgctgtgctgagggtaaacgggacatttcaggccaatttccccctgggccccgtcacacacggaggaaattataggtgtttcggttcattcagggcattaccgcacgcctggtccgatccctcagatcctctgccagtttctgttacgggcaactccaggcatttgcacgtgctcatcgggacctcagtcgttatcatcccattcgctatattactcttctttctgttgcaccgctggtgcgctaacaaaaagaacgccgtggttatggatcaggaaccggcaggaaatcgcacagtcaaccgcgaagacagcgatgagcaagacccccaggaagtgacctacgcccaacttaatcactgtgtgttcacacagagaaaaatcacacgaccatctcaaagacctaagacccctccaaccgatacatcagtgtag

SEQ ID NO: 245983 - DNA, 1233 bp, Artificial Sequence
  derived and/or modified sequence
atgtctttgatggttgtctccatggcatgcgttggcttttttttactagagggcccatggccccatgtgggcggacaggataagccttttctgagcgcgtggcccggaaccgtggtaagtgaaggccagcatgttacactgcagtgcaggtccagacttggcttcaatgaattttcgctttccaaggaagacggcatgcccgtgcctgagttgtacaatcgcatcttcaggaatagttttctgatggggccagtgacccctgcacatgctggcacctaccgctgctgttcttcccatccccatagccccactggctggtcagccccatcaaatcccgtggtgataatggtcacgggggtccatagaaagccatccctgctggcccaccctgggcctcttgttaaaagcggtgagacagtaattctccagtgttggtctgatgtgagattcgagaggttcttgctgcaccgtgagggaattacagaagaccccctcaggctcgtgggccagcttcatgacgctgggtcccaggtcaattactctatgggtcctatgacccctgcccttgccggaacctaccggtgttttggctcagtgacgcatctgccatatgagctcagtgctcccagcgatcctctggatatcgttgttgttggcctctatgggaagcctagcctcagcgctcagccaggcccaaccgtgcaggccggtgagaatgttaccctcagttgctctagccgcagcttatttgatatctatcacctgagcagagaagccgaggctggtgaattaaggctgaccgcggtgctgcgggtaaatgggacttttcaagccaattttcccctcggacctgtcactcacggcggaaactaccgttgtttcgggtcctttagggctttgcctcacgcctggagcgaccccagcgatcctctgccggtgagcgtcactgggaattccaggcacctgcatgtgctgatcgggacatctgtggtgattatcccattcgcaattctcttgttcttcttgttgcatcggtggtgcgccaacaaaaagaatgcagttgtcatggatcaggagcctgcaggcaatcgcacagtcaacagagaagatagtgatgaacaggacccacaggaagtcacctatgcccagctcaatcactgcgtgttcacccagcggaaaattaccagaccctcccagcgacctaaaaccccaccaacagatacctctgtatag

SEQ ID NO: 245984 - DNA, 129 bp, Artificial Sequence
  derived and/or modified sequence
atggcccggggacagcaaaagatccagtcccaacaaaaaaatgccaagaagcaagccggccagaaaaagaaacagggtcacgatcagaaggccgctgccaaggcagcactgatttacacgtgtacctag

SEQ ID NO: 245985 - DNA, 1233 bp, Artificial Sequence
  derived and/or modified sequence
atgagccttatggtcgttagtatggcctgtgtgggcttcttcctgctagagggcccatggccacatgtcggcggccaggataagccctttctcagcgcctggcctgggactgttgtgtctgaaggccagcatgtgaccctgcagtgccgttccagattgggattcaacgagttttcactctctaaggaggatgggatgccggtgcctgaattatacaacagaattttccgtaactctttcctgatgggcccagtgaccccggcacacgcaggaacatatcggtgttgtagttcccacccgcattctcctactggctggtcagctccatcaaatcccgtggtcataatggtgacgggggtgcaccgcaaacctagcctcctagcacaccccggaccactcgtcaaatctggagaaacggtgattctacagtgttggagtgatgtgcgctttgagagattcctgctgcacagagagggcatcaccgaagaccctcttcgtctcattggacagctgcacgacgccgggtctcaggttaactattctatgggcccaatgacgcctgcccttgcgggtacatacagatgtttcgggtctgttacacatttgccttatgaactgagcgctccctctgacccacttgacattgtcgtggtcgggttgtatgggaaaccatccctttccgctcagccaggtcccacggtccaggctggcgagaacgtcaccctgagttgctccagccgttcgctgtttgacatctaccatctgagcagggaggctgaggcaggggaactacgactgactgcggtgctaagagtaaatggtacattccaagcgaatttccctctgggccctgttactcatgggggcaattaccgctgctttggatcattccgcgctcttcctcatgcctggtcggatccttctgaccccctgccagttagcgtgactggcaactcacgctacctccacgccctcataggaacatcagtggtcataatacctttcgcaatattgctcttcttccttctgcacagatggtgtgcaaataaaaaaaacgcagtggttatggaccaggagccggcgggcaatcgcaccgttaatagggaggatagcgatgagcaggatcctcaggaggtgacttacgcccagctcaatcattgcgtcttcacccagcgcaagattacacgaccgtcccagagaccaaagaccccacctacagatacatccgtatag

SEQ ID NO: 245986 - DNA, 1694 bp, Artificial Sequence
  derived and/or modified sequence
gtctgcaccggcagcaccatgtcgctcatggtcgtcagcatggcgtgtgttgggttcttcttgctggaggggccctggccacatgtgggtggtcaggacaagcccttcctctctgcctggcccggcactgtggtgtctgaaggacaacatgtgactcttcagtgtcgctctcgtcttgggtttaacgaattcagtctgtccaaagaagacgggatgcctgtccctgagctctacaacagaatattccggaacagctttctcatgggccctgtgaccccagcacatgcagggacctacagatgttgcagttcacacccacactcccccactgggtggtcggcacccagcaaccctgtggtgatcatggtcacaggagtccacagaaaaccttccctcctggcccacccaggtcccctggtgaaatcgggagagacggtcatcctgcaatgttggtcagatgtcaggtttgagcgcttccttctgcacagagaggggatcactgaggaccccttgcgcctcattggacagctccacgatgcgggttcccaggtcaactattccatgggtcccatgacacctgcccttgcagggacctacagatgctttggttctgtcactcacttaccctatgagttgtcggctcccagtgaccctctggacatcgtggtcgtaggtctatatgggaaaccttctctctcagcccagccgggccccacggttcaggcaggagagaatgtgaccttgtcctgcagctcccggagcttgtttgacatttaccatctatccagggaggcagaggccggtgaacttaggctcactgcggtgctgagggtcaatggaacattccaggccaacttccctctgggccctgtgacccacggagggaactacagatgcttcggctctttccgtgccctgccccacgcgtggtcagacccgagtgacccactgcccgtttctgtcacaggtaactccagatacctgcacgctctgattgggacctcagtggtcatcatcccctttgctatcctcctcttctttctccttcatcgctggtgtgccaacaaaaagaatgctgttgtaatggaccaagagcctgcagggaacagaacagtgaacagggaggactctgatgaacaagaccctcaggaggtgacatacgcacagttgaatcactgcgttttcacacagagaaaaatcactcgcccttctcagaggcccaagacacccccaacagataccagcgtgtaacacggaacttccaaatgctgagcgcagatccaaagttgtcttctgtccaccagcaccacagtcaggccttgatgggatcttctagggagacaatagccctgtctcaaaaccgggttgccagctcccatgtaccagcagctggaatctgaaggcgtgagtctgcatcttagggcatcgctcttcctcacaccacgaatctgaacatgcctctctcttgcttacaaatgtctaaggtccccactgcctgctggagagaaaacacactcctttgcttagcccacaattctccatttcacttgacccctgcccacctctccaacctaactggcttacttcctagtctacttgaggctgcgatcacactgaggaactcacaattccaaacatataagaggctccctcttaacacggcacttagatacatgctattccacctttcctca

SEQ ID NO: 245987 - DNA, 1233 bp, Artificial Sequence
  derived and/or modified sequence
atgagcctgatggtggtgtccatggcctgtgtgggcttcttcctgctggagggcccctggccccacgtgggcggccaggacaagcccttcctgagcgcctggccaggcaccgtggtgtctgagggccagcacgtgaccctgcagtgccgcagccggctgggcttcaatgagttcagcctgagcaaagaagatggcatgcctgtgcctgagctgtacaaccgcatcttcagaaattccttcctgatgggccctgtgaccccagcccacgccggcacctaccgctgctgcagcagccacccccacagccccaccggctggagcgcccccagcaaccctgtggtgatcatggtgactggagtgcacaggaagcccagcctgctggcccaccctggccccctggtgaagagcggggagaccgtcatcctgcagtgctggagcgatgtgcgctttgagcgcttcctgctgcaccgggagggcatcacagaggaccccctgcggctcatcggccagctgcatgatgctggcagccaggtgaactacagcatgggccccatgaccccagccctggccggcacctaccgctgcttcggctctgtgacccacctgccctatgagctgagcgcccccagcgaccccctggacatcgtggtggtgggcctgtatggcaagcccagcctgagcgcccagcccggccccaccgtgcaggccggggagaatgtgaccctgagctgcagcagccgcagcctgtttgacatctaccacctgagccgggaggccgaggccggggagctgcggctgacagctgtgctgcgggtgaatggcaccttccaggccaacttccccctgggccctgtgacccatggaggcaactaccgctgcttcggcagcttccgggccctgccccacgcctggagcgaccccagcgaccccctgcctgtgtctgtgacaggcaacagccgctacctgcacgccctgattggcacctctgtggtgatcatcccctttgccatcctgctcttcttcctgctgcaccgctggtgtgccaacaagaagaatgctgtggtgatggaccaggagcctgctggcaacagaacagtgaacagagaagattctgatgagcaggacccccaggaggtgacctacgcccagctgaaccactgtgtgttcacccagaggaagatcacccggcccagccagaggcccaagaccccacccacagacacctctgtgtag

SEQ ID NO: 245988 - DNA, 1233 bp, Artificial Sequence
  derived and/or modified sequence
atgagcctgatggtggtgagcatggcctgcgtgggcttcttcctgttggaaggtccctggccccacgtcggtggccaggacaagcctttcttgagtgcatggcccggtactgtagtgagcgagggacaacacgtcacattgcaatgtcgatctagattgggcttcaatgaatttagtctcagtaaagaggatgggatgcctgtcccggagctatacaacaggatatttcgaaattcgttcctcatgggtcctgtgactccagcccacgccgggacttaccggtgttgtagttctcatcctcactcaccaacgggatggtctgctcctagcaatcccgtagtgattatggtaaccggcgtgcatcgaaagccttcattactggcccatccaggacctcttgtgaaatcaggcgaaaccgttatccttcagtgctggtccgatgtgaggttcgaaaggtttttgctgcatagagagggaattactgaagatcccctaagactgattggtcagttgcacgacgccggctctcaggttaattattccatggggccaatgacaccggccctagccggcacctatcgctgttttggatccgtcacgcacctgccctatgagttaagcgctccatccgatccactggacatagttgtagtgggtctgtacggtaaacccagtctgtccgcacagcccggccccactgtccaagcaggtgaaaacgtcacactttcttgcagctcacggtccctattcgatatatatcacctgagccgtgaggctgaagccggcgagctgcgcctgacggccgtgctgcgagttaatgggacattccaggccaacttcccattgggccccgtgacacatggcggtaactataggtgcttcggttccttcagagctttgccccatgcctggagcgatccaagtgacccattacccgtgtctgtcacgggaaattcccggtatcttcatgcgcttattggcacctcggtggtaataattccctttgctatcttgctgtttttcctgttgcaccgctggtgcgccaacaaaaaaaacgctgttgtgatggaccaggagcctgctggcaataggaccgttaacagagaagactctgacgagcaagatccccaggaagtgacctatgcccagcttaatcactgtgtcttcacccaaagaaagatcactcggcccagccagcggcctaaaactcccccgaccgacacttctgtatag

SEQ ID NO: 245989 - DNA, 1233 bp, Artificial Sequence
  derived and/or modified sequence
atgtctctgatggtggtgtccatggcatgtgtaggattcttccttcttgaaggaccatggcctcacgtcggagggcaggacaagccctttctgtctgcttggcccggaaccgtggtgagcgagggacagcacgtgaccctacagtgtcggagccgcctggggtttaatgagttctcactgtctaaggaggatgggatgcctgtgcccgaattatataatcgtatatttcggaatagcttcctgatggggcctgtcacgccagcccacgccggaacataccgttgttgctctagccacccacattcacctacgggctggagtgccccaagcaaccctgtggtgatcatggtgactggagtgcatcgcaagccatcgctgctggcgcaccctggtcccctggtgaagtcgggcgagacagtgatcctgcagtgctggagtgacgtcaggttcgagcgtttcctgctgcatagagagggcatcaccgaggatccgcttcgcctgattgggcagctgcacgatgctggcagtcaggttaattatagtatgggaccaatgacaccggcactggcaggaacctaccgctgttttggctcagtaacccacttgccctacgagcttagcgccccaagtgaccccttggatatagtggtggtgggactgtacggaaagccttccctgtcggcacagccaggacctacggttcaagccggagaaaatgttacactatcttgcagctccaggtcccttttcgatatatatcacctgtctagggaggccgaggcaggggaattgagactgaccgcagttctgagagtcaacgggacattccaagctaatttccccctcggaccagtgacccacggtgggaattaccgctgttttggcagcttcagggcgttacctcatgcctggtctgatccaagcgaccctctaccagttagcgtgacgggaaactctcgctacttgcatgcccttatcggcacctccgtcgttattattccatttgctatcctactcttcttcctactccatagatggtgcgccaataaaaaaaatgccgtggtcatggatcaagagcctgccggtaaccggaccgtgaatagggaggactctgatgaacaggacccccaggaagtaacctacgcccagctgaaccattgcgttttcactcagcgcaagattacccgcccaagccagcggcctaaaacgcctcccacagacacctcggtgtag

SEQ ID NO: 245990 - DNA, 1233 bp, Artificial Sequence
  derived and/or modified sequence
atgagcctgatggtggtgagcatggcctgcgtgggcttcttcctgctggagggcccctggccccacgtgggcggccaggacaagcccttcctgagcgcctggcccggcaccgtggtgagcgagggccagcacgtgaccctgcagtgcagaagcagactgggcttcaacgagttcagcctgagcaaggaggacggcatgcccgtgcccgagctgtacaacagaatcttcagaaacagcttcctgatgggccccgtgacccccgcccacgccggcacctacagatgctgcagcagccacccccacagccccaccggctggagcgcccccagcaaccccgtggtgatcatggtgaccggcgtgcacagaaagcccagcctgctggcccaccccggccccctggtgaagagcggcgagaccgtgatcctgcagtgctggagcgacgtgagattcgagagattcctgctgcacagagagggcatcaccgaggaccccctgagactgatcggccagctgcacgacgccggcagccaggtgaactacagcatgggccccatgacccccgccctggccggcacctacagatgcttcggcagcgtgacccacctgccctacgagctgagcgcccccagcgaccccctggacatcgtggtggtgggcctgtacggcaagcccagcctgagcgcccagcccggccccaccgtgcaggccggcgagaacgtgaccctgagctgcagcagcagaagcctgttcgacatctaccacctgagcagagaggccgaggccggcgagctgagactgaccgccgtgctgagagtgaacggcaccttccaggccaacttccccctgggccccgtgacccacggcggcaactacagatgcttcggcagcttcagagccctgccccacgcctggagcgaccccagcgaccccctgcccgtgagcgtgaccggcaacagcagatacctgcacgccctgatcggcaccagcgtggtgatcatccccttcgccatcctgctgttcttcctgctgcacagatggtgcgccaacaagaagaacgccgtggtgatggaccaggagcccgccggcaacagaaccgtgaacagagaggacagcgacgagcaggacccccaggaggtgacctacgcccagctgaaccactgcgtgttcacccagagaaagatcaccagacccagccagagacccaagaccccccccaccgacaccagcgtgtag

SEQ ID NO: 245991 - protein, 566 aa, Artificial Sequence
  derived and/or modified sequence
MGSAGFSVGKFHVEVASRGRECVSGTPECGNRLGSAGFGALCLELRGADPAWGPFAAHGRSRRQGSRFLWLLKILVIILVLGIVGFMFGSMFLQAVFSSPKPELPSPAPGVQKLKLLPEERLRNLFSYDGIWLFPKNQCKCEANKEQGGYNFQDAYGQSDLPAVKARRQAEFEHFQRREGLPRPLPLLVQPNLPFGYPVHGVEVMPLHTVPIPGLQFEGPDAPVYEVTLTASLGTLNTLADVPDSVVQGRGQKQLIISTSDRKLLKFILQHVTYTSTGYQHQKVDIVSLESRSSVAKFPVTIRHPVIPKLYDPGPERKLRNLVTIATKTFLRPHKLMIMLRSIREYYPDLTVIVADDSQKPLEIKDNHVEYYTMPFGKGWFAGRNLAISQVTTKYVLWVDDDFLFNEETKIEVLVDVLEKTELDVVGGSVLGNVFQFKLLLEQSENGACLHKRMGFFQPLDGFPSCVVTSGVVNFFLAHTERLQRVGFDPRLQRVAHSEFFIDGLGTLLVGSCPEVIIGHQSRSPVVDSELAALEKTYNTYRSNTLTRVQFKLALHYFKNHLQCAA

SEQ ID NO: 245992 - DNA, 1701 bp, Artificial Sequence
  derived and/or modified sequence
atgggcagcgccggcttcagcgtgggcaagttccacgtggaggtggccagcagaggcagagagtgcgtgagcggcacccccgagtgcggcaacagactgggcagcgccggcttcggcgccctgtgcctggagctgagaggcgccgaccccgcctggggccccttcgccgcccacggcagaagcagaagacagggcagcagattcctgtggctgctgaagatcctggtgatcatcctggtgctgggcatcgtgggcttcatgttcggcagcatgttcctgcaggccgtgttcagcagccccaagcccgagctgcccagccccgcccccggcgtgcagaagctgaagctgctgcccgaggagagactgagaaacctgttcagctacgacggcatctggctgttccccaagaaccagtgcaagtgcgaggccaacaaggagcagggcggctacaacttccaggacgcctacggccagagcgacctgcccgccgtgaaggccagaagacaggccgagttcgagcacttccagagaagagagggcctgcccagacccctgcccctgctggtgcagcccaacctgcccttcggctaccccgtgcacggcgtggaggtgatgcccctgcacaccgtgcccatccccggcctgcagttcgagggccccgacgcccccgtgtacgaggtgaccctgaccgccagcctgggcaccctgaacaccctggccgacgtgcccgacagcgtggtgcagggcagaggccagaagcagctgatcatcagcaccagcgacagaaagctgctgaagttcatcctgcagcacgtgacctacaccagcaccggctaccagcaccagaaggtggacatcgtgagcctggagagcagaagcagcgtggccaagttccccgtgaccatcagacaccccgtgatccccaagctgtacgaccccggccccgagagaaagctgagaaacctggtgaccatcgccaccaagaccttcctgagaccccacaagctgatgatcatgctgagaagcatcagagagtactaccccgacctgaccgtgatcgtggccgacgacagccagaagcccctggagatcaaggacaaccacgtggagtactacaccatgcccttcggcaagggctggttcgccggcagaaacctggccatcagccaggtgaccaccaagtacgtgctgtgggtggacgacgacttcctgttcaacgaggagaccaagatcgaggtgctggtggacgtgctggagaagaccgagctggacgtggtgggcggcagcgtgctgggcaacgtgttccagttcaagctgctgctggagcagagcgagaacggcgcctgcctgcacaagagaatgggcttcttccagcccctggacggcttccccagctgcgtggtgaccagcggcgtggtgaacttcttcctggcccacaccgagagactgcagagagtgggcttcgaccccagactgcagagagtggcccacagcgagttcttcatcgacggcctgggcaccctgctggtgggcagctgccccgaggtgatcatcggccaccagagcagaagccccgtggtggacagcgagctggccgccctggagaagacctacaacacctacagaagcaacaccctgaccagagtgcagttcaagctggccctgcactacttcaagaaccacctgcagtgcgccgcctag

SEQ ID NO: 245993 - DNA, 1443 bp, Artificial Sequence
  derived and/or modified sequence
atgttcggcagcatgttcctgcaggccgtgttcagcagccccaagcccgagctgcccagccccgcccccggcgtgcagaagctgaagctgctgcccgaggagagactgagaaacctgttcagctacgacggcatctggctgttccccaagaaccagtgcaagtgcgaggccaacaaggagcagggcggctacaacttccaggacgcctacggccagagcgacctgcccgccgtgaaggccagaagacaggccgagttcgagcacttccagagaagagagggcctgcccagacccctgcccctgctggtgcagcccaacctgcccttcggctaccccgtgcacggcgtggaggtgatgcccctgcacaccgtgcccatccccggcctgcagttcgagggccccgacgcccccgtgtacgaggtgaccctgaccgccagcctgggcaccctgaacaccctggccgacgtgcccgacagcgtggtgcagggcagaggccagaagcagctgatcatcagcaccagcgacagaaagctgctgaagttcatcctgcagcacgtgacctacaccagcaccggctaccagcaccagaaggtggacatcgtgagcctggagagcagaagcagcgtggccaagttccccgtgaccatcagacaccccgtgatccccaagctgtacgaccccggccccgagagaaagctgagaaacctggtgaccatcgccaccaagaccttcctgagaccccacaagctgatgatcatgctgagaagcatcagagagtactaccccgacctgaccgtgatcgtggccgacgacagccagaagcccctggagatcaaggacaaccacgtggagtactacaccatgcccttcggcaagggctggttcgccggcagaaacctggccatcagccaggtgaccaccaagtacgtgctgtgggtggacgacgacttcctgttcaacgaggagaccaagatcgaggtgctggtggacgtgctggagaagaccgagctggacgtggtgggcggcagcgtgctgggcaacgtgttccagttcaagctgctgctggagcagagcgagaacggcgcctgcctgcacaagagaatgggcttcttccagcccctggacggcttccccagctgcgtggtgaccagcggcgtggtgaacttcttcctggcccacaccgagagactgcagagagtgggcttcgaccccagactgcagagagtggcccacagcgagttcttcatcgacggcctgggcaccctgctggtgggcagctgccccgaggtgatcatcggccaccagagcagaagccccgtggtggacagcgagctggccgccctggagaagacctacaacacctacagaagcaacaccctgaccagagtgcagttcaagctggccctgcactacttcaagaaccacctgcagtgcgccgcctag

SEQ ID NO: 245994 - DNA, 1701 bp, Artificial Sequence
  derived and/or modified sequence
atgggctccgccggcttctcagtaggcaagttccacgttgaagtggctagtcggggtagagagtgtgtgtccggtacacccgaatgcggtaatagactgggttctgcgggattcggggccctgtgcctagaactcagaggggccgatcccgcctggggtcccttcgctgctcacggtaggtccaggagacaggggagtagattcctgtggttactgaaaattctcgttataatcctcgtgctggggattgtcggctttatgtttggtagtatgttcctccaggcagtcttttcttctcctaaacctgaactgccttcccctgccccaggtgttcagaagctgaaactgctccctgaggagagactacgcaacctgttcagctacgacgggatatggctgttcccaaaaaaccagtgtaagtgcgaagcgaacaaggaacagggcggctataactttcaggatgcttacggacaaagcgacttaccagccgtcaaggcgcgcaggcaggctgaattcgagcatttccagagacgcgaaggtctaccacggcctctgcctctactcgtgcaacccaacctgccatttggatatcctgtgcatggtgtagaggtcatgcctctccacaccgttccgattccagggctgcaattcgagggccctgatgccccggtgtacgaggttactttaaccgccagtttaggtacattaaatacccttgctgacgttcccgacagcgttgtgcaaggccggggacaaaagcagctcattatttctacaagtgaccgcaaactgctcaaatttatcctgcagcacgtcacttatacaagcactggctatcagcatcagaaggtcgatatagtgagcctggaatcacgtagttctgtggctaaatttcctgttaccatccggcaccctgtgatccccaagttatacgaccccgggccggagcgcaagctccgaaatctcgtgactatagctaccaagacgttccttagaccacataagttaatgataatgctgagatcgattcgcgagtactaccctgacctgactgttatcgtggcagatgactctcaaaagcctctcgagatcaaggacaaccacgtagagtactataccatgccttttggcaagggctggtttgccggaaggaatctggctattagccaagtgaccaccaagtatgtgttatgggttgatgatgactttctcttcaacgaggagactaagattgaggtgctagttgatgtgctggaaaagactgagcttgacgtggtggggggaagcgttctagggaacgttttccagtttaagctgctgcttgaacagagtgaaaatggggcttgcctccacaaaaggatggggttctttcagccgcttgacgggttcccgtcttgtgtcgtgacttccggtgtcgtcaacttttttctggcacatactgagaggctgcagagggtgggtttcgacccaagactgcagcgggtggcccatagcgaattctttatcgacggtctcgggactttgctggtgggttcttgcccggaggtgatcatcggacaccaaagccgctctcccgtagtggatagtgagctcgctgcgctcgaaaaaacatacaatacttaccgaagcaacacactcacacgcgtgcagttcaaactggcattgcactactttaagaaccatctgcagtgtgccgcctag

SEQ ID NO: 245995 - DNA, 1443 bp, Artificial Sequence
  derived and/or modified sequence
atgtttgggagtatgttcctccaggctgtgttcagttccccaaaacccgaactgccatcccctgctcccggcgtacaaaagttgaaactgctgcccgaagagcggctccgcaatctgttttcctatgatggaatctggctcttccccaaaaatcagtgtaagtgcgaagctaataaagaacagggtgggtataactttcaggacgcctacggtcaaagcgacctcccagcagttaaagctagaaggcaggcagagttcgagcatttccagagaagggagggcttgccgcgacctcttccgctgttggtccagcctaatctcccttttggataccctgtgcatggggtggaagtcatgccccttcacacagtccctatcccaggattacaatttgaaggccctgatgcgccagtttatgaggttactcttaccgccagcctggggacgttaaataccctggccgatgtgccagattctgttgtgcagggccggggccaaaagcagctgataatctccacttccgacaggaagctcctcaagttcatcttgcaacacgtgacatatacgtctacaggctaccaacaccagaaggtggatattgtgagcctcgagtccagatcttcagttgcaaagttccctgttacaatccgacatccagtaatcccaaagttgtatgacccagggccagagcgcaaactccggaacctagtcactattgccaccaagaccttccttcgcccccacaaacttatgatcatgttgcgctccattagagagtattaccctgatctgactgttatcgtggctgacgactcccagaagcccttggaaataaaggacaatcacgtggagtactataccatgccatttggaaaggggtggttcgccggccggaacctagctatctcccaagtcacaacaaagtatgtcttgtgggttgacgatgacttcctgtttaatgaggagacgaaaatcgaggttctcgtggacgtgttggagaaaacggaactcgatgtcgtcggcggctccgtgctcggaaatgtgttccagttcaagctactcctggaacagtcagaaaacggtgcatgtctgcataagaggatgggcttcttccagccgctcgacggttttccctcctgcgtggtcacaagtggggtagtgaattttttcctcgcacatactgagagacttcagcgcgtcgggtttgatccccgactccagcgcgttgcccactccgagtttttcatcgacggtcttggaacactgcttgtgggcagctgcccggaggtaatcatcggccaccaatcccgctcccctgtcgtggacagtgagcttgctgcgttggaaaagacttataacacctacaggtctaatactctcacccgggtgcagttcaaactcgcactgcactactttaaaaatcaccttcagtgcgctgcctag

SEQ ID NO: 245996 - DNA, 1701 bp, Artificial Sequence
  derived and/or modified sequence
atgggcagcgctggcttctctgtgggcaagttccacgtggaggtggccagccggggcagagaatgtgtgtctggcaccccagaatgtggcaaccggctgggcagcgctggctttggagccctgtgcctggagctgcggggagctgaccctgcctggggcccctttgctgcccacggccgcagccggcggcagggcagccgcttcctgtggctgctgaagatcctggtgatcatcctggtgctgggcatcgtgggcttcatgtttggctccatgttcctgcaggccgtgttcagcagccccaagccagagctgcccagccctgcccctggggtgcagaagctgaagctgctgcctgaggagcggctgaggaacctcttctcctatgatggcatctggctgttccccaagaaccagtgcaagtgtgaggccaacaaggagcagggcggctacaacttccaggatgcctacggccagagcgacctgcctgctgtgaaggcccggcggcaggccgagtttgagcacttccagaggcgggagggcctgccccggcccctgcccctgctggtgcagcccaacctgcccttcggctaccctgtgcacggcgtggaggtgatgcccctgcacacagtgcccatccctggcctgcagtttgagggcccagatgcccctgtgtatgaggtgaccctgacagccagcctgggcaccctgaacaccctggctgatgtgcctgattctgtggtgcagggccggggccagaagcagctgatcatcagcaccagtgacaggaagctgctgaagttcatcctgcagcacgtgacctacaccagcacaggctaccagcaccagaaggtggacatcgtgtccctggagagccgcagctctgtggccaagtttcctgtgaccatccgccaccctgtgatccccaagctgtatgaccccggccctgagaggaagctgaggaacctggtgaccatcgccaccaagaccttcctgcggccccacaagctgatgatcatgctgcggagcatccgggagtactacccagacctgactgtgattgtggctgatgacagccagaagcccctggagatcaaggacaaccacgtggagtactacaccatgccctttgggaagggctggtttgctggcaggaacctggccatcagccaggtgaccaccaagtatgtgctgtgggtggatgatgacttcctgttcaatgaggagaccaagattgaggtgctggtggatgtgctggagaagacagagctggatgtggtgggcggctctgtgctgggcaatgtgttccagttcaagctgctgctggagcagagtgaaaatggagcctgcctgcacaagaggatgggcttcttccagcccctggatggcttccccagctgtgtggtgaccagcggcgtggtgaacttcttcctggcccacacagagcggctgcagagggtgggctttgacccccggctgcagagggtggcccacagcgagttcttcattgatggcctgggcaccctgctggtgggcagctgcccagaggtgatcatcggccaccagagccgcagccctgtggtggacagcgagctggccgccctggagaagacctacaacacctaccgcagcaacaccctgaccagggtgcagttcaagctggccctgcactacttcaagaaccacctgcagtgtgccgcctag

SEQ ID NO: 245997 - DNA, 1443 bp, Artificial Sequence
  derived and/or modified sequence
atgtttggctccatgttcctgcaggccgtgttcagcagccccaagccagagctgcccagccctgcccctggggtgcagaagctgaagctgctgcctgaggagcggctgaggaacctcttctcctatgatggcatctggctgttccccaagaaccagtgcaagtgtgaggccaacaaggagcagggcggctacaacttccaggatgcctacggccagagcgacctgcctgctgtgaaggcccggcggcaggccgagtttgagcacttccagaggcgggagggcctgccccggcccctgcccctgctggtgcagcccaacctgcccttcggctaccctgtgcacggcgtggaggtgatgcccctgcacacagtgcccatccctggcctgcagtttgagggcccagatgcccctgtgtatgaggtgaccctgacagccagcctgggcaccctgaacaccctggctgatgtgcctgattctgtggtgcagggccggggccagaagcagctgatcatcagcaccagtgacaggaagctgctgaagttcatcctgcagcacgtgacctacaccagcacaggctaccagcaccagaaggtggacatcgtgtccctggagagccgcagctctgtggccaagtttcctgtgaccatccgccaccctgtgatccccaagctgtatgaccccggccctgagaggaagctgaggaacctggtgaccatcgccaccaagaccttcctgcggccccacaagctgatgatcatgctgcggagcatccgggagtactacccagacctgactgtgattgtggctgatgacagccagaagcccctggagatcaaggacaaccacgtggagtactacaccatgccctttgggaagggctggtttgctggcaggaacctggccatcagccaggtgaccaccaagtatgtgctgtgggtggatgatgacttcctgttcaatgaggagaccaagattgaggtgctggtggatgtgctggagaagacagagctggatgtggtgggcggctctgtgctgggcaatgtgttccagttcaagctgctgctggagcagagtgaaaatggagcctgcctgcacaagaggatgggcttcttccagcccctggatggcttccccagctgtgtggtgaccagcggcgtggtgaacttcttcctggcccacacagagcggctgcagagggtgggctttgacccccggctgcagagggtggcccacagcgagttcttcattgatggcctgggcaccctgctggtgggcagctgcccagaggtgatcatcggccaccagagccgcagccctgtggtggacagcgagctggccgccctggagaagacctacaacacctaccgcagcaacaccctgaccagggtgcagttcaagctggccctgcactacttcaagaaccacctgcagtgtgccgcctag

SEQ ID NO: 245998 - DNA, 1701 bp, Artificial Sequence
  derived and/or modified sequence
atgggcagcgccggcttcagcgtgggcaagttccacgtggaggtggcctcgcgaggacgggaatgtgttagtggcactccagaatgcggcaaccggttagggagcgccggattcggcgcgctttgtctggagctgagaggagctgatcctgcctgggggccgtttgccgcacatgggcgatcccggcgccagggttctcggttcttgtggctgttaaaaatccttgtcattatcctggtcctcggtatcgtcgggttcatgttcggatcaatgtttctacaagcagtatttagcagccctaagccagaacttcctagcccagctccaggggtgcaaaaactgaagttactgcccgaggaacgcttacggaatctcttttcatacgatgggatctggctctttcctaaaaaccagtgcaagtgcgaggccaacaaggagcagggcggctataattttcaggacgcctatggccaatccgatttaccagcagtgaaggcgcggagacaggcggagtttgagcatttccagcggcgcgaagggctccctaggccgctgccactgctcgtccagccaaacctgccctttggatatcctgtccacggtgtcgaagttatgcctcttcacactgtgcccatccctgggttgcagttcgagggccctgatgcccccgtgtacgaggtgactctgacagctagcctgggaaccttaaacacgctggcagacgtccccgacagcgtggtgcaaggcaggggccaaaagcagctcatcatctccacatctgatcgcaagctgttgaagtttatcctccaacacgtgacatacacatctacgggttatcagcaccagaaagtggatatcgtgagcctggaatctcgttcatccgttgctaagtttccagtgaccattcgccatcccgtcatccccaaactgtacgatcccggacctgagcgtaagctgcggaatctggtgaccattgccaccaagacttttctgcgcccacacaaactgatgattatgcttaggtctattcgagaatactacccagatctcacagtgattgtggcagacgattcacagaaaccgttagaaattaaagacaatcacgtggaatactacaccatgccatttggcaagggctggtttgccggaagaaatctcgcaatttcccaggttacaacaaaatacgtactgtgggtggacgacgactttctgttcaatgaggagactaaaatagaagttcttgtggacgttctggaaaaaaccgaactcgatgtggtgggcgggagcgtgctgggtaacgtgttccaattcaaactactcttggagcagtccgaaaatggcgcttgcctgcacaaacgaatgggtttctttcagccacttgatggctttcccagctgcgtggtgacctccggcgtggtgaatttcttcttggcgcacaccgagaggctgcagcgcgtgggcttcgatcctagactccagagggtcgctcattcagaatttttcatcgatgggctgggcacgcttctagtcggttcttgcccggaggtgattattggacaccaatctaggtcacctgtggtagacagcgagttggccgcgctggagaaaacgtacaacacctacaggtctaacacccttaccagagtgcaatttaaactggcattacactactttaagaaccacctgcaatgcgctgcttag

SEQ ID NO: 245999 - DNA, 1443 bp, Artificial Sequence
  derived and/or modified sequence
atgttcggcagcatgttcctgcaggccgtgttcagcagccccaagcctgagttgccctcgcctgcccctggagtacagaagctgaagctgcttcccgaggagcgcctgaggaacttattctcttatgacggcatctggctgttccccaagaaccaatgcaagtgtgaggcaaacaaggagcagggcgggtacaacttccaggacgcgtacggtcagtcagacctcccagcagtgaaagctcggcgccaggctgaattcgagcactttcaaagacgcgaagggttaccccgacccctgcctcttttggtccagccaaatctgccatttggctacccagtgcatggcgtggaggtgatgccgttacataccgtcccaatccccggacttcaattcgagggtccggacgcccccgtatacgaagtgaccctgactgcctctttgggtaccctgaatacgttggccgacgtaccagattcagtggttcagggcagaggccaaaaacagctcattatcagcacgtccgaccggaaactgctgaagtttatactccagcacgtgacttatacatcgactggatatcaacatcagaaagtggacattgtatcactggaatccagatcatctgttgccaaattccctgtgactatacggcatcctgttatacctaaactttacgacccggggccagaacgcaagcttcgcaatttagtgaccattgccacaaaaacctttctccgtccacacaaactcatgatcatgctgagatccatcagagagtactaccccgatctcactgtcatcgtcgctgatgacagccagaaacctctcgagataaaagacaatcatgtggagtactatactatgccattcggaaaaggttggttcgcaggcagaaatctggccatcagccaggtgaccaccaaatatgtcctgtgggttgatgatgatttcctgtttaacgaagaaaccaagatcgaggtgctggtcgatgtgcttgagaagacagagttagacgtggttggcgggtccgtcctaggcaacgtctttcagttcaagcttctccttgagcaatcagagaatggagcatgcctgcataagcgaatgggctttttccagccattagacggcttcccctcgtgtgtagtaaccagtggcgttgtcaatttcttcctagcacacaccgagcggctgcagcgcgtgggattcgacccgaggctccaacgagtcgcccattctgaattttttatagatggtctgggcacactcctcgttgggtcgtgccccgaggttattattggtcatcagtcacggtcaccagtcgtggattccgaattggctgctctcgagaagacatataacacctaccgttccaacactctgactcgagtccagttcaagctcgctctgcactatttcaagaaccacttgcaatgtgcagcttag

SEQ ID NO: 246000 - DNA, 1701 bp, Artificial Sequence
  derived and/or modified sequence
atgggctcagccggtttctctgtgggaaagtttcatgtggaagtggcctcccggggtagggagtgtgtctcaggtacccctgaatgcgggaatcgcctcgggagcgctgggttcggggctctttgtctcgaactcagaggcgctgaccctgcttggggaccgtttgcggcacatggtagatctagacgccagggatcaaggttcttgtggctgctgaaaatcctggtcattattctcgtgcttggaattgttggattcatgtttggctctatgtttctacaagctgtttttagcagccccaaaccagagttacccagccccgctcctggggtccagaaactgaagctgttgccagaggaaagactccggaatttatttagctatgatggaatctggctgttccccaagaaccaatgtaagtgcgaagccaataaggagcaggggggatataacttccaggatgcatatgggcagtccgacctgcctgccgtcaaggcaagacgccaagcagagtttgaacactttcagagaagagaagggctccctaggccactcccccttctagtccaacccaacctcccgtttggataccccgtccatggagtggaagtcatgcctctgcacactgtaccaatccctggtttgcagttcgaagggccagatgcccctgtgtacgaggtgaccctcacggccagtctcgggactctcaacactctggccgacgtccctgactctgtggtgcagggcagagggcagaagcaactcattatttctacatctgatcgaaaactgctaaagttcattcttcagcacgtgacttataccagcaccggatatcagcaccagaaggtcgatattgtgtctcttgagtcccgcagcagcgtggctaaattccctgtcaccatcagacatccagtgatccccaagctgtatgatcccggtccggagcgtaaactgcgcaatctggtgacaattgcgacgaagacctttctccggccacacaagctcatgatcatgctgagatccataagggagtattaccccgatctgaccgtgatagtggccgatgattctcagaaaccactggagatcaaggataatcacgtggagtattacacgatgcccttcgggaagggttggttcgccggaagaaatcttgccatttcccaggtgacaactaagtacgtgctatgggttgatgatgatttcctcttcaacgaagaaactaagatcgaggtgctcgttgatgtgctggagaagacagagcttgacgtggtggggggaagcgtgttggggaatgtttttcagttcaagctgcttttagagcaatcagagaatggcgcttgcttgcacaagcgcatggggttttttcagccgctagatgggtttccctcttgcgtggtgacgtcaggcgtggtgaatttctttctggctcacacagagcgactgcagcgggttggctttgacccacgcttacagagagtcgcccattccgaattttttatcgacggcctcggaactttgctggtgggtagctgcccagaggttattatcggacatcaatcaagatcacccgtggttgatagcgagttggctgccctggaaaaaacgtacaacacttataggtccaatactctcacccgagttcagttcaaactggctcttcactacttcaaaaatcatttgcagtgcgctgcctag

SEQ ID NO: 246001 - DNA, 1443 bp, Artificial Sequence
  derived and/or modified sequence
atgttcggatcaatgttcctgcaagccgtgtttagctcacccaagcctgaacttccctctccagctcctggagtgcagaaattgaaactccttcctgaagaacgcctccgaaaccttttttcgtacgacggcatctggctgttccctaagaaccagtgtaagtgtgaggctaacaaggaacagggaggctacaatttccaagatgcctatgggcagtccgatctgccagcggtaaaagccagacgccaagctgagttcgagcatttccagcgacgggaaggccttccacgcccacttccactgttggtgcagcccaatctgccttttggctaccccgtgcacggagttgaagtcatgcctcttcacactgtccccatcccaggcctgcaattcgagggacctgacgcaccagtgtatgaggtgacgcttaccgctagcctgggtaccctgaacactctggcagatgtcccagattcggtagtgcaaggtaggggtcagaaacagctgatcatctctacgtcagatcggaaactcctaaagttcattctgcagcacgtgacttataccagcacaggctaccagcatcaaaaggtcgacatcgtcagccttgagtccaggtcttctgtggctaagtttcctgtgactatccggcatcccgtcattccgaaactctatgatccaggaccagaacgcaagctgcggaatttggtgacgatagcaaccaagacttttctgagaccccataagctaatgatcatgcttaggtctatccgtgaatattatcctgatcttacggtgatcgtggccgatgactctcaaaagcccttagagataaaggataatcacgtcgagtattatactatgccattcgggaagggctggttcgccggaagaaatctggcaatcagccaggtgactacaaagtacgttttgtgggttgacgatgacttcctttttaacgaggaaacgaagatagaggtgctcgtggatgtcctcgagaagactgagttggatgttgtgggtgggtcggtactgggaaacgtgttccagtttaagttgctcttggagcagtctgaaaacggcgcttgtctacataaaagaatgggatttttccaacccctggatggatttccctcttgcgtcgtaacaagcggtgtggttaactttttcttagctcacaccgagaggcttcagagggtcgggtttgatccaaggctgcagcgcgtggcccatagcgagttttttattgacggcctcggtactttgctggtcgggagttgccctgaagtgatcattggtcatcagtcaaggagccctgtcgtcgacagcgaattagccgctctggagaagacctataatacgtatcgtagcaatacccttacacgggtgcagttcaagctggcactccattacttcaagaaccaccttcaatgtgctgcttag

SEQ ID NO: 246002 - DNA, 1906 bp, Artificial Sequence
  derived and/or modified sequence
ataggtggctgcagaggcgaggtgacggcgcgtgcggaacgaactctgcacccccaggaatggggagcgctggcttttccgtgggaaaattccacgtggaagtggcctctcgcggccgggaatgtgtctcggggacgcccgagtgtgggaatcggctcgggagtgcgggcttcggggctctctgcttggaactcagaggcgctgacccagcctggggcccgtttgctgcccacgggaggagccgccgtcagggctcgagatttctgtggctcctcaagatattggtcataatcctggtacttggcattgttggatttatgttcggaagcatgttccttcaagcagtgttcagcagccccaagccagaactcccaagtcctgccccgggtgtccagaagctgaagcttctgcctgaggaacgtctcaggaacctcttttcctacgatggaatctggctgttcccgaaaaatcagtgcaaatgtgaagccaacaaagagcagggaggttacaactttcaggatgcctatggccagagcgacctcccagcggtgaaagcgaggagacaggctgaatttgaacactttcagaggagagaagggctgccccgcccactgcccctgctggtccagcccaacctcccctttgggtacccagtccacggagtggaggtgatgcccctgcacacggttcccatcccaggcctccagtttgaaggacccgatgcccccgtctatgaggtcaccctgacagcttctctggggacactgaacacccttgctgatgtcccagacagtgtggtgcagggcagaggccagaagcagctgatcatttctaccagtgaccggaagctgttgaagttcattcttcagcacgtgacatacaccagcacggggtaccagcaccagaaggtagacatagtgagtctggagtccaggtcctcagtggccaagtttccagtgaccatccgccatcctgtcatacccaagctatacgaccctggaccagagaggaagctcagaaacctggttaccattgctaccaagactttcctccgcccccacaagctcatgatcatgctccggagtattcgagagtattacccagacttgaccgtaatagtggctgatgacagccagaagcccctggaaattaaagacaatcacgtggagtattacactatgccctttgggaagggttggtttgctggtaggaacctggccatatctcaggtcaccaccaaatacgttctctgggtggacgatgattttctcttcaacgaggagaccaagattgaggtgctggtggatgtcctggagaaaacagaactggacgtggtaggcggcagtgtgctgggaaatgtgttccagtttaagttgttgctggaacagagtgagaatggggcctgccttcacaagaggatgggatttttccaacccctggatggcttccccagctgcgtggtgaccagtggcgtggtcaacttcttcctggcccacacggagcgactccaaagagttggctttgatccccgcctgcaacgagtggctcactcagaattcttcattgatgggctagggaccctactcgtggggtcatgcccagaagtgattataggtcaccagtctcggtctccagtggtggactcagaactggctgccctagagaagacctacaatacataccggtccaacaccctcacccgggtccagttcaagctggccctccactacttcaagaaccatctccaatgtgccgcataaaggtgtgagggcataggagaaacactaggctggctggttatggtatctatagcaggccaccaaaaactggactcctgataggtgaacgttgtaccaaaccagctggtgggtagggaaaagggaaatggctcagttactggaagtac

SEQ ID NO: 246003 - DNA, 1819 bp, Artificial Sequence
  derived and/or modified sequence
aaggccgcgaggttggagggcacggggacacagcatagcgaggaaggaacgctcgagatttctgtggctcctcaagatattggtcataatcctggtacttggcattgttggatttatgttcggaagcatgttccttcaagcagtgttcagcagccccaagccagaactcccaagtcctgccccgggtgtccagaagctgaagcttctgcctgaggaacgtctcaggaacctcttttcctacgatggaatctggctgttcccgaaaaatcagtgcaaatgtgaagccaacaaagagcagggaggttacaactttcaggatgcctatggccagagcgacctcccagcggtgaaagcgaggagacaggctgaatttgaacactttcagaggagagaagggctgccccgcccactgcccctgctggtccagcccaacctcccctttgggtacccagtccacggagtggaggtgatgcccctgcacacggttcccatcccaggcctccagtttgaaggacccgatgcccccgtctatgaggtcaccctgacagcttctctggggacactgaacacccttgctgatgtcccagacagtgtggtgcagggcagaggccagaagcagctgatcatttctaccagtgaccggaagctgttgaagttcattcttcagcacgtgacatacaccagcacggggtaccagcaccagaaggtagacatagtgagtctggagtccaggtcctcagtggccaagtttccagtgaccatccgccatcctgtcatacccaagctatacgaccctggaccagagaggaagctcagaaacctggttaccattgctaccaagactttcctccgcccccacaagctcatgatcatgctccggagtattcgagagtattacccagacttgaccgtaatagtggctgatgacagccagaagcccctggaaattaaagacaatcacgtggagtattacactatgccctttgggaagggttggtttgctggtaggaacctggccatatctcaggtcaccaccaaatacgttctctgggtggacgatgattttctcttcaacgaggagaccaagattgaggtgctggtggatgtcctggagaaaacagaactggacgtggtaggcggcagtgtgctgggaaatgtgttccagtttaagttgttgctggaacagagtgagaatggggcctgccttcacaagaggatgggatttttccaacccctggatggcttccccagctgcgtggtgaccagtggcgtggtcaacttcttcctggcccacacggagcgactccaaagagttggctttgatccccgcctgcaacgagtggctcactcagaattcttcattgatgggctagggaccctactcgtggggtcatgcccagaagtgattataggtcaccagtctcggtctccagtggtggactcagaactggctgccctagagaagacctacaatacataccggtccaacaccctcacccgggtccagttcaagctggccctccactacttcaagaaccatctccaatgtgccgcataaaggtgtgagggcataggagaaacactaggctggctggttatggtatctatagcaggccaccaaaaactggactcctgataggtgaacgttgtaccaaaccagctggtgggtagggaaaagggaaatggctcagttactggaagtaccaatcaaaggtgaagggtcactggaaatgaaccagtcactgaccagggcaatggagactgtattaatagcaatgatgatttgtacaatgccctgccttttttgaagcatttgcat

SEQ ID NO: 246004 - protein, 1200 aa, Artificial Sequence
  derived and/or modified sequence
MKVAGGLELGAAALLSASPRALVTLSTGPTCSILPKNPLFPQNLSSQPCIKMEGDKSLTFSSYGLQWCLYELDKEEFQTFKELLKKKSSESTTCSIPQFEIENANVECLALLLHEYYGASLAWATSISIFENMNLRTLSEKARDDMKRHSPEDPEATMTDQGPSKEKVPGISQAVQQDSATAAETKEQEISQAMEQEGATAAETEEQEISQAMEQEGATAAETEEQGHGGDTWDYKSHVMTKFAEEEDVRRSFENTAADWPEMQTLAGAFDSDRWGFRPRTVVLHGKSGIGKSALARRIVLCWAQGGLYQGMFSYVFFLPVREMQRKKESSVTEFISREWPDSQAPVTEIMSRPERLLFIIDGFDDLGSVLNNDTKLCKDWAEKQPPFTLIRSLLRKVLLPESFLIVTVRDVGTEKLKSEVVSPRYLLVRGISGEQRIHLLLERGIGEHQKTQGLRAIMNNRELLDQCQVPAVGSLICVALQLQDVVGESVAPFNQTLTGLHAAFVFHQLTPRGVVRRCLNLEERVVLKRFCRMAVEGVWNRKSVFDGDDLMVQGLGESELRALFHMNILLPDSHCEEYYTFFHLSLQDFCAALYYVLEGLEIEPALCPLYVEKTKRSMELKQAGFHIHSLWMKRFLFGLVSEDVRRPLEVLLGCPVPLGVKQKLLHWVSLLGQQPNATTPGDTLDAFHCLFETQDKEFVRLALNSFQEVWLPINQNLDLIASSFCLQHCPYLRKIRVDVKGIFPRDESAEACPVVPLWMRDKTLIEEQWEDFCSMLGTHPHLRQLDLGSSILTERAMKTLCAKLRHPTCKIQTLMFRNAQITPGVQHLWRIVMANRNLRSLNLGGTHLKEEDVRMACEALKHPKCLLESLRLDCCGLTHACYLKISQILTTSPSLKSLSLAGNKVTDQGVMPLSDALRVSQCALQKLILEDCGITATGCQSLASALVSNRSLTHLCLSNNSLGNEGVNLLCRSMRLPHCSLQRLMLNQCHLDTAGCGFLALALMGNSWLTHLSLSMNPVEDNGVKLLCEVMREPSCHLQDLELVKCHLTAACCESLSCVISRSRHLKSLDLTDNALGDGGVAALCEGLKQKNSVLARLGLKACGLTSDCCEALSLALSCNRHLTSLNLVQNNFSPKGMMKLCSAFACPTSNLQIIGLWKWQYPVQIRKLLEEVQLLKPRVVIDGSWHSFDEDDRYWWKN

SEQ ID NO: 246005 - DNA, 3603 bp, Artificial Sequence
  derived and/or modified sequence
atgaaggtggccggcggcctggagctgggcgccgccgccctgctgagcgccagccccagagccctggtgaccctgagcaccggccccacctgcagcatcctgcccaagaaccccctgttcccccagaacctgagcagccagccctgcatcaagatggagggcgacaagagcctgaccttcagcagctacggcctgcagtggtgcctgtacgagctggacaaggaggagttccagaccttcaaggagctgctgaagaagaagagcagcgagagcaccacctgcagcatcccccagttcgagatcgagaacgccaacgtggagtgcctggccctgctgctgcacgagtactacggcgccagcctggcctgggccaccagcatcagcatcttcgagaacatgaacctgagaaccctgagcgagaaggccagagacgacatgaagagacacagccccgaggaccccgaggccaccatgaccgaccagggccccagcaaggagaaggtgcccggcatcagccaggccgtgcagcaggacagcgccaccgccgccgagaccaaggagcaggagatcagccaggccatggagcaggagggcgccaccgccgccgagaccgaggagcaggagatcagccaggccatggagcaggagggcgccaccgccgccgagaccgaggagcagggccacggcggcgacacctgggactacaagagccacgtgatgaccaagttcgccgaggaggaggacgtgagaagaagcttcgagaacaccgccgccgactggcccgagatgcagaccctggccggcgccttcgacagcgacagatggggcttcagacccagaaccgtggtgctgcacggcaagagcggcatcggcaagagcgccctggccagaagaatcgtgctgtgctgggcccagggcggcctgtaccagggcatgttcagctacgtgttcttcctgcccgtgagagagatgcagagaaagaaggagagcagcgtgaccgagttcatcagcagagagtggcccgacagccaggcccccgtgaccgagatcatgagcagacccgagagactgctgttcatcatcgacggcttcgacgacctgggcagcgtgctgaacaacgacaccaagctgtgcaaggactgggccgagaagcagccccccttcaccctgatcagaagcctgctgagaaaggtgctgctgcccgagagcttcctgatcgtgaccgtgagagacgtgggcaccgagaagctgaagagcgaggtggtgagccccagatacctgctggtgagaggcatcagcggcgagcagagaatccacctgctgctggagagaggcatcggcgagcaccagaagacccagggcctgagagccatcatgaacaacagagagctgctggaccagtgccaggtgcccgccgtgggcagcctgatctgcgtggccctgcagctgcaggacgtggtgggcgagagcgtggcccccttcaaccagaccctgaccggcctgcacgccgccttcgtgttccaccagctgacccccagaggcgtggtgagaagatgcctgaacctggaggagagagtggtgctgaagagattctgcagaatggccgtggagggcgtgtggaacagaaagagcgtgttcgacggcgacgacctgatggtgcagggcctgggcgagagcgagctgagagccctgttccacatgaacatcctgctgcccgacagccactgcgaggagtactacaccttcttccacctgagcctgcaggacttctgcgccgccctgtactacgtgctggagggcctggagatcgagcccgccctgtgccccctgtacgtggagaagaccaagagaagcatggagctgaagcaggccggcttccacatccacagcctgtggatgaagagattcctgttcggcctggtgagcgaggacgtgagaagacccctggaggtgctgctgggctgccccgtgcccctgggcgtgaagcagaagctgctgcactgggtgagcctgctgggccagcagcccaacgccaccacccccggcgacaccctggacgccttccactgcctgttcgagacccaggacaaggagttcgtgagactggccctgaacagcttccaggaggtgtggctgcccatcaaccagaacctggacctgatcgccagcagcttctgcctgcagcactgcccctacctgagaaagatcagagtggacgtgaagggcatcttccccagagacgagagcgccgaggcctgccccgtggtgcccctgtggatgagagacaagaccctgatcgaggagcagtgggaggacttctgcagcatgctgggcacccacccccacctgagacagctggacctgggcagcagcatcctgaccgagagagccatgaagaccctgtgcgccaagctgagacaccccacctgcaagatccagaccctgatgttcagaaacgcccagatcacccccggcgtgcagcacctgtggagaatcgtgatggccaacagaaacctgagaagcctgaacctgggcggcacccacctgaaggaggaggacgtgagaatggcctgcgaggccctgaagcaccccaagtgcctgctggagagcctgagactggactgctgcggcctgacccacgcctgctacctgaagatcagccagatcctgaccaccagccccagcctgaagagcctgagcctggccggcaacaaggtgaccgaccagggcgtgatgcccctgagcgacgccctgagagtgagccagtgcgccctgcagaagctgatcctggaggactgcggcatcaccgccaccggctgccagagcctggccagcgccctggtgagcaacagaagcctgacccacctgtgcctgagcaacaacagcctgggcaacgagggcgtgaacctgctgtgcagaagcatgagactgccccactgcagcctgcagagactgatgctgaaccagtgccacctggacaccgccggctgcggcttcctggccctggccctgatgggcaacagctggctgacccacctgagcctgagcatgaaccccgtggaggacaacggcgtgaagctgctgtgcgaggtgatgagagagcccagctgccacctgcaggacctggagctggtgaagtgccacctgaccgccgcctgctgcgagagcctgagctgcgtgatcagcagaagcagacacctgaagagcctggacctgaccgacaacgccctgggcgacggcggcgtggccgccctgtgcgagggcctgaagcagaagaacagcgtgctggccagactgggcctgaaggcctgcggcctgaccagcgactgctgcgaggccctgagcctggccctgagctgcaacagacacctgaccagcctgaacctggtgcagaacaacttcagccccaagggcatgatgaagctgtgcagcgccttcgcctgccccaccagcaacctgcagatcatcggcctgtggaagtggcagtaccccgtgcagatcagaaagctgctggaggaggtgcagctgctgaagcccagagtggtgatcgacggcagctggcacagcttcgacgaggacgacagatactggtggaagaactag

SEQ ID NO: 246006 - DNA, 3603 bp, Artificial Sequence
  derived and/or modified sequence
atgaaggtcgcaggaggactggagcttggagcagccgccctattatcagccagtccccgcgcgctcgtaacactctccactggaccaacctgtagtatacttcctaagaaccccctttttcctcagaatctgtccagccagccctgtattaaaatggaaggtgacaaatctttaaccttttcttcttatggacttcagtggtgcttgtatgaactggacaaagaagagttccagacattcaaggaactgttgaaaaagaaaagttcggagtccacaacctgctcgatcccccagtttgagatagaaaatgccaacgtggaatgtctagcccttttgttgcatgagtattacggcgctagtcttgcatgggctactagcatcagcatcttcgagaatatgaacctcaggactttgtcagaaaaggcgagagatgatatgaaaaggcactcaccagaggatccagaagccactatgacagatcaaggcccatccaaggagaaggtgcccggcatttcacaagcagtccagcaggactccgctacagctgcagaaaccaaggagcaagaaatctcacaggccatggagcaggagggcgccaccgccgcagagacagaagaacaggaaatcagtcaggccatggaacaggagggagcaacggctgctgagacagaggagcagggccatggcggagatacatgggattacaaatcacatgtgatgaccaaatttgcagaggaagaggatgtgagacggtcattcgaaaacacagctgctgattggcctgaaatgcagacacttgcaggggcttttgatagcgaccgctggggatttagaccacggactgtcgtgttacatggaaagtctggcatcggcaagtccgctttagctcgtcgcattgtgctttgttgggcccagggagggctgtaccagggtatgttcagctatgtgttcttcctcccggtaagggagatgcagcggaaaaaggaatcaagcgtgactgaattcatttcccgcgaatggccggattctcaggccccagtaactgaaatcatgagcaggcccgagcgccttttattcattatagatggatttgatgacctcggaagcgtcctgaacaatgataccaagctttgcaaggactgggctgaaaaacagcccccattcactctcatcagaagcctattaaggaaggtgctgctgcccgagtcgttcctgattgtcacagtccgggacgtcgggacggaaaagctaaaaagtgaagtcgtctctccccggtatctgctggtacgcggcataagcggtgaacaaagaatccacctgctcctcgaaagggggatcggagaacaccaaaagacccagggcttacgtgctattatgaacaaccgtgaactgctggatcaatgtcaggtacctgccgttggctccctgatctgcgtggcactacagctacaggatgtggttggtgaatcagttgccccctttaaccagacactgaccggcttgcacgccgccttcgtttttcaccaactgacccccagaggcgtggtgcgtaggtgtctgaacctggaggagcgtgttgtgctcaaaagattctgtcgcatggcggttgaaggagtctggaacaggaaatcagtctttgatggcgacgacctgatggtgcagggactcggcgagtcagagctgcgcgcactgttccacatgaatatcctcttgcccgacagtcattgcgaagaatactacacgttttttcatctttcactacaagacttctgcgccgcactatattacgtgttggagggtctcgagatcgagcctgccctctgtccattgtatgttgaaaaaaccaagcgttctatggagttaaagcaggctggctttcacatccactccctatggatgaagcgtttcctatttggcctagtcagcgaggacgttagacgtcctctggaagtcttactcggctgtccagtcccgttgggtgtgaagcagaagctgcttcactgggtgagcctgctgggccagcagccaaacgccaccacccctggtgataccctggacgcatttcactgcctgttcgagactcaggacaaggagttcgtgagactggctcttaactccttccaagaggtgtggttgccaattaaccagaacttggacctgatcgcaagctccttctgcctgcagcattgtccatatcttaggaagatcagagtagatgtaaagggcattttcccgcgagacgaaagtgctgaggcttgtccagtagtgcccctgtggatgcgcgataaaactcttattgaggaacaatgggaggacttctgcagcatgctggggacacatccccacttgcgacagctcgatctgggttcatctatactgactgagagagcgatgaagacactgtgcgccaaactacgccacccaacgtgtaagatacaaactctcatgttcaggaatgctcagatcactcctggggtgcagcatctgtggagaatcgtcatggccaaccggaacttgcgttcactgaatctgggcgggactcatttgaaagaggaggacgtacgcatggcctgcgaggcgttgaaacacccgaagtgcctactggaaagtctgagacttgattgttgtggcttgacccatgcttgttatctgaagatcagccaaatattgacgacaagcccgagccttaagagcctatccttagcagggaataaggtaacagatcaaggtgtgatgcccctgtccgatgctttgagagtttcgcagtgtgccctccagaaactgattcttgaagactgcggcattaccgcaacgggctgccagagcctcgcttctgccctggttagcaataggagcctgacccacctatgtctaagtaataattcactgggtaatgagggggtgaatctcttgtgcagatccatgcgcctgcctcattgctctctgcaaaggcttatgctgaatcagtgccacctcgacactgctggttgcggttttctggcccttgctttgatgggtaactcctggctgacacatctgagcctgagcatgaatccagttgaagataacggggtcaaattgctctgcgaagttatgcgggagccaagctgtcatctgcaggatctggagttggtcaagtgccatcttacggctgcctgctgcgaatctctgtcttgcgtaatctcacgtagtcggcacttgaaaagtttggatctaaccgacaacgcgctcggagacggaggagttgccgcgctgtgcgagggcctgaaacaaaagaacagcgtgctggccaggctgggactgaaagcctgtggtctaacttccgactgttgtgaggcactcagcttggccctgagctgcaacagacacctgacaagcctcaaccttgtgcagaacaatttttcccctaaaggcatgatgaagctgtgtagcgcattcgcttgtcctacttctaatctccagatcataggcctgtggaaatggcaatacccggtgcagattaggaaactgctcgaggaggtgcagcttcttaaaccgcgtgttgttatagacggctcctggcacagcttcgatgaggacgataggtactggtggaaaaactag

SEQ ID NO: 246007 - DNA, 3603 bp, Artificial Sequence
  derived and/or modified sequence
atgaaggtggccggcggcctggagctgggcgccgccgccctgctgagcgccagcccccgggccctggtgaccctgagcacaggccccacctgcagcatcctgcccaagaaccccctcttcccccagaacctgagcagccagccctgcatcaagatggagggggacaagagcctgaccttcagcagctatggcctgcagtggtgcctgtatgagctggacaaggaggagttccagaccttcaaggagctgctgaagaagaagagcagcgagagcaccacctgcagcatcccccagtttgaaattgaaaatgccaacgtggagtgcctggccctgctgctgcacgagtactatggagccagcctggcctgggccaccagcatcagcatctttgagaacatgaacctgcggaccctgtctgagaaggccagagatgacatgaagaggcacagccctgaggaccctgaggccaccatgacagaccagggccccagcaaggagaaggtgcccggcatcagccaggccgtgcagcaggacagcgccacagctgctgagaccaaggagcaggagatcagccaggccatggagcaggagggcgccacagctgctgagacagaggagcaggagatcagccaggccatggagcaggagggcgccacagctgctgagacagaggagcagggccacggcggggacacctgggactacaagagccacgtgatgaccaagtttgctgaggaggaggatgtgcggcgcagctttgagaacacagctgctgactggccagagatgcagaccctggccggggcctttgacagcgaccgctggggcttccggcccaggacagtggtgctgcacggcaagagcggcatcggcaagagcgccctggccaggagaattgtgctgtgctgggcccagggcggcctgtaccagggcatgttctcctatgtgttcttcctgcctgtgcgggagatgcagaggaagaaggagagctctgtgacagagttcatcagccgggagtggccagacagccaggcccctgtgacagagatcatgagcaggcctgagcggctgctcttcatcattgatggctttgatgacctgggctctgtgctgaacaatgacaccaagctgtgcaaggactgggccgagaagcagccccccttcaccctcatccgcagcctgctgaggaaggtgctgctgcctgagagcttcctgattgtgacagtgagagatgtgggcacagagaagctgaagtctgaggtggtgagcccccgctacctgctggtgcggggcatctctggagagcagaggatccacctgctgctggagcggggcatcggggagcaccagaagacccagggcctgcgggccatcatgaacaaccgggagctgctggaccagtgccaggtgcctgctgtgggcagcctcatctgtgtggccctgcagctgcaggatgtggtgggggagagcgtggcccccttcaaccagaccctgaccggcctgcatgctgcctttgtgttccaccagctgaccccccggggcgtggtgcggcgctgcctgaacctggaggagcgggtggtgctgaagcgcttctgcaggatggctgtggagggcgtgtggaacaggaagtctgtgtttgatggagatgacctgatggtgcagggcctgggggagagcgagctgcgggccctcttccacatgaacatcctgctgcctgacagccactgtgaggagtactacaccttcttccacctgagcctgcaggacttctgtgccgccctgtactacgtgctggagggcctggagattgaaccagccctgtgccccctgtatgtggagaagaccaagaggtccatggagctgaagcaggccggcttccacatccacagcctgtggatgaagcgcttcctgtttggcctggtgtctgaagatgtgcggcggcccctggaggtgctgctgggctgccctgtgcccctgggcgtgaagcagaagctgctgcactgggtgtccctgctgggccagcagcccaatgccaccacccctggggacaccctggatgccttccactgcctgtttgagacccaggacaaggagtttgtgcggctggccctgaacagcttccaggaggtgtggctgcccatcaaccagaacctggacctgattgccagcagcttctgcctgcagcactgcccctacctgaggaagatccgggtggatgtgaagggcatcttccccagagatgaatctgctgaggcctgccctgtggtgcccctgtggatgagggacaagaccctcatcgaggagcagtgggaggacttctgcagcatgctgggcacccacccccacctgcggcagctggacctgggcagcagcatcctgacagagcgggccatgaagaccctgtgtgccaagctgcggcaccccacctgcaagatccagaccctgatgttcagaaatgcccagatcaccccaggagtgcagcacctgtggagaattgtgatggccaacagaaacctgcggagcctgaacctgggcggcacccacctgaaggaggaggatgtgaggatggcctgtgaggccctgaagcaccccaagtgcctgctggagagcctgcggctggactgctgcggcctgacccacgcctgctacctgaagatcagccagatcctgaccaccagccccagcctgaagagcctgagcctggccggcaacaaggtgacagaccagggcgtgatgcccctgagtgatgccctgcgggtgtcccagtgtgccctgcagaagctgatcctggaggactgtggcatcacagccaccggctgccagagcctggccagcgccctggtgagcaacagaagcctgacccacctgtgcctgagcaacaacagcctgggcaatgaaggagtgaacctgctgtgccgctccatgaggctgccccactgcagcctgcagaggctgatgctgaaccagtgccacctggacacagctggctgcggcttcctggccctggccctgatgggcaacagctggctgacccacctgagcctgtccatgaaccctgtggaggacaatggagtgaagctgctgtgtgaggtgatgagggagcccagctgccacctgcaggacctggagctggtgaagtgccacctgacagctgcctgctgtgagagcctgagctgtgtgatcagccgcagccgccacctgaagagcctggacctgacagacaatgccctgggagatggaggagtggccgccctgtgtgagggcctgaagcagaagaacagcgtgctggcccggctgggcctgaaggcctgtggcctgaccagtgactgctgtgaggccctgagcctggccctgagctgcaacagacacctgaccagcctgaacctggtgcagaacaacttcagccccaagggcatgatgaagctgtgcagcgcctttgcctgccccaccagcaacctgcagatcatcggcctgtggaagtggcagtaccctgtgcagatcaggaagctgctggaggaggtgcagctgctgaagccccgggtggtgattgatggctcctggcacagctttgatgaagatgaccgctactggtggaagaactag

SEQ ID NO: 246008 - DNA, 3888 bp, Artificial Sequence
  derived and/or modified sequence
atgaaggttgcaggaggacttgaacttggagctgctgctctgctctcagcatcaccacgtgctcttgtcactctttccacaggtcctacttgctctatattaccaaagaatccacttttcccccaaaacctgagctctcagccttgtatcaagatggaaggagacaaatcgctcaccttttccagctacgggctgcaatggtgtctctatgagctagacaaggaagaatttcagacattcaaggaattactaaagaagaaatcttcagaatcgaccacatgctctattccacagtttgaaatcgagaatgccaacgtggaatgtctggcactcctcttgcatgagtattatggagcatcgctggcctgggctacgtccattagcatctttgaaaacatgaacctgcgaaccctctcggagaaggcacgggatgacatgaaaagacattcaccagaagatcctgaagcaacgatgactgaccaaggaccaagcaaggaaaaagtgccaggaatttcacaagctgtgcaacaagatagtgccacagctgcagagacaaaagaacaagaaatttcacaagctatggaacaagaaggtgccacagcagcagagacagaagaacaagaaatttcacaagctatggaacaagaaggtgccacagcagcagagacagaagaacaaggacatggaggtgacacatgggactacaagagtcacgtgatgaccaaattcgctgaggaggaggatgtacgtcgtagttttgaaaacactgctgctgactggccggaaatgcaaacgttggctggtgcttttgattcagaccggtggggcttccggcctcgcacggtggttctgcacggaaagtcaggaattgggaaatcggctctagccagaaggatcgtgctgtgctgggcgcaaggtggactctaccagggaatgttctcctacgtcttcttcctccccgttagagagatgcagcggaagaaggagagcagtgtcacagagttcatctccagggagtggccagactcccaggctccggtgacggagatcatgtcccgaccagaaaggctgttgttcatcattgacggtttcgatgacctgggctctgtcctcaacaatgacacaaagctctgcaaagactgggctgagaagcagcctccgttcaccctcatacgcagtctgctgaggaaggtcctgctccctgagtccttcctgatcgtcaccgtcagagacgtgggcacagagaagctcaagtcagaggtcgtgtctccccgttacctgttagttagaggaatctccggggaacaaagaatccacttgctccttgagcgcgggattggtgagcatcagaagacacaagggttgcgtgcgatcatgaacaaccgtgagctgctcgaccagtgccaggtgcccgccgtgggctctctcatctgcgtggccctgcagctgcaggacgtggtgggggagagcgtcgcccccttcaaccaaacgctcacaggcctgcacgccgcttttgtgtttcatcagctcacccctcgaggcgtggtccggcgctgtctcaatctggaggaaagagttgtcctgaagcgcttctgccgtatggctgtggagggagtgtggaataggaagtcagtgtttgacggtgacgacctcatggttcaaggactcggggagtctgagctccgtgctctgtttcacatgaacatccttctcccagacagccactgtgaggagtactacaccttcttccacctcagtctccaggacttctgtgccgccttgtactacgtgttagagggcctggaaatcgagccagctctctgccctctgtacgttgagaagacaaagaggtccatggagcttaaacaggcaggcttccatatccactcgctttggatgaagcgtttcttgtttggcctcgtgagcgaagacgtaaggaggccactggaggtcctgctgggctgtcccgttcccctgggggtgaagcagaagcttctgcactgggtctctctgttgggtcagcagcctaatgccaccaccccaggagacaccctggacgccttccactgtcttttcgagactcaagacaaagagtttgttcgcttggcattaaacagcttccaagaagtgtggcttccgattaaccagaacctggacttgatagcatcttccttctgcctccagcactgtccgtatttgcggaaaattcgggtggatgtcaaagggatcttcccaagagatgagtccgctgaggcatgtcctgtggtccctctatggatgcgggataagaccctcattgaggagcagtgggaagatttctgctccatgcttggcacccacccacacctgcggcagctggacctgggcagcagcatcctgacagagcgggccatgaagaccctgtgtgccaagctgaggcatcccacctgcaagatacagaccctgatgtttagaaatgcacagattacccctggtgtgcagcacctctggagaatcgtcatggccaaccgtaacctaagatccctcaacttgggaggcacccacctgaaggaagaggatgtaaggatggcgtgtgaagccttaaaacacccaaaatgtttgttggagtctttgaggctggattgctgtggattgacccatgcctgttacctgaagatctcccaaatccttacgacctcccccagcctgaaatctctgagcctggcaggaaacaaggtgacagaccagggagtaatgcctctcagtgatgccttgagagtctcccagtgcgccctgcagaagctgatactggaggactgtggcatcacagccacgggttgccagagtctggcctcagccctcgtcagcaaccggagcttgacacacctgtgcctatccaacaacagcctggggaacgaaggtgtaaatctactgtgtcgatccatgaggcttccccactgtagtctgcagaggctgatgctgaatcagtgccacctggacacggctggctgtggttttcttgcacttgcgcttatgggtaactcatggctgacgcacctgagccttagcatgaaccctgtggaagacaatggcgtgaagcttctgtgcgaggtcatgagagaaccatcttgtcatctccaggacctggagttggtaaagtgtcatctcaccgccgcgtgctgtgagagtctgtcctgtgtgatctcgaggagcagacacctgaagagcctggatctcacggacaatgccctgggtgacggtggggttgctgcgctgtgcgagggactgaagcaaaagaacagtgttctggcgagactcgggttgaaggcatgtggactgacttctgattgctgtgaggcactctccttggccctttcctgcaaccggcatctgaccagtctaaacctggtgcagaataacttcagtcccaaaggaatgatgaagctgtgttcggcctttgcctgtcccacgtctaacttacagataattgggctgtggaaatggcagtaccctgtgcaaataaggaagctgctggaggaagtgcagctactcaagccccgagtcgtaattgacggtagttggcattcttttgatgaagatgaccggtactggtggaaaaactgaagatacggaaacctgccccactcacacccatctgatggaggaactttaaacgctgttttctcagagcaagctatgcacctgggagttccttctcaaagatggagaatgatttctgattctcacaaagccctcaatggtagtgattcttctgtgttcactctacgttggttactggatttgaaggctagagaccttcaagtcataggactcagtatctgtgaaatgtccgtcatatctcagagcatatagagggaattaaataaacacaaagcatttggaaaagtt

SEQ ID NO: 246009 - DNA, 3603 bp, Artificial Sequence
  derived and/or modified sequence
atgaaggtggccggcggcctggagctgggcgccgccgccctgctgtctgcaagcccaagggctcttgtgaccctttcaacaggtcctacatgttccatactcccaaaaaacccactgtttcctcaaaatttaagctcccaaccctgcatcaagatggagggcgacaagtctctaacattctcctcttacgggctccagtggtgtctctatgaactcgataaggaagagtttcaaactttcaaagagctattgaagaagaagagctccgaatcaaccacatgctccattcctcagtttgagattgaaaacgcaaacgtggaatgcttggcgctccttcttcatgaatactacggcgcatccctagcctgggcaacttccatctccatctttgagaacatgaatcttcgaacactctcggaaaaagctcgtgacgacatgaagaggcatagccccgaagaccccgaagccacaatgaccgatcagggcccgtctaaggagaaggtacctggaatttcacaggccgttcagcaagattccgccacagctgccgaaactaaagaacaagagatctcacaggccatggagcaagagggggccacagctgctgagacggaggagcaagagatttcccaagccatggagcaagagggagccacagcagccgagactgaagaacagggacatggcggcgatacgtgggattacaagtcccacgtcatgaccaaattcgctgaagaagaagatgtcaggcggagcttcgagaacaccgcagctgattggcccgagatgcaaactctggcaggcgcttttgattccgacaggtggggcttccgaccaaggaccgtggttcttcacggtaagtcaggcatcggtaaatcagccctcgcccggcgcatagtcttatgttgggcacagggcggtttataccaaggtatgttttcctatgtctttttcctgcccgtccgagaaatgcagagaaagaaagagagcagcgtgacagaattcatctctcgggaatggccagatagtcaggcacctgtgactgagataatgtccaggcctgaacgactgctgtttatcattgatgggttcgatgatcttgggtccgttctgaacaacgacactaaactctgcaaagactgggcagaaaagcagcctccttttacccttataagatcactactgcgcaaggtgctgctgccagaaagctttcttatcgtcaccgtccgcgatgttggaactgagaagctgaaatcagaggtcgtgagtcctagatacctattggtgcgggggatcagcggtgaacagcgcatacacttgctcctcgagcgggggatcggcgaacatcagaagacacaagggcttcgagctattatgaacaatagagagttgctggaccagtgtcaggtacctgctgtaggtagcctcatctgcgttgcgttgcagctccaggacgtcgttggggagtccgtggccccctttaaccaaactctcacaggcctgcacgctgccttcgtttttcaccaactgacaccaaggggagtggtgcgtaggtgcttaaatctcgaagagcgagtggttctcaaacgtttctgccgcatggccgtggagggcgtttggaataggaaatccgtatttgatggggatgatttaatggtgcagggactgggcgaatcggaactgcgcgcactgttccatatgaatatccttctgcctgactcccattgtgaggaatactacaccttctttcacctgagcttgcaggacttctgtgccgccctgtactacgtactcgagggtctggaaattgagcctgcgctctgcccgctctacgtggagaagaccaagaggtcaatggagctaaagcaagcaggctttcacatccactcactttggatgaaacggttcctcttcggcttggtgtccgaggatgtccgtcgccccctcgaagtgttattgggatgccctgtcccactgggcgtgaagcaaaaactgctgcactgggtgagtctcctcggtcagcagccaaatgccaccacccccggagacaccctggatgcctttcactgcctgttcgaaacccaagacaaggaattcgtgcggctcgctctgaattcattccaggaggtatggctgcctataaatcaaaatctggatctcatagcttcaagtttctgcctgcaacactgtccttaccttcgaaaaattcgcgtggacgtgaagggaatctttccccgggatgagtctgccgaggcatgcccagtggttccgctctggatgcgcgataaaaccctgatcgaggaacagtgggaggacttctgctctatgcttggaacacacccccacttgagacagcttgacctgggctcaagcattctgaccgagagagccatgaaaactctgtgtgccaagttgcggcacccaacttgtaaaatccagacacttatgttccggaatgctcagatcacacccggtgtgcagcacctatggcgcatagtgatggccaaccggaacttaaggagtctgaacctcggtggaacccatctgaaggaggaggacgtacgcatggcttgcgaggcgttgaagcacccgaagtgcctgctggagagcttgcgccttgattgttgcggtctgacccatgcctgctacctgaaaatcagccaaatcctcaccacaagtccctcactgaagtccctctctctggctggaaacaaggttacagaccagggagtgatgccactgtccgacgcccttcgagtgagccagtgcgcactacaaaagctcatcctggaggactgtggaatcacagcgacagggtgccagagcttggcttccgctctggtctctaaccgctctctaacacatttgtgcttgagcaataattcgctcggcaacgagggcgtgaacctcttgtgtaggtccatgagactcccacactgctcccttcagaggctgatgctgaaccagtgccatctggatacagccggatgcggttttttggcacttgcactcatggggaattcctggctcacacacctgtcactgtccatgaacccagtggaggacaatggagttaagttgctgtgtgaggtcatgagagaaccctcttgtcaccttcaggatctagaactggttaagtgccacctgaccgccgcttgttgtgagtcactgtcatgtgtcattagcagaagtagacacctgaaatcactcgacctcacggacaatgctctgggggacggaggggtggcggcgctttgcgaaggattgaagcagaaaaactccgtgctcgcccggctagggctgaaggcttgtggcctcacaagtgactgctgtgaggcgctctcccttgccctctcatgcaatcgccatcttacttcactcaacctggtacagaacaatttttctcctaaagggatgatgaagctgtgttcggctttcgcatgcccgactagtaatctccagataatagggctgtggaagtggcaatacccggtccagattaggaagctgttggaggaggtccagttgcttaaaccacgcgtcgtcattgacggatcgtggcactcctttgatgaagatgaccggtattggtggaaaaactag

SEQ ID NO: 246010 - DNA, 3603 bp, Artificial Sequence
  derived and/or modified sequence
atgaaagttgcaggtgggctggagttgggcgcagccgctcttctgtctgcctcaccacgggcactggtgactctttctactggacctacctgctcaatcctgccaaaaaatcctctattccctcagaatttgagctcacagccgtgcatcaaaatggagggggacaagtctttgacattcagcagctatgggctgcagtggtgtttatatgaattagacaaagaagagttccaaacatttaaagagcttttgaagaagaagagttccgagtccacaacgtgttcaatcccacaattcgaaattgaaaatgctaacgtggagtgcctggctctgttgctgcatgaatactatggtgcaagccttgcttgggccacaagtattagcatatttgagaacatgaacctaagaaccttgagtgaaaaagcgagggatgatatgaagcggcattctccggaggaccccgaagccacgatgacggatcaaggaccctctaaagagaaagtgccaggaatatcacaggcagttcagcaagacagcgcaaccgcggctgaaacgaaagagcaggaaatttcgcaggccatggaacaggaaggagccaccgctgccgagacggaagaacaagagatttcacaggctatggaacaggaaggcgctactgcagcagagacagaggaacagggacacggaggggacacatgggactacaagagccacgtgatgacgaaattcgcagaagaagaagacgtgcggcgttcttttgagaacacagccgctgactggcctgagatgcagaccctggccggagcattcgactcagatcgatggggcttccggcctcggaccgtggtcctacacggcaagagcgggatagggaaatccgccctggcccgtagaattgtcctctgctgggctcaagggggtctctatcaggggatgtttagctatgtattctttctgcctgtgcgagagatgcaaaggaaaaaagaaagcagcgtcacagaatttatttcccgtgagtggcccgacagccaagctcctgtcacagaaatcatgagtcggccagaacgcctgcttttcatcattgatggatttgatgacctcgggtcagttttgaataacgacactaagttatgtaaagactgggccgagaagcaacccccattcacgctgattcgaagcttgctgcgaaaagtgctgctgcccgaatcatttttgattgtaactgtcagggatgtgggcaccgaaaaactgaagagtgaggtcgtttctcctagataccttctcgtgcggggaatatccggggaacagagaatccaccttcttcttgagcggggaattggtgaacatcaaaaaacccagggtttgcgtgcaattatgaataatcgcgaactcctcgaccagtgccaagtaccggctgtgggatccctaatctgcgtggccctgcagctccaggatgtcgtcggcgagagcgttgctccatttaaccagaccctgactggcctgcatgcggcattcgtcttccatcagctaactcccaggggagtggtacgtagatgcctcaacctcgaggaacgcgtagttcttaagaggttttgccggatggcagtagaaggcgtgtggaatagaaagtcagtattcgacggagacgacctgatggttcaggggctcggcgaatcagagttgagggccctgttccacatgaacattcttctacccgactcccattgcgaagaatattacactttttttcatttgtctcttcaagatttctgtgcagctctgtactacgtcttagagggccttgaaattgaaccagccctgtgccctctatacgtggagaaaacaaaacgtagtatggagttgaaacaggctggctttcatatacactctctctggatgaagcgctttcttttcggcctggtgagtgaagatgtccgcaggcccctcgaggtgctgctgggatgtccagtgcctctcggcgtcaaacagaagttattgcactgggtgagcctgctgggtcagcagccgaatgcaactacccccggagatacacttgatgcatttcactgcctttttgaaacacaagacaaggagttcgtgcggcttgccctgaactcctttcaggaggtctggttaccgattaaccagaacctggacctcatcgcctccagcttctgtctgcaacactgcccttacctgcggaagattagggttgacgttaagggcattttccctcgggacgagtccgccgaggcgtgccccgtcgtaccgttgtggatgcgggataagactctcattgaggaacagtgggaggatttttgcagcatgctcggaacccacccacacctacggcagcttgacttaggctcctcgatactgaccgagagagctatgaagaccctgtgtgcgaagctgcgccatcccacatgtaagatacagactctgatgtttcgaaacgctcaaatcaccccaggagtgcagcatctgtggagaatcgtgatggccaaccgcaatctccggtcactgaacctcggcggtacacatctcaaagaagaggacgttaggatggcttgtgaggccctgaagcaccccaagtgcctccttgagtccttgagactggattgctgcgggctgactcatgcatgttatcttaaaatctcacagatcctgaccacttctcctagtctcaaaagcctatcactcgccggtaacaaggtgacagaccagggtgtcatgcctctgagcgatgcgctgagggtttcccaatgcgccctgcagaaactgatcctcgaagattgcgggatcactgcaactggatgtcagagcctggcaagcgcactggttagcaataggtcactgacccatctgtgtctttccaataatagtctgggtaacgagggcgtgaatctgctctgtcgtagtatgcgcctgccccactgttccctccagaggctgatgctgaatcagtgccaccttgacacagcagggtgcgggtttctggcactggcacttatggggaacagttggcttacccatttgagtctgagtatgaacccagtggaggacaacggcgttaaactcctgtgtgaagtgatgcgagagccttcttgtcacttacaggatctggaattagtgaaatgtcaccttacagccgcttgttgtgagagtctgtcttgtgtcatcagtagatcacgccacctcaagagcctggacctgactgacaatgccctcggagatggaggggtggctgcgctgtgcgagggactgaagcagaagaactccgtactggctcggctgggcttgaaggcttgcggcctcacatcagattgttgcgaggcgctgagtctcgccctgagctgtaatcgtcatttaacgagccttaatctggtgcagaataacttttccccgaagggaatgatgaagctgtgcagtgcgttcgcctgcccaaccagtaacctgcagatcattggactttggaagtggcagtaccccgtgcagatccgtaaactcctcgaagaggtccaactgttaaagccgagggtggttattgacggatcatggcactcattcgacgaagacgaccggtactggtggaagaactag

SEQ ID NO: 246011 - protein, 406 aa, Artificial Sequence
  derived and/or modified sequence
MESLRGYTHSDIGYRSLAVGEDIEEVNDEKLTVTSLMARGGEDEENTRSKPEYGTEAENNVGTEGSVPSDDQDREGGGGHEPEQQQEEPPLTKPEQQQEEPPLLELKQEQEEPPQTTVEGPQPAEGPQTAEGPQPPERKRRRRTAFTQFQLQELENFFDESQYPDVVARERLAARLNLTEDRVQVWFQNRRAKWKRNQRVLMLRNTATADLAHPLDMFLGGAYYAAPALDPALCVHLVPQLPRPPVLPVPPMPPRPPMVPMPPRPPIAPMPPMAPVPPGSRMAPVPPGPRMAPVPPWPPMAPVPPWPPMAPVPTGPPMAPVPPGPPMARVPPGPPMARVPPGPPMAPLPPGPPMAPLPPGPPMAPLPPGPPMAPLPPRSHVPHTGLAPVHITWAPVINSYYACPFF

SEQ ID NO: 246012 - DNA, 1591 bp, Artificial Sequence
  derived and/or modified sequence
cccgggatcgccgcggaaccacgcacagagtctgcagaagtgcacagctttatcgacagcgcttgaagcatggagtctcttcgcgggtacacccacagtgatattggctaccgcagcctggcagtcggcgaggacatcgaggaagtgaatgatgagaaacttaccgtgacctcgctgatggcaaggggaggagaggacgaggagaatacacggtccaaacctgagtacggaacagaagcggaaaacaacgttggcacggaagggtccgtcccctcggacgaccaagaccgtgagggtggcggcggccacgagccggagcaacagcaggaggagccgcccctgaccaagccggagcaacagcaggaggagccgcccctgctcgagctgaagcaagagcaggaggagccgccccagacgaccgtggaggggccacagccggcggaggggccacaaaccgctgagggaccacagcccccagagaggaaacgccgccgccgcaccgcgttcacgcagtttcagctgcaggagctagagaactttttcgatgaatctcaatatcccgacgttgtggcgcgagagagacttgcagcacgcctgaatttgactgaagacagagtgcaggtttggtttcagaacagaagagccaagtggaaacgaaatcagagggtgctaatgttgagaaacactgctactgctgacctggcccaccctttggacatgttcttgggtggggcctattatgctgctcctgctctggatcctgctttgtgtgttcatctggtgccacaactacctagaccacctgtgctgcctgtgccacctatgccacccaggccacccatggtccctatgccacccaggccacccatagcacctatgccacccatggcgcctgtgccacccggctcacgcatggcgcctgtgccacccgggccacgcatggcgcctgtgccaccctggccgcccatggcgcctgtgccaccctggccgcccatggcgcctgtgccaaccgggccgcccatggcgcctgtgccacccgggccgcccatggcgcgtgtgccacccgggccgcccatggcgcgtgtgccacccgggccgcccatggcgcctctgccacccgggccgcccatggcgcctctgccacccgggccgcccatggcgcctctgccacccgggccgcccatggcgcctctgccacccaggtcacatgtgcctcacactggcctggctcctgtacacatcacatgggcccctgtcatcaacagttattatgcatgtccctttttctaaagtaaggtattcataacagtttttccaaagttctttcctgccagatagaaattgtgcacagcacagcatcaagtaattcgttagatgcttgttaaatgaagtgggtaggtgaacaaagttaacgaatgccctgttatttttgtaggccacataattgtagtattttcaataaagatgtgacttaatagtaaaaaaaaaaaaaaaaaaaaaaaaaaaaaaaaaaaaaaaaaaaaaaaaaaaaaaaaaaaaaaaaaaaaaaaaaaaaaaaaaaaaaaaaaaaaaaaaaaaaaaaaaaaaaaaa

SEQ ID NO: 246013 - DNA, 1221 bp, Artificial Sequence
  derived and/or modified sequence
atggagagcctgagaggctacacccacagcgacatcggctacagaagcctggccgtgggcgaggacatcgaggaggtgaacgacgagaagctgaccgtgaccagcctgatggccagaggcggcgaggacgaggagaacaccagaagcaagcccgagtacggcaccgaggccgagaacaacgtgggcaccgagggcagcgtgcccagcgacgaccaggacagagagggcggcggcggccacgagcccgagcagcagcaggaggagccccccctgaccaagcccgagcagcagcaggaggagccccccctgctggagctgaagcaggagcaggaggagcccccccagaccaccgtggagggcccccagcccgccgagggcccccagaccgccgagggcccccagccccccgagagaaagagaagaagaagaaccgccttcacccagttccagctgcaggagctggagaacttcttcgacgagagccagtaccccgacgtggtggccagagagagactggccgccagactgaacctgaccgaggacagagtgcaggtgtggttccagaacagaagagccaagtggaagagaaaccagagagtgctgatgctgagaaacaccgccaccgccgacctggcccaccccctggacatgttcctgggcggcgcctactacgccgcccccgccctggaccccgccctgtgcgtgcacctggtgccccagctgcccagaccccccgtgctgcccgtgccccccatgccccccagaccccccatggtgcccatgccccccagaccccccatcgcccccatgccccccatggcccccgtgccccccggcagcagaatggcccccgtgccccccggccccagaatggcccccgtgcccccctggccccccatggcccccgtgcccccctggccccccatggcccccgtgcccaccggcccccccatggcccccgtgccccccggcccccccatggccagagtgccccccggcccccccatggccagagtgccccccggcccccccatggcccccctgccccccggcccccccatggcccccctgccccccggcccccccatggcccccctgccccccggcccccccatggcccccctgccccccagaagccacgtgccccacaccggcctggcccccgtgcacatcacctgggcccccgtgatcaacagctactacgcctgccccttcttctag

SEQ ID NO: 246014 - DNA, 1221 bp, Artificial Sequence
  derived and/or modified sequence
atggaaagtcttaggggctatacccacagtgatattgggtaccgctctttggccgtgggtgaagacatagaagaagtgaacgatgaaaagttgactgtgaccagcctgatggcacgaggaggtgaagatgaagagaacacacgctccaagccagagtacgggaccgaggcggagaacaatgtaggaaccgagggatccgtcccatctgacgatcaagatcgtgagggaggtgggggccacgaacccgaacagcagcaggaggaaccccctctgaccaaacccgaacagcagcaagaggagcccccactgctcgagttaaaacaagagcaggaggaacccccacagactaccgtggagggacctcagcccgctgaggggccccagaccgctgagggcccacagccccccgaacgcaagagacgcagaaggactgcttttactcagttccagcttcaggagctagagaattttttcgatgaaagtcaatacccagacgtggtggccagggagaggctggctgctcgcctgaatctgacggaagatcgggtgcaggtgtggttccaaaatcgacgagcaaagtggaaaaggaatcagagagtgctgatgctacggaacacggcaactgccgacctggcccaccctttggatatgttccttggcggcgcctattacgccgcgcccgcgctggacccagctctctgtgtgcatctggtacctcagctaccccgcccccccgttctccctgtcccaccgatgcctcctcgccctcctatggtgccgatgcccccgcgccccccaatagctccaatgcctcccatggcaccagtgcctcctggctcgcgaatggcgcccgtccccccaggtcccaggatggctccggttcccccttggccgcccatggctcccgtgccgccatggcctcccatggctcccgtgcctaccggaccacctatggcacctgtgccccccggacccccgatggcgcgggtcccacccggtccacccatggctcgggtgcctcccggacctcctatggcacctctgccgccgggacctcctatggcccccttaccccctggtccgcctatggcccctctgccacccggccctcctatggcacctctgccgccaaggtctcacgttcctcatactgggctggcaccagtacatattacttgggccccagtgatcaactcatactacgcatgcccatttttctag

SEQ ID NO: 246015 - DNA, 1495 bp, Artificial Sequence
  derived and/or modified sequence
agagccagttccaaccccgggatcgccgcggaaccacgcacagagtctgcagaagtgcacagctttatcgacagcgcttgaagcatggagtctcttcgcgggtacacccacagtgatattggctaccgcagcctggcagtcggcgaggacatcgaggaagtgaatgatgagaaacttaccgtgacctcgctgatggcaaggggaggagaggacgaggagaatacacggtccaaacctgagtacggaacagaagcggaaaacaacgttggcacggaagggtccgtcccctcggacgaccaagaccgtgagggtggcggcggccacgagccggagcaacagcaggaggagccgcccctgaccaagccggagcaacagcaggaggagccgcccctgctcgagctgaagcaagagcaggaggagccgccccagacgaccgtggaggggccacagccggcggaggggccacaaaccgctgagggaccacagcccccagagaggaaacgccgccgccgcaccgcgttcacgcagtttcagctgcaggagctagagaactttttcgatgaatctcaatatcccgacgttgtggcgcgagagagacttgcagcacgcctgaatttgactgaagacagagtgcaggtttggtttcagaacagaagagccaagtggaaacgaaatcagagggtgctaatgttgagaaacactgctactgctgacctggcccaccctttggacatgttcttgggtggggcctattatgctgctcctgctctggatcctgctttgtgtgttcatctggtgccacaactacctagaccacctgtgctgcctgtgccacctatgccacccaggccacccatggtccctatgccacccaggccacccatagcacctatgccacccatggcgcctgtgccacccggctcacgcatggcgcctgtgccacccgggccacgcatggcgcctgtgccaccctggccgcccatggcgcctgtgccaccctggccgcccatggcgcctgtgccaaccgggccgcccatggcgcctgtgccacccgggccgcccatggcgcgtgtgccacccgggccgcccatggcgcgtgtgccacccgggccgcccatggcgcctctgccacccgggccgcccatggcgcctctgccacccgggccgcccatggcgcctctgccacccgggccgcccatggcgcctctgccacccaggtcacatgtgcctcacactggcctggctcctgtacacatcacatgggcccctgtcatcaacagttattatgcatgtccctttttctaaagtaaggtattcataacagtttttccaaagttctttcctgccagatagaaattgtgcacagcacagcatcaagtaattcgttagatgcttgttaaatgaagtgggtaggtgaacaaagttaacgaatgccctgttatttttgtaggccacataattgtagtattttcaataaagatgtgacttaatagta

SEQ ID NO: 246016 - DNA, 1221 bp, Artificial Sequence
  derived and/or modified sequence
atggagagcctgcggggctacacccacagcgacatcggctaccgcagcctggccgtgggagaagatattgaggaggtgaatgatgagaagctgactgtgaccagcctgatggcccggggcggggaggatgaggagaacaccaggagcaagccagaatatggaacagaagctgagaacaacgtgggcacagagggctctgtgcccagtgatgaccaggaccgggagggcggcggcggccacgagcctgagcagcagcaggaggagccccccctgaccaagccagagcagcagcaggaggagccccccctgctggagctgaagcaggagcaggaggagcccccccagaccaccgtggagggcccccagcctgctgagggcccccagacagctgagggcccccagcccccagagaggaagagaagaagaagaacagccttcacccagttccagctgcaggagctggagaacttctttgatgagagccagtacccagatgtggtggcccgggagcggctggccgcccggctgaacctgacagaggacagagtgcaggtgtggttccagaacagaagagccaagtggaagaggaaccagagggtgctgatgctgaggaacacagccacagctgacctggcccaccccctggacatgttcctgggcggggcctactatgctgccccagccctggaccctgccctgtgtgtgcacctggtgccccagctgccccggccccctgtgctgcctgtgccccccatgccaccccggccccccatggtgcccatgccacccaggcctcccatcgcccccatgccacccatggcccctgtgcccccaggcagcaggatggcccctgtgcccccaggccccaggatggcccctgtgcccccctggccacccatggcccctgtgcccccctggccacccatggcccctgtgcccaccggcccccccatggcccctgtgcccccaggcccccccatggcccgggtgcccccaggcccccccatggcccgggtgcccccaggcccccccatggcccccctgcccccaggcccccccatggcccccctgcccccaggcccccccatggcccccctgcccccaggcccccccatggcccccctgccccccaggagccacgtgccccacacaggcctggcccctgtgcacatcacctgggcccctgtgatcaacagctactatgcctgccccttcttctag

SEQ ID NO: 246017 - DNA, 1221 bp, Artificial Sequence
  derived and/or modified sequence
atggagagcctgcggggctacacccacagcgacatcggctaccggtcattggctgtaggagaggacatagaagaggtgaacgatgagaagctcactgttacaagcctgatggcacgcgggggggaggacgaggaaaacacacgctcaaaaccagagtacggcaccgaagctgagaataacgtcggtaccgagggcagtgtcccttccgatgaccaagatcgggaggggggcggcggtcatgagcccgaacagcaacaggaagaaccccctctgacaaaaccagagcagcagcaggaagaacctccacttctcgagctcaagcaggaacaggaggaaccaccccagacaactgtcgaagggccacagcccgcagagggaccccagaccgcagagggaccccagccacccgaacggaagcggaggcgtcggactgccttcacgcagttccagctgcaggagctggagaatttctttgacgagtcccagtaccccgatgtggtggctcgtgagaggctggctgccaggttaaatcttactgaagaccgggtacaggtgtggttccaaaacagacgcgcaaaatggaaacggaaccagagagtcctcatgttaaggaatacggccactgccgatctggctcaccctctggatatgtttctcggaggggcttattatgccgcgcccgcgcttgaccctgcgctgtgtgtgcatctagtaccccagctgccccgtccaccagttctgcccgtgcctccaatgccaccgaggcctccaatggtaccaatgcccccgagacctcccatcgcaccgatgccccctatggcacccgtcccgcccggatccaggatggcccctgtgccgccgggcccaaggatggctcctgtgcccccttggccaccaatggcacccgtgcccccttggcccccgatggccccagtgccgaccggccctcccatggcgcccgtgccaccgggaccacctatggcaagagtgcctccaggtccccctatggctcgtgtgccacccggtccaccgatggcccctttgcccccaggcccacccatggccccactgccacccggccctccaatggctccactgcctcctggcccccctatggctccactaccaccgcggtcacatgtgccccacaccgggctggcccccgtccatattacatgggcaccggttatcaacagttactatgcttgcccgttcttctag

SEQ ID NO: 246018 - DNA, 1221 bp, Artificial Sequence
  derived and/or modified sequence
atggaatcactcagaggatacacacatagcgacatcgggtacagatcactcgctgtcggagaagacatcgaggaggtgaatgatgagaagcttactgtcacatcactgatggctaggggtggagaggacgaggagaataccaggtccaagcccgaatacggaacggaggccgaaaataacgttgggacagaggggtctgtacccagcgatgaccaggacagagaaggaggaggtggccatgagccagagcaacaacaggaagagccgccactgactaaaccggagcaacagcaggaagaacctccactgttggaactaaagcaggaacaagaggagcctcctcagacgaccgtggagggaccccagccagccgagggtccccagacagcggagggacctcagccaccggagcgcaagcggaggcgtcgcaccgcgttcacccagtttcagctgcaggaattggagaatttttttgatgaaagccagtatccggacgtagtggccagggagcgtctggcggctaggctcaatctcaccgaagatagagtgcaggtgtggtttcaaaacagaagggccaagtggaagagaaatcaacgggtactcatgctgaggaacacggctaccgccgatttggctcaccccctcgacatgtttctcgggggtgcatattacgctgctcccgcattggaccccgcactttgtgtgcatctcgtgccacaactgccccgtcctcccgtcttacctgtgccccctatgccccctcgaccgcctatggtgcccatgccgcctcgaccacctatcgctccaatgccacccatggcgcctgtgcctccgggaagccgtatggcacctgtccccccaggccctaggatggctccggtgccaccttggcctcctatggctcccgtgcccccatggccccctatggccccagttcccaccggaccacctatggctcctgtgccccctggaccacccatggccagggtccccccaggtccgccaatggcaagggtccctccaggcccaccaatggcacccttgccgcctggccctcctatggctccgctgccccctggcccacccatggccccattgccacctgggcctccaatggccccactgccccctagaagccatgtcccccacaccgggctcgcaccagtacatattacttgggccccagtgataaatagttactacgcctgccctttcttttag

SEQ ID NO: 246019 - DNA, 420 bp, Artificial Sequence
  derived and/or modified sequence
atgttcctgctgaagaagagcagcgagaagggctggtaccccgtgaaggagagcagagacagaggccccagaagatggagccagggcctgagcagaaagaagagaaccttccccaccaagagctggagaaagaagacccccggcctgctgctgcccctgcccagcggctggcagcacggcagcctgagagccggccaggtgctgcacctggacggcgccggcggcgacagcgaggccgacgtgctgatgatgctgagaagactgatcagaggccaggtgaagggcaccctgggctggagagtgggcatcgccgtgcccaccacccccaccctgggcggctgccccagaagactggaggtgtggtggtggctgctgctgctgctgctgctgctgctgctgctgctgctgctgctgctgtag

SEQ ID NO: 246020 - protein, 520 aa, Artificial Sequence
  derived and/or modified sequence
MEFHNGGHVSGIGGFLVSLTSRMKPHTLAVTPALIFAITVATIGSFQFGYNTGVINAPETIIKEFINKTLTDKANAPPSEVLLTNLWSLSVAIFSVGGMIGSFSVGLFVNRFGRRNSMLIVNLLAATGGCLMGLCKIAESVEMLILGRLVIGLFCGLCTGFVPMYIGEISPTALRGAFGTLNQLGIVIGILVAQIFGLELILGSEELWPVLLGFTILPAILQSAALPCCPESPRFLLINRKKEENATRILQRLWGTQDVSQDIQEMKDESARMSQEKQVTVLELFRVSSYRQPIIISIVLQLSQQLSGINAVFYYSTGIFKDAGVQQPIYATISAGVVNTIFTLLSLFLVERAGRRTLHMIGLGGMAFCSTLMTVSLLLKNHYNGMSFVCIGAILVFVACFEIGPGPIPWFIVAELFSQGPRPAAMAVAGCSNWTSNFLVGLLFPSAAYYLGAYVFIIFTGFLITFLAFTFFKVPETRGRTFEDITRAFEGQAHGADRSGKDGVMGMNSIEPAKETTTNV

SEQ ID NO: 246021 - protein, 120 aa, Artificial Sequence
  derived and/or modified sequence
MEFHNGGHVSGIGGFLVSLTSRMKPHTLAVTPALIFAITVATIGSFQFGYNTGVINAPETIIKEFINKTLTDKANAPPSEVLLTNLWSLSVAIFSVGGMIGSFSVGLFVNRFGRRNSMLI

SEQ ID NO: 246022 - protein, 141 aa, Artificial Sequence
  derived and/or modified sequence
MEFHNGGHVSGIGGFLVSLTSRMKPHTLAVTPALIFAITVATIGSFQFGYNTGVINAPETIIKEFINKTLTDKANAPPSEVLLTNLWSLSVAIFSVGGMIGSFSVGLFVNRFGRRNSMLIVNLLAATGGCLMGLCKIAESV

SEQ ID NO: 246023 - DNA, 1563 bp, Artificial Sequence
  derived and/or modified sequence
atggaattccacaacggcggccacgtctccgggattggcggattcctggtctctctgacctcacgaatgaaaccacacaccctggcagtgacacccgcactgatcttcgccatcaccgtggcgactatcggttcctttcaatttggctacaacacaggcgtgattaatgccccggagaccataatcaaggaattcatcaacaagaccctgaccgacaaagcaaacgccccccccagcgaggtcctgctgaccaacctctggtccctgtccgtggcaatcttttctgtcggaggaatgattggcagtttcagcgtcggtctattcgtgaatcggtttgggaggaggaatagtatgctcatcgtcaaccttcttgcagccaccggggggtgcttgatgggattgtgcaaaattgcagagagcgtagaaatgctgatactgggtcgattggtgatcgggctgttctgcgggctttgcaccggttttgtaccaatgtatatcggagagatcagccctacagcgctgcgtggcgctttcggcacactcaatcagctggggatagtgattggtatacttgtggctcagatctttgggctagagctgatcctcgggtccgaggaactatggcctgtgctcctgggatttaccattctaccagccatcttgcagagtgccgcgctgccttgttgccctgaatctccacggttccttcttattaatcggaaaaaagaagagaacgcaacaaggattttgcaacggctctgggggacccaagatgtgagccaggatatccaggaaatgaaggacgagtccgctagaatgtcccaggaaaagcaggtaactgtgttggagttattcagagtgagtagttaccgccaaccaataattattagcattgtgttgcaactttcccagcagctctctgggattaatgctgtgttttattatagtactggcatattcaaagatgctggagtgcagcagcctatctacgcaaccatttctgcaggagtggtcaataccatttttacactgctctctctgttccttgtcgagagggcaggccgacgcacattgcacatgatcggcctggggggtatggctttttgcagtactcttatgactgtctctctgctcctaaagaaccattataatggtatgtcgttcgtctgcattggggcgatcctggtgtttgttgcctgttttgagatcgggcctgggcctattccttggttcattgtcgcagaattatttagccagggaccaaggcctgcggccatggcagttgccggttgcagcaactggacctctaatttcctggttgggctgctctttccttcggccgcgtactacctcggtgcttatgtgttcattatcttcaccgggtttctgatcacatttcttgcctttaccttctttaaggtccccgagactaggggaaggacgtttgaggacatcacacgcgcgttcgagggtcaagcacatggggcagacagatctggcaaggatggagtaatggggatgaattccattgaacccgcaaaggagaccaccacgaacgtgtag

SEQ ID NO: 246024 - DNA, 363 bp, Artificial Sequence
  derived and/or modified sequence
atggagttccacaatggtggacatgtctctgggatcggtgggtttttagtgtcccttacctctaggatgaaacctcacactttggccgtgactcctgcgctgatcttcgccataactgtggcgaccattggtagcttccagtttgggtacaacacgggggttatcaacgcccccgagaccatcatcaaagagtttatcaacaagacgttaactgacaaggcaaatgccccccctagcgaggtgctcctgactaacctgtggagcctttccgtggcaatcttcagcgtgggaggaatgatcggttctttcagtgtggggctgtttgtcaataggtttggccgccgaaactccatgctgatatag

SEQ ID NO: 246025 - DNA, 426 bp, Artificial Sequence
  derived and/or modified sequence
atggagttccataatggcggacacgtgagtgggattggaggctttctggtgagcctgacttcgagaatgaagccacatacactggctgtaacgccagcgctgattttcgccattaccgtggccactattggatctttccagttcggatacaatactggcgtgatcaacgcacccgagaccataatcaaggagtttatcaataagacccttaccgataaggcaaacgctcccccgagcgaagttctactgacaaatctctggagcttgtctgtagccatcttcagcgtcggtggaatgattggcagtttctctgtgggcctgttcgtgaaccgttttggtcggcgaaacagcatgctgattgtaaatctgctggccgctacaggaggttgccttatgggactttgtaagatcgccgagtcagtctag

SEQ ID NO: 246026 - DNA, 1563 bp, Artificial Sequence
  derived and/or modified sequence
atggaatttcataatggcggccacgtcagcggcataggcggctttctggtgtcccttacgtcacggatgaagcctcacaccctggcagttacccccgcactgatattcgccattacagtcgcaacgatcggttctttccagtttggatacaatactggcgtgatcaacgcgcccgagacaatcatcaaggagttcataaacaagacactgactgacaaggccaacgccccgccatccgaagtattactgaccaatctatggagcctgtccgtggccatttttagtgtaggagggatgatcggatcttttagcgtggggctgtttgttaatcggtttgggcgccgtaacagtatgctgatcgtgaatctactggctgctaccggcggctgcctgatggggttgtgcaagatagccgagagcgtggagatgctcattctcggcaggctggtgatcgggctcttttgtggactgtgcactgggttcgttccgatgtatattggagagataagtcctacggctctcaggggtgcattcggaaccctgaatcagctgggcattgtcattgggatcctggtcgctcaaatttttggcttggagctgatccttggcagtgaagaactatggccagtgctgctgggctttactatcctcccggctattttgcagagtgcggcgctgccttgttgccctgaaagcccaaggttcttactcattaataggaagaaagaggagaatgccacccgtatactgcagagactgtggggaacgcaagacgtcagccaggatatccaagaaatgaaggatgagtctgctagaatgagccaggagaaacaggtcacagtattagaactcttccgagtttcctcatatcggcagccaattattatttctattgttctgcagctgtcccagcagctgtcgggcattaatgcagttttttattacagcacgggaatttttaaagatgcaggcgtccagcagcctatttatgctacaatcagcgccggagtggtgaatactatctttactctactgtcgctgtttctggtggaaagagcaggcagacgaactttacatatgatcggactaggtggcatggctttttgtagtacactaatgaccgtgagcctcctgcttaagaaccattataacggtatgtctttcgtgtgtattggggcaatactcgtgttcgttgcttgttttgaaattggtcccggtccaatcccatggtttattgtggcagaactgttttctcagggacctaggcctgcggccatggccgtggcgggctgtagcaattggaccagcaacttcttagttggactcttgtttcccagcgctgcctactacttgggcgcgtatgtattcatcatcttcaccggtttcttgataacctttctggcttttactttctttaaggttcccgagacccgcgggaggacatttgaggacattactagggcttttgaagggcaggctcacggcgccgatagaagtggcaaggacggtgtgatgggaatgaacagcatagagcccgccaaggaaaccacaacaaacgtatag

SEQ ID NO: 246027 - DNA, 1563 bp, Artificial Sequence
  derived and/or modified sequence
atggagttccacaatggaggccacgtgtctggcatcggcggcttcctggtgtccctgaccagcaggatgaagccccacaccctggccgtgaccccagccctgatctttgccatcaccgtggccaccatcggcagcttccagtttggctacaacacaggagtcatcaatgcccctgagaccatcatcaaggagttcatcaacaagaccctgacagacaaggccaatgcccctccttctgaggtgctgctgaccaacctgtggagcctgtctgtggccatcttctctgtgggcggcatgattggcagcttctctgtgggcctgtttgtgaaccgcttcggcagaagaaattccatgctgattgtgaacctgctggccgccactggaggctgcctgatgggcctgtgcaagattgctgagagcgtggagatgctgatcctgggccgcctggtgattggcctcttctgtggcctgtgcaccggctttgtgcccatgtacatcggggagatcagccccacagccctgcggggggccttcggcaccctgaaccagctgggcatcgtcatcggcatcctggtggcccagatcttcggcctggagctgatcctgggcagcgaggagctgtggcctgtgctgctgggcttcaccatcctgcctgccatcctgcagagcgctgccctgccctgctgcccagagagcccccgcttcctgctgatcaacaggaagaaggaggagaatgccacccgcatcctgcagaggctgtggggcacccaggatgtgtcccaggacatccaggagatgaaggatgagagcgccaggatgagccaggagaagcaggtgacagtgctggagctgttccgggtgtcctcctaccggcagcccatcatcatcagcatcgtgctgcagctgagccagcagctgagcggcatcaatgctgtgttctactacagcacaggcatcttcaaggatgctggggtgcagcagcccatctatgccaccatctctgctggggtggtgaacaccatcttcaccctgctgagcctcttcctggtggagagagctggaagaaggaccctgcacatgattggcctgggcggcatggccttctgcagcaccctgatgacagtgtccctgctgctgaagaaccactacaacggcatgagctttgtgtgcattggagccatcctggtgtttgtggcctgctttgaaattggccctggccccatcccctggttcatcgtggccgagctgttcagccagggccccaggcctgctgccatggctgtggccggctgcagcaactggaccagcaacttcctggtgggcctgctcttccccagcgctgcctactacctgggcgcctacgtgttcatcatcttcaccggcttcctgatcaccttcctggccttcaccttcttcaaggtgcctgagacccggggccgcacctttgaggacatcacccgggcctttgagggccaggcccacggggctgacagaagtggcaaggatggagtgatgggcatgaacagcattgagcccgccaaggagaccaccaccaacgtgtag

SEQ ID NO: 246028 - DNA, 363 bp, Artificial Sequence
  derived and/or modified sequence
atggagttccacaatggaggccacgtgtctggcatcggcggcttcctggtgtccctgaccagcaggatgaagccccacaccctggccgtgaccccagccctgatctttgccatcaccgtggccaccatcggcagcttccagtttggctacaacacaggagtcatcaatgcccctgagaccatcatcaaggagttcatcaacaagaccctgacagacaaggccaatgcccctccttctgaggtgctgctgaccaacctgtggagcctgtctgtggccatcttctctgtgggcggcatgattggcagcttctctgtgggcctgtttgtgaaccgcttcggcagaagaaattccatgctgatctag

SEQ ID NO: 246029 - DNA, 426 bp, Artificial Sequence
  derived and/or modified sequence
atggagttccacaatggaggccacgtgtctggcatcggcggcttcctggtgtccctgaccagcaggatgaagccccacaccctggccgtgaccccagccctgatctttgccatcaccgtggccaccatcggcagcttccagtttggctacaacacaggagtcatcaatgcccctgagaccatcatcaaggagttcatcaacaagaccctgacagacaaggccaatgcccctccttctgaggtgctgctgaccaacctgtggagcctgtctgtggccatcttctctgtgggcggcatgattggcagcttctctgtgggcctgtttgtgaaccgcttcggcagaagaaattccatgctgattgtgaacctgctggccgccactggaggctgcctgatgggcctgtgcaagattgctgagagcgtgtag

SEQ ID NO: 246030 - DNA, 1563 bp, Artificial Sequence
  derived and/or modified sequence
atggagttccacaacggcggccacgtgagcggcatcggcggcttcttagtgtctctgacctccaggatgaaacctcatactcttgccgttactccagccctgatatttgccatcaccgtggccactatcggctcatttcagtttgggtacaatactggggttattaacgcccccgaaactataatcaaggagttcatcaataagaccctcacggacaaagcaaacgccccaccttcggaggtcctgctgaccaacctctggtcacttagcgttgccatttttagtgttgggggtatgatcggatccttctctgtgggactgtttgttaaccggtttgggagacggaattctatgttgattgtgaaccttctcgcggccactggcgggtgcttgatgggcctgtgtaaaatcgccgaaagtgttgagatgctcatcctaggccgacttgttattggtttgttttgtgggctatgcacagggttcgtgccaatgtacattggggaaatatccccaacggccttgcgtggtgccttcggtaccctcaatcagctcgggatcgtgattggcattctggtagcacagatttttggcctcgagctgatcctgggatcagaagaactgtggccggtcttgttgggattcacaatcctgccagcaatcctccaaagtgcggccctgccatgttgtcctgagtccccacgattcttattgataaacaggaagaaggaagaaaacgcaacccgtattttacaacggctgtgggggacccaagacgtgagccaggatatacaggagatgaaggatgaatccgctaggatgtcacaggagaaacaggtaacagtcctggagctctttcgtgtgtccagttacaggcagcccattatcatatctatcgtactccagctgagccagcagttatctggaattaacgcggtcttttactactctactggaatcttcaaggacgcaggggtccagcagcctatctatgcgacgatctccgcaggcgtcgtaaacactatatttacactactcagcctgttcctggttgaaagggccggacggcggacactgcatatgatcggtttgggggggatggccttttgtagcacactgatgacggtatcactcctgctcaaaaaccactacaatggaatgtcattcgtatgcataggagctatcctggtgttcgtggcgtgttttgagattgggcccgggcccattccctggttcatcgtggctgagctgttcagtcaaggacccagaccagccgctatggcagtggctggatgtagtaactggaccagcaatttcctagtggggctgctttttccctcagcagcttactacttgggagcctacgtgttcattatctttactgggtttttaatcacttttctagcattcaccttctttaaggtccctgaaacacgagggcgcactttcgaagatataaccagggccttcgagggccaggcacacggcgccgataggtcaggcaaggacggagtcatggggatgaacagtattgagccagccaaggagaccacaacaaatgtttag

SEQ ID NO: 246031 - DNA, 363 bp, Artificial Sequence
  derived and/or modified sequence
atggagttccacaacggcggccacgtgagcggcatcggcggcttcttggtttctttaacatctaggatgaaaccccacactctggctgtgacaccagcgcttatatttgcgatcaccgtagcaaccataggaagcttccaattcgggtacaacacaggtgtgatcaacgcgcccgaaacaatcataaaagaatttattaataagacactgaccgacaaggcaaacgctcctcccagtgaagtattgctcaccaacctgtggtccctgagtgtggccattttttccgtgggcggaatgataggatcattcagcgtgggcctgttcgtgaacaggttcggaagaaggaactcaatgctgatctag

SEQ ID NO: 246032 - DNA, 426 bp, Artificial Sequence
  derived and/or modified sequence
atggagttccacaacggcggccacgtgagcggcatcggcggcttcctggtcagcctgacctcacgtatgaagccccacactctagctgtcacaccggcactcatatttgccatcaccgtggcgactatcgggtctttccagttcgggtacaacacaggtgtgatcaacgcaccagaaactataatcaaagaatttattaacaagaccctcaccgataaagccaatgcaccccccagcgaagttctgttaaccaacttgtggtcattgtccgtggccatattctcggtcggggggatgattgggtcattctctgtaggtcttttcgttaacaggttcggccggcggaactctatgctgattgtgaatctgctggctgccaccggagggtgtctcatgggtctttgcaaaattgccgagtctgtgtag

SEQ ID NO: 246033 - DNA, 1563 bp, Artificial Sequence
  derived and/or modified sequence
atggagttccacaacggcggccacgtgagcggcatcggcggcttcctcgtctccttgacttctcgtatgaagccccacaccctcgccgtaacccccgctctcatttttgccataacagtggccaccatcggctcttttcaatttgggtataataccggcgtaattaatgccccagagactattattaaggaattcatcaacaagacgctaaccgacaaggccaacgcaccaccatcagaagtcctcctgactaatttgtggtctctctcagtcgcgatattctccgtaggcggcatgataggcagcttttcagtaggtcttttcgtaaaccgtttcggcaggagaaacagcatgttgatcgtaaatctcctggccgccacaggggggtgcttaatgggcctgtgtaaaattgcggagtccgtcgaaatgctgattttggggaggctggtgattggactgttctgcggactctgtactgggttcgtaccaatgtatatcggagagattagcccaacagccctgcggggcgcgttcggcacactgaaccagttaggaattgtcatcggcattctggtggcccagatttttggcttggaattaattctgggctccgaggagctgtggccagtcttactgggatttaccattctccccgcaatcttgcagtccgcagcccttccttgttgccccgaaagtccaaggtttcttttgattaaccgcaagaaggaagaaaacgcaacaaggattttgcagcgactttggggcacacaggacgtcagtcaggatatccaagaaatgaaggacgaatctgcgaggatgtcccaggagaagcaggtgacagtgctagagctcttcagagtctcctcttataggcaacctatcattatttccattgtactgcaactgtcacagcagctatcagggataaacgccgtattttactatagtactgggattttcaaggacgcaggcgtacaacaacccatttacgcaacgataagtgcgggcgtggtcaacaccattttcaccttactcagcttgtttctcgtcgagcgggctgggcgccgtactctccacatgatcggacttggcgggatggcgttttgttccactctgatgacggtatccctgttacttaagaaccactacaacgggatgtcttttgtttgtatcggggcgattctagtctttgtcgcctgtttcgagatcggaccggggcctatcccatggttcatcgtagccgaactgttcagccagggaccaaggcccgcagctatggctgtcgcgggttgcagcaattggacttccaatttcctagtcggactgctgttcccttcggctgcatactacctgggtgcttatgttttcataattttcacagggttcttgatcacgttcctggcattcacattcttcaaagtgcccgagacaagaggacggactttcgaggatatcacccgtgccttcgagggccaggcccatggagccgacaggtctgggaaagacggggtcatggggatgaattcaattgaaccagcgaaggagacaaccacaaatgtgtag

SEQ ID NO: 246034 - DNA, 1563 bp, Artificial Sequence
  derived and/or modified sequence
atggaattccataacggcggtcatgtctcagggatcggcggatttctcgtaagtctcacttcccggatgaagccccacactctggccgtgacaccagccctaattttcgccattacagtcgcgactattgggtcctttcaatttggatacaacacaggagtgatcaatgcccctgaaacgataattaaggagttcataaacaagactctgacagacaaggctaatgcacccccaagcgaggtcctactgaccaacctgtggtcgctgagcgtggcaatcttcagtgtggggggaatgatcggcagcttctccgtgggtctatttgttaatcggtttggtcgtagaaacagcatgctcattgttaacctactggccgcaaccgggggatgtctcatgggcctgtgcaaaatcgctgaatccgtagaaatgctgattctcgggaggcttgtcataggtctgttttgcggattatgcacgggcttcgtgcccatgtatattggagaaatctcccccacagcactaagaggagcttttggcacgctcaaccagttggggattgtgatcggaattctcgtggcccagattttcgggctggagctcattcttggctcagaggaattatggccggtactgctgggctttaccatcctaccggcaattcttcagtcagcagccttgccatgctgcccagaaagtccacgctttttgcttattaatagaaagaaagaagaaaacgccacccggattctgcagcgtctttggggaactcaggacgtgtctcaagacattcaagagatgaaagatgaatccgccagaatgtctcaagagaaacaagtgacggttttagagctgtttcgtgtgtccagctaccgccagcccatcatcataagcatcgtcctgcagctctcacaacagctctccggtatcaatgccgtcttctattattcgaccggaatctttaaggacgcgggagttcaacagcctatttatgcgacaatttccgcaggcgttgtcaacaccatctttacgctgttatccctcttcctcgtggagcgcgctggtcggagaactctgcatatgattggattagggggtatggccttctgtagtacgttaatgacagtgagcctgctcctgaagaaccactataacggaatgtcttttgtttgtataggggctatattagtgttcgtggcttgcttcgaaattggcccaggtcctatcccctggtttatcgtggctgagctgttcagtcaaggccctagacctgccgctatggccgtcgctggatgctccaactggactagtaatttcctcgtcggtctgctgttcccaagcgctgcttactatctcggagcctatgtgtttatcatttttacaggattcttgatcacatttctggccttcacattttttaaagtgcccgagacccggggacgcacttttgaggatatcacaagagcttttgaagggcaggcccacggggctgaccgctcaggaaaggatggggtgatgggtatgaacagtatcgaacctgcaaaagaaaccacaaccaacgtgtag

SEQ ID NO: 246035 - DNA, 363 bp, Artificial Sequence
  derived and/or modified sequence
atggaattccacaacgggggacacgtgtctgggatcggcggatttttggtctccttgacatcacgaatgaagcctcatactttggccgtgactccagctttgatatttgccatcacagtcgcgactattgggtccttccaatttggctacaacactggggtcatcaatgcgccagaaaccattataaaagagtttattaacaagaccctcaccgataaggccaatgcccctcctagcgaggtgctgctgacgaatctgtggtctcttagcgtagctatcttttctgtggggggaatgatcgggtctttctctgtcggtctgttcgtcaatagattcgggcgtcgcaattccatgttgatttag

SEQ ID NO: 246036 - DNA, 426 bp, Artificial Sequence
  derived and/or modified sequence
atggaatttcacaacggaggtcacgtcagtgggatcggagggttcctagtgtcacttacctctcgtatgaagcctcatacgctcgctgtcacacccgcactgatttttgccattacagtggcgaccatcggaagtttccaatttggatacaatactggcgtcattaatgcacccgagacaatcatcaaggaatttattaataaaactctaactgacaaagcaaacgcccctccatccgaggtgcttctgacaaacctgtggagcctcagcgtcgcaatcttcagcgttggtggaatgattggctcattttcagtgggcctgtttgtcaatcgcttcggccgaaggaatagcatgctaatcgtgaacttgctcgccgcaaccgggggttgcctaatggggctgtgtaaaatcgcagagtcagtctag

SEQ ID NO: 246037 - DNA, 1563 bp, Artificial Sequence
  derived and/or modified sequence
atggagtttcacaacgggggtcacgtatcgggtattggcggattcctcgtgagcctcacaagtcggatgaaacctcacacccttgcggtgactcctgcactgattttcgccattaccgtggccaccattgggtcatttcaatttgggtacaatactggtgtgatcaatgcgccagaaaccattatcaaagaattcataaacaaaacattgactgataaggccaacgcccctccttcagaggtcctgctgacaaacctgtggtccctttccgtggcgatcttctcagtcgggggtatgattggctccttcagcgttggactctttgttaacagattcggccgtcgaaactctatgctgatcgtgaatctcctcgccgctaccgggggatgcctcatgggtttgtgcaaaatcgccgaatcagtggagatgctcattcttggcagacttgtcatcggcctcttctgcggcctgtgtactggatttgttcctatgtacatcggggagatcagccccacggccctacgtggcgcatttggcaccctaaatcaacttggaatcgtgattggaatcctcgtggcccagatttttggcctagaactaattttaggatccgaagagctgtggcccgtcctgctcgggtttaccattttaccggcaatcttgcagagcgcagctctgccctgttgtcccgagtcacccaggtttctgctaatcaacaggaagaaggaggagaatgccacccgcattctccaaagactttggggaacccaggacgttagccaggatatacaggaaatgaaagatgagtcggcacggatgtctcaggagaaacaagttactgttcttgaactctttagagtgagctcatacagacagccgatcatcatatccattgtattacagttgtcccagcagctgtccggcattaacgcagtgttctactattctacgggcattttcaaggatgccggagtccagcagccaatttacgccacaatctccgcaggggtggtgaacacaatttttactctgctgtccctgtttctcgttgaacgagccggtcgtcgcacgcttcatatgataggccttggcggtatggcgttttgtagcacactcatgacggtgagcttgttgctgaaaaatcattacaatggaatgtcatttgtttgcattggcgctatcctcgtgttcgtggcatgttttgagatcgggcctggcccaattccatggttcatagtggccgagctattttcccagggcccacggcctgccgcaatggctgtggcagggtgctctaactggacctcaaacttcctggttggactcctgttccctagtgctgcttattacctcggggcatacgtgttcatcatttttacaggctttttgattaccttcctggccttcaccttcttcaaagtgcccgagacacgagggagaacattcgaggatataactcgagcgttcgaggggcaggcacacggagctgatcggagcgggaaggacggggtgatgggaatgaacagtattgaacccgctaaggagaccacaaccaatgtctag

SEQ ID NO: 246038 - DNA, 2335 bp, Artificial Sequence
  derived and/or modified sequence
ggacccctgctctgaccgcaggtgggtgcttgtcttgcttacggagggctcccgatgaaccgagtcacgttttgtaaccacattaacggaccattcaaagtcgaatcctaggcttttcgaggcagttagtgggtcccaacggctgcaggcggggccggcgggggcgcagcggcccgggaggaagcagtaccttgaagagaaattggagagggagtcaattcctaggatagcagagagatggacaacagacagaatagatggagtttcacaatggtggccatgtgtctggaattggtgggttcttggtctcactgacttcaagaatgaagccgcacaccctcgcagtcaccccagctctgatctttgccatcacagttgctacaatcggctctttccagtttggctacaacactggggtcatcaatgctcctgagacgatcataaaggaatttatcaataaaactttgacggacaaggcaaatgcccctccctctgaggtgctgctcacgaatctctggtccttgtctgtggccatattttccgtcgggggtatgatcggctccttttccgtcggactctttgttaaccgctttggcaggcgcaattcaatgctgattgtcaacctgttggctgccactggtggctgccttatgggactgtgtaaaatagctgagtcagttgaaatgctgatcctgggccgcttggttattggcctcttctgcggactctgcacaggttttgtgcccatgtacattggagagatctcgcctactgccctgaggggtgcctttggcactctcaaccagctgggcatagttattggaattctggtggcccagatctttggtctggaactcatccttgggtctgaagagctatggccggtgctattaggctttaccatccttccagctatcctgcaaagtgcagcccttccatgttgccctgaaagtcccagatttttgctcattaacagaaaaaaagaggagaatgctacgcggatcctccagcggttgtggggcacccaggatgtatcccaagacatccaggagatgaaagatgagagtgcaaggatgtcacaagaaaagcaagtcaccgtgctggagctctttagagtgtccagctaccgacagcccatcatcatttccattgtgctccagctctctcagcagctctctgggatcaatgctgtgttctattactcaacaggaatcttcaaggatgcaggtgttcaacagcccatctatgccaccatcagcgcgggtgtggttaatactatcttcactttactttctctatttctggtggaaagggcaggaagaaggactctgcatatgataggccttggagggatggctttttgttccacgctcatgactgtttctttgttattaaagaatcactataatgggatgagctttgtctgtattggggctatcttggtctttgtggcctgttttgaaattggaccaggccccattccctggtttattgtggccgaactcttcagccagggcccccgcccagctgcgatggcagtggccggctgctccaactggacctccaacttcctagtcggattgctcttcccctctgctgcttactatttaggagcctacgtttttattatcttcaccggcttcctcattaccttcttggcctttaccttcttcaaagtccctgagacccgtggcaggacttttgaggatatcacacgggcctttgaagggcaggcacacggtgcagatagatctgggaaggacggcgtcatggggatgaacagcatcgagcctgctaaggagaccaccaccaatgtctaagtcatgcctccttccacctccctcccggcatgggaaagccacctctccctcaacaagggagagactttatcaggatgaacccaggactgcttctgaatgctgctacttgatttctttctcatcccacgcactccatgagcaccccaaggctgcagtttgttggatcttcaatggctttttaaattttatttcctggacatcctcttctgcttaggagagaccgagtgaacctaccttcatttcaggagggattggccgcttggcacatgacaactttgccagcttttcctcccttgggttctgatattgccgcactagaggatataggagaggaaaagtaaggtgcagttgccccaacctcagacttaccaggaagcagatacatatgagtgtggaagccggagggtgtttatgtaagagcaccttcctcacttccatacagctctacgcggcaaattaacttgagttttatttatcttatcctctggtttaattacataaatatttatttttta

SEQ ID NO: 246039 - DNA, 533 bp, Artificial Sequence
  derived and/or modified sequence
agcagccgccggggctggaccgtgcggtgcgcaggtgagaagccgggaggggccggacaaccccgaccgcgagccggacccctgctctgaccgcaggaagcagtaccttgaagagaaattggagagggagtcaattcctaggatagcagagagatggacaacagacagaatagatggagtttcacaatggtggccatgtgtctggaattggtgggttcttggtctcactgacttcaagaatgaagccgcacaccctcgcagtcaccccagctctgatctttgccatcacagttgctacaatcggctctttccagtttggctacaacactggggtcatcaatgctcctgagacgatcataaaggaatttatcaataaaactttgacggacaaggcaaatgcccctccctctgaggtgctgctcacgaatctctggtccttgtctgtggccatattttccgtcgggggtatgatcggctccttttccgtcggactctttgttaaccgctttggcaggcgcaattcaatgctgatt

SEQ ID NO: 246040 - DNA, 578 bp, Artificial Sequence
  derived and/or modified sequence
ggcgggggcgcagcggcccgggaggtgcgtggttgagcgaagccgcggggcccaaccgcagtcgcggggtctgggaggaagcagtaccttgaagagaaattggagagggagtcaattcctaggatagcagagagatggacaacagacagaatagatggagtttcacaatggtggccatgtgtctggaattggtgggttcttggtctcactgacttcaagaatgaagccgcacaccctcgcagtcaccccagctctgatctttgccatcacagttgctacaatcggctctttccagtttggctacaacactggggtcatcaatgctcctgagacgatcataaaggaatttatcaataaaactttgacggacaaggcaaatgcccctccctctgaggtgctgctcacgaatctctggtccttgtctgtggccatattttccgtcgggggtatgatcggctccttttccgtcggactctttgttaaccgctttggcaggcgcaattcaatgctgattgtcaacctgttggctgccactggtggctgccttatgggactgtgtaaaatagctgagtcagttg

SEQ ID NO: 246041 - DNA, 4125 bp, Artificial Sequence
  derived and/or modified sequence
agtcgcggggtctgggaggagacctgaatgaaatgagggagccttgggagcatgatccaggcggagggaactggattcgggaggaggaactgccttggccttgaaagatacctaccaggagttcaagtgctgtgcgggtgcatcagctttgtagatttgtgcaagatgaaaattggaattgtcttaggaaattatggatcattcatttattcagtgctggattcattcagtgatttatgtctgaagtgtgacagaaggggagtaaggccaagtgtccttgccctctattggagattctgcctcccctgggacagatggcttcttgagcacactcccacgatgggtggctgctctggtacatctcatccacttcttcatctgtgaagctgtcacccatggtggtgagcagctcctggaggtggtcctcatgaatgaaacctgaggattcctcgttgaagcaggtattcatccatggggttcttccgcggtgaagccagcttgtcgtgctgtcccccttgtcattgaagccatcatggttctggtcaatcatgttgaaagcctccttaaactcctggatgtggaactggtcgaacatcacgaagacattggatgtggccccttgtgctgtggtcgcttcttggtggtcttggctttggtccacttgctgaacattttggcttcaggaagcagtaccttgaagagaaattggagagggagtcaattcctaggatagcagagagatggacaacagacagaatagatggagtttcacaatggtggccatgtgtctggaattggtgggttcttggtctcactgacttcaagaatgaagccgcacaccctcgcagtcaccccagctctgatctttgccatcacagttgctacaatcggctctttccagtttggctacaacactggggtcatcaatgctcctgagacgatcataaaggaatttatcaataaaactttgacggacaaggcaaatgcccctccctctgaggtgctgctcacgaatctctggtccttgtctgtggccatattttccgtcgggggtatgatcggctccttttccgtcggactctttgttaaccgctttggcaggcgcaattcaatgctgattgtcaacctgttggctgccactggtggctgccttatgggactgtgtaaaatagctgagtcagttgaaatgctgatcctgggccgcttggttattggcctcttctgcggactctgcacaggttttgtgcccatgtacattggagagatctcgcctactgccctgaggggtgcctttggcactctcaaccagctgggcatagttattggaattctggtggcccagatctttggtctggaactcatccttgggtctgaagagctatggccggtgctattaggctttaccatccttccagctatcctgcaaagtgcagcccttccatgttgccctgaaagtcccagatttttgctcattaacagaaaaaaagaggagaatgctacgcggatcctccagcggttgtggggcacccaggatgtatcccaagacatccaggagatgaaagatgagagtgcaaggatgtcacaagaaaagcaagtcaccgtgctggagctctttagagtgtccagctaccgacagcccatcatcatttccattgtgctccagctctctcagcagctctctgggatcaatgctgtgttctattactcaacaggaatcttcaaggatgcaggtgttcaacagcccatctatgccaccatcagcgcgggtgtggttaatactatcttcactttactttctctatttctggtggaaagggcaggaagaaggactctgcatatgataggccttggagggatggctttttgttccacgctcatgactgtttctttgttattaaagaatcactataatgggatgagctttgtctgtattggggctatcttggtctttgtggcctgttttgaaattggaccaggccccattccctggtttattgtggccgaactcttcagccagggcccccgcccagctgcgatggcagtggccggctgctccaactggacctccaacttcctagtcggattgctcttcccctctgctgcttactatttaggagcctacgtttttattatcttcaccggcttcctcattaccttcttggcctttaccttcttcaaagtccctgagacccgtggcaggacttttgaggatatcacacgggcctttgaagggcaggcacacggtgcagatagatctgggaaggacggcgtcatggggatgaacagcatcgagcctgctaaggagaccaccaccaatgtctaagtcatgcctccttccacctccctcccggcatgggaaagccacctctccctcaacaagggagagactttatcaggatgaacccaggactgcttctgaatgctgctacttgatttctttctcatcccacgcactccatgagcaccccaaggctgcagtttgttggatcttcaatggctttttaaattttatttcctggacatcctcttctgcttaggagagaccgagtgaacctaccttcatttcaggagggattggccgcttggcacatgacaactttgccagcttttcctcccttgggttctgatattgccgcactagaggatataggagaggaaaagtaaggtgcagttgccccaacctcagacttaccaggaagcagatacatatgagtgtggaagccggagggtgtttatgtaagagcaccttcctcacttccatacagctctacgcggcaaattaacttgagttttatttatcttatcctctggtttaattacataaatatttattttttaagtgtaattttgccaaataataaaaacagaaggaaattgagattagagggaggtgtttaaagagaggttatagagtaaaagatttgatgctggagaggttaaggtgcaataagaattcagggagaaatgttgttcattattggagggtaaatgatgtggtgcctgaggtctgtacattacctcttaacaatttctgtccttcagatggaaactctttgatttctcagaaaagttgtatgcctatttaataaagctactcatttcctttggaactttatctttaagataatagtttacatgtagtagtacttgaaatctaggattattaactaatatgggcattgtagttaatggcggttgatgggttctaattttggatggagtccagggaagagaaagtgatttctagaaagcctgttcccctcactggacgaaataactccttgtagtagtctcattacttttgaagtaatcccgccacctatctagtgggagagccatccaaatgagaaacctaaaataattggttcttggtagagattcattatttctccactttgttctttaggagattttaggtgttgattttctgttttattttaactcatacctttaaaggaattccccaaagaatgtttacagcaaacttggaatttgtaacctcagctctgggagaggatttttttctgagcgattattatctaaagtgtgttgttgctttaggctcacggcacgcttgcgtatgtctgttaccatgtcactgtggtcctatgccgaatgccctcaggggacttgaatctttccaataaaccaggtttagacagtatgagtcaatgtgcagtgcagcccacacttgagaggatgaatgtatgtgcactgtcactttgctctgggtggaagtatgttattgttgacttattttctctgtgtttgttcctacagcccctttttcatatgttgctcagtctccctttcccttcttggtgcttacacatctcagaccctttagccaaacccttgccagtgacagtattttggttctcagttctcactgttccctctgctcctggagcctttgaataaaaatgcacgtagctatggagtggggtttagctggaaaggtggccttccaacttcacgtcaacttctggctcctcagtttggcagtaaggcagggaagttgttttcctatttctcactgagaagattgtgaatatttccatatggattttccattattgtttgtttgattctttgttttaaaataaaaattctgaatgtacatga

SEQ ID NO: 246042 - DNA, 1563 bp, Artificial Sequence
  derived and/or modified sequence
atggagttccacaacggcggccacgtgagcggcatcggcggcttcctggtgagcctgaccagcagaatgaagccccacaccctggccgtgacccccgccctgatcttcgccatcaccgtggccaccatcggcagcttccagttcggctacaacaccggcgtgatcaacgcccccgagaccatcatcaaggagttcatcaacaagaccctgaccgacaaggccaacgccccccccagcgaggtgctgctgaccaacctgtggagcctgagcgtggccatcttcagcgtgggcggcatgatcggcagcttcagcgtgggcctgttcgtgaacagattcggcagaagaaacagcatgctgatcgtgaacctgctggccgccaccggcggctgcctgatgggcctgtgcaagatcgccgagagcgtggagatgctgatcctgggcagactggtgatcggcctgttctgcggcctgtgcaccggcttcgtgcccatgtacatcggcgagatcagccccaccgccctgagaggcgccttcggcaccctgaaccagctgggcatcgtgatcggcatcctggtggcccagatcttcggcctggagctgatcctgggcagcgaggagctgtggcccgtgctgctgggcttcaccatcctgcccgccatcctgcagagcgccgccctgccctgctgccccgagagccccagattcctgctgatcaacagaaagaaggaggagaacgccaccagaatcctgcagagactgtggggcacccaggacgtgagccaggacatccaggagatgaaggacgagagcgccagaatgagccaggagaagcaggtgaccgtgctggagctgttcagagtgagcagctacagacagcccatcatcatcagcatcgtgctgcagctgagccagcagctgagcggcatcaacgccgtgttctactacagcaccggcatcttcaaggacgccggcgtgcagcagcccatctacgccaccatcagcgccggcgtggtgaacaccatcttcaccctgctgagcctgttcctggtggagagagccggcagaagaaccctgcacatgatcggcctgggcggcatggccttctgcagcaccctgatgaccgtgagcctgctgctgaagaaccactacaacggcatgagcttcgtgtgcatcggcgccatcctggtgttcgtggcctgcttcgagatcggccccggccccatcccctggttcatcgtggccgagctgttcagccagggccccagacccgccgccatggccgtggccggctgcagcaactggaccagcaacttcctggtgggcctgctgttccccagcgccgcctactacctgggcgcctacgtgttcatcatcttcaccggcttcctgatcaccttcctggccttcaccttcttcaaggtgcccgagaccagaggcagaaccttcgaggacatcaccagagccttcgagggccaggcccacggcgccgacagaagcggcaaggacggcgtgatgggcatgaacagcatcgagcccgccaaggagaccaccaccaacgtgtag

SEQ ID NO: 246043 - DNA, 363 bp, Artificial Sequence
  derived and/or modified sequence
atggagttccacaacggcggccacgtgagcggcatcggcggcttcctggtgagcctgaccagcagaatgaagccccacaccctggccgtgacccccgccctgatcttcgccatcaccgtggccaccatcggcagcttccagttcggctacaacaccggcgtgatcaacgcccccgagaccatcatcaaggagttcatcaacaagaccctgaccgacaaggccaacgccccccccagcgaggtgctgctgaccaacctgtggagcctgagcgtggccatcttcagcgtgggcggcatgatcggcagcttcagcgtgggcctgttcgtgaacagattcggcagaagaaacagcatgctgatctag

SEQ ID NO: 246044 - DNA, 426 bp, Artificial Sequence
  derived and/or modified sequence
atggagttccacaacggcggccacgtgagcggcatcggcggcttcctggtgagcctgaccagcagaatgaagccccacaccctggccgtgacccccgccctgatcttcgccatcaccgtggccaccatcggcagcttccagttcggctacaacaccggcgtgatcaacgcccccgagaccatcatcaaggagttcatcaacaagaccctgaccgacaaggccaacgccccccccagcgaggtgctgctgaccaacctgtggagcctgagcgtggccatcttcagcgtgggcggcatgatcggcagcttcagcgtgggcctgttcgtgaacagattcggcagaagaaacagcatgctgatcgtgaacctgctggccgccaccggcggctgcctgatgggcctgtgcaagatcgccgagagcgtgtag

SEQ ID NO: 246045 - DNA, 585 bp, Artificial Sequence
  derived and/or modified sequence
atggagaacttcaccgctcttttcggcgctcaggccgatcctccacctccacctactgccctggggtttggccctgggaagccccccccacccccccccccacccgcaggaggcgggccgggtactgcccccccacccacagcagcaaccgcccctcccggcgccgataaatccggcgccggatgcggccccttctaccttatgcgtgagttaccgggatctactgaactgaccggctctactaatctgataacacattataatcttgaacaggcctacaacaagttctgtgggaagaaagtgaaagaaaaactaagtaactttctgcccgatctgccgggaatgatcgacctgccaggatcacatgataattctagcctccggtccctgatagaaaagccgcccattctgtcttcttcttttaatcctataacaggcaccatgctggccgggtttcggctgcataccggtcccctgccagagcagtgccggctgatgcatattcaacctcccaagaaaaagaacaaacacaagcataaacagagcagaacacaggaccccgttcctcccgggaagccaagctag

SEQ ID NO: 246046 - DNA, 585 bp, Artificial Sequence
  derived and/or modified sequence
atggagaacttcaccgccctgtttggagcccaggccgaccccccacctccacccacagccctgggctttggacctgggaagcccccacctcctcctcctcctcctgctgggggcggccctggaacagcccccccacccacagctgccacagcccctcctggagctgacaagagcggggccggctgcggccccttctacctgatgagggagctgcccggcagcacagagctgaccggcagcaccaacctgatcacccactacaacctggagcaggcctacaacaagttctgtgggaagaaggtgaaggagaagctgagcaacttcctgcctgacctgcccggcatgattgacctgcccggcagccatgacaacagcagcctgcggagcctgattgagaagccacccatcctgagcagcagcttcaaccccatcaccggcaccatgctggccggcttccggctgcacacaggccccctgcctgagcagtgccgcctgatgcacatccagccccccaagaagaagaacaagcacaagcacaagcagagcaggacccaggaccctgtgcccccaggcaagcccagctag

SEQ ID NO: 246047 - DNA, 1515 bp, Artificial Sequence
  derived and/or modified sequence
cagcgccggggcggagggtacgatggagaatttcacggcactgtttggggctcaggctgacccaccaccgcccccaaccgcactcggcttcggaccaggaaagcctccacccccgccaccgcctcctgcgggcgggggacccggcacggccccgcctcccaccgcggccacggctcctcctggcgcggacaagtcaggagctggctgtggccctttttacctcatgagggaactgccaggtagcacagagctgacaggcagcacgaatctgatcacacactacaacttggaacaagcctataataaattctgtgggaagaaggtgaaggagaagctaagtaacttcctgcctgacctgccagggatgattgatctgcctggttcccatgataacagcagcctccgctctctcattgagaagccccctattctcagtagctctttcaatcctatcacagggaccatgctggccggcttccgcctccacactggcccgttgccggagcagtgtcgtctgatgcatattcagcctcccaagaagaagaataagcacaagcacaaacagagccgtacccaggatcctgtccccccaggtaaacccagttaagttccgtatggagctctggactcctaaattcccctgaagaagaaaccaatgtactgtggtctcttgggacttgggacagggactctagcagcacctctgtatcctttctggccatttggacaaaagcagttgccccgacttgggattttcctgtagtcttcagtggttcataacagtagaggattttgagctttacaggtgataggtacctaatgtctcctacagaaacaccatctgattcagatcacaagaagaagaaaaagaaaaaagaagaggatcctgaacggaaaaggaagaagaaagagaagaagaaaaagaaggtagagtagaggcctattgccacaacccagtgagtttccccagatctcacccctgtcctaaataccctagagttctttgcctcaagttggacccaagattgaaaacccaaggcaggttgcaggtttctcctgtacagcctgatcaaagccaaggctagttcctagttgttcttaccctgcttctttctcccccagaatcgacatagtccagaccacccaggtatgggcagctcccaggccagcagcagcagcagcctacgctaataggaccactggactctttgccaggatggcttttcctgctgtactgaacctgctgataaaagctgccttccaggctcttggacactgccttgggagcatcctgcagctgggacagaggccagctcctgttgggctcagttgagactaagtaaattaggagagagagggacatgcttttgtaggctcatcccagttggttttctcatggacatctcttcctctcccaggaagcttacaattttcttctctctcttttgtgcaatttgtctgatttaggacttgttctgtgttttctttaaaaaaaaaaaaattacatttatcaaa

SEQ ID NO: 246048 - DNA, 585 bp, Artificial Sequence
  derived and/or modified sequence
atggagaacttcaccgccctgttcggcgcccaggccgacccccccccaccccccacggctctgggatttgggccgggcaaaccccctcctccgccacccccgccagcgggcgggggaccagggactgcaccacccccgacagctgcaaccgccccccctggcgcggacaagtccggcgccggatgtgggcctttctacctgatgcgggagctaccaggttctaccgaactcaccgggtcaactaacctcatcacccattacaatctggagcaggcatacaacaaattctgtgggaagaaagttaaagagaagctaagtaactttttacctgacctccctggcatgatagacctgcctggaagtcatgacaattcgagtctgcgcagcctgatcgaaaagccccctatcctctcctccagcttcaatcctataaccggtaccatgctggctggatttcggctccacaccggtccactgcccgagcagtgtcgcctcatgcatatccaacctcccaagaaaaaaaacaagcataagcataagcaatcacgtacgcaagaccccgttccaccaggaaaaccatcttag

SEQ ID NO: 246049 - DNA, 585 bp, Artificial Sequence
  derived and/or modified sequence
atggaaaacttcacagcactgttcggagcccaggccgaccctcctccgcctccaacggcactcggttttggaccaggaaagccgccacctccccctcctcccccagctggtggaggtccaggaaccgcgccaccacccacagctgctaccgcgcctcctggagctgataagtctggagcagggtgtggtcccttttacttgatgagggagctccccggaagcactgagctaactgggtccacgaatctgattactcattataacctggagcaagcctataacaaattttgtgggaagaaggtgaaggagaagttatccaatttcctgccagatttaccaggcatgatcgatcttcccggaagccacgacaactccagtctcaggagtcttatcgagaaaccaccaatccttagctcttcttttaatccaatcactggtacgatgctggccggattccggttgcacacaggcccactgccagagcagtgtcgcctcatgcacatacagccgccaaaaaaaaagaacaagcacaaacacaaacagtctagaactcaggaccctgttccgccaggaaaaccttcatag

SEQ ID NO: 246050 - DNA, 585 bp, Artificial Sequence
  derived and/or modified sequence
atggagaacttcaccgccctgttcggcgcccaggccgaccccccccccccccccaccgccctgggcttcggccccggcaagccccccccccccccccccccccccgccggcggcggccccggcaccgcccccccccccaccgccgccaccgccccccccggcgccgacaagagcggcgccggctgcggccccttctacctgatgagagagctgcccggcagcaccgagctgaccggcagcaccaacctgatcacccactacaacctggagcaggcctacaacaagttctgcggcaagaaggtgaaggagaagctgagcaacttcctgcccgacctgcccggcatgatcgacctgcccggcagccacgacaacagcagcctgagaagcctgatcgagaagccccccatcctgagcagcagcttcaaccccatcaccggcaccatgctggccggcttcagactgcacaccggccccctgcccgagcagtgcagactgatgcacatccagccccccaagaagaagaacaagcacaagcacaagcagagcagaacccaggaccccgtgccccccggcaagcccagctag

SEQ ID NO: 246051 - protein, 137 aa, Artificial Sequence
  derived and/or modified sequence
MAGSQDIFDAIVMADERFHGEGYREGYEEGSSLGVMEGRQHGTLHGAKIGSEIGCYQGFAFAWKCLLHSCTTEKDSRKMKVLESLIGMIQKFPYDDPTYDKLHEDLDKIRGKFKQFCSLLNVQPDFKISAEGSGLSF

SEQ ID NO: 246052 - protein, 78 aa, Artificial Sequence
  derived and/or modified sequence
MAGSQDIFDAIVMADESRKMKVLESLIGMIQKFPYDDPTYDKLHEDLDKIRGKFKQFCSLLNVQPDFKISAEGSGLSF

SEQ ID NO: 246053 - DNA, 414 bp, Artificial Sequence
  derived and/or modified sequence
atggccggatcgcaggacatctttgacgcaattgtgatggcggacgagcgttttcacggggagggatacagagagggctacgaggagggctctagcctcggggtgatggaaggcaggcagcacgggacattgcacggggccaaaatcggtagtgaaataggctgttatcaaggattcgctttcgcttggaaatgcctccttcattcatgcacaaccgagaaggactcacggaagatgaaggtgctcgaatccctcataggaatgattcagaagtttccatatgacgacccaacctacgataagctccacgaagacctcgacaagatcaggggcaagtttaaacagttctgttcattgctcaacgtgcaaccagattttaagatcagtgcagagggatccggcttaagtttttag

SEQ ID NO: 246054 - DNA, 414 bp, Artificial Sequence
  derived and/or modified sequence
atggctggtagccaggatatatttgacgccattgttatggcggatgaacggtttcatggcgaggggtatcgtgagggttacgaagagggtagttcgttgggggtgatggagggtagacagcatggcaccctgcacggagccaagatagggtcagaaattggttgctatcagggcttcgcttttgcctggaaatgtctgctacattcatgcacaacagaaaaggattctcgcaagatgaaggtcttagagagtctaatcggtatgattcaaaagtttccttacgatgatcctacgtacgacaagttgcacgaagacttagataagatacgcggcaagttcaaacaattctgctcccttctcaacgtgcagcccgattttaagatttcagctgagggcagcggactctccttttag

SEQ ID NO: 246055 - DNA, 237 bp, Artificial Sequence
  derived and/or modified sequence
atggccgggagtcaggatattttcgatgccattgtaatggccgacgaatctagaaagatgaaagtattagagtcactgatcggcatgatacagaagtttccttatgatgacccgacttacgacaagttgcacgaagacttggacaaaatcagaggaaaatttaagcagttctgcagtttattgaatgtgcagccagactttaagatttccgcggagggttcagggctcagcttctag

SEQ ID NO: 246056 - DNA, 414 bp, Artificial Sequence
  derived and/or modified sequence
atggccggcagccaggacatctttgatgccatcgtgatggctgatgagcgcttccatggagagggctaccgggagggctatgaggagggcagcagcctgggcgtgatggagggccggcagcacggcaccctgcatggagccaagattggcagcgagatcggctgctaccagggctttgcctttgcctggaagtgcctgctgcacagctgcaccacagagaaggacagcaggaagatgaaggtgctggagagcctcatcggcatgatccagaagttcccctatgatgaccccacctatgacaagctgcacgaggacctggacaagatccggggcaagttcaagcagttctgcagcctgctgaatgtgcagcctgacttcaagatctctgctgagggcagcggcctgtccttctag

SEQ ID NO: 246057 - DNA, 237 bp, Artificial Sequence
  derived and/or modified sequence
atggccggcagccaggacatctttgatgccatcgtgatggctgatgagagcaggaagatgaaggtgctggagagcctgattggcatgatccagaagttcccctatgatgaccccacctatgacaagctgcacgaggacctggacaagatccggggcaagttcaagcagttctgcagcctgctgaatgtgcagcctgacttcaagatctctgctgagggcagcggcctgtccttctag

SEQ ID NO: 246058 - DNA, 414 bp, Artificial Sequence
  derived and/or modified sequence
atggccggcagccaggacatcttcgacgccatcgtgatggccgacgagagattccacggcgaaggctaccgcgaagggtacgaagaaggaagttccctgggtgttatggagggtcgacaacacggtaccctgcacggggctaaaatcggaagcgagatcggctgttaccagggatttgcttttgcttggaagtgcctcctccacagctgcacaaccgagaaagattcaagaaagatgaaggtgttggagagcctgattggaatgatccaaaagtttccttacgatgatcccacatatgacaagctgcacgaagacctagacaagatccgtggcaaatttaagcagttctgtagcctgctgaatgtacagcctgactttaagatctccgctgagggttcagggctgtctttctag

SEQ ID NO: 246059 - DNA, 414 bp, Artificial Sequence
  derived and/or modified sequence
atggccggcagccaggacatcttcgacgccatcgtgatggccgacgagcgcttccacggcgagggctaccgagaagggtacgaggaaggctcgtctctcggggtcatggagggccgccagcatggaacgttacatggggccaaaataggttccgaaatcggctgttatcagggttttgcctttgcctggaaatgtctcctgcactcatgtacgacagagaaggacagtcggaaaatgaaagttcttgaatctcttatcggcatgattcagaagtttccatatgacgatcccacttacgataaactccacgaggatctcgataagattagaggaaagtttaaacagttctgctccttgctaaatgtgcagccagattttaaaataagtgccgaaggaagcggactgtccttttag

SEQ ID NO: 246060 - DNA, 237 bp, Artificial Sequence
  derived and/or modified sequence
atggccggcagccaggacatcttcgacgccatcgtgatggccgacgaaagcagaaagatgaaggtcctagagtccctaattgggatgattcagaagtttccctacgacgaccctacatacgataagctccacgaggacctcgacaagattagaggaaaattcaaacagttctgcagcctgctcaacgttcaaccggactttaaaatcagtgccgaagggtctggattatcattttag

SEQ ID NO: 246061 - DNA, 2478 bp, Artificial Sequence
  derived and/or modified sequence
gggtctcgtctcctcccaagcggagcatttgtgcctgaagctgccgggtctgctacggcaccgcggggctgcagaaacccgggggccaagggcgggctgcttgccgctatggctggcagtcaggacatattcgatgccatcgtgatggcggatgagaggtttcatggggaagggtatcgggaaggctatgaagaaggcagtagtttgggtgtgatggagggaaggcagcatggcacgctgcatggagccaaaatcgggtctgagatcgggtgctaccaaggttttgcttttgcatggaaatgtctactgcacagttgcaccactgagaaggacagcagaaagatgaaggtcttagaatcattgattggaatgatccagaaattcccttatgatgaccctacttacgataaactccatgaagacttagacaagatcagaggaaaatttaaacagttttgttcgttactcaatgttcagccagactttaaaattagtgcagaaggttccggactttcattttgaggaggatggatgaacagagaccgaacgtcgaggaacagatgtgtgtgtgacgtgtttagaaatgcggtgaagggccagacggtgctgggaaggcagttgttcattgggagggtgagggttccggttcggccgtgggagggcttccttccctggggttttctgcctgtgtcaccttggtgcccgtcttggggcctcgccacacatgccctttgttgggctgaagccgtccctggcagagccctcgtgcattgacttgacagcctctccggcagcacaggcctagctggttctgggttggagttggctctggatagggtcagtcaccaggcctggactgaaggcagttatttttattattattattatttgcaatgagagagatggttggccccgaatgaggctcatgggaggtttggacgggtgctgtgccgcatgtcgaggccgattgtgtgccaggcggtgcgggacgtgcctcccgtgtgttatttaatcccttcaggagcccacaagatgggtgttattctcattttacagaggagggaggggagacgcgaagggattgcctggtctaagggcacccagcagcagagctaggacttccgccctaaggctgtgcctcactgccaccaggcacagccgcctccggaatgcacaggcgagtccctgccctccctcccaggccgcacaggtcctgccaagcctcacggagcacgggggagtctgtggtggccagtttacctgggcatctggctgagaggaagaaaggccaacctgatcctgaggggacccagacatatcctttgcactgtccctagaggggcgatgagctttgcagcattaaaaaatggtgaaggggggaaatattttgaaccaaagaccaaatgttaggccgccgttatatttgcagaagctttgagaaccatgcgtatagcctcctgcattctcccctctcctaggagctcttttgtctctgtccttacgaggcgtcatacagaggcagtggggtgggcacagatgagcagagtggatggttcggtgggtccccacgaggcgagtggtggtcatatgtgatggcacgtgttcacacaccctcctgtgtacccccccagggtcaccgaagtccccacacgctggctctccacacccctcctgttccagaaagcatgtccgaaagcagtccaggagattattaaggggtcgccatgaatccactttggttttaaaaccattcccgaatgtcctagtggattgtgttgtgctgcctaagctgccggctgcaggagccagagaagtgacccccgcgggagcagcggcaggtggatctccacggtggctcgctttgtttttgttttgttttttcttttaagacggagtctcactctgtcgccgagtttggagtgtattggcgcgatctcggctcactgtaacctccgcctcctgaattcaagtgattctcctgcctcagcctccctagtagctgggattataggcgccccccaccacgcccaagtaacttttgtatttttagtagagatggggttttgccttgttggccaggctggtcttgaactcccagcctgaaatgatccacccacgtccacctaccaaagtgctggaattgcaggcatgagccaccactcccggcctgctttttgtttttgaagacaggacttaggtctcctcctcccgaactctaaacctgcgtgtgtggctgtgcaccgctcgtttgtagcgtcacctcaggtctggggaagtctgtgctggcatctcctcattgtgccttcatcagagctggtgccttcgggccagaaagactctcgttctttctagatggtgggatcaggggcctttgctgtgtttcccttggtggatttttgtgttttgtaagttgtctattttgataatgtattatttttataactgtaaaaaaagtaaatagcatattttaaagtgaaa

SEQ ID NO: 246062 - DNA, 709 bp, Artificial Sequence
  derived and/or modified sequence
atttgtgcctgaagctgccgggtctgctacggcaccgcggggctgcagaaacccgggggccaagggcgggctgcttgccgctatggctggcagtcaggacatattcgatgccatcgtgatggcggatgagaggtttcatggggaagggtatcgggaaggctatgaagaaggcagtagtttgggtgtgatggagggaaggcagcatggcacgctgcatggagccaaaatcgggtctgagatcgggtgctaccaaggttttgcttttgcatggaaatgtctactgcacagttgcaccactgagaaggacagcagaaagatgaaggtcttagaatcattgattggaatgatccagaaattcccttatgatgaccctacttacgataaactccatgaagacttagacaagatcagaggaaaatttaaacagttttgttcgttactcaatgttcagccagactttaaaattagtgcagaaggttccggactttcattttgaggaggatggatgaacagagaccgaacgtcgaggaacagatgccgcacaggtcctgccaagcctcacggagcacgggggagtctgtggtggccagtttacctgggcatctggctgagaggaagaaaggccaacctgatcctgaggggacccagacatatcctttgcactgtccctagaggggcgatgagctttgcagcattaaaaaatggtgaa

SEQ ID NO: 246063 - DNA, 2274 bp, Artificial Sequence
  derived and/or modified sequence
gcatttgtgcctgaagctgccgggtctgctacggcaccgcggggctgcagaaacccgggggccaagggcgggctgcttgccgctatggctggcagtcaggacatattcgatgccatcgtgatggcggatgagagcagaaagatgaaggtcttagaatcattgattggaatgatccagaaattcccttatgatgaccctacttacgataaactccatgaagacttagacaagatcagaggaaaatttaaacagttttgttcgttactcaatgttcagccagactttaaaattagtgcagaaggttccggactttcattttgaggaggatggatgaacagagaccgaacgtcgaggaacagatgtgtgtgtgacgtgtttagaaatgcggtgaagggccagacggtgctgggaaggcagttgttcattgggagggtgagggttccggttcggccgtgggagggcttccttccctggggttttctgcctgtgtcaccttggtgcccgtcttggggcctcgccacacatgccctttgttgggctgaagccgtccctggcagagccctcgtgcattgacttgacagcctctccggcagcacaggcctagctggttctgggttggagttggctctggatagggtcagtcaccaggcctggactgaaggcagttatttttattattattattatttgcaatgagagagatggttggccccgaatgaggctcatgggaggtttggacgggtgctgtgccgcatgtcgaggccgattgtgtgccaggcggtgcgggacgtgcctcccgtgtgttatttaatcccttcaggagcccacaagatgggtgttattctcattttacagaggagggaggggagacgcgaagggattgcctggtctaagggcacccagcagcagagctaggacttccgccctaaggctgtgcctcactgccaccaggcacagccgcctccggaatgcacaggcgagtccctgccctccctcccaggccgcacaggtcctgccaagcctcacggagcacgggggagtctgtggtggccagtttacctgggcatctggctgagaggaagaaaggccaacctgatcctgaggggacccagacatatcctttgcactgtccctagaggggcgatgagctttgcagcattaaaaaatggtgaaggggggaaatattttgaaccaaagaccaaatgttaggccgccgttatatttgcagaagctttgagaaccatgcgtatagcctcctgcattctcccctctcctaggagctcttttgtctctgtccttacgaggcgtcatacagaggcagtggggtgggcacagatgagcagagtggatggttcggtgggtccccacgaggcgagtggtggtcatatgtgatggcacgtgttcacacaccctcctgtgtacccccccagggtcaccgaagtccccacacgctggctctccacacccctcctgttccagaaagcatgtccgaaagcagtccaggagattattaaggggtcgccatgaatccactttggttttaaaaccattcccgaatgtcctagtggattgtgttgtgctgcctaagctgccggctgcaggagccagagaagtgacccccgcgggagcagcggcaggtggatctccacggtggctcgctttgtttttgttttgttttttcttttaagacggagtctcactctgtcgccgagtttggagtgtattggcgcgatctcggctcactgtaacctccgcctcctgaattcaagtgattctcctgcctcagcctccctagtagctgggattataggcgccccccaccacgcccaagtaacttttgtatttttagtagagatggggttttgccttgttggccaggctggtcttgaactcccagcctgaaatgatccacccacgtccacctaccaaagtgctggaattgcaggcatgagccaccactcccggcctgctttttgtttttgaagacaggacttaggtctcctcctcccgaactctaaacctgcgtgtgtggctgtgcaccgctcgtttgtagcgtcacctcaggtctggggaagtctgtgctggcatctcctcattgtgccttcatcagagctggtgccttcgggccagaaagactctcgttctttctagatggtgggatcaggggcctttgctgtgtttcccttggtggatttttgtgttttgtaagttgtctattttgataatgtattatttttataactgtaaaaaaagtaaatagcatattttaaagtg

SEQ ID NO: 246064 - DNA, 414 bp, Artificial Sequence
  derived and/or modified sequence
atggccggatcacaagatatattcgacgcaattgtgatggccgacgaaagatttcacggtgagggctatagagaggggtatgaggaaggaagttcccttggcgtaatggagggcaggcagcacggaaccctgcacggagcgaagatcggaagcgagatagggtgttatcagggatttgcgttcgcctggaagtgtctcctgcatagctgtacaacggagaaggactcccgcaaaatgaaagtcctggaaagtctgatcggcatgatccagaaattcccttatgatgaccccacatacgataaactccatgaagatttagacaagataaggggcaagtttaagcagttttgctcactactgaatgttcagcccgatttcaaaatctctgctgaaggatctgggctgagcttttag

SEQ ID NO: 246065 - DNA, 414 bp, Artificial Sequence
  derived and/or modified sequence
atggcgggatcacaggacatctttgatgccatagtgatggcagacgagcgttttcacggggagggttacagagaaggctacgaagagggctcgagcctcggcgtgatggaagggagacagcacgggacacttcacggagcaaagatcgggtcggaaattggctgttatcagggctttgcctttgcctggaaatgcttactccattcttgcactaccgaaaaggatagccggaagatgaaggttctggagtctcttattggaatgatccaaaaatttccttatgatgaccctacctatgataagctccatgaggatttagataagattcggggaaagtttaaacagttttgttcactcttgaacgtgcagccagattttaaaatctcggcggaagggagtggtctgagcttctag

SEQ ID NO: 246066 - DNA, 237 bp, Artificial Sequence
  derived and/or modified sequence
atggctggctcccaggatatcttcgatgctatagtcatggcagatgagagtcggaaaatgaaagtgctagaatccctcattgggatgatccagaaatttccatatgatgatcctacttatgacaagctccacgaggatctcgataaaatccggggaaagttcaagcagttttgtagccttctgaatgtccagcctgactttaaaatctccgccgaaggatctggcctcagcttctag

SEQ ID NO: 246067 - DNA, 414 bp, Artificial Sequence
  derived and/or modified sequence
atggccggcagccaggacatcttcgacgccatcgtgatggccgacgagagattccacggcgagggctacagagagggctacgaggagggcagcagcctgggcgtgatggagggcagacagcacggcaccctgcacggcgccaagatcggcagcgagatcggctgctaccagggcttcgccttcgcctggaagtgcctgctgcacagctgcaccaccgagaaggacagcagaaagatgaaggtgctggagagcctgatcggcatgatccagaagttcccctacgacgaccccacctacgacaagctgcacgaggacctggacaagatcagaggcaagttcaagcagttctgcagcctgctgaacgtgcagcccgacttcaagatcagcgccgagggcagcggcctgagcttctag

SEQ ID NO: 246068 - DNA, 237 bp, Artificial Sequence
  derived and/or modified sequence
atggccggcagccaggacatcttcgacgccatcgtgatggccgacgagagcagaaagatgaaggtgctggagagcctgatcggcatgatccagaagttcccctacgacgaccccacctacgacaagctgcacgaggacctggacaagatcagaggcaagttcaagcagttctgcagcctgctgaacgtgcagcccgacttcaagatcagcgccgagggcagcggcctgagcttctag

SEQ ID NO: 246069 - protein, 143 aa, Artificial Sequence
  derived and/or modified sequence
MSCLDVMYQVYGPPQPYFAAAYTPYHQKLAYYSKMQEAQECNASPSSSGSGSSSFSSQTPASIKEEEGSPEKERPPEAEYINSRCVLFTYFQGDISSVVDEHFSRALSQPSSYSPSCTSSKAPRSSGPWRARRYSLCGASLLS

SEQ ID NO: 246070 - DNA, 432 bp, Artificial Sequence
  derived and/or modified sequence
atgagctgcctggacgtgatgtaccaggtgtacggccccccccagccctacttcgccgccgcctacaccccctaccaccagaagctggcctactacagcaagatgcaggaggcccaggagtgcaacgccagccccagcagcagcggcagcggcagcagcagcttcagcagccagacccccgccagcatcaaggaggaggagggcagccccgagaaggagagaccccccgaggccgagtacatcaacagcagatgcgtgctgttcacctacttccagggcgacatcagcagcgtggtggacgagcacttcagcagagccctgagccagcccagcagctacagccccagctgcaccagcagcaaggcccccagaagcagcggcccctggagagccagaagatacagcctgtgcggcgccagcctgctgagctag

SEQ ID NO: 246071 - DNA, 432 bp, Artificial Sequence
  derived and/or modified sequence
atgagttgtttggacgttatgtaccaggtctacgggcctccacaaccttacttcgcggcagcctatacaccttatcaccagaaactggcatactatagcaaaatgcaggaggcacaggagtgtaatgcttcaccatcttcctctggttctggcagctcttcatttagttctcaaactccggcctctattaaagaggaagagggaagtcccgagaaagagcggccacccgaggctgagtatatcaactcaagatgcgtgctttttacctatttccagggagatatcagttctgtcgtggatgagcacttctctcgcgcgctgtcacaacctagtagctacagcccaagctgtacctcttctaaagcccctaggtcaagcgggccttggcgggcccggcggtattccctgtgtggagcgtcactgctgtcctag

SEQ ID NO: 246072 - DNA, 432 bp, Artificial Sequence
  derived and/or modified sequence
atgagctgcctggatgtgatgtaccaggtgtatggccccccccagccctactttgctgctgcctacaccccctaccaccagaagctggcctactacagcaagatgcaggaggcccaggagtgcaatgccagccccagcagcagcggcagcggcagcagcagcttcagcagccagaccccagccagcatcaaggaggaggagggcagccctgagaaggagaggcctcctgaggccgagtacatcaacagccgctgtgtgctcttcacctacttccagggcgacatcagctctgtggtggatgagcacttcagccgggccctgagccagcccagcagctacagccccagctgcaccagcagcaaggcccccaggagcagcggcccctggagggcccggcgctacagcctgtgtggggccagcctgctgtcctag

SEQ ID NO: 246073 - DNA, 432 bp, Artificial Sequence
  derived and/or modified sequence
atgagctgcctggacgtgatgtaccaggtgtacggccccccccagccttattttgccgcagcgtacacgccttaccaccagaagttagcttattactccaagatgcaggaggcacaggagtgcaatgccagtccaagctccagcggctcaggctctagcagctttagctcgcagacaccagcttctatcaaggaggaggaaggctcccctgagaaagaaagaccacctgaggctgaatatatcaatagtcgatgtgttttattcacctatttccagggcgacatcagtagtgtcgtggacgagcatttcagccgggccctgtcgcagccctcctcctattcaccgtcttgtaccagctccaaggctccacgatccagtggtccttggcgggcgaggcgctactccctgtgtggtgcctcccttttatcttag

SEQ ID NO: 246074 - DNA, 432 bp, Artificial Sequence
  derived and/or modified sequence
atgtcatgtctcgatgtcatgtatcaggtgtatggaccccctcagccatatttcgccgcagcctacactccctaccaccaaaaactagcttactactctaagatgcaggaggcgcaggagtgtaacgcaagcccctcctctagcgggagcgggtcatcaagcttcagcagccaaactcccgcttctatcaaggaggaggagggctcccccgagaaggagagacccccagaggcagaatacataaattcacgctgcgtgttatttacttattttcagggagacatctcaagcgtcgttgacgagcatttctctagagctctgagccaaccatctagctacagcccctcctgtacatcctctaaagcccctaggtcttcaggtccttggagggcacgccgatatagcttgtgcggtgcttccctgctaagctag

SEQ ID NO: 246075 - DNA, 1709 bp, Artificial Sequence
  derived and/or modified sequence
gcttctgccctggagcgcggtcgggagtaaaatcgcaggagtgggagggtagcgagccagctggattccgagccgcggagcgcgctggctttgctccgcctgatgactccagagcgcgggtccaagcgccgcccatgcagcacccctgagctccggggaaggagagttaatgaaaaaacacttaaccgtctccgctgcggagagtcatgagctgtctggatgttatgtaccaagtctatggtcctccgcagccctacttcgcagccgcctacaccccctaccaccagaaactagcctattattccaaaatgcaggaagcgcaggagtgcaatgccagccccagcagcagtggcagcggcagctcctcattttccagccaaaccccagccagtataaaagaggaagaaggcagcccagagaaagagcgcccaccagaggcagagtacatcaactcccgctgcgtcctcttcacttatttccagggggacatcagctccgtggtggatgaacatttcagcagggccctgagccaacccagcagctactctcctagctgtaccagcagcaaagcaccaaggagctctgggccctggcgagctcgtcgttattccctctgtggtgcatccctcctgagctgatctgctgacccagggtttccccttccccttcccttctgaccagccttggaggctcagcatctgtgcctctcactccgtggatgaggacatgggggaaggcagagacttcagacttctcagtgtgttgggaaaaccaaaaaccacaactacagaaattcatctaaaaataagtcctgctgctgaaagagcaaatccaaagactgagttatgtttaatgacttttggccgaatcactggaaatatctgtggtgagattgctgagtcaggtgatgtgatatcataagctttcttggaacgggggaaagaaaatgaaactttttggtgtgaatattttttatgctgatgtgaattattttgttaggtagtgtgattatagcactactactgtcagattttaaattgtatgtgtacttgcatctaagactgtggtagagaagtaaagagaagtcaattccttcttcctcacctctcagcctccagatcccttcctgcccatcccttccctacaatgcccactccagacgcaaagatacacttttttcctttggactgtgaacatggaagcctcagcctgaatgtgagtggcaagtggcttatctggagccacctgcccaagtcttactaaaatgcagctgttgttagacaactgttgaaaactccagaaatacatcacccaaggtggcagttctcagtatttggcagaacaattgcaattgcactgggtatattatatatatatatgtatgcatatatatcatattttttacaaggaacattttatgatgaaagaagaaacccttctctgccttctctcccacgaattctgtccctgtatcctctggatgtaaaaagcaaggagagaccccaactgtctccatggagaagaactaggaatcaccacaaggggaagaaatgtacatgaagtctccattacctcgaatttttttctcagtctcactggttgtgatttggtcactttagtgttgggacaggggaaagggtctgtgcgtgggcaaagctgaaggtgatgaggaagaagagacgaacattaaagatgtctatttactatga

SEQ ID NO: 246076 - protein, 471 aa, Artificial Sequence
  derived and/or modified sequence
MDERFNKWLLTPVLTLLFVVIMYQYVSPSCTSSCTNFGEQPRAGEAGPPAVPGPARRAQAPPEEWERRPQLPPPPRGPPEGPRGAAAPEEEDEEPGDPREGEEEEEEDEPDPEAPENGSLPRFVPRFNFSLKDLTRFVDFNIKGRDVIVFLHIQKTGGTTFGRHLVKNIRLEQPCSCKAGQKKCTCHRPGKKETWLFSRFSTGWSCGLHADWTELTNCVPAIMEKKDCPRNHSHTRNFYYITMLRDPVSRYLSEWKHVQRGATWKTSLHMCDGRSPTPDELPTCYPGDDWSGVSLREFMDCTYNLANNRQVRMLADLSLVGCYNLTFMNESERNTILLQSAKNNLKNMAFFGLTEFQRKTQFLFERTFNLKFISPFTQFNITRASNVEINEGARQRIEDLNFLDMQLYEYAKDLFQQRYHHTKQLEHQRDRQKRREERRLQREHRDHQWPKEDGAAEGTVTEDYNSQVVRW

SEQ ID NO: 246077 - DNA, 1416 bp, Artificial Sequence
  derived and/or modified sequence
atggacgagaggtttaataaatggctcctcacgccggtactgaccttgctgtttgtggtgatcatgtatcagtacgtgtccccttcctgtacctcaagctgcactaacttcggagaacagcctagagctggcgaagctgggccacccgcggtgccaggccccgctcgacgggcacaagccccacccgaagaatgggaaaggaggccgcagctgccgccgccaccccgaggacctccagagggccccagaggggctgcggctccagaggaagaggacgaggagcccggcgaccctcgggagggagaagaagaggaggaagaggacgagccagatccggaagcccccgagaatggttccctcccaagatttgtccctcgtttcaatttctcacttaaagatcttacaaggttcgttgacttcaatatcaaaggccgggacgttatcgtgttcttgcacatccagaaaactggaggaacaaccttcgggcgccacctcgtgaagaatatacggctggaacagccgtgttcctgcaaggcgggtcagaagaagtgtacctgccaccggccaggcaaaaaggaaacatggctgttcagccgattttcaactggttggtcatgcggattgcacgccgattggacggagctcacaaattgcgtgcctgctataatggaaaagaaggactgccctcgcaaccatagtcatactcgaaatttctactatattaccatgcttagagatcctgtctctagatatttaagtgaatggaagcacgttcaacgtggcgccacgtggaaaactagcctgcacatgtgtgatggacggtcccccactccggatgaactaccaacatgttaccctggggatgactggagtggggttagcctccgggagttcatggattgcacttacaatttagccaacaacagacaagtgcgcatgctcgccgacttgagcctggtcggctgctataatctcacgttcatgaacgaaagcgaacgcaataccatcttactgcagtctgccaagaacaatctcaaaaacatggccttctttgggcttaccgagtttcagcgaaaaacccaatttctgtttgaaagaacattcaacttgaagttcataagcccttttactcagttcaacattactcgggcgtcgaatgtggaaattaatgagggcgcccgtcaaagaattgaggacctcaacttcttggacatgcagctgtatgagtatgctaaggacctgttccagcaaagataccatcataccaagcagcttgagcaccagagggatcggcagaaaagacgggaggaacgtcgacttcagcgagaacaccgagaccaccagtggcctaaggaggacggcgctgctgaggggaccgtgaccgaagattataactcacaggtggtgcgctggtag

SEQ ID NO: 246078 - DNA, 1659 bp, Artificial Sequence
  derived and/or modified sequence
gcctgccggcctgagagcgggaccatggatgaaaggttcaacaagtggctgctgacgccggtgctcactctcctcttcgtggtcatcatgtaccagtacgtgtccccctcctgcaccagctcctgcaccaacttcggggagcagccccgcgcgggggaggccggcccgcccgccgtcccgggtcccgcccgccgggctcaggcgccgccggaggagtgggagcggcggccccagttgcccccgccgccccgggggccccccgagggacctcggggggccgcggcgccggaggaggaggacgaggagcccggagacccccgggagggggaggaagaggaggaggaagacgagccggaccccgaggccccggaaaacggctccctgccccgattcgtgccgcgcttcaacttcagcctgaaggacctgacccgcttcgtggatttcaacatcaaagggcgcgacgtgatcgtgttcctccacatccagaagacggggggcaccactttcggccggcacctggtgaagaacatccggctggagcagccttgtagctgcaaagcgggtcagaagaagtgcacctgccaccggcctggcaagaaggagacgtggctcttctcccgcttctccaccggctggagctgcgggctgcacgccgactggacggagctcaccaactgcgtgccggccatcatggagaagaaggactgtccccgcaaccacagccacaccaggaatttctattacatcacaatgttacgggatccagtgtcacgttacctgagcgagtggaaacatgtccagagaggggccacttggaaaacctctcttcatatgtgtgatggaagaagccccaccccagatgagctgcctacctgctaccctggggatgactggtctggggtcagcttgcgggagtttatggattgcacctacaacctggctaacaatcgccaggtgcgcatgctggctgacctcagcctggtgggctgctataacttgactttcatgaacgagagtgaaagaaacaccatcctgttgcagagtgcaaagaacaacctgaagaacatggccttctttgggctcactgagttccagaggaagacacagtttctctttgagagaacattcaacctcaagttcatctcccccttcacacagttcaacatcacgcgggcttctaacgtggagatcaacgagggtgcccgccaacgcattgaggatctaaacttcctggacatgcagctttacgagtatgcaaaagatctcttccagcagcgctaccaccacaccaagcagctagagcaccagagggaccgccagaagcggcgggaggagcggaggctgcagcgagagcacagggaccaccagtggcccaaagaagatggggctgcagaagggactgtcaccgaggactacaacagccaggtggtgagatggtgacctcctgccctctcctctctcaggagggggagggtgagcaggcacattgactttctgttgaggtaccttggagaagctgagccattctgaggacatctggctgtgtgtgcttgatttggacatcttcttccttctttgtcttcatttttatccagctggagattatccgtcttgttcttttttttcttgacattttgcaattggtgatattaagtaggg

SEQ ID NO: 246079 - DNA, 1416 bp, Artificial Sequence
  derived and/or modified sequence
atggatgagcgcttcaacaagtggctgctgacccctgtgctgaccctgctgtttgtggtgatcatgtaccagtatgtgagccccagctgcaccagcagctgcaccaactttggagagcagcccagggctggggaggccggccccccagctgtgcccggccctgcccggcgggcccaggcccctcctgaggagtgggagcggcggccccagctgcccccaccaccccggggccccccagagggccccagaggagctgctgcccctgaggaggaggatgaggagcccggggacccccgggagggggaggaggaggaggaggaggatgagccagaccctgaggccccagaaaatggcagcctgcccaggtttgtgccccgcttcaacttcagcctgaaggacctgaccaggtttgtggacttcaacatcaagggcagagatgtgattgtgttcctgcacatccagaagacaggaggcaccaccttcggccgccacctggtgaagaacatccggctggagcagccctgcagctgcaaggccggccagaagaagtgcacctgccacaggcctgggaagaaggagacctggctgttcagccgcttcagcacaggctggagctgtggcctgcacgccgactggacagagctgaccaactgtgtgcctgccatcatggagaagaaggactgccccaggaaccacagccacaccaggaacttctactacatcaccatgctgcgggaccctgtgagccgctacctgtctgagtggaagcacgtgcagagaggagccacctggaagaccagcctgcacatgtgtgatggccgcagccccaccccagatgagctgcccacctgctacccaggagatgactggagcggcgtgtccctgcgggagttcatggactgcacctacaacctggccaacaaccggcaggtgaggatgctggccgacctgagcctggtgggctgctacaacctgaccttcatgaatgaaagtgaaagaaacaccatcctgctgcagagcgccaagaacaacctgaagaacatggccttcttcggcctgacagagttccagaggaagacccagttcctgtttgagaggaccttcaacctgaagttcatcagccccttcacccagttcaacatcacccgggccagcaatgtggagatcaatgaaggagcccggcagagaattgaggacctgaacttcctggacatgcagctgtatgaatatgccaaggacctcttccagcagcgctaccaccacaccaagcagctggagcaccagagggaccggcagaagaggcgggaggagcggcggctgcagcgggagcaccgggaccaccagtggcccaaggaggatggagctgctgagggcaccgtgacagaggactacaacagccaggtggtgcgctggtag

SEQ ID NO: 246080 - DNA, 1416 bp, Artificial Sequence
  derived and/or modified sequence
atggacgagcggttcaacaagtggctgctgacccccgtgctgaccctgctgtttgtagtgattatgtaccaatacgtctcaccctcctgcacaagtagttgcacgaatttcggggagcagcccagggccggcgaggctggccctccggctgtacctggccccgctcggagagctcaggctccgccagaggagtgggaaaggagaccacagttgccgccaccgcctcgaggccctcccgagggaccaaggggcgcggccgctccagaggaagaagatgaggaaccgggtgatccccgcgaaggggaggaagaggaggaggaggatgagccggatccggaagctccagagaatgggtctctaccacgcttcgtgcctcgctttaacttcagtcttaaagatcttacacggttcgtcgatttcaacattaagggcagggatgtgatcgtcttcctccacattcaaaaaaccgggggaacaacatttggcagacacctggtgaagaacattaggctcgaacagccatgctcatgcaaagctggccaaaaaaagtgcacatgccatcgccccgggaaaaaagagacttggcttttctctaggttctccacaggatggtcctgcggactccatgccgactggacagaactaaccaactgcgtgcctgccataatggagaagaaagactgcccgagaaatcattctcatacaagaaacttttattacatcaccatgctccgagaccctgtgtcccgctacctctccgagtggaaacacgtgcagagaggcgccacctggaagacaagtcttcatatgtgcgacggacgctccccaactcctgatgagctaccaacttgctaccccggcgacgattggtcgggtgtgtctctcagggagtttatggactgtacatacaatttggcaaataaccggcaggttcggatgctggcggatctgagcctcgtgggttgctacaacctgaccttcatgaacgaaagcgagcgcaacaccatattattacagagcgccaaaaataatttaaaaaacatggcattcttcggcctgacagagtttcagaggaagacccagttcttgtttgagcgcaccttcaatctgaagtttatctctccgtttactcaattcaatatcaccagggcaagcaatgtggagatcaatgagggcgctcgccagaggatcgaagacctgaattttctggatatgcagctatatgagtacgccaaggacctgtttcaacagcgctatcaccatactaagcaacttgagcaccagagggaccgtcaaaagagacgcgaggagcggagactacagcgtgaacaccgggaccatcagtggcccaaggaagatggggctgcagagggaaccgtcaccgaggactacaactcacaggtggtccgctggtag

SEQ ID NO: 246081 - DNA, 1416 bp, Artificial Sequence
  derived and/or modified sequence
atggatgagagatttaataagtggctgttgactccggtcctgaccctcctgttcgtggtgatcatgtaccagtatgtttcaccatcttgtacatccagctgtactaactttggggagcagccaagggccggagaagctggaccacctgcagtgcccggacccgcaaggcgggctcaggccccacccgaggagtgggagcgacggcctcaactaccacccccacccagggggcctcctgaaggacctcgcggtgctgcggcaccagaggaagaggacgaggagcccggagaccctcgagagggcgaggaagaagaagaagaggacgagcctgacccagaggcaccggaaaacggtagcttaccaagattcgtccccaggttcaactttagccttaaagatctcactagattcgttgacttcaatataaaggggagggacgtgatcgtgtttctccacattcaaaagaccgggggaacgacctttgggcgtcacctcgtgaaaaacataaggctggagcagccatgttcctgcaaagctggtcagaagaagtgtacttgccacaggccgggaaaaaaagagacatggttgttcagccggttctcaaccggttggtcatgtggcctccacgccgattggactgagcttaccaattgcgtcccagccatcatggaaaagaaggactgtccccgaaaccattcccatacccggaacttttactatatcacaatgctgagggatcccgttagtagatatctgtcagagtggaaacacgtacagagaggggcaacttggaagacatcactgcacatgtgtgatgggcgttcacctacccccgatgaacttcccacttgttacccaggggacgattggagtggcgtgagtttgagggagttcatggactgcacctataacctggcaaataatagacaggtgcgaatgctcgctgacctgagcctcgtaggctgctacaacctgaccttcatgaatgagtcagagaggaatacaattctactgcagtctgcaaagaacaaccttaagaatatggcattttttggtctgaccgaattccagaggaaaacgcagttcctgttcgagcggacatttaatctgaaattcatatcccctttcacacaatttaacattacacgggcaagcaacgtggaaattaacgaaggggcacgacagagaattgaggacttaaacttcctggatatgcagctttatgagtacgccaaagatctgttccagcagcgctaccaccacacgaagcaattggaacaccagcgggacagacagaaacgcagggaggagcgcaggctccaacgagagcaccgcgaccatcaatggccaaaggaggatggagccgctgaggggaccgtcaccgaggactataacagccaggtcgtaaggtggtag

SEQ ID NO: 246082 - DNA, 1416 bp, Artificial Sequence
  derived and/or modified sequence
atggacgagagattcaacaagtggctgctgacccccgtgctgaccctgctgttcgtggtgatcatgtaccagtacgtgagccccagctgcaccagcagctgcaccaacttcggcgagcagcccagagccggcgaggccggcccccccgccgtgcccggccccgccagaagagcccaggccccccccgaggagtgggagagaagaccccagctgccccccccccccagaggcccccccgagggccccagaggcgccgccgcccccgaggaggaggacgaggagcccggcgaccccagagagggcgaggaggaggaggaggaggacgagcccgaccccgaggcccccgagaacggcagcctgcccagattcgtgcccagattcaacttcagcctgaaggacctgaccagattcgtggacttcaacatcaagggcagagacgtgatcgtgttcctgcacatccagaagaccggcggcaccaccttcggcagacacctggtgaagaacatcagactggagcagccctgcagctgcaaggccggccagaagaagtgcacctgccacagacccggcaagaaggagacctggctgttcagcagattcagcaccggctggagctgcggcctgcacgccgactggaccgagctgaccaactgcgtgcccgccatcatggagaagaaggactgccccagaaaccacagccacaccagaaacttctactacatcaccatgctgagagaccccgtgagcagatacctgagcgagtggaagcacgtgcagagaggcgccacctggaagaccagcctgcacatgtgcgacggcagaagccccacccccgacgagctgcccacctgctaccccggcgacgactggagcggcgtgagcctgagagagttcatggactgcacctacaacctggccaacaacagacaggtgagaatgctggccgacctgagcctggtgggctgctacaacctgaccttcatgaacgagagcgagagaaacaccatcctgctgcagagcgccaagaacaacctgaagaacatggccttcttcggcctgaccgagttccagagaaagacccagttcctgttcgagagaaccttcaacctgaagttcatcagccccttcacccagttcaacatcaccagagccagcaacgtggagatcaacgagggcgccagacagagaatcgaggacctgaacttcctggacatgcagctgtacgagtacgccaaggacctgttccagcagagataccaccacaccaagcagctggagcaccagagagacagacagaagagaagagaggagagaagactgcagagagagcacagagaccaccagtggcccaaggaggacggcgccgccgagggcaccgtgaccgaggactacaacagccaggtggtgagatggtag

SEQ ID NO: 246083 - protein, 720 aa, Artificial Sequence
  derived and/or modified sequence
MPVPWFLLSLALGRSPVVLSLERLVGPQDATHCSPGLSCRLWDSDILCLPGDIVPAPGPVLAPTHLQTELVLRCQKETDCDLCLRVAVHLAVHGHWEEPEDEEKFGGAADSGVEEPRNASLQAQVVLSFQAYPTARCVLLEVQVPAALVQFGQSVGSVVYDCFEAALGSEVRIWSYTQPRYEKELNHTQQLPDCRGLEVWNSIPSCWALPWLNVSADGDNVHLVLNVSEEQHFGLSLYWNQVQGPPKPRWHKNLTGPQIITLNHTDLVPCLCIQVWPLEPDSVRTNICPFREDPRAHQNLWQAARLQLLTLQSWLLDAPCSLPAEAALCWRAPGGDPCQPLVPPLSWENVTVDKVLEFPLLKGHPNLCVQVNSSEKLQLQECLWADSLGPLKDDVLLLETRGPQDNRSLCALEPSGCTSLPSKASTRAARLGEYLLQDLQSGQCLQLWDDDLGALWACPMDKYIHKRWALVWLACLLFAAALSLILLLKKDHAKGWLRLLKQDVRSGAAARGRAALLLYSADDSGFERLVGALASALCQLPLRVAVDLWSRRELSAQGPVAWFHAQRRQTLQEGGVVVLLFSPGAVALCSEWLQDGVSGPGAHGPHDAFRASLSCVLPDFLQGRAPGSYVGACFDRLLHPDAVPALFRTVPVFTLPSQLPDFLGALQQPRAPRSGRLQERAEQVSRALQPALDSYFHPPGTPAPGRGVGPGAGPGAGDGT

SEQ ID NO: 246084 - DNA, 2163 bp, Artificial Sequence
  derived and/or modified sequence
atgccggtgccgtggtttctcctgtccctggcccttggcagatcacctgtggtgctgagcttggaaagattagtgggacctcaagacgctactcactgctctcccggactgtcctgcaggctctgggatagtgacatcctctgcctgccaggcgatattgttcctgctcctgggccagtcctcgctcctactcaccttcagaccgagctggttctccgctgccagaaagagactgactgcgacttgtgcttacgagtggctgtgcacctggctgtgcatgggcattgggaggaacccgaggacgaggaaaaattcggaggggctgccgatagtggggtggaggagcccaggaacgcttctttgcaggcgcaggttgtactgtcttttcaggcatatcctactgccaggtgtgtgctcttagaggttcaggtccccgccgcattggtgcagtttggacagagtgtgggcagcgtcgtgtatgattgtttcgaggcggcactcggcagtgaagtgaggatctggagctacacacagccaagatacgaaaaagaactgaatcacacccagcaactcccagactgcagagggctggaggtctggaatagcatcccctcctgctgggcactcccatggctgaatgtcagtgcggatggggataatgtacacctggtcctgaacgtctcagaggaacagcatttcggactcagcctgtactggaaccaggtgcaaggtcctcccaagcctcgatggcacaagaatctgaccggcccccagataattacactgaaccataccgacctcgtgccttgtctttgtatccaagtgtggccgctcgaacccgattctgttcgcacaaatatttgtccgtttagagaggatccccgagcccaccaaaacctttggcaggcggcccgccttcagcttctgacactccagagctggctgttggacgctccttgttctctgccagcagaagcagccctctgttggagggcaccaggtggagacccatgtcagccactcgttccaccactgtcttgggagaatgtaaccgtggacaaggtcctggagttccccctgctcaaaggccacccaaatctctgcgtccaggtgaacagtagcgagaagcttcagctacaagagtgtctttgggccgacagcctgggtccgctcaaggatgacgtcctcctacttgagacacgcggaccccaagacaatcggtctctgtgtgctctggagcccagtggttgcacctctctgccatcaaaggcgtccacacgggccgcacggctaggcgaataccttttacaggacctgcagtctggtcagtgtttgcagctctgggacgatgaccttggcgctctctgggcatgccccatggacaaatacatccacaagcggtgggccttggtttggttggcctgtctgctcttcgccgctgctttatctctgatactcctgttgaaaaaggaccacgccaaaggctggcttagactgctgaaacaggacgtgcggtctggcgccgccgcacgagggagagccgcactgctcctttactcagccgacgatagtgggttcgagcgcctcgtgggggcgctggccagtgccctgtgccagctacccttaagagtggcagttgacttatggagtagaagggaactttccgcccagggcccggttgcttggttccatgctcagcgacgccagacccttcaagagggcggagtggtcgtactgttattttccccgggtgctgtggccttgtgttccgagtggttgcaggatggagtgagcggaccaggagcacatggccctcatgatgcatttcgggcctctctctcctgtgttctgcctgattttttacaaggtcgcgcccctgggtcatacgtcggcgcttgcttcgaccggttactgcatcccgatgccgtccccgctctcttcagaactgttccagtgttcactttaccaagtcagctgcccgactttctcggcgccctccagcagcctcgcgccccacggtccggcagactgcaggagagagctgagcaagtgagcagggctttacaaccggccttggacagctacttccacccacctggaaccccagccccaggacgtggagtggggccaggcgcaggccctggcgccggcgatgggacgtag

SEQ ID NO: 246085 - DNA, 2388 bp, Artificial Sequence
  derived and/or modified sequence
ggaagtaggaggagagtcaggactcccaggacagagagtgcacaaactacccagcacagccccctccgccccctctggaggctgaagagggattccagcccctgccacccacagacacgggctgactggggtgtctgccccccttgggggggggcagcacagggcctcaggcctgggtgccacctggcacctagaagatgcctgtgccctggttcttgctgtccttggcactgggccgaagcccagtggtcctttctctggagaggcttgtggggcctcaggacgctacccactgctctccgggcctctcctgccgcctctgggacagtgacatactctgcctgcctggggacatcgtgcctgctccgggccccgtgctggcgcctacgcacctgcagacagagctggtgctgaggtgccagaaggagaccgactgtgacctctgtctgcgtgtggctgtccacttggccgtgcatgggcactgggaagagcctgaagatgaggaaaagtttggaggagcagctgactcaggggtggaggagcctaggaatgcctctctccaggcccaagtcgtgctctccttccaggcctaccctactgcccgctgcgtcctgctggaggtgcaagtgcctgctgcccttgtgcagtttggtcagtctgtgggctctgtggtatatgactgcttcgaggctgccctagggagtgaggtacgaatctggtcctatactcagcccaggtacgagaaggaactcaaccacacacagcagctgcctgactgcagggggctcgaagtctggaacagcatcccgagctgctgggccctgccctggctcaacgtgtcagcagatggtgacaacgtgcatctggttctgaatgtctctgaggagcagcacttcggcctctccctgtactggaatcaggtccagggccccccaaaaccccggtggcacaaaaacctgactggaccgcagatcattaccttgaaccacacagacctggttccctgcctctgtattcaggtgtggcctctggaacctgactccgttaggacgaacatctgccccttcagggaggacccccgcgcacaccagaacctctggcaagccgcccgactgcaactgctgaccctgcagagctggctgctggacgcaccgtgctcgctgcccgcagaagcggcactgtgctggcgggctccgggtggggacccctgccagccactggtcccaccgctttcctgggagaacgtcactgtggacaaggttctcgagttcccattgctgaaaggccaccctaacctctgtgttcaggtgaacagctcggagaagctgcagctgcaggagtgcttgtgggctgactccctggggcctctcaaagacgatgtgctactgttggagacacgaggcccccaggacaacagatccctctgtgccttggaacccagtggctgtacttcactacccagcaaagcctccacgagggcagctcgccttggagagtacttactacaagacctgcagtcaggccagtgtctgcagctatgggacgatgacttgggagcgctatgggcctgccccatggacaaatacatccacaagcgctgggccctcgtgtggctggcctgcctactctttgccgctgcgctttccctcatcctccttctcaaaaaggatcacgcgaaagggtggctgaggctcttgaaacaggacgtccgctcgggggcggccgccaggggccgcgcggctctgctcctctactcagccgatgactcgggtttcgagcgcctggtgggcgccctggcgtcggccctgtgccagctgccgctgcgcgtggccgtagacctgtggagccgtcgtgaactgagcgcgcaggggcccgtggcttggtttcacgcgcagcggcgccagaccctgcaggagggcggcgtggtggtcttgctcttctctcccggtgcggtggcgctgtgcagcgagtggctacaggatggggtgtccgggcccggggcgcacggcccgcacgacgccttccgcgcctcgctcagctgcgtgctgcccgacttcttgcagggccgggcgcccggcagctacgtgggggcctgcttcgacaggctgctccacccggacgccgtacccgcccttttccgcaccgtgcccgtcttcacactgccctcccaactgccagacttcctgggggccctgcagcagcctcgcgccccgcgttccgggcggctccaagagagagcggagcaagtgtcccgggcccttcagccagccctggatagctacttccatcccccggggactcccgcgccgggacgcggggtgggaccaggcgcgggacctggggcgggggacgggacttaaataaaggcagacgctgtttttctaccca

SEQ ID NO: 246086 - DNA, 2163 bp, Artificial Sequence
  derived and/or modified sequence
atgcctgtgccctggttcctgctgagcctggccctgggccgcagccctgtggtgctgagcctggagcggctggtgggcccccaggatgccacccactgcagccctggcctgagctgccgcctgtgggacagcgacatcctgtgcctgcccggggacatcgtgcctgcccctggccctgtgctggcccccacccacctgcagacagagctggtgctgcgctgccagaaggagacagactgtgacctgtgcctgcgggtggccgtgcacctggccgtgcacggccactgggaggagccagaagatgaggagaagtttggaggagctgctgacagcggcgtggaggagcccagaaatgccagcctgcaggcccaggtggtgctgtccttccaggcctaccccacagcccgctgtgtgctgctggaggtgcaggtgcctgctgccctggtgcagtttggccagagcgtgggctctgtggtgtatgactgctttgaagctgccctgggcagcgaggtgcgcatctggagctacacccagcccaggtatgagaaggagctgaaccacacccagcagctgcctgactgccggggcctggaggtgtggaacagcatccccagctgctgggccctgccctggctgaatgtgtctgcagatggagacaacgtgcacctggtgctgaatgtgtctgaggagcagcacttcggcctgagcctgtactggaaccaggtgcagggcccccccaagccccgctggcacaagaacctgaccggcccccagatcatcaccctgaaccacacagacctggtgccctgcctgtgcatccaggtgtggcccctggagccagacagcgtgaggaccaacatctgccccttccgggaggacccccgggcccaccagaacctgtggcaggccgcccggctgcagctgctgaccctgcagagctggctgctggatgccccctgcagcctgcctgctgaggccgccctgtgctggagggcccctggaggagacccctgccagcccctggtgccccccctgtcctgggagaatgtgacagtggacaaggtgctggagttccccctgctgaagggccaccccaacctgtgtgtgcaggtgaacagcagcgagaagctgcagctgcaggagtgcctgtgggccgacagcctgggccccctgaaggatgatgtgctgctgctggagacccggggcccccaggacaacagaagcctgtgtgccctggagcccagcggctgcaccagcctgcccagcaaggccagcacccgggccgcccggctgggggagtacctgctgcaggacctgcagagcggccagtgcctgcagctgtgggatgatgacctgggcgccctgtgggcctgccccatggacaagtacatccacaagcgctgggccctggtgtggctggcctgcctgctgtttgctgctgccctgagcctcatcctgctgctgaagaaggaccacgccaagggctggctgcggctgctgaagcaggatgtgcgcagcggggctgctgcccggggccgggccgccctgctgctgtacagcgcagatgacagcggctttgagcggctggtgggcgccctggccagcgccctgtgccagctgcccctgcgggtggccgtggacctgtggagcagaagagagctgagcgcccagggccctgtggcctggttccacgcccagaggcggcagaccctgcaggagggcggcgtggtggtgctgctcttcagccctggagctgtggccctgtgcagcgagtggctgcaggatggagtgtctggccctggggcccacggcccccatgatgccttccgggccagcctgagctgtgtgctgcctgacttcctgcagggccgggcccctggcagctatgtgggcgcctgctttgaccggctgctgcacccagatgctgtgcctgccctcttcagaacagtgcctgtgttcaccctgcccagccagctgcctgacttcctgggcgccctgcagcagccccgggcccccaggagcggccgcctgcaggagagagctgagcaggtgtcccgggccctgcagcctgccctggacagctacttccaccccccaggcaccccagcccctggccggggcgtgggccctggggccggccctggagctggagatggcacctag

SEQ ID NO: 246087 - DNA, 2163 bp, Artificial Sequence
  derived and/or modified sequence
atgcccgtgccctggttcctgctgagcctggccctgggccggagccccgtggtactgtcactcgaacgacttgttggaccacaagatgcgacacattgcagccccggcttgtcatgtcgtctatgggattctgacattctttgtttaccaggtgacatcgtgcccgcgcctgggccagttctggcaccgacccatctccagaccgagctggtactgagatgccaaaaggaaaccgactgcgacctctgcctgagggttgccgttcacctagctgtgcacgggcattgggaagagccagaggacgaggagaaatttggcggcgccgccgactctggggtcgaggaaccaagaaatgctagcctccaggcccaggttgtgctgtcctttcaagcctacccaacggctcgatgtgtgttattggaggtccaggttccagcggcactggtgcagttcggccaaagcgtgggcagtgtggtttacgactgttttgaagccgcactgggatccgaagtgcgaatctggagttatacccagccccgctatgaaaaggagctgaaccacacccaacagctgcccgattgtaggggactcgaggtgtggaattcaatcccttcctgctgggccctgccgtggcttaatgtgagcgcagacggcgataatgttcatctcgtgctgaacgtgtcagaagaacaacactttggcttgagtctgtactggaatcaagtccaggggcccccgaaaccaagatggcataaaaacttgacagggccacagataattaccctgaatcacaccgaccttgtgccctgtttatgtatccaggtctggccattggaaccagatagtgtgcgcacgaatatctgtccctttcgcgaagaccctagagcgcatcagaatttgtggcaagccgcccggctccagctgcttacactgcagtcatggcttctggatgctccttgcagcctgcctgctgaggctgctctgtgctggcgcgcccctggcggcgatccttgccaacctctggtacccccactaagttgggagaatgtgaccgtagacaaggtgcttgagttccccctcctgaaggggcaccccaatctgtgtgtgcaggtgaatagctcggagaaacttcaactacaggaatgtctgtgggctgatagccttggacctctcaaggacgatgtcttgctgctagagactcggggcccgcaggacaataggtccctgtgcgccctggagcccagtggctgcacttccctcccctctaaggcttctaccagagcagccagactgggcgagtacctcttgcaggacttgcagtctgggcagtgtcttcagttgtgggatgacgatctgggggccctgtgggcttgccctatggataagtacattcacaaacgctgggcccttgtgtggctcgcttgcttgctctttgcggccgctctgagcttgatcctgctcctcaaaaaggaccacgcaaaaggatggctgaggcttcttaagcaagatgtgcggtcaggcgcggccgcgagaggtagggcagcactgctactgtatagcgccgatgatagcggttttgagcgccttgtgggggcactggcttccgcactgtgtcagctccccctccgcgtggccgtggacctatggagccgacgggagctgagtgcccaggggcctgtggcttggttccacgcccagagacgccagactctgcaggaaggcggtgtggttgttttgttatttagccccggcgccgtcgctctgtgctcagagtggctccaggatggagtgtctggtccaggagcccatggacctcatgatgcctttcgcgctagtctctcttgcgtcttacccgatttcctgcaaggccgagcaccaggatcttatgttggggcgtgctttgaccgcctgctccaccccgatgccgtgccagccctcttcagaaccgtgccagtgtttactctgcccagccagctgcctgatttcctcggagcccttcaacaacctcgcgcgccacgcagcgggcgcttgcaggagcgggccgaacaggtgtctagggcccttcaacctgccttggactcctactttcatcccccaggaactccagctcctgggaggggcgtgggccccggcgccgggccaggtgcaggcgatgggacatag

SEQ ID NO: 246088 - DNA, 2163 bp, Artificial Sequence
  derived and/or modified sequence
atgccagtcccttggtttctattatctctcgccttaggcagatcaccagtggtgttaagtctggagcgactggtgggccctcaggacgctacccattgttcgcccggactttcctgccgactctgggacagtgatatcctgtgcctgcccggagacatcgtaccagcccctggacctgttcttgccccaacccatctacaaaccgagctcgtcctgcggtgtcagaaagaaactgactgtgatctttgcctgcgggtggcagtgcatctagctgttcatggacactgggaagagccagaggacgaggagaaattcgggggtgctgccgactctggggttgaagagcctagaaacgcttcactgcaggctcaagtagtgctgtccttccaggcttatcctaccgctcggtgcgtcctcctggaggtacaggtgccagcggcattggtgcagttcggtcagtctgtgggaagtgttgtgtacgactgcttcgaagcggcactcgggtctgaggttcggatctggtcgtacacccagccacgctatgagaaggaactcaatcacacccagcagttgccagactgtcgtggactcgaagtctggaattctattccgagctgttgggcactgccctggctgaacgtgtctgctgatggtgataacgttcacctggtgctcaatgtatccgaagaacagcactttggactgtctctgtattggaatcaagttcagggaccacccaagcccagatggcacaagaacctcacgggcccacagatcattactctcaaccatactgatctggtgccatgcctttgcatccaggtgtggccccttgagcctgattcagtcagaaccaatatttgtcctttccgtgaggacccacgggctcaccaaaatttgtggcaggcagcgagactccaactgctgaccctacagtcttggcttctcgacgctccttgttcattgcccgcagaagctgccttgtgctggagggcccctggaggagacccttgtcaacctctggtccctcctcttagctgggaaaacgtgaccgtcgataaagtcctcgagtttcccttgctcaaaggccatcccaatctgtgtgtacaggtgaatagtagcgagaaactccagctacaggaatgcctctgggcggatagtctcggccctctgaaggacgacgtcttgctgctggagacgaggggaccccaggataatcgttccctttgtgctctggaacccagcggatgcacgtccctgccctccaaggcttctactagagcagcacgactgggcgaatatctgctccaggatctccaaagcgggcagtgtctgcagttatgggacgacgatctgggagcactctgggcgtgcccaatggacaaatacattcataagaggtgggctctggtttggctggcatgtctgctgttcgccgcagcactttcgctgattttgctgctgaagaaagaccatgctaaaggctggctgagactgttgaaacaggacgtgagatcaggagccgctgccagaggcagggcagctctgctgctgtatagcgccgacgacagcggatttgaacgtctagtcggggctctggcttcagcactgtgtcagctgcccctgagagtcgccgtagacttgtggagcagacgagagctcagtgcacaagggcctgttgcctggtttcacgctcagaggcggcagacactgcaggagggcggtgtggtggtattgctattttcccctggagcagtggctttgtgtagcgaatggcttcaggacggcgtcagcggtcccggtgcacacgggcctcatgatgcattcagagcatcactgagctgcgtccttccagactttttgcagggaagggcgcctggatcttacgtcggggcatgctttgacagactgttgcatcctgatgccgtcccagctttattcagaactgttccagtatttactctgccatctcaactgcctgactttttaggcgctctacaacagccacgtgctcctcgtagtggtcgcctgcaggaaagggcagaacaggtgagcagggcccttcaacctgcattagacagctatttccatccacccggtacacctgcccctggcaggggcgtaggccctggcgctggccctggagccggagatgggacatag

SEQ ID NO: 246089 - DNA, 2163 bp, Artificial Sequence
  derived and/or modified sequence
atgcccgtgccctggttcctgctgagcctggccctgggcagaagccccgtggtgctgagcctggagagactggtgggcccccaggacgccacccactgcagccccggcctgagctgcagactgtgggacagcgacatcctgtgcctgcccggcgacatcgtgcccgcccccggccccgtgctggcccccacccacctgcagaccgagctggtgctgagatgccagaaggagaccgactgcgacctgtgcctgagagtggccgtgcacctggccgtgcacggccactgggaggagcccgaggacgaggagaagttcggcggcgccgccgacagcggcgtggaggagcccagaaacgccagcctgcaggcccaggtggtgctgagcttccaggcctaccccaccgccagatgcgtgctgctggaggtgcaggtgcccgccgccctggtgcagttcggccagagcgtgggcagcgtggtgtacgactgcttcgaggccgccctgggcagcgaggtgagaatctggagctacacccagcccagatacgagaaggagctgaaccacacccagcagctgcccgactgcagaggcctggaggtgtggaacagcatccccagctgctgggccctgccctggctgaacgtgagcgccgacggcgacaacgtgcacctggtgctgaacgtgagcgaggagcagcacttcggcctgagcctgtactggaaccaggtgcagggcccccccaagcccagatggcacaagaacctgaccggcccccagatcatcaccctgaaccacaccgacctggtgccctgcctgtgcatccaggtgtggcccctggagcccgacagcgtgagaaccaacatctgccccttcagagaggaccccagagcccaccagaacctgtggcaggccgccagactgcagctgctgaccctgcagagctggctgctggacgccccctgcagcctgcccgccgaggccgccctgtgctggagagcccccggcggcgacccctgccagcccctggtgccccccctgagctgggagaacgtgaccgtggacaaggtgctggagttccccctgctgaagggccaccccaacctgtgcgtgcaggtgaacagcagcgagaagctgcagctgcaggagtgcctgtgggccgacagcctgggccccctgaaggacgacgtgctgctgctggagaccagaggcccccaggacaacagaagcctgtgcgccctggagcccagcggctgcaccagcctgcccagcaaggccagcaccagagccgccagactgggcgagtacctgctgcaggacctgcagagcggccagtgcctgcagctgtgggacgacgacctgggcgccctgtgggcctgccccatggacaagtacatccacaagagatgggccctggtgtggctggcctgcctgctgttcgccgccgccctgagcctgatcctgctgctgaagaaggaccacgccaagggctggctgagactgctgaagcaggacgtgagaagcggcgccgccgccagaggcagagccgccctgctgctgtacagcgccgacgacagcggcttcgagagactggtgggcgccctggccagcgccctgtgccagctgcccctgagagtggccgtggacctgtggagcagaagagagctgagcgcccagggccccgtggcctggttccacgcccagagaagacagaccctgcaggagggcggcgtggtggtgctgctgttcagccccggcgccgtggccctgtgcagcgagtggctgcaggacggcgtgagcggccccggcgcccacggcccccacgacgccttcagagccagcctgagctgcgtgctgcccgacttcctgcagggcagagcccccggcagctacgtgggcgcctgcttcgacagactgctgcaccccgacgccgtgcccgccctgttcagaaccgtgcccgtgttcaccctgcccagccagctgcccgacttcctgggcgccctgcagcagcccagagcccccagaagcggcagactgcaggagagagccgagcaggtgagcagagccctgcagcccgccctggacagctacttccacccccccggcacccccgcccccggcagaggcgtgggccccggcgccggccccggcgccggcgacggcacctag

SEQ ID NO: 246090 - protein, 791 aa, Artificial Sequence
  derived and/or modified sequence
MPVPWFLLSLALGRSPVVLSLERLVGPQDATHCSPVSLEPWGDEERLRVQFLAQQSLSLAPVTAATARTALSGLSGADGRREERGRGKSWVCLSLGGSGNTEPQKKGLSCRLWDSDILCLPGDIVPAPGPVLAPTHLQTELVLRCQKETDCDLCLRVAVHLAVHGHWEEPEDEEKFGGAADSGVEEPRNASLQAQVVLSFQAYPTARCVLLEVQVPAALVQFGQSVGSVVYDCFEAALGSEVRIWSYTQPRYEKELNHTQQLPDCRGLEVWNSIPSCWALPWLNVSADGDNVHLVLNVSEEQHFGLSLYWNQVQGPPKPRWHKNLTGPQIITLNHTDLVPCLCIQVWPLEPDSVRTNICPFREDPRAHQNLWQAARLQLLTLQSWLLDAPCSLPAEAALCWRAPGGDPCQPLVPPLSWENVTVDKVLEFPLLKGHPNLCVQVNSSEKLQLQECLWADSLGPLKDDVLLLETRGPQDNRSLCALEPSGCTSLPSKASTRAARLGEYLLQDLQSGQCLQLWDDDLGALWACPMDKYIHKRWALVWLACLLFAAALSLILLLKKDHAKGWLRLLKQDVRSGAAARGRAALLLYSADDSGFERLVGALASALCQLPLRVAVDLWSRRELSAQGPVAWFHAQRRQTLQEGGVVVLLFSPGAVALCSEWLQDGVSGPGAHGPHDAFRASLSCVLPDFLQGRAPGSYVGACFDRLLHPDAVPALFRTVPVFTLPSQLPDFLGALQQPRAPRSGRLQERAEQVSRALQPALDSYFHPPGTPAPGRGVGPGAGPGAGDGT

SEQ ID NO: 246091 - DNA, 2376 bp, Artificial Sequence
  derived and/or modified sequence
atgccggtgccgtggtttctgctctctcttgcactggggagaagccccgtggtgctctcgctggagcgactggtgggcccccaggatgccacacactgttctcccgtatccctcgagccgtggggggatgaggagcgcctcagggtacagtttctggcacagcagtccctgagtttggcacccgtgactgccgcgactgccaggacggctttgagcggcttgagcggtgccgacggaagacgcgaagaaagaggacggggaaagtcatgggtttgtctctccctgggaggtagcggaaatacggaacctcagaagaagggcctctcatgcagactatgggactcggacattctgtgtctgcctggcgacattgtaccggcacccgggcccgtcctggcacccactcacctgcagaccgaactagtgctgcgatgccagaaggagaccgactgcgatttgtgcctgcgcgtagccgttcatctagctgtgcatggccactgggaggaaccggaggacgaggaaaagttcgggggagctgcggactccggggtggaggagcctcggaatgccagcctccaagcccaagttgtgctgtcattccaggcgtatccaactgctcgctgtgttcttctcgaggtgcaggtacctgccgccctggtacaatttggtcaaagcgttggaagcgtggtctatgattgtttcgaagctgctctggggtccgaagtaaggatttggtcatatacgcagcctcggtatgaaaaggagctaaatcacacacagcaactgcccgattgtcgcggacttgaggtctggaatagcatcccgtcgtgttgggctcttccatggcttaacgtgtcagccgatggcgacaatgtacacctggttttaaacgtaagtgaggaacagcattttgggctgagcctgtattggaatcaagtgcagggaccacctaaacctagatggcacaagaaccttaccggcccccagatcattactctcaaccatacagacctagtaccgtgtttatgcatacaggtttggcccctggagccggattcggtccgtactaacatctgtccatttcgtgaggaccccagagcgcatcagaatttgtggcaggctgctcgcctccaactgctaactctgcagagttggctactggacgctccttgctctctcccggccgaggcggcgctgtgctggcgcgccccaggaggagacccttgtcagccactcgtgccaccgctgtcatgggagaatgtgactgtcgacaaggtcctcgaattcccactccttaagggtcaccctaatctatgcgtgcaggtcaattctagtgaaaagctgcagttacaggaatgcctgtgggccgacagcctcgggccactcaaagatgatgtgcttctcttggagacgcggggacctcaggacaatcggtcactgtgtgccctagagcctagtggctgtacaagcttaccgtcaaaagccagcacccgggctgcaagacttggggagtacctgctccaggacctgcaatctggccaatgcctgcagttgtgggacgatgacctgggagctctttgggcttgcccgatggacaaatacatacataaacggtgggccctggtctggctcgcctgcttgctgtttgccgccgcactgtcactgatcctgctcctgaaaaaagaccacgcaaaaggctggctgcggttgctgaaacaggacgttcggagtggtgccgccgcaagaggccgagctgcactgcttctgtactcagcggacgattccggcttcgagcgcctcgtgggtgcgcttgctagcgccctttgtcaactgcctctgagagtggctgtggacttatggtcaaggcgcgagttatctgcccagggacccgtcgcctggttccatgcccagaggaggcagactttacaggagggcggcgttgtggtgctactgttctccccgggagccgtcgcactatgcagcgagtggctacaggatggagtgagtggcccaggggctcatggaccccacgacgctttccgcgcgagcctgagctgtgtcctgcccgacttcctgcaggggcgggcccctgggagttatgtgggcgcatgcttcgacagactcctccatccagatgcggtcccggcactcttcagaactgtacccgttttcacgttaccgtcacaactgcccgatttcctgggcgctctgcaacagccaagagcacccagatctggaagactacaagaaagagccgagcaggtgtccagagctctgcagcccgctctggatagttactttcatcccccaggcactccagcgccagggaggggcgtgggccccggtgctggccctggggctggcgacggaacatag

SEQ ID NO: 246092 - DNA, 2621 bp, Artificial Sequence
  derived and/or modified sequence
aaaacgaaagcactccgtgctggaagtaggaggagagtcaggactcccaggacagagagtgcacaaactacccagcacagccccctccgccccctctggaggctgaagagggattccagcccctgccacccacagacacgggctgactggggtgtctgccccccttgggggggggcagcacagggcctcaggcctgggtgccacctggcacctagaagatgcctgtgccctggttcttgctgtccttggcactgggccgaagcccagtggtcctttctctggagaggcttgtggggcctcaggacgctacccactgctctccggtgagtctggaaccctggggagacgaggaaaggctcagggttcagtttttggctcagcaaagccttagcctggctcctgtcactgctgccactgccagaactgccctgtctggtctgtctggtgctgatggtagaagagaagaacggggaaggggcaagagctgggtctgtctttctctgggagggtctgggaatacggagccccagaaaaagggcctctcctgccgcctctgggacagtgacatactctgcctgcctggggacatcgtgcctgctccgggccccgtgctggcgcctacgcacctgcagacagagctggtgctgaggtgccagaaggagaccgactgtgacctctgtctgcgtgtggctgtccacttggccgtgcatgggcactgggaagagcctgaagatgaggaaaagtttggaggagcagctgactcaggggtggaggagcctaggaatgcctctctccaggcccaagtcgtgctctccttccaggcctaccctactgcccgctgcgtcctgctggaggtgcaagtgcctgctgcccttgtgcagtttggtcagtctgtgggctctgtggtatatgactgcttcgaggctgccctagggagtgaggtacgaatctggtcctatactcagcccaggtacgagaaggaactcaaccacacacagcagctgcctgactgcagggggctcgaagtctggaacagcatcccgagctgctgggccctgccctggctcaacgtgtcagcagatggtgacaacgtgcatctggttctgaatgtctctgaggagcagcacttcggcctctccctgtactggaatcaggtccagggccccccaaaaccccggtggcacaaaaacctgactggaccgcagatcattaccttgaaccacacagacctggttccctgcctctgtattcaggtgtggcctctggaacctgactccgttaggacgaacatctgccccttcagggaggacccccgcgcacaccagaacctctggcaagccgcccgactgcaactgctgaccctgcagagctggctgctggacgcaccgtgctcgctgcccgcagaagcggcactgtgctggcgggctccgggtggggacccctgccagccactggtcccaccgctttcctgggagaacgtcactgtggacaaggttctcgagttcccattgctgaaaggccaccctaacctctgtgttcaggtgaacagctcggagaagctgcagctgcaggagtgcttgtgggctgactccctggggcctctcaaagacgatgtgctactgttggagacacgaggcccccaggacaacagatccctctgtgccttggaacccagtggctgtacttcactacccagcaaagcctccacgagggcagctcgccttggagagtacttactacaagacctgcagtcaggccagtgtctgcagctatgggacgatgacttgggagcgctatgggcctgccccatggacaaatacatccacaagcgctgggccctcgtgtggctggcctgcctactctttgccgctgcgctttccctcatcctccttctcaaaaaggatcacgcgaaagggtggctgaggctcttgaaacaggacgtccgctcgggggcggccgccaggggccgcgcggctctgctcctctactcagccgatgactcgggtttcgagcgcctggtgggcgccctggcgtcggccctgtgccagctgccgctgcgcgtggccgtagacctgtggagccgtcgtgaactgagcgcgcaggggcccgtggcttggtttcacgcgcagcggcgccagaccctgcaggagggcggcgtggtggtcttgctcttctctcccggtgcggtggcgctgtgcagcgagtggctacaggatggggtgtccgggcccggggcgcacggcccgcacgacgccttccgcgcctcgctcagctgcgtgctgcccgacttcttgcagggccgggcgcccggcagctacgtgggggcctgcttcgacaggctgctccacccggacgccgtacccgcccttttccgcaccgtgcccgtcttcacactgccctcccaactgccagacttcctgggggccctgcagcagcctcgcgccccgcgttccgggcggctccaagagagagcggagcaagtgtcccgggcccttcagccagccctggatagctacttccatcccccggggactcccgcgccgggacgcggggtgggaccaggcgcgggacctggggcgggggacgggacttaaataaaggcagacgctgtttttctaccc

SEQ ID NO: 246093 - DNA, 2376 bp, Artificial Sequence
  derived and/or modified sequence
atgcctgtgccctggttcctgctgagcctggccctgggccgcagccctgtggtgctgagcctggagcggctggtgggcccccaggatgccacccactgcagccctgtgtccctggagccctggggagatgaggagcggctgcgggtgcagttcctggcccagcagagcctgagcctggcccctgtgacagctgccacagccaggacagccctgagcggcctgtctggagcagatggccggcgggaggagcggggccggggcaagtcctgggtgtgcctgagcctgggcggcagcggcaacacagagccccagaagaagggcctgagctgccgcctgtgggacagcgacatcctgtgcctgcccggggacatcgtgcctgcccctggccctgtgctggcccccacccacctgcagacagagctggtgctgcgctgccagaaggagacagactgtgacctgtgcctgcgggtggccgtgcacctggccgtgcacggccactgggaggagccagaagatgaggagaagtttggaggagctgctgacagcggcgtggaggagcccagaaatgccagcctgcaggcccaggtggtgctgtccttccaggcctaccccacagcccgctgtgtgctgctggaggtgcaggtgcctgctgccctggtgcagtttggccagagcgtgggctctgtggtgtatgactgctttgaggccgccctgggcagcgaggtgcgcatctggagctacacccagcccaggtatgagaaggagctgaaccacacccagcagctgcctgactgccggggcctggaggtgtggaacagcatccccagctgctgggccctgccctggctgaatgtgtctgcagatggagacaacgtgcacctggtgctgaatgtgtctgaggagcagcacttcggcctgagcctgtactggaaccaggtgcagggcccccccaagccccgctggcacaagaacctgaccggcccccagatcatcaccctgaaccacacagacctggtgccctgcctgtgcatccaggtgtggcccctggagccagattctgtgaggaccaacatctgccccttccgggaggacccccgggcccaccagaacctgtggcaggccgcccggctgcagctgctgaccctgcagagctggctgctggatgccccctgcagcctgcctgctgaggccgccctgtgctggagggcccctggaggagacccctgccagcccctggtgccccccctgtcctgggagaatgtgacagtggacaaggtgctggagttccccctgctgaagggccaccccaacctgtgtgtgcaggtgaacagcagcgagaagctgcagctgcaggagtgcctgtgggccgacagcctgggccccctgaaggatgatgtgctgctgctggagacccggggcccccaggacaacagaagcctgtgtgccctggagcccagcggctgcaccagcctgcccagcaaggccagcaccagggctgcccggctgggggagtacctgctgcaggacctgcagagcggccagtgcctgcagctgtgggatgatgacctgggcgccctgtgggcctgccccatggacaagtacatccacaagcgctgggccctggtgtggctggcctgcctgctgtttgctgctgccctgagcctcatcctgctgctgaagaaggaccacgccaagggctggctgcggctgctgaagcaggatgtgcgctctggagctgctgcccggggccgggccgccctgctgctgtacagcgcagatgattctggctttgagcggctggtgggcgccctggccagcgccctgtgccagctgcccctgcgggtggccgtggacctgtggagccggcgggagctgagcgcccagggccctgtggcctggttccacgcccagaggcggcagaccctgcaggagggcggcgtggtggtgctgctcttcagccctggagctgtggccctgtgcagcgagtggctgcaggatggagtgtctggccctggggcccacggcccccatgatgccttccgggccagcctgagctgtgtgctgcctgacttcctgcagggccgggcccctggcagctatgtgggcgcctgctttgaccggctgctgcacccagatgctgtgcctgccctcttcagaacagtgcctgtgttcaccctgcccagccagctgcctgacttcctgggcgccctgcagcagccccgggcccccaggagcggccgcctgcaggagcgggcagagcaggtgtcccgggccctgcagcctgccctggacagctacttccaccccccaggcaccccagcccctggccggggcgtgggccctggagctggccctggagctggagatggcacctag

SEQ ID NO: 246094 - DNA, 2376 bp, Artificial Sequence
  derived and/or modified sequence
atgcccgtgccctggttcctgctgagcctggccctgggccggagcccagtcgtgctgtcgctggagcgactagtgggacctcaggacgcaacccactgctcccccgtgagtctcgaaccttggggtgacgaggagagattgcgcgttcagtttctggcgcagcaaagtctgtctttggcccctgtcactgcggcaacagccagaactgccttgtcaggcctcagcggggcagatggccggagggaagagcgaggacgcggaaaatcctgggtctgcctgtccctgggaggatctggcaataccgagcctcaaaaaaaaggactgtcctgtcgcctgtgggacagcgacatcctttgcctgcccggagacatcgtgcccgcaccaggccccgtactggcccctactcacttgcaaacagagctagtactgcgatgccagaaagagaccgactgcgacctctgcctgcgggtggctgtccacctggcagtacatggccactgggaagaacctgaagacgaagagaaattcggcggtgcagccgactcaggcgtcgaggagcctcggaatgcctcattgcaggcacaggttgtgctgtcttttcaggcctatcctacggccaggtgcgtcctgcttgaggtgcaagtccccgccgccctagtccaatttggacaaagcgttggatccgttgtgtacgattgctttgaagctgctctgggaagtgaggtcaggatttggtcttacacacaaccaagatatgagaaggagctgaatcacacccagcaactgcctgattgccgcggtctcgaagtgtggaatagcattccgtcatgttgggctttaccttggttgaatgtatccgctgacggcgataacgtccatctggtcctgaatgtgtcggaagagcagcactttggattgtccctttattggaaccaggtacaagggcccccaaagccacgctggcacaagaacttgaccggcccccaaattataaccctcaatcataccgacctcgtaccctgcttatgcatccaggtttggccattagagcccgactcagtgcgcactaacatttgtcctttccgcgaggatcctcgcgctcatcagaatctgtggcaggccgcccgccttcagctacttaccctgcagagctggctcctagatgctccatgcagtttacccgccgaggctgcgctctgctggagagcccccggaggagatccctgtcagcccctcgtaccccccctcagctgggagaacgttaccgtggacaaggtactcgagtttccgcttctgaaagggcaccccaacctttgcgtccaagtgaactcttccgagaagctccagcttcaggagtgtctttgggctgactccctggggcctctgaaagatgatgtgctcctcctcgaaacgcgcggcccccaagacaaccgcagcttgtgcgccttagaaccatctgggtgcacgtcattgcccagcaaagcatccacccgggcagccagattaggagagtacctcctacaggacctgcagagcggacagtgcctgcagttgtgggatgatgaccttggtgcgctgtgggcatgtccaatggataaatacatacataaaagatgggcgctggtctggctggcatgtctgttgtttgccgctgccctcagcctgatcctcctgctcaagaaggatcacgcgaaggggtggctgcggcttctcaagcaggacgtgagaagtggcgcggctgccagaggtagggccgccctcctactctactcagcagacgattcagggttcgagaggctagtaggcgctctcgcttcagctttatgccagttgcccttacgggttgccgtcgatttgtggtccagacgggagctttccgctcaggggcctgttgcatggtttcacgcccagagacgtcagaccctgcaggagggaggggtcgtcgtccttttgttcagccccggggcggtggccctgtgttctgaatggctgcaggacggagtgtcaggtcccggggcccacggccctcacgacgcttttagggcctcattgtcctgcgtcttacccgacttcctgcagggccgtgcacccgggagctacgtgggagcttgcttcgacaggctcttgcatcccgacgccgttccggcactgtttcggaccgtgcctgtgttcactcttcccagccaactgccagactttctgggggcactgcagcagccacgggctcccagaagtggaagattgcaggagcgcgcggaacaggtctctcgggccttacagcccgcacttgattcatatttccacccccctggcacccccgctcctggccgtggggtcggtccaggagccggccccggtgccggcgacggcacatag

SEQ ID NO: 246095 - DNA, 2376 bp, Artificial Sequence
  derived and/or modified sequence
atgccagtgccctggtttcttttgtccctggccctaggcagaagtccagtggttttgagtctggaaaggctggtgggccctcaggatgcaacccactgtagccccgtcagcctggaaccctggggagatgaggaacgcctgcgcgtgcagtttcttgcacagcagtctctgtctttagcaccagtgactgccgcaactgctcggaccgccctaagcggcctgagcggagccgacggccgacgtgaggagaggggccgagggaagagctgggtgtgtctcagcctggggggttctggcaacaccgagcctcaaaagaagggattgtcttgcaggctttgggacagtgatattctctgtctgccgggagatattgttcccgctccgggacccgtcctggcgccaacgcacctgcagacagaactggtgttgcgatgccagaaagaaaccgattgcgacctctgcctacgagtggctgtgcatctcgcggttcatggccattgggaggagcccgaggacgaagagaagtttggtggggctgcagacagcggtgttgaagaacccaggaatgcctcccttcaagcgcaggtcgttcttagctttcaggcctaccctaccgctagatgcgtgctgctggaagtgcaggtgcccgctgccctcgtgcagtttggtcagtcagttggctccgtagtctacgactgctttgaggcggcactgggatccgaagtgcggatatggtcatatactcagccaaggtacgagaaggaactcaaccatacccagcagctcccagattgcagaggccttgaagtatggaactcaattccgagctgctgggcactgccctggttaaatgtgtcagccgatggggacaacgtccacctcgtgcttaacgtgtctgaagaacagcattttggtctatcgctttactggaatcaggtccaagggccaccaaaaccaagatggcacaaaaatcttacgggcccacagattatcaccctaaatcataccgacctggtcccgtgtctatgtatacaggtttggccgctcgaacccgatagcgtgagaaccaacatctgtccctttcgcgaggatcccagagcccaccagaatctctggcaagctgccaggctgcagttgctgacactgcaatcatggctgctcgatgccccttgctcactgcccgctgaagctgcgctctgttggcgcgctcccggaggcgatccgtgtcagcctctcgtgccgccactctcatgggagaatgtcaccgtcgacaaggtgttggagttcccgcttctgaagggccaccctaacctctgtgttcaagtcaatagcagcgagaagctccaactgcaggaatgcctctgggcagactcacttggcccactcaaggatgatgtcttactcctcgagacccgcggtccccaggacaaccgtagcctgtgcgctctagagccttccggctgcacttcattgccgtcgaaggccagtacccgcgcagcacgactgggggagtacttgctgcaagacttgcagagcggacagtgcctccaactgtgggacgatgatctgggcgctctatgggcctgcccgatggacaagtatatccacaaacggtgggcgctagtgtggctcgcgtgtctgctctttgccgcagccctaagcctaatactcctactgaagaaagaccacgccaagggatggttaagactattgaagcaagacgttcgctccggagcagcagcaagaggaagggcggctctgttgttatactctgctgacgatagcgggtttgaacgactcgtgggagcactggcctctgccctctgtcaactgccgctaagggtcgccgtggatctctggagtcgccgagagcttagcgcccagggtccagtggcatggtttcacgcacaacgaagacagacgctacaggaggggggtgtggtggttctgctgttttcaccaggtgctgtcgcgctgtgcagcgagtggcttcaggatggggtgtcaggacctggggctcacgggcctcacgatgcgttccgggcttccctatcttgtgtgctgcccgactttttacagggacgagccccaggttcctacgtgggagcctgctttgaccggttactgcatccggacgccgtaccagctctatttcggaccgtgcccgtgtttacgcttccatctcagctgccagacttcttgggcgctttgcagcaacccagagctcctagaagtggacgactccaggagcgggcagagcaggtcagcagagctctccaaccagcactcgacagttactttcacccacccggaacgcccgctccagggaggggcgtcggtcccggtgccggacccggtgctggagatggaacttag

SEQ ID NO: 246096 - DNA, 2376 bp, Artificial Sequence
  derived and/or modified sequence
atgcccgtgccctggttcctgctgagcctggccctgggcagaagccccgtggtgctgagcctggagagactggtgggcccccaggacgccacccactgcagccccgtgagcctggagccctggggcgacgaggagagactgagagtgcagttcctggcccagcagagcctgagcctggcccccgtgaccgccgccaccgccagaaccgccctgagcggcctgagcggcgccgacggcagaagagaggagagaggcagaggcaagagctgggtgtgcctgagcctgggcggcagcggcaacaccgagccccagaagaagggcctgagctgcagactgtgggacagcgacatcctgtgcctgcccggcgacatcgtgcccgcccccggccccgtgctggcccccacccacctgcagaccgagctggtgctgagatgccagaaggagaccgactgcgacctgtgcctgagagtggccgtgcacctggccgtgcacggccactgggaggagcccgaggacgaggagaagttcggcggcgccgccgacagcggcgtggaggagcccagaaacgccagcctgcaggcccaggtggtgctgagcttccaggcctaccccaccgccagatgcgtgctgctggaggtgcaggtgcccgccgccctggtgcagttcggccagagcgtgggcagcgtggtgtacgactgcttcgaggccgccctgggcagcgaggtgagaatctggagctacacccagcccagatacgagaaggagctgaaccacacccagcagctgcccgactgcagaggcctggaggtgtggaacagcatccccagctgctgggccctgccctggctgaacgtgagcgccgacggcgacaacgtgcacctggtgctgaacgtgagcgaggagcagcacttcggcctgagcctgtactggaaccaggtgcagggcccccccaagcccagatggcacaagaacctgaccggcccccagatcatcaccctgaaccacaccgacctggtgccctgcctgtgcatccaggtgtggcccctggagcccgacagcgtgagaaccaacatctgccccttcagagaggaccccagagcccaccagaacctgtggcaggccgccagactgcagctgctgaccctgcagagctggctgctggacgccccctgcagcctgcccgccgaggccgccctgtgctggagagcccccggcggcgacccctgccagcccctggtgccccccctgagctgggagaacgtgaccgtggacaaggtgctggagttccccctgctgaagggccaccccaacctgtgcgtgcaggtgaacagcagcgagaagctgcagctgcaggagtgcctgtgggccgacagcctgggccccctgaaggacgacgtgctgctgctggagaccagaggcccccaggacaacagaagcctgtgcgccctggagcccagcggctgcaccagcctgcccagcaaggccagcaccagagccgccagactgggcgagtacctgctgcaggacctgcagagcggccagtgcctgcagctgtgggacgacgacctgggcgccctgtgggcctgccccatggacaagtacatccacaagagatgggccctggtgtggctggcctgcctgctgttcgccgccgccctgagcctgatcctgctgctgaagaaggaccacgccaagggctggctgagactgctgaagcaggacgtgagaagcggcgccgccgccagaggcagagccgccctgctgctgtacagcgccgacgacagcggcttcgagagactggtgggcgccctggccagcgccctgtgccagctgcccctgagagtggccgtggacctgtggagcagaagagagctgagcgcccagggccccgtggcctggttccacgcccagagaagacagaccctgcaggagggcggcgtggtggtgctgctgttcagccccggcgccgtggccctgtgcagcgagtggctgcaggacggcgtgagcggccccggcgcccacggcccccacgacgccttcagagccagcctgagctgcgtgctgcccgacttcctgcagggcagagcccccggcagctacgtgggcgcctgcttcgacagactgctgcaccccgacgccgtgcccgccctgttcagaaccgtgcccgtgttcaccctgcccagccagctgcccgacttcctgggcgccctgcagcagcccagagcccccagaagcggcagactgcaggagagagccgagcaggtgagcagagccctgcagcccgccctggacagctacttccacccccccggcacccccgcccccggcagaggcgtgggccccggcgccggccccggcgccggcgacggcacctag

SEQ ID NO: 246097 - protein, 690 aa, Artificial Sequence
  derived and/or modified sequence
MRPMRIFVNDDRHVMAKHSSVYPTQEELEAVQNMVSHTERALKAVSDWIDEQEKGSSEQAESDNMDVPPEDDSKEGAGEQKTEHMTRTLRGVMRVGLVAKGLLLKGDLDLELVLLCKEKPTTALLDKVADNLAIQLAAVTEDKYEILQSVDDAAIVIKNTKEPPLSLTIHLTSPVVREEMEKVLAGETLSVNDPPDVLDRQKCLAALASLRHAKWFQARANGLKSCVIVIRVLRDLCTRVPTWGPLRGWPLELLCEKSIGTANRPMGAGEALRRVLECLASGIVMPDGSGIYDPCEKEATDAIGHLDRQQREDITQSAQHALRLAAFGQLHKVLGMDPLPSKMPKKPKNENPVDYTVQIPPSTTYAITPMKRPMEEDGEEKSPSKKKKKIQKKEEKAEPPQAMNALMRLNQLKPGLQYKLVSQTGPVHAPIFTMSVEVDGNSFEASGPSKKTAKLHVAVKVLQDMGLPTGAEGRDSSKGEDSAEETEAKPAVVAPAPVVEAVSTPSAAFPSDATAEQGPILTKHGKNPVMELNEKRRGLKYELISETGGSHDKRFVMEVEVDGQKFQGAGSNKKVAKAYAALAALEKLFPDTPLALDANKKKRAPVPVRGGPKFAAKPHNPGFGMGGPMHNEVPPPPNLRGRGRGGSIRGRGRGRGFGGANHGGYMNAGAGYGSYGYGGNSATAGYTGFV

SEQ ID NO: 246098 - DNA, 6123 bp, Artificial Sequence
  derived and/or modified sequence
aaagggggcggggcttcagccggtcacgtgttcccgcacctccccggcgcgcgcctgcccgcccgcccgctcgcccccggtccggactcctcctcctcctcttctcgccattgcagttggacccagcagcccggcgcgcaccgcgtggcttttgggggcagaccccggcgggctgtggcaggagggcggcggcggcggctgcggtcgaagaaggggacgccgacaagagttgaagtattgataacaccaaggaactctatcacaatttgaaaagataagcaaaagtttgatttccagacactacagaagaagtaaaaatgcgtccaatgcgaatttttgtgaatgatgaccgccatgtgatggcaaagcattcttccgtttatccaacacaagaggagctggaggcagtccagaacatggtgtcccacacggagcgggcgctcaaagctgtgtccgactggatagacgagcaggaaaagggtagcagcgagcaggcagagtccgataacatggatgtgcccccagaggacgacagtaaagaaggggctggggaacagaagacggagcacatgaccagaaccctgcggggagtgatgcgggtgggcctggtggcaaagggcctcctactcaagggggacttggatctggagctggtgctgctgtgtaaggagaagcccacaaccgccctcctggacaaggtggccgacaacctggccatccagcttgctgctgtaacagaagacaagtacgaaatactgcaatctgtcgacgatgctgcgattgtgataaaaaacacaaaagagcctccattgtccctgaccatccacctgacatcccctgttgtcagagaagaaatggagaaagtattagctggagaaacgctatcagtcaacgaccccccggacgttctggacaggcagaaatgccttgctgccttggcgtccctccgacacgccaagtggttccaggccagagccaacgggctgaagtcttgtgtcattgtgatccgggtcttgagggacctgtgcactcgcgtgcccacctggggtcccctccgaggctggcctctcgagctcctgtgtgagaaatccattggcacggccaacagaccgatgggtgctggcgaggccctgcggagagtgctggagtgcctggcgtcgggcatcgtgatgccagatggttctggcatttatgacccttgtgaaaaagaagccactgatgctattgggcatctagacagacagcaacgggaagatatcacacagagtgcgcagcacgcactgcggctcgctgccttcggccagctccataaagtcctaggcatggaccctctgccttccaagatgcccaagaaaccaaagaatgaaaacccagtggactacaccgttcagatcccaccaagcaccacctatgccattacgcccatgaaacgcccaatggaggaggacggggaggagaagtcgcccagcaaaaagaagaagaagattcagaagaaagaggagaaggcagagcccccccaggctatgaatgccctgatgcggttgaaccagctgaagccagggctgcagtacaagctggtgtcccagactgggcccgtccatgcccccatctttaccatgtctgtggaggttgatggcaattcattcgaggcctctgggccctccaaaaagacggccaagctgcacgtggccgttaaggtgttacaggacatgggcttgccgacgggtgctgaaggcagggactcgagcaagggggaggactcggctgaggagaccgaggcgaagccagcagtggtggcccctgccccagtggtagaagctgtctccacccctagtgcggcctttccctcagatgccactgccgagcaggggccgatcctgacaaagcacggcaagaacccagtcatggagctgaacgagaagaggcgtgggctcaagtacgagctcatctccgagaccgggggcagccacgacaagcgcttcgtcatggaggtcgaagtggatggacagaagttccaaggtgctggttccaacaaaaaggtggcgaaggcctacgctgctcttgctgccctagaaaagcttttccctgacacccctctcgcccttgatgccaacaaaaagaagagagccccagtacccgtcagagggggaccgaaatttgctgctaagccacataaccctggcttcggcatgggaggccccatgcacaacgaagtgcccccaccccccaaccttcgagggcggggaagaggcgggagcatccggggacgagggcgcgggcgaggatttggtggcgccaaccatggaggctacatgaatgccggtgctgggtatggaagctatgggtacggaggcaactcggcgacagcaggctacagtcagttctacagcaacggagggcattctgggaatgccagtggcggtggcggcgggggcggtggtggctcctccggctatggctcctactaccaaggtgacaactacaactcaccggtgcccccaaaacacgctgggaagaagcagccgcacgggggccagcagaagccctcctacggctcgggctaccagtcccaccagggccagcagcagtcctacaaccagagcccctacagcaactatggccctccacagggcaagcagaaaggctataaccatggacaaggcagctactcctactcgaactcctacaactctcccgggggcgggggcggatccgactacaactacgagagcaaattcaactacagtggtagtggaggccgaagcggcgggaacagctacggctcaggcggggcatcctacaacccagggtcacacgggggctacggcggaggttctgggggcggctcctcataccaaggcaaacaaggaggctactcacagtcgaactacaactccccggggtccggccagaactacagtggccctcccagctcctaccagtcctcacaaggcggctatggcagaaacgcagaccacagcatgaactaccagtacagataagcccccgcggggcggagatttctaccttctgcacttactccccatcagaagatcgagttttatgcatcacagttaacatgtcagctggccctccaggcccccgcccccatcccgtccacgttgctgtgtcgtgaggtgcagcgggtcaccctgtggcccgtcctgtgacccatatttagccgtgtttgggactccgtgtcttcaatggtttgttagttgccattacaactttgtctgggtagagtttttgagtttttgcagttcagtatccctctgtctattcacacttcgtgttagtggtaactcagtttgtctttaaatagttacagaagggatacgtcatttgttaatgcttttgtgaagtgagttaaacgagctttctgtattttaatgctttagtgtttcagttttataagtgaagattttattttaaaaaccagtgggaaagagtggggggtttctttttatgtctgggtcattcaggcagtacatctgaattaagctgaatgtagacaaataaagaaaaacaaaactgcgcccgtcttaggcctgggtgtctgacccaccagcagtgcaatgggcaggtttccccactctattcctgctcttgggaaagcagcgtgggccatcaggatggtccctggtccttagagagggtccagttcaggcttctagacattttactcatgctcagcgaaggctggttcctggtcccctgggctgtgtagacccggtgtcccaccaggctccaggctcccaccatctacagaggggcttacagcgcccattctggtcttggggaacccatcacaaaataggctttttctgctccccgattctggtgtagttctaagtacacagtgatgtcctctgtaggggcgtgcctgtggtggaacataacgcagttacaaaagaaagggcaggtgaggcctgggtaaccccagccatggaccgtcagtggctggagggagcttcgtgtctgtgctggagctgcagcctgctcgccatctggaggctcagtggagtggggagttggggttctcataccagcagatttccctagagcgtgattctcccatctgaggcaatcttgcctcccaggggaaattttgcaatgtttggaggatgttgtcacagctagtagcgggtgctctgggatctggtggatagatgccaaggatgctgtcaagcatactgtactgcccagaacagtggcccatagcagggacctgccctatcaaaatatcaggtgtatggaggtggagtcccaacgctagagcagcccttctcagctccaccctgcccggggagggaggaggagctctggtttcagagcagtgccgggattgcctttccccaggatctgtgtcggccatccaggaagaactgtactggccaagcctgggaccacacgtctgcagagatcctgctctgctggcctgagccccaggccttggcctcctgtgcttgggtaaccatggccactgggaaaagcaaggaccgtgtttgactttcttggagaggtgaaagaggtgaaagaacaagttgtgtgctagaaaacttttgaggaattcttatttgtgttagagcagaggaggtcccagataccaagtggcgcctcccaggaaaggctgggagaagaggtggcctggagtaccccgagatcccagcagcgcacacagtggagggatgaggatggatgggtcctaacccctgattttgatgggatgtgttcatgtcctatctcctctcctggacacattaaggggttgggacaagaagagactcctgtgagatcagcagacctcgtgtttaaggagagaatgcctgcctgcaacactcatggagagggacacttcctggccccacctgctaaatacctccaaactctgggcaggcgcctgcattctcaacacaggacttcccttaacagtttccggatcagtgaccaccaccacgttcaggtttctgaatgcagacccaccacgagggatggattccacccgcccgccctgctgcagatacatgcggcacagcaggcacgtgcctggagagaacagctcctgagcacagcacccttggagccctcaccccgctcacgatcctcaccagtgctgatgatgccgtcatgctgctggcctgagacagtatcccagctacaacaggacgacaccgggttcaggaatatgtggctatcaccttgagcactgacagtggccttccaggctagttgccttccaaacgcaggtagccgacctgcaggagggcctacaaacgggcccagcaagagctgggcaacagctggcttgtgaaatgagacaccttgaccaatatgctttgggtggacggtctcctacatgttcagtggaggccaccaggagcatccatgagcggggaaggggtccacacccttacatggcaagttgatacgatggggtgcttggtggatgggccatggaggtccgtgagctggaactgggcacacgccatcccagagggctcaggatgccccaggaaggaaagaagggcaacagactacacgattggacgtgtgtggttgactgggatgaagttggagggaggggcagggccttgcaggggattggtactgatcccagggaggaagtgttggggcttcatgaactaggatgaaaggaggcccctgagccatgacaaggggcacatccaggatttccgccaccctgaatttagtagagctagtaggccctggtcgtcactctgggcagggatgccgtcagccttgagggtcgccacccacctgtgtgttgccctctgtcctggcagggaaacatacaccccttgtctcaccaccaaccttgcttgtgtagtcagcagggctggccctgccccaaggactcactgcatgtacccggacccctaggcctggcctttgcagcatagttgggagcttctggattccatctgcacctgtgagccccatgctggctgtgcactgcgcgggcctgagactgctggatacaatgttgggcaacaactcagccagcctgatggcagcctcagaggcttactctaacccatcccagaataaatggagacttcatgtgttcattgtttcattcactcaaaaaaaaaaaaaaaa

SEQ ID NO: 246099 - DNA, 2685 bp, Artificial Sequence
  derived and/or modified sequence
atgagacccatgagaatcttcgtgaacgacgacagacacgtgatggccaagcacagcagcgtgtaccccacccaggaggagctggaggccgtgcagaacatggtgagccacaccgagagagccctgaaggccgtgagcgactggatcgacgagcaggagaagggcagcagcgagcaggccgagagcgacaacatggacgtgccccccgaggacgacagcaaggagggcgccggcgagcagaagaccgagcacatgaccagaaccctgagaggcgtgatgagagtgggcctggtggccaagggcctgctgctgaagggcgacctggacctggagctggtgctgctgtgcaaggagaagcccaccaccgccctgctggacaaggtggccgacaacctggccatccagctggccgccgtgaccgaggacaagtacgagatcctgcagagcgtggacgacgccgccatcgtgatcaagaacaccaaggagccccccctgagcctgaccatccacctgaccagccccgtggtgagagaggagatggagaaggtgctggccggcgagaccctgagcgtgaacgacccccccgacgtgctggacagacagaagtgcctggccgccctggccagcctgagacacgccaagtggttccaggccagagccaacggcctgaagagctgcgtgatcgtgatcagagtgctgagagacctgtgcaccagagtgcccacctggggccccctgagaggctggcccctggagctgctgtgcgagaagagcatcggcaccgccaacagacccatgggcgccggcgaggccctgagaagagtgctggagtgcctggccagcggcatcgtgatgcccgacggcagcggcatctacgacccctgcgagaaggaggccaccgacgccatcggccacctggacagacagcagagagaggacatcacccagagcgcccagcacgccctgagactggccgccttcggccagctgcacaaggtgctgggcatggaccccctgcccagcaagatgcccaagaagcccaagaacgagaaccccgtggactacaccgtgcagatcccccccagcaccacctacgccatcacccccatgaagagacccatggaggaggacggcgaggagaagagccccagcaagaagaagaagaagatccagaagaaggaggagaaggccgagcccccccaggccatgaacgccctgatgagactgaaccagctgaagcccggcctgcagtacaagctggtgagccagaccggccccgtgcacgcccccatcttcaccatgagcgtggaggtggacggcaacagcttcgaggccagcggccccagcaagaagaccgccaagctgcacgtggccgtgaaggtgctgcaggacatgggcctgcccaccggcgccgagggcagagacagcagcaagggcgaggacagcgccgaggagaccgaggccaagcccgccgtggtggcccccgcccccgtggtggaggccgtgagcacccccagcgccgccttccccagcgacgccaccgccgagcagggccccatcctgaccaagcacggcaagaaccccgtgatggagctgaacgagaagagaagaggcctgaagtacgagctgatcagcgagaccggcggcagccacgacaagagattcgtgatggaggtggaggtggacggccagaagttccagggcgccggcagcaacaagaaggtggccaaggcctacgccgccctggccgccctggagaagctgttccccgacacccccctggccctggacgccaacaagaagaagagagcccccgtgcccgtgagaggcggccccaagttcgccgccaagccccacaaccccggcttcggcatgggcggccccatgcacaacgaggtgccccccccccccaacctgagaggcagaggcagaggcggcagcatcagaggcagaggcagaggcagaggcttcggcggcgccaaccacggcggctacatgaacgccggcgccggctacggcagctacggctacggcggcaacagcgccaccgccggctacagccagttctacagcaacggcggccacagcggcaacgccagcggcggcggcggcggcggcggcggcggcagcagcggctacggcagctactaccagggcgacaactacaacagccccgtgccccccaagcacgccggcaagaagcagccccacggcggccagcagaagcccagctacggcagcggctaccagagccaccagggccagcagcagagctacaaccagagcccctacagcaactacggccccccccagggcaagcagaagggctacaaccacggccagggcagctacagctacagcaacagctacaacagccccggcggcggcggcggcagcgactacaactacgagagcaagttcaactacagcggcagcggcggcagaagcggcggcaacagctacggcagcggcggcgccagctacaaccccggcagccacggcggctacggcggcggcagcggcggcggcagcagctaccagggcaagcagggcggctacagccagagcaactacaacagccccggcagcggccagaactacagcggcccccccagcagctaccagagcagccagggcggctacggcagaaacgccgaccacagcatgaactaccagtacagatag

SEQ ID NO: 246100 - DNA, 2295 bp, Artificial Sequence
  derived and/or modified sequence
atgagacccatgagaatcttcgtgaacgacgacagacacgtgatggccaagcacagcagcgtgtaccccacccaggaggagctggaggccgtgcagaacatggtgagccacaccgagagagccctgaaggccgtgagcgactggatcgacgagcaggagaagggcagcagcgagcaggccgagagcgacaacatggacgtgccccccgaggacgacagcaaggagggcgccggcgagcagaagaccgagcacatgaccagaaccctgagaggcgtgatgagagtgggcctggtggccaagggcctgctgctgaagggcgacctggacctggagctggtgctgctgtgcaaggagaagcccaccaccgccctgctggacaaggtggccgacaacctggccatccagctggccgccgtgaccgaggacaagtacgagatcctgcagagcgtggacgacgccgccatcgtgatcaagaacaccaaggagccccccctgagcctgaccatccacctgaccagccccgtggtgagagaggagatggagaaggtgctggccggcgagaccctgagcgtgaacgacccccccgacgtgctggacagacagaagtgcctggccgccctggccagcctgagacacgccaagtggttccaggccagagccaacggcctgaagagctgcgtgatcgtgatcagagtgctgagagacctgtgcaccagagtgcccacctggggccccctgagaggctggcccctggagctgctgtgcgagaagagcatcggcaccgccaacagacccatgggcgccggcgaggccctgagaagagtgctggagtgcctggccagcggcatcgtgatgcccgacggcagcggcatctacgacccctgcgagaaggaggccaccgacgccatcggccacctggacagacagcagagagaggacatcacccagagcgcccagcacgccctgagactggccgccttcggccagctgcacaaggtgctgggcatggaccccctgcccagcaagatgcccaagaagcccaagaacgagaaccccgtggactacaccgtgcagatcccccccagcaccacctacgccatcacccccatgaagagacccatggaggaggacggcgaggagaagagccccagcaagaagaagaagaagatccagaagaaggaggagaaggccgagcccccccaggccatgaacgccctgatgagactgaaccagctgaagcccggcctgcagtacaagctggtgagccagaccggccccgtgcacgcccccatcttcaccatgagcgtggaggtggacggcaacagcttcgaggccagcggccccagcaagaagaccgccaagctgcacgtggccgtgaaggtgctgcaggacatgggcctgcccaccggcgccgagggcagagacagcagcaagggcgaggacagcgccgaggagaccgaggccaagcccgccgtggtggcccccgcccccgtggtggaggccgtgagcacccccagcgccgccttccccagcgacgccaccgccgagcagggccccatcctgaccaagcacggcaagaaccccgtgatggagctgaacgagaagagaagaggcctgaagtacgagctgatcagcgagaccggcggcagccacgacaagagattcgtgatggaggtggaggtggacggccagaagttccagggcgccggcagcaacaagaaggtggccaaggcctacgccgccctggccgccctggagaagctgttccccgacacccccctggccctggacgccaacaagaagaagagagcccccgtgcccgtgagaggcggccccaagttcgccgccaagccccacaaccccggcttcggcatgggcggccccatgcacaacgaggtgccccccccccccaacctgagaggcagaggcagaggcggcagcatcagaggcagaggcagaggcagaggcttcggcggcgccaaccacggcggctacatgaacgccggcgccggctacggcagctacggctacggcggcaacagcgccaccgccggctacagcaagagcagcagaccccccccccccagcagacccagatgctgcgtggtgagatgcagcggcagcccctgcggccccagctgcgacccctacctggccgtgttcggcaccccctgcctgcagtggttcgtgagctgccactacaacttcgtgtgggtggagttcctgagcttctgcagcagcgtgagcctgtgcctgttcaccctgagagtgagcggcaacagcgtgtgcctgtag

SEQ ID NO: 246101 - DNA, 2073 bp, Artificial Sequence
  derived and/or modified sequence
atgagacccatgagaatcttcgtgaacgacgacagacacgtgatggccaagcacagcagcgtgtaccccacccaggaggagctggaggccgtgcagaacatggtgagccacaccgagagagccctgaaggccgtgagcgactggatcgacgagcaggagaagggcagcagcgagcaggccgagagcgacaacatggacgtgccccccgaggacgacagcaaggagggcgccggcgagcagaagaccgagcacatgaccagaaccctgagaggcgtgatgagagtgggcctggtggccaagggcctgctgctgaagggcgacctggacctggagctggtgctgctgtgcaaggagaagcccaccaccgccctgctggacaaggtggccgacaacctggccatccagctggccgccgtgaccgaggacaagtacgagatcctgcagagcgtggacgacgccgccatcgtgatcaagaacaccaaggagccccccctgagcctgaccatccacctgaccagccccgtggtgagagaggagatggagaaggtgctggccggcgagaccctgagcgtgaacgacccccccgacgtgctggacagacagaagtgcctggccgccctggccagcctgagacacgccaagtggttccaggccagagccaacggcctgaagagctgcgtgatcgtgatcagagtgctgagagacctgtgcaccagagtgcccacctggggccccctgagaggctggcccctggagctgctgtgcgagaagagcatcggcaccgccaacagacccatgggcgccggcgaggccctgagaagagtgctggagtgcctggccagcggcatcgtgatgcccgacggcagcggcatctacgacccctgcgagaaggaggccaccgacgccatcggccacctggacagacagcagagagaggacatcacccagagcgcccagcacgccctgagactggccgccttcggccagctgcacaaggtgctgggcatggaccccctgcccagcaagatgcccaagaagcccaagaacgagaaccccgtggactacaccgtgcagatcccccccagcaccacctacgccatcacccccatgaagagacccatggaggaggacggcgaggagaagagccccagcaagaagaagaagaagatccagaagaaggaggagaaggccgagcccccccaggccatgaacgccctgatgagactgaaccagctgaagcccggcctgcagtacaagctggtgagccagaccggccccgtgcacgcccccatcttcaccatgagcgtggaggtggacggcaacagcttcgaggccagcggccccagcaagaagaccgccaagctgcacgtggccgtgaaggtgctgcaggacatgggcctgcccaccggcgccgagggcagagacagcagcaagggcgaggacagcgccgaggagaccgaggccaagcccgccgtggtggcccccgcccccgtggtggaggccgtgagcacccccagcgccgccttccccagcgacgccaccgccgagcagggccccatcctgaccaagcacggcaagaaccccgtgatggagctgaacgagaagagaagaggcctgaagtacgagctgatcagcgagaccggcggcagccacgacaagagattcgtgatggaggtggaggtggacggccagaagttccagggcgccggcagcaacaagaaggtggccaaggcctacgccgccctggccgccctggagaagctgttccccgacacccccctggccctggacgccaacaagaagaagagagcccccgtgcccgtgagaggcggccccaagttcgccgccaagccccacaaccccggcttcggcatgggcggccccatgcacaacgaggtgccccccccccccaacctgagaggcagaggcagaggcggcagcatcagaggcagaggcagaggcagaggcttcggcggcgccaaccacggcggctacatgaacgccggcgccggctacggcagctacggctacggcggcaacagcgccaccgccggctacaccggcttcgtgtag

SEQ ID NO: 246102 - DNA, 2685 bp, Artificial Sequence
  derived and/or modified sequence
atgcgcccaatgcgcatcttcgtgaatgacgatagacacgtcatggccaaacactcttcggtctatcctacccaggaagagttagaagctgtgcagaatatggtgtcacataccgaaagggccctcaaggccgtatcggactggatcgatgagcaagagaaaggctcatctgaacaggccgaaagcgacaacatggatgttcctcctgaggatgacagcaaagagggggccggagaacaaaagaccgagcacatgacaagaaccctcaggggagtcatgagggtggggttagtcgcaaagggactattgttgaaaggcgatctagacctggaactggtgcttttgtgcaaagagaagccaacaaccgcgcttttagacaaggtagccgataatctagcaattcagctcgcggcggtcacagaggataagtacgagatcctccagagtgtcgatgatgctgctattgtgattaagaataccaaggaaccccctctgtcactgacaattcacctcaccagcccggtggtccgagaagaaatggaaaaggtactcgccggggaaaccctctccgtcaacgatcctcctgacgtgttggataggcaaaaatgccttgcagccctcgcttctcttcgccatgccaaatggttccaagctcgtgcaaacgggttgaagagctgcgtcatcgtgattcgggtacttcgtgatctgtgcaccagagtgccaacttggggtccccttcgaggttggccccttgaactactttgcgagaagtcaatcgggacagccaataggcccatgggagcaggcgaggcacttcggcgtgtgttagagtgcctcgcctctggaatcgtcatgcctgacggaagtggaatctatgacccttgcgaaaaagaagccacggacgcaatcggacacctggataggcagcagagagaggacataactcagtcagcgcagcacgctcttcgtctcgccgcatttgggcagctgcacaaggttctgggcatggatcctctgccaagtaaaatgcccaaaaagccgaagaatgagaaccctgtagactacaccgtccagattcccccttcaaccacttatgctatcactccaatgaagcgacctatggaggaggacggcgaggagaaatcccccagcaagaaaaagaaaaagatccagaaaaaggaagaaaaggccgaaccaccgcaggcaatgaatgcactcatgagactgaatcagctgaagcctggcctacagtataagctggtaagtcagaccggtccggtgcacgcaccgatcttcactatgtcggtagaggtcgacgggaacagctttgaggcatcagggccgtctaagaagactgccaagctccacgtggccgtgaaggtgctgcaagatatggggctgccaaccggggctgagggccgcgacagcagtaagggcgaagattctgctgaagagacagaagcgaaaccagctgtggtcgcacccgctccagtagtagaggccgtgtccacaccaagcgccgccttcccaagcgatgcaacagcagaacaggggccgatccttacaaagcacggcaagaatcctgtaatggaactcaatgagaagagacggggcctcaaatatgagctgatcagcgagaccggtggcagccacgacaagcgttttgtgatggaggtcgaagtggatgggcagaagttccaaggggccgggagcaacaagaaagtcgcaaaggcctacgccgccctagccgcgctcgaaaagctatttcccgataccccgctggcgttggatgcaaacaagaaaaagagagctcccgtcccagtgagaggcggaccgaagttcgccgctaaaccccataaccccgggtttggaatgggaggtcccatgcataatgaggtacctccaccacccaatttgagaggtaggggaagggggggcagcatcagggggcgtggtcgcgggaggggttttggcggagccaatcatggcggctatatgaatgctggcgccgggtacggatcttacgggtacggcggcaacagtgctaccgctggctattcgcagttttattccaacgggggccactcaggcaatgcttctggcggcggtggcggcgggggcggcggttcttccgggtacggctcttactaccagggagacaattacaacagcccggtccctcctaagcatgccggcaaaaaacaaccacacgggggacagcagaagccctcctacggctcagggtatcagagtcaccagggacaacagcagtcctataaccagtctccttattccaattacggcccgccacaaggcaagcaaaagggctataaccacggccaaggctcatactcctatagtaatagctacaattctcctggagggggcggcggtagcgactataattatgagagtaaattcaactattctgggagcggaggtagatctggcggaaactcatatgggagcgggggtgcgagctacaatcctgggagccatgggggatacggggggggatccggaggggggagttcataccagggcaaacagggcgggtacagtcaatcaaattataactccccaggtagtgggcagaattactctggcccacccagcagttaccagtcgtctcaggggggatacgggaggaacgccgatcatagtatgaactatcagtatagatag

SEQ ID NO: 246103 - DNA, 2295 bp, Artificial Sequence
  derived and/or modified sequence
atgagacctatgcgcattttcgtgaacgacgatcgacacgtcatggccaagcactcttcggtgtatcccactcaggaggagctcgaagccgtgcaaaacatggtaagccacaccgagcgggctctgaaagcagtttccgactggatagatgaacaggagaaaggttcctccgagcaggcagaatcagacaatatggacgttccccccgaggatgactctaaggagggggcgggtgagcaaaaaaccgagcacatgacgcgcacattgcgtggtgtcatgagagtgggtctggtcgccaaagggttactcttgaagggcgacttggatcttgaattggtgttactctgtaaggaaaagccaactacggccctactggacaaggtggcggataacctggctatacagctcgcagccgttacggaggacaaatacgaaatcttgcagtctgtagacgatgcagccatagtaataaagaataccaaggagcccccacttagtctgaccatacatttaacttcacccgtggtccgcgaagagatggaaaaggtgcttgccggggaaacactcagcgtaaacgacccacctgacgtgctggatcgtcaaaagtgtttagccgctctggctagccttcgccacgctaaatggttccaggccagagccaacggacttaaatcgtgcgtgatcgtcatacgggtcttacgcgacctgtgtactcgcgtgcccacatgggggccattacgcggatggccgcttgagctcctgtgcgagaagagcatcggcactgcaaataggcctatgggagctggcgaagctctgagaagggtgttagagtgcctagcttctggtattgtgatgcccgacggatccgggatttatgacccatgcgaaaaggaggcaaccgacgccattggccacctggaccgccaacaaagagaagatattacacagtcagctcagcacgctttacgcctggccgccttcgggcagcttcataaggtactcggcatggaccctcttccttccaagatgccaaagaagccaaagaatgaaaaccccgtcgactacactgtgcagattccccctagtacaacttatgctatcactcctatgaagagacctatggaggaggatggggaggaaaagtctccttcgaagaagaaaaaaaagatccagaagaaggaagaaaaggccgaacctccacaggccatgaacgccttgatgcggctcaatcagctgaaacccggccttcagtataagctggtgtctcagactggaccagtgcacgcgcccatcttcacaatgtcagtggaggtggacggtaattctttcgaggcgagcgggccgtcaaagaagactgcgaaacttcacgtagccgtgaaggtcttacaggacatgggactccccacaggagcagaaggccgagacagctcaaaaggggaggactctgctgaggaaaccgaggcgaagccggccgttgttgcacctgccccagttgtcgaggcagtgtccaccccaagtgcggctttcccctcagacgccaccgcagagcagggcccgatccttacaaagcatggtaagaacccggtgatggaactgaacgaaaagcgacggggcctgaagtatgagctgatcagcgaaactggaggcagccacgacaaaaggttcgtaatggaggtggaggtcgacggccagaagttccagggggctggcagtaataaaaaggtcgccaaggcttatgctgcactggccgccttggaaaagctgtttcccgacacccctctggctcttgacgccaataaaaaaaagcgggcccctgtacctgtcagagggggacccaaatttgcggccaagccacacaacccgggctttggcatggggggacccatgcacaatgaggtgccgccaccaccgaacttgaggggtcggggaaggggggggtccattcgcgggagaggtagaggtcgaggatttggcggggctaaccacggaggttatatgaacgcgggggctggttacggttcatacggctacggggggaatagcgccacggctgggtattctaagtcttccagaccccctcctccttctcgtcccagatgttgtgtggttagatgcagtgggagtccctgtggaccatcgtgtgatccctacctagctgtcttcggcactccttgcttacagtggtttgtttcttgccactacaatttcgtttgggtcgagttcctgagcttctgcagctccgttagtttgtgcctgttcactctaagggtgagcgggaattctgtctgcctttag

SEQ ID NO: 246104 - DNA, 2073 bp, Artificial Sequence
  derived and/or modified sequence
atgcgccctatgcgaatcttcgtgaacgacgacaggcacgtgatggcaaaacatagttctgtgtatcccactcaggaggagctggaggccgtgcagaacatggtctcacacactgagagagctttgaaagctgtctctgattggattgacgaacaagaaaagggtagctccgagcaagcagagtcagataatatggatgtccctccagaggatgacagcaaggaaggcgccggcgagcagaaaaccgaacatatgacacgaaccctgcggggtgtaatgcgcgtgggcctcgtggcaaagggcctgctcctgaaaggagacctggacctggagttggtgctgttatgcaaggaaaaaccaactacagctctgttagataaagtcgcagataacttagccatccagctggcggcagttacggaggacaaatatgagatcctgcagagcgttgatgacgcggcaatcgtcattaagaacacaaaggagcccccgctgtcattaaccatacacctaaccagcccggttgtgagagaggagatggagaaagttctggctggcgaaactctgagcgtgaacgacccgccagacgtgctagataggcaaaaatgtctggctgctctggcatctctgagacacgccaagtggtttcaggcgagggcaaatggattgaaaagctgcgtcattgtcattagggtgctgcgtgacttgtgtactagggtacctacctggggaccactgcggggctggccactggagctgctttgcgaaaaaagtatcggcacagcaaatagacccatgggggcgggtgaagccctcaggagagtacttgaatgtctggcgagcggaatcgtcatgcccgatggaagtgggatctacgatccgtgcgagaaagaggccacagacgccatcggtcacctggatcgtcagcagcgcgaagacattacacaatccgcacaacacgccctgcgtcttgcagctttcggacagctgcacaaagttcttggcatggatcctttgccctccaaaatgccgaagaaacccaaaaatgagaaccccgtcgattacacggtgcaaattcctccttcgacgacatacgccattaccccgatgaagcggcctatggaagaggacggggaagaaaagtctccaagtaagaaaaagaaaaaaatccaaaaaaaagaagaaaaagcagaaccacctcaggcgatgaacgctcttatgcgtttaaatcaacttaagccaggcctccagtacaagctcgtctcgcaaaccggtccggtccatgcacccatatttacaatgtccgtggaggtggatggcaacagctttgaggcctctggaccgtctaagaaaacagccaaattgcacgtagctgtaaaggtcctacaggatatgggcctgccgaccggcgccgaaggccgggattccagtaagggcgaggattccgccgaggagactgaggccaaacccgctgtcgtggcacccgcacctgttgtcgaggcggtgtctacgccttccgcagcctttccctctgacgctacagctgagcagggtcctattctgaccaagcacggtaaaaacccagtaatggagctgaatgagaaacggcgcggtcttaaatatgagctgatttccgaaactggaggttcacacgataagagattcgtgatggaagttgaggtcgatggccagaagtttcagggggccggctcaaataagaaagtggctaaggcttatgccgccctggcggctctggagaaactcttccccgacacgcccctggcactcgacgcaaacaagaaaaaacgcgccccagtgcccgtgcggggagggccaaagttcgcggccaagccacataacccgggctttggaatgggcggcccaatgcacaatgaagtccctccgcccccaaatctacgaggtaggggcagaggcggcagcatcaggggtcgaggccggggccgcggattcggcggcgccaaccacggcgggtacatgaacgctggcgcgggatatggcagctacggatatggggggaactctgccactgccggatataccggctttgtgtag

SEQ ID NO: 246105 - DNA, 2685 bp, Artificial Sequence
  derived and/or modified sequence
atgaggcccatgaggatctttgtgaatgatgacagacatgtgatggccaagcacagctctgtgtaccccacccaggaggagctggaggccgtgcagaacatggtgagccacacagagcgggccctgaaggctgtgtctgactggattgatgagcaggagaagggcagcagcgagcaggccgagagtgacaacatggatgtgcccccagaagatgacagcaaggagggcgctggggagcagaagacagagcacatgaccaggaccctgcggggcgtgatgagggtgggcctggtggccaagggcctgctgctgaagggggacctggacctggagctggtgctgctgtgcaaggagaagcccaccacagccctgctggacaaggtggccgacaacctggccatccagctggccgctgtgacagaggacaagtatgagatcctgcagagcgtggatgatgctgccatcgtcatcaagaacaccaaggagccccccctgagcctgaccatccacctgaccagccctgtggtgcgggaggagatggagaaggtgctggccggggagaccctgtctgtgaatgaccccccagatgtgctggaccggcagaagtgcctggccgccctggccagcctgcggcatgccaagtggttccaggcccgggccaacggcctgaagagctgtgtgattgtcatccgggtgctgcgggacctgtgcaccagggtgcccacctggggccccctgcggggctggcccctggagctgctgtgtgagaagagcattggaacagccaaccggcccatgggcgctggggaggccctgcggcgggtgctggagtgcctggccagcggcatcgtgatgccagatggcagcggcatctatgacccctgtgagaaggaggccacagatgccatcggccacctggaccggcagcagcgggaggacatcacccagagcgcccagcacgccctgcggctggccgccttcggccagctgcacaaggtgctgggcatggaccccctgcccagcaagatgcccaagaagcccaagaatgaaaatcctgtggactacacagtgcagatcccccccagcaccacctacgccatcacccccatgaagaggcccatggaggaggatggagaggagaagagccccagcaagaagaagaagaagatccagaagaaggaggagaaggccgagcccccccaggccatgaatgccctgatgaggctgaaccagctgaagccaggcctgcagtacaagctggtgtcccagacaggccctgtgcacgcccccatcttcaccatgtctgtggaggtggatggcaacagctttgaggccagcggccccagcaagaagacagccaagctgcacgtggccgtgaaggtgctgcaggacatgggcctgcccactggagctgagggccgggacagcagcaagggggaggacagcgctgaggagacagaggccaagccagctgtggtggccccagcccctgtggtggaggccgtgtccacccccagcgctgccttccccagtgatgccacagctgagcagggccccatcctgaccaagcacggcaagaaccctgtgatggagctgaatgagaagaggcggggcctgaagtatgagctgatcagcgagactggaggcagccatgacaagagatttgtgatggaggtggaggtggatggccagaagttccagggcgccggcagcaacaagaaggtggccaaggcctatgctgccctggccgccctggagaagctgttcccagacacccccctggccctggatgccaacaagaagaagagggcccctgtgcctgtgcggggcggccccaagtttgctgccaagccccacaaccctggcttcggcatgggcggccccatgcacaatgaggtgcccccaccacccaacctgcggggccggggccggggcggcagcatccggggccggggccggggccggggctttggaggagccaaccacggcggctacatgaatgctggggccggctacggcagctatggctatggaggcaacagcgccacagctggctacagccagttctacagcaatggaggccacagcggaaatgccagcggcggcggcggcggcggcggcggcggcagcagcggctacggcagctactaccagggcgacaactacaacagccctgtgccccccaagcatgctgggaagaagcagccccatggaggccagcagaagcccagctatggcagcggctaccagagccaccagggccagcagcagagctacaaccagagcccctacagcaactacggccccccccagggcaagcagaagggctacaaccacggccagggcagctacagctacagcaacagctacaacagccctgggggcggcggcggcagtgactacaactatgagagcaagttcaactacagcggcagcggcggccgcagcggcggcaacagctatggcagcggcggggccagctacaaccctggcagccatggaggctacggcggcggcagcggcggcggcagcagctaccagggcaagcagggcggctacagccagagcaactacaacagccctggcagcggccagaactacagcggcccccccagcagctaccagagcagccagggcggctatggaagaaatgctgaccacagcatgaactaccagtacagatag

SEQ ID NO: 246106 - DNA, 2295 bp, Artificial Sequence
  derived and/or modified sequence
atgaggcccatgaggatctttgtgaatgatgacagacatgtgatggccaagcacagctctgtgtaccccacccaggaggagctggaggccgtgcagaacatggtgagccacacagagcgggccctgaaggctgtgtctgactggattgatgagcaggagaagggcagcagcgagcaggccgagagtgacaacatggatgtgcccccagaagatgacagcaaggagggcgctggggagcagaagacagagcacatgaccaggaccctgcggggcgtgatgagggtgggcctggtggccaagggcctgctgctgaagggggacctggacctggagctggtgctgctgtgcaaggagaagcccaccacagccctgctggacaaggtggccgacaacctggccatccagctggccgctgtgacagaggacaagtatgagatcctgcagagcgtggatgatgctgccatcgtcatcaagaacaccaaggagccccccctgagcctgaccatccacctgaccagccctgtggtgcgggaggagatggagaaggtgctggccggggagaccctgtctgtgaatgaccccccagatgtgctggaccggcagaagtgcctggccgccctggccagcctgcggcatgccaagtggttccaggcccgggccaacggcctgaagagctgtgtgattgtcatccgggtgctgcgggacctgtgcaccagggtgcccacctggggccccctgcggggctggcccctggagctgctgtgtgagaagagcattggaacagccaaccggcccatgggcgctggggaggccctgcggcgggtgctggagtgcctggccagcggcatcgtgatgccagatggcagcggcatctatgacccctgtgagaaggaggccacagatgccatcggccacctggaccggcagcagcgggaggacatcacccagagcgcccagcacgccctgcggctggccgccttcggccagctgcacaaggtgctgggcatggaccccctgcccagcaagatgcccaagaagcccaagaatgaaaatcctgtggactacacagtgcagatcccccccagcaccacctacgccatcacccccatgaagaggcccatggaggaggatggagaggagaagagccccagcaagaagaagaagaagatccagaagaaggaggagaaggccgagcccccccaggccatgaatgccctgatgaggctgaaccagctgaagccaggcctgcagtacaagctggtgtcccagacaggccctgtgcacgcccccatcttcaccatgtctgtggaggtggatggcaacagctttgaggccagcggccccagcaagaagacagccaagctgcacgtggccgtgaaggtgctgcaggacatgggcctgcccactggagctgagggccgggacagcagcaagggggaggacagcgctgaggagacagaggccaagccagctgtggtggccccagcccctgtggtggaggccgtgtccacccccagcgctgccttccccagtgatgccacagctgagcagggccccatcctgaccaagcacggcaagaaccctgtgatggagctgaatgagaagaggcggggcctgaagtatgagctgatcagcgagactggaggcagccatgacaagagatttgtgatggaggtggaggtggatggccagaagttccagggcgccggcagcaacaagaaggtggccaaggcctatgctgccctggccgccctggagaagctgttcccagacacccccctggccctggatgccaacaagaagaagagggcccctgtgcctgtgcggggcggccccaagtttgctgccaagccccacaaccctggcttcggcatgggcggccccatgcacaatgaggtgcccccaccacccaacctgcggggccggggccggggcggcagcatccggggccggggccggggccggggctttggaggagccaaccacggcggctacatgaatgctggggccggctacggcagctatggctatggaggcaacagcgccacagctggctacagcaagagcagccggcccccaccacccagccggccccgctgctgcgtggtgcgctgcagcggcagcccctgtggccccagctgtgacccctacctggccgtgtttggcaccccctgcctgcagtggtttgtgtcctgccactacaactttgtgtgggtggagttcctgtccttctgcagctctgtgtccctgtgcctcttcaccctgcgggtgtctggcaacagcgtgtgcctgtag

SEQ ID NO: 246107 - DNA, 2073 bp, Artificial Sequence
  derived and/or modified sequence
atgaggcccatgaggatctttgtgaatgatgacagacatgtgatggccaagcacagctctgtgtaccccacccaggaggagctggaggccgtgcagaacatggtgagccacacagagcgggccctgaaggctgtgtctgactggattgatgagcaggagaagggcagcagcgagcaggccgagagtgacaacatggatgtgcccccagaagatgacagcaaggagggcgctggggagcagaagacagagcacatgaccaggaccctgcggggcgtgatgagggtgggcctggtggccaagggcctgctgctgaagggggacctggacctggagctggtgctgctgtgcaaggagaagcccaccacagccctgctggacaaggtggccgacaacctggccatccagctggccgctgtgacagaggacaagtatgagatcctgcagagcgtggatgatgctgccatcgtcatcaagaacaccaaggagccccccctgagcctgaccatccacctgaccagccctgtggtgcgggaggagatggagaaggtgctggccggggagaccctgtctgtgaatgaccccccagatgtgctggaccggcagaagtgcctggccgccctggccagcctgcggcatgccaagtggttccaggcccgggccaacggcctgaagagctgtgtgattgtcatccgggtgctgcgggacctgtgcaccagggtgcccacctggggccccctgcggggctggcccctggagctgctgtgtgagaagagcattggaacagccaaccggcccatgggcgctggggaggccctgcggcgggtgctggagtgcctggccagcggcatcgtgatgccagatggcagcggcatctatgacccctgtgagaaggaggccacagatgccatcggccacctggaccggcagcagcgggaggacatcacccagagcgcccagcacgccctgcggctggccgccttcggccagctgcacaaggtgctgggcatggaccccctgcccagcaagatgcccaagaagcccaagaatgaaaatcctgtggactacacagtgcagatcccccccagcaccacctacgccatcacccccatgaagaggcccatggaggaggatggagaggagaagagccccagcaagaagaagaagaagatccagaagaaggaggagaaggccgagcccccccaggccatgaatgccctgatgaggctgaaccagctgaagccaggcctgcagtacaagctggtgtcccagacaggccctgtgcacgcccccatcttcaccatgtctgtggaggtggatggcaacagctttgaggccagcggccccagcaagaagacagccaagctgcacgtggccgtgaaggtgctgcaggacatgggcctgcccactggagctgagggccgggacagcagcaagggggaggacagcgctgaggagacagaggccaagccagctgtggtggccccagcccctgtggtggaggccgtgtccacccccagcgctgccttccccagtgatgccacagctgagcagggccccatcctgaccaagcacggcaagaaccctgtgatggagctgaatgagaagaggcggggcctgaagtatgagctgatcagcgagactggaggcagccatgacaagagatttgtgatggaggtggaggtggatggccagaagttccagggcgccggcagcaacaagaaggtggccaaggcctatgctgccctggccgccctggagaagctgttcccagacacccccctggccctggatgccaacaagaagaagagggcccctgtgcctgtgcggggcggccccaagtttgctgccaagccccacaaccctggcttcggcatgggcggccccatgcacaatgaggtgcccccaccacccaacctgcggggccggggccggggcggcagcatccggggccggggccggggccggggctttggaggagccaaccacggcggctacatgaatgctggggccggctacggcagctatggctatggaggcaacagcgccacagctggctacacaggctttgtgtag

SEQ ID NO: 246108 - DNA, 2685 bp, Artificial Sequence
  derived and/or modified sequence
atgcggcccatgcggatcttcgtgaacgacgaccggcacgtgatggcgaaacatagcagtgtatatcccacgcaggaggaattagaggccgttcaaaacatggtgtcacataccgagagggctctcaaagccgtgtcggattggatagatgagcaggagaaagggagctctgaacaggctgagtccgacaatatggacgtgccaccagaggacgacagcaaggagggagccggggagcaaaagaccgagcacatgaccagaactctaagaggggtcatgagagtgggattagttgccaaagggcttttgctcaagggagatctcgacctggaactcgtcttgctgtgtaaagagaagcccacaaccgcactactggacaaggtggcggacaacctggctattcagctggccgctgtgaccgaggataaatacgaaatcttgcagtctgtggacgacgcagctatcgttattaagaatacaaaagagccaccgttatctctgaccatacatttgacatccccggtcgtccgagaggaaatggagaaagtcctcgcaggtgagactcttagtgtgaatgaccctcctgacgtcctggatcgtcagaaatgtttggccgctttggcctccctcaggcatgccaagtggttccaggccagggccaatggtcttaaatcttgcgttatcgtgatccgggtgctcagggacctctgtaccagggtgcctacgtggggaccgttgagagggtggccactggaattgctgtgtgagaaatcaataggaacagcaaatcgaccaatgggggcaggagaggcgctgcgtcgcgtcctggaatgtttagcttccgggatcgtaatgccagacggaagcggcatttatgacccctgcgaaaaggaggccactgatgccattggccatctcgatcggcaacaacgagaggacattacccagtccgcccaacacgcgttacgcctcgcagcctttgggcagctacacaaagtgttagggatggatcctctaccctcaaagatgccaaagaagccaaaaaacgaaaaccccgtcgattatacagtgcagattccaccttctaccacgtatgccatcacaccaatgaagcgacctatggaagaggacggagaagaaaaaagccctagcaagaagaagaagaagattcagaagaaagaggagaaggcagaaccaccacaggccatgaatgccttgatgcggctgaatcagttgaaacccggcctccaatataaactcgtgtcgcagaccggccctgttcacgccccaattttcacgatgtccgtggaggtggatgggaatagttttgaagcttccggaccttcgaaaaaaaccgccaaacttcacgtggccgttaaagtactgcaggatatgggcctcccaacgggggccgaaggacgagatagcagcaagggagaagactcagctgaagaaaccgaggccaagccagctgttgtggctccagcccctgtggttgaagctgtgtcaacaccgtctgccgcattccccagcgatgctacagccgaacaggggccaatcctcactaagcacggaaagaaccctgttatggagttgaatgagaagcgccggggcctgaaatacgagttgatctccgagactggggggagccacgataaaagatttgtgatggaagtggaggtagatggccagaagtttcagggtgcagggtcaaacaagaaggtcgccaaagcatatgctgcgttggccgcactggagaagctgttccctgacacccccctggccctggatgctaataaaaagaaaagagccccagttcctgtacgggggggccccaagttcgcagctaagcctcacaatcccggatttgggatgggcgggcctatgcataatgaggtgcctcctccaccaaatctgcggggcagaggacgcggcgggtcgatccggggacgggggcgaggcagagggttcggaggtgcaaatcacggcggatacatgaacgcgggggcaggttacggatcatatggatatggcgggaatagcgctactgctggctacagccaattttactcaaacggcgggcattctggtaatgctagtggaggcgggggcggaggaggaggcggttcttctggctatgggagctattatcaaggggacaactataactctccagtgccccccaagcatgcaggcaagaaacagcctcacggtggccagcagaagccatcatacgggagcggctaccaaagccatcagggccagcagcagtcctacaatcaatcaccatactcgaactacggacctcctcagggcaaacaaaagggatacaaccacgggcaggggtcatattcctactccaactcctacaacagccccggtggggggggggggtctgactacaactatgagtccaagtttaattacagtggaagcggtggaaggagcggcggaaactcctatggcagcggtggggcttcttataatccaggcagccatggtggttacggcggaggctccgggggaggaagctcgtaccagggaaagcagggcggctattcacagtctaattacaattcaccaggaagtggacaaaattatagcggtccaccctcatcctatcaaagttcacagggcggctatggccgaaatgctgaccactccatgaactatcagtaccgctag

SEQ ID NO: 246109 - DNA, 2295 bp, Artificial Sequence
  derived and/or modified sequence
atgcggcccatgcggatcttcgtgaacgacgaccggcacgtgatggcgaagcattcaagcgtataccctacccaagaagagctcgaagccgtccagaatatggtgagtcataccgaaagagcactgaaagctgtgtctgactggatagacgagcaggaaaaagggtcatcagagcaggccgagagcgataacatggacgttcctccagaggacgacagtaaggaaggcgccggggagcagaagacagagcacatgaccaggacgcttaggggagtgatgcgcgtgggtctggtggcaaagggccttctgctaaagggagatctggatcttgagttggttttgttgtgtaaagaaaagccgaccacagcactgctggacaaagtggctgacaacctggcaattcagcttgccgcagtcacagaagacaagtatgagattctgcagagcgtggatgatgcggctatcgtgattaaaaataccaaggagccccctctcagtctcactatccatctgacctccccagtggtcagggaggaaatggagaaagtccttgcgggggaaacactgtccgtgaatgatcctcccgacgtgctggataggcagaagtgccttgcagctctagccagccttcgacacgcaaagtggtttcaggctcgggctaacggcctgaaatcctgcgtgattgtcataagagttctcagagatctgtgtactagagtgccaacctggggacctctacgcggatggccattggagcttttgtgcgaaaagtcgatcggcactgcaaaccgccccatgggagccggtgaagccctgagaagggtactggagtgcctggcttccggcatcgtaatgccagacggctccgggatctacgatccttgcgaaaaagaggctaccgatgcaattggtcatttggaccgtcaacagcgggaagacataacacagagtgcacagcacgcacttcgcctggcagccttcggacagctgcacaaggttctgggaatggaccctctgccgtcaaagatgcctaaaaagcccaaaaatgagaatcccgtcgattatacggtacagattcccccaagcacaacttacgcaatcacgcccatgaaaagaccaatggaggaagatggcgaggagaaatcaccaagtaaaaaaaagaaaaagattcagaagaaggaggaaaaagctgagccgcctcaggctatgaacgccttgatgcggctcaaccagttgaaaccaggactacagtataagttagtgtcacagaccggcccggtccatgcccccatttttactatgtctgtagaggtggacggtaatagctttgaagcttccggcccttctaaaaaaacagccaaactccatgtcgcggtgaaggtcttacaggatatggggctgccaactggagctgaaggaagagactcctcaaagggtgaagacagcgctgaggagaccgaggcgaaaccggctgtggtcgcccccgcccctgtggtggaagccgtctctaccccgtcagcagctttccccagcgacgcgactgcagaacaggggccaattctgactaagcacgggaaaaatccagtgatggagctgaacgagaagcgccgagggctcaagtacgagctcatcagcgaaaccgggggaagccacgataagcgcttcgtcatggaagtcgaagtggatggacagaagtttcaaggggccggttcaaacaaaaaagtcgctaaggcttacgccgcactcgccgctctggagaaattattccccgacacaccactggcgctggacgctaacaagaaaaaaagagctccggttcccgtgagagggggccccaagttcgctgcaaaaccacacaacccggggtttggtatgggtgggccaatgcacaatgaggtgccgccaccgccaaatttgaggggtcgtggacgcggcggctccattcgtgggcggggtcgtggccggggctttggcggcgccaatcacggcggctatatgaatgctggagccggttatgggtcatacggctatggaggtaactcagctacagctggctacagcaaaagttctaggcccccacctccgtcgagaccacgctgttgtgtggtgagatgttctgggtccccttgcgggccctcgtgcgatccgtacttggctgtgtttggcacaccttgcctgcagtggtttgtgtcctgccattacaatttcgtatgggtggaatttctcagcttttgtagcagtgttagcctttgtctctttactttgcgagtatctggaaattccgtatgtctttag

SEQ ID NO: 246110 - DNA, 2073 bp, Artificial Sequence
  derived and/or modified sequence
atgcggcccatgcggatcttcgtgaacgacgaccggcacgtgatggccaaacatagtagcgtctacccaacccaagaggagctagaggctgtgcaaaatatggtgtcccacacagagcgggctctgaaggccgtgtctgattggatcgacgagcaggaaaaaggttccagcgaacaagcagaatcagacaacatggacgtgccccccgaagacgactccaaagaaggggcgggcgagcagaaaacagaacatatgactcggaccttgaggggggttatgagagtggggcttgtggccaaagggctgctgctgaaaggggacctggatcttgaactcgttctgctgtgcaaggagaagcctacgaccgcactcttagacaaagttgctgataacctcgcgatccagctggccgctgtgacagaagacaaatacgagatcttgcagagcgtggacgatgctgctatcgtaatcaagaataccaaggaaccaccattgagcctgaccattcatctcacatcaccagtggtacgggaggaaatggaaaaagtgttggcaggtgaaactctgtcagtgaacgatccccccgacgtcctggacaggcagaagtgtctggctgctctggcctcacttcgacacgctaagtggttccaggcccgagctaacggcctgaagtcgtgcgtgattgtgatcagagttttacgcgatttatgtactagggttcctacttggggcccattgagagggtggcccctcgagctgctgtgcgaaaagagcatcggcaccgcgaatagacccatgggggcgggggaggccctaagaagggtattagaatgtttggcttcaggcatcgtaatgccagacggcagtggaatttatgacccttgcgaaaaggaggccactgatgctatcggacacctggacaggcagcagagagaagacatcacacagagcgctcagcacgccctccgccttgcggcatttggccagttacataaggtgctgggcatggatcccttaccttcaaaaatgccaaagaagcctaaaaatgagaatcctgtcgattataccgtgcaaattccaccttcgaccacctacgccatcacaccgatgaaaagacccatggaagaggacggcgaggagaagtccccctccaagaagaaaaaaaagatccagaagaaggaagagaaggccgagcccccccaggctatgaacgctcttatgaggctgaatcagcttaaaccgggtttgcaatacaagttagtcagtcaaacgggccccgtgcacgccccaatattcactatgtctgtcgaagtggatgggaactcgtttgaagcctcagggccctcaaaaaagacagccaaactgcacgtggctgtgaaggttctacaggatatgggcctaccaacaggggcggagggacgagattcctccaagggcgaagacagcgccgaggagaccgaggccaagccggccgtggttgcccccgcacctgtggtggaggctgtgtctacaccttcagcggcctttccaagcgatgccaccgcagagcagggtcccattctgaccaaacacggcaaaaaccctgtaatggaactaaatgaaaaaagacgcggactgaaatatgaactcatctccgagactggcggcagtcacgataagaggttcgtcatggaggtggaggtggacgggcagaagttccagggagctggcagcaataaaaaggtggctaaggcatatgccgcactcgccgccctcgagaagctgttccccgatactcccctggctctggacgccaataagaaaaagcgcgctcccgtccctgtgcgtggcggtcctaagtttgcggcaaaacctcacaacccaggatttggaatgggggggccaatgcacaacgaagtgccaccccctcccaacctgaggggtagaggcagaggagggtctatacgcggccgcggccgcgggcgtggcttcggaggggcaaaccacggcggttatatgaacgccggagccggttatggaagctacggctatggagggaactcagctaccgccggatatacaggttttgtatag

SEQ ID NO: 246111 - DNA, 2685 bp, Artificial Sequence
  derived and/or modified sequence
atgcgtcccatgcgaatcttcgtgaacgacgaccgccatgtgatggcaaaacattctagtgtgtatccaactcaggaagaattggaggccgtccagaacatggtgtcccacaccgagcgtgctctcaaagctgtaagcgactggattgatgagcaggaaaagggatcatctgagcaggccgaaagcgataacatggatgttccccctgaggacgactcgaaggagggtgcaggcgagcagaagactgaacacatgacgcggactttacggggagtgatgagggttggtctggttgcaaaagggcttctgctgaaaggcgatcttgatctggagctggtattgctctgcaaagagaaacctaccacagctctgctggataaagtcgctgataacctagccatccagctcgccgctgttacagaagacaaatacgagattcttcagagcgtggatgatgcggctatagttataaagaacaccaaggagccccctctctccctaaccatacacctcactagtcccgtagtgagggaagagatggagaaagtactcgcaggagagaccttgtccgtaaacgatccgccagacgtgctggacagacaaaagtgtctggctgcgctggcgtctctgcgtcacgctaagtggttccaggcgcgtgcaaatggtctgaaatcttgtgttatagtaattagagtgctgcgcgatctctgtacaagggtcccaacttggggtcccttaaggggatggcctctcgagctgctctgtgaaaagtctatcgggacagcgaacagacctatgggggctggagaggccctccgccgagtcctagaatgtttggcatccggcatagtgatgcctgatggctccggcatctacgacccctgtgaaaaggaggccaccgatgccattgggcacctagatcgtcagcagagagaagatattacccagtctgcacagcacgctctacgcctggcagctttcgggcaactccacaaggttcttggcatggatccactaccatctaaaatgcccaagaaacccaagaacgaaaatccagtggactacactgttcagattccacctagcactacatacgccattacacctatgaaacgtccaatggaggaggatggggaagagaaaagtccttcaaagaagaagaagaaaatccagaaaaaggaggagaaagcagagccaccacaggcgatgaatgcactgatgagactgaaccagttgaaacccggactccagtacaaactggtcagtcaaacagggcctgtgcatgctccaattttcaccatgtcagtagaggtagatgggaactctttcgaagcatccggcccatccaaaaagacagcaaagttacatgtcgctgtgaaggtacttcaggacatgggtctgcctaccggggctgagggcagagactcgtctaaaggagaggatagcgccgaagagactgaagcaaaacccgctgtggtagcgccagctcctgttgtcgaagcagtgtccaccccctccgcagctttcccctctgacgcaactgccgaacaaggcccaatcctgacaaagcacggcaaaaatccagttatggaattgaatgaaaagcggcgaggcctcaagtatgagctcatctcagaaactggcggtagccacgacaagcgattcgtcatggaggtggaagtcgacggacaaaaatttcagggagctgggtctaataaaaaggtcgctaaggcctatgccgcactggctgctctggaaaagcttttccccgatacgccactggcgttagacgcaaataagaaaaagcgcgcaccggtgcctgtcagggggggtcccaaattcgcggctaaaccacacaacccaggatttggcatgggtggtccaatgcataacgaagttcccccacctccaaatctgagaggacggggaagaggagggtctatcaggggccgtggtagaggaaggggattcggcggagctaatcacggcggatacatgaatgccggagctgggtatgggtcctatggctacggtggaaactcggctacagctggctactcccaattctatagcaacggtgggcatagcggcaacgcatccggcggaggagggggaggaggaggagggtcatctgggtacggttcctactaccagggggataattacaattccccagtgcccccaaagcatgccggaaagaaacagccacacggcggacaacaaaaaccctcgtatggttccgggtaccagtcccaccagggccaacaacaatcttacaaccaatccccctattccaattatggccctcctcaagggaagcagaagggatataatcacgggcaaggtagctatagttactctaacagctacaactctcccggaggagggggtggctctgactataattacgagtcaaaattcaactactccggctcaggcggaaggtcagggggaaattcatatggttccgggggagcatcatataatcctggcagtcacgggggatacggtggtggcagcggcggtggcagtagctaccagggcaaacagggaggttactcccagagtaactacaactcaccgggatctgggcaaaactatagtgggcctccttcctcttatcagtcctcacagggtggatacgggagaaacgccgatcacagtatgaactatcagtacagatag

SEQ ID NO: 246112 - DNA, 2295 bp, Artificial Sequence
  derived and/or modified sequence
atgagaccgatgcggatcttcgtgaacgatgaccgtcatgtgatggctaagcacagcagcgtttaccccacacaggaggagctggaagccgttcagaatatggttagccacaccgaacgagccctgaaagcagtttctgattggattgatgaacaagagaagggatctagcgaacaggcagagtccgacaacatggacgtgcctcccgaggacgactcaaaggagggtgccggtgaacagaaaaccgagcacatgactaggactctccggggagtgatgcgggtaggtcttgtcgctaaaggactgctgctgaagggggatctcgatctcgagctggtcctgctgtgtaaggagaagccaacgaccgcgctgctggataaagtggctgacaaccttgccatccagcttgccgctgtgaccgaggataaatacgaaattctacagtctgttgacgatgccgcaattgtcataaaaaacacgaaagaacctcccctgagccttacaatccacttgacctctcctgtcgtaagagaggaaatggaaaaggtactcgcaggggagactctgagcgtgaatgatccccctgacgtcttggacagacagaagtgtttagccgcattggcaagtctacgtcacgctaagtggtttcaagcacgcgcaaatggattaaagtcctgtgtgattgttatccgggttctccgggacttgtgtacgcgcgtgcccacatggggccctttgcggggttggcccctcgagcttctctgcgagaaatcaattggcacggccaatagacccatgggcgcaggcgaggctctccgacgcgtgctcgagtgcctggcatccgggatcgttatgcccgatgggtctgggatttatgatccctgtgagaaggaagcaactgacgcaatcggccacctggacagacagcagcgtgaggacatcacacagagcgctcagcacgccctacgattagctgcatttggccagctccacaaggtgttaggcatggatccccttccttccaagatgcccaagaaacccaagaatgaaaatcccgttgactataccgtacaaattcccccaagcactacttacgctatcaccccgatgaaaagacccatggaggaagatggagaagaaaagtcaccctccaaaaagaagaaaaagatccagaaaaaagaggagaaggccgagccgcctcaagccatgaacgccctaatgagactcaatcagctgaagccagggctacaatacaagcttgtctcccagacggggccagttcacgcacccatctttacaatgagtgtcgaagttgatggcaatagttttgaagcctcgggcccatcgaagaaaacagccaaattgcacgtggccgtgaaagtccttcaggatatgggcttgcccaccggtgcggaaggacgggatagttccaagggagaggattctgcggaagagactgaggccaaacccgctgtggtcgcccctgcacctgttgtcgaggcagtgagtacgcccagcgcagctttcccttctgacgcaacagccgaacagggacccatattaaccaagcacgggaagaatcccgtgatggagctcaatgaaaagaggcgaggactgaaatacgaactcatttccgaaaccggcggtagccacgataagcggtttgtgatggaggtggaggtggacggacaaaagtttcagggggcaggctccaataagaaggtggctaaagcttacgctgcactggcagccctcgagaagttgtttcccgacactcccctggccctagatgctaacaagaagaagagggctcccgtacccgttaggggtgggcctaagttcgctgccaaaccccacaaccctggcttcgggatgggcggtcctatgcataacgaggtcccccctccgcctaatttaagaggacgaggccgaggcggatccatccgaggtcgagggagaggacgtgggttcggcggagccaaccacggagggtacatgaatgcgggtgccggatatggatcttacggctacggagggaatagtgctacagctggatacagtaagtcgagccgccctcctccacccagtcgacctaggtgttgtgtcgtgcgttgctctggttcgccctgtgggcctagctgtgacccatatttggcagtattcggtacgccatgccttcagtggttcgtcagttgccactataacttcgtctgggttgagttcctttccttctgttctagcgtgtccctctgcttgttcacactacgagtgtccggtaatagcgtctgcctttag

SEQ ID NO: 246113 - DNA, 2073 bp, Artificial Sequence
  derived and/or modified sequence
atgcgcccaatgcgcatttttgtgaatgatgacagacatgtcatggccaagcattcttccgtctatcctacccaagaggaactcgaggccgtgcagaatatggtttctcacactgagagagccctcaaagcggtcagcgactggatagacgagcaggaaaagggttcttccgagcaagcagaatcagataacatggacgtgcctcctgaggacgacagcaaggagggagccggagaacaaaagaccgagcacatgactagaactctcagaggagtcatgagggtggggcttgtcgcaaaaggccttcttttgaagggagatctggatctagagctggtcctcctgtgtaaagaaaaacccaccaccgcattattggataaggtggcagataatctggcaatccagctggcggctgtgacggaggataagtacgagatcctgcagtccgttgacgacgccgcaatagttattaaaaatacaaaagagcctcccctcagcctgacaattcatcttacttcaccagtagtcagagaggaaatggaaaaggtgctggcaggcgaaaccttgagcgtgaatgacccccctgacgtcctggataggcagaagtgtctcgcagccctagctagcctccgacatgcaaagtggtttcaggctcgagcaaacggactgaagagctgcgtgatagttatccgagttcttagagatttgtgcacccgcgttcctacatggggaccactgcgcggatggcccttagaactgctatgtgagaagagcattggaactgcaaataggccaatgggtgctggagaggccttacgcagggttcttgagtgcctcgccagcggcattgtgatgcctgacggcagtggcatttacgatccgtgtgaaaaggaagcaacagatgccatcggccatctcgaccgccagcagcgagaagatatcacgcaatccgcccagcatgcgctgagactcgctgcttttggacagctgcacaaagttctcggaatggatcctctcccgtctaagatgccaaaaaagcctaagaatgagaatcccgtcgattataccgttcaaatccctccatcaacaacttatgccatcaccccaatgaagcggccaatggaggaagatggcgaagagaagtccccctctaaaaaaaagaaaaagatccagaagaaagaagagaaggctgagcccccacaagccatgaatgccttgatgaggttaaaccagctgaaacctgggttgcagtacaaacttgtgagtcagacaggaccagtccacgccccaatttttacaatgagcgtggaggtggacgggaactcgtttgaggccagcgggccatctaaaaaaaccgcaaagctccatgtggccgtgaaagtattacaagacatgggactgcccaccggggctgagggaagagatagcagtaaaggcgaagatagcgccgaggagactgaggcgaaacctgctgtagtggcgcctgccccagtagtggaagccgtcagcacgccctccgctgctttcccttcagatgcgactgccgagcagggacccatcttaaccaaacacggaaagaatccagtgatggagctaaacgagaagcgcagaggtctaaagtacgagctaatcagcgaaacagggggatcccacgacaaacgctttgtgatggaggtcgaagtggatggtcaaaagtttcagggcgcagggtcaaataaaaaagtagctaaagcctacgccgcactagctgccctggagaagctgttccctgatacaccactcgcgctggacgcaaacaaaaaaaagcgtgcacccgtaccagtgagaggaggaccaaaatttgccgctaagccgcacaacccaggctttgggatgggagggccaatgcataacgaggtccctcccccacccaacttgagaggaagaggacggggtggatccatcagaggcaggggtcgcggtcgagggttcgggggagccaatcatgggggatatatgaatgccggtgccggttacggtagttacggctatggaggaaattctgctacggccggatatacggggttcgtttag

SEQ ID NO: 246114 - DNA, 6107 bp, Artificial Sequence
  derived and/or modified sequence
aaagggggcggggcttcagccggtcacgtgttcccgcacctccccggcgcgcgcctgcccgcccgcccgctcgcccccggtccggactcctcctcctcctcttctcgccattgcagttggacccagcagcccggcgcgcaccgcgtggcttttgggggcagaccccggcgggctgtggcaggagggcggcggcggcggctgcggtcgaagaaggggacgccgacaagagttgaagtattgataacaccaaggaactctatcacaatttgaaaagataagcaaaagtttgatttccagacactacagaagaagtaaaaatgcgtccaatgcgaatttttgtgaatgatgaccgccatgtgatggcaaagcattcttccgtttatccaacacaagaggagctggaggcagtccagaacatggtgtcccacacggagcgggcgctcaaagctgtgtccgactggatagacgagcaggaaaagggtagcagcgagcaggcagagtccgataacatggatgtgcccccagaggacgacagtaaagaaggggctggggaacagaagacggagcacatgaccagaaccctgcggggagtgatgcgggtgggcctggtggcaaagggcctcctactcaagggggacttggatctggagctggtgctgctgtgtaaggagaagcccacaaccgccctcctggacaaggtggccgacaacctggccatccagcttgctgctgtaacagaagacaagtacgaaatactgcaatctgtcgacgatgctgcgattgtgataaaaaacacaaaagagcctccattgtccctgaccatccacctgacatcccctgttgtcagagaagaaatggagaaagtattagctggagaaacgctatcagtcaacgaccccccggacgttctggacaggcagaaatgccttgctgccttggcgtccctccgacacgccaagtggttccaggccagagccaacgggctgaagtcttgtgtcattgtgatccgggtcttgagggacctgtgcactcgcgtgcccacctggggtcccctccgaggctggcctctcgagctcctgtgtgagaaatccattggcacggccaacagaccgatgggtgctggcgaggccctgcggagagtgctggagtgcctggcgtcgggcatcgtgatgccagatggttctggcatttatgacccttgtgaaaaagaagccactgatgctattgggcatctagacagacagcaacgggaagatatcacacagagtgcgcagcacgcactgcggctcgctgccttcggccagctccataaagtcctaggcatggaccctctgccttccaagatgcccaagaaaccaaagaatgaaaacccagtggactacaccgttcagatcccaccaagcaccacctatgccattacgcccatgaaacgcccaatggaggaggacggggaggagaagtcgcccagcaaaaagaagaagaagattcagaagaaagaggagaaggcagagcccccccaggctatgaatgccctgatgcggttgaaccagctgaagccagggctgcagtacaagctggtgtcccagactgggcccgtccatgcccccatctttaccatgtctgtggaggttgatggcaattcattcgaggcctctgggccctccaaaaagacggccaagctgcacgtggccgttaaggtgttacaggacatgggcttgccgacgggtgctgaaggcagggactcgagcaagggggaggactcggctgaggagaccgaggcgaagccagcagtggtggcccctgccccagtggtagaagctgtctccacccctagtgcggcctttccctcagatgccactgccgagcaggggccgatcctgacaaagcacggcaagaacccagtcatggagctgaacgagaagaggcgtgggctcaagtacgagctcatctccgagaccgggggcagccacgacaagcgcttcgtcatggaggtcgaagtggatggacagaagttccaaggtgctggttccaacaaaaaggtggcgaaggcctacgctgctcttgctgccctagaaaagcttttccctgacacccctctcgcccttgatgccaacaaaaagaagagagccccagtacccgtcagagggggaccgaaatttgctgctaagccacataaccctggcttcggcatgggaggccccatgcacaacgaagtgcccccaccccccaaccttcgagggcggggaagaggcgggagcatccggggacgagggcgcgggcgaggatttggtggcgccaaccatggaggctacatgaatgccggtgctgggtatggaagctatgggtacggaggcaactcggcgacagcaggctacagtcagttctacagcaacggagggcattctgggaatgccagtggcggtggcggcgggggcggtggtggctcctccggctatggctcctactaccaaggtgacaactacaactcaccggtgcccccaaaacacgctgggaagaagcagccgcacgggggccagcagaagccctcctacggctcgggctaccagtcccaccagggccagcagcagtcctacaaccagagcccctacagcaactatggccctccacagggcaagcagaaaggctataaccatggacaaggcagctactcctactcgaactcctacaactctcccgggggcgggggcggatccgactacaactacgagagcaaattcaactacagtggtagtggaggccgaagcggcgggaacagctacggctcaggcggggcatcctacaacccagggtcacacgggggctacggcggaggttctgggggcggctcctcataccaaggcaaacaaggaggctactcacagtcgaactacaactccccggggtccggccagaactacagtggccctcccagctcctaccagtcctcacaaggcggctatggcagaaacgcagaccacagcatgaactaccagtacagataagcccccgcggggcggagatttctaccttctgcacttactccccatcagaagatcgagttttatgcatcacagttaacatgtcagctggccctccaggcccccgcccccatcccgtccacgttgctgtgtcgtgaggtgcagcgggtcaccctgtggcccgtcctgtgacccatatttagccgtgtttgggactccgtgtcttcaatggtttgttagttgccattacaactttgtctgggtagagtttttgagtttttgcagttcagtatccctctgtctattcacacttcgtgttagtggtaactcagtttgtctttaaatagttacagaagggatacgtcatttgttaatgcttttgtgaagtgagttaaacgagctttctgtattttaatgctttagtgtttcagttttataagtgaagattttattttaaaaaccagtgggaaagagtggggggtttctttttatgtctgggtcattcaggcagtacatctgaattaagctgaatgtagacaaataaagaaaaacaaaactgcgcccgtcttaggcctgggtgtctgacccaccagcagtgcaatgggcaggtttccccactctattcctgctcttgggaaagcagcgtgggccatcaggatggtccctggtccttagagagggtccagttcaggcttctagacattttactcatgctcagcgaaggctggttcctggtcccctgggctgtgtagacccggtgtcccaccaggctccaggctcccaccatctacagaggggcttacagcgcccattctggtcttggggaacccatcacaaaataggctttttctgctccccgattctggtgtagttctaagtacacagtgatgtcctctgtaggggcgtgcctgtggtggaacataacgcagttacaaaagaaagggcaggtgaggcctgggtaaccccagccatggaccgtcagtggctggagggagcttcgtgtctgtgctggagctgcagcctgctcgccatctggaggctcagtggagtggggagttggggttctcataccagcagatttccctagagcgtgattctcccatctgaggcaatcttgcctcccaggggaaattttgcaatgtttggaggatgttgtcacagctagtagcgggtgctctgggatctggtggatagatgccaaggatgctgtcaagcatactgtactgcccagaacagtggcccatagcagggacctgccctatcaaaatatcaggtgtatggaggtggagtcccaacgctagagcagcccttctcagctccaccctgcccggggagggaggaggagctctggtttcagagcagtgccgggattgcctttccccaggatctgtgtcggccatccaggaagaactgtactggccaagcctgggaccacacgtctgcagagatcctgctctgctggcctgagccccaggccttggcctcctgtgcttgggtaaccatggccactgggaaaagcaaggaccgtgtttgactttcttggagaggtgaaagaggtgaaagaacaagttgtgtgctagaaaacttttgaggaattcttatttgtgttagagcagaggaggtcccagataccaagtggcgcctcccaggaaaggctgggagaagaggtggcctggagtaccccgagatcccagcagcgcacacagtggagggatgaggatggatgggtcctaacccctgattttgatgggatgtgttcatgtcctatctcctctcctggacacattaaggggttgggacaagaagagactcctgtgagatcagcagacctcgtgtttaaggagagaatgcctgcctgcaacactcatggagagggacacttcctggccccacctgctaaatacctccaaactctgggcaggcgcctgcattctcaacacaggacttcccttaacagtttccggatcagtgaccaccaccacgttcaggtttctgaatgcagacccaccacgagggatggattccacccgcccgccctgctgcagatacatgcggcacagcaggcacgtgcctggagagaacagctcctgagcacagcacccttggagccctcaccccgctcacgatcctcaccagtgctgatgatgccgtcatgctgctggcctgagacagtatcccagctacaacaggacgacaccgggttcaggaatatgtggctatcaccttgagcactgacagtggccttccaggctagttgccttccaaacgcaggtagccgacctgcaggagggcctacaaacgggcccagcaagagctgggcaacagctggcttgtgaaatgagacaccttgaccaatatgctttgggtggacggtctcctacatgttcagtggaggccaccaggagcatccatgagcggggaaggggtccacacccttacatggcaagttgatacgatggggtgcttggtggatgggccatggaggtccgtgagctggaactgggcacacgccatcccagagggctcaggatgccccaggaaggaaagaagggcaacagactacacgattggacgtgtgtggttgactgggatgaagttggagggaggggcagggccttgcaggggattggtactgatcccagggaggaagtgttggggcttcatgaactaggatgaaaggaggcccctgagccatgacaaggggcacatccaggatttccgccaccctgaatttagtagagctagtaggccctggtcgtcactctgggcagggatgccgtcagccttgagggtcgccacccacctgtgtgttgccctctgtcctggcagggaaacatacaccccttgtctcaccaccaaccttgcttgtgtagtcagcagggctggccctgccccaaggactcactgcatgtacccggacccctaggcctggcctttgcagcatagttgggagcttctggattccatctgcacctgtgagccccatgctggctgtgcactgcgcgggcctgagactgctggatacaatgttgggcaacaactcagccagcctgatggcagcctcagaggcttactctaacccatcccagaataaatggagacttcatgtgttcattgtttcattcactc

SEQ ID NO: 246115 - DNA, 2612 bp, Artificial Sequence
  derived and/or modified sequence
aaagggggcggggcttcagccggtcacgtgttcccgcacctccccggcgcgcgcctgcccgcccgcccgctcgcccccggtccggactcctcctcctcctcttctcgccattgcagttggacccagcagcccggcgcgcaccgcgtggcttttgggggcagaccccggcgggctgtggcaggagggcggcggcggcggctgcggtcgaagaaggggacgccgacaagagttgaagtattgataacaccaaggaactctatcacaatttgaaaagataagcaaaagtttgatttccagacactacagaagaagtaaaaatgcgtccaatgcgaatttttgtgaatgatgaccgccatgtgatggcaaagcattcttccgtttatccaacacaagaggagctggaggcagtccagaacatggtgtcccacacggagcgggcgctcaaagctgtgtccgactggatagacgagcaggaaaagggtagcagcgagcaggcagagtccgataacatggatgtgcccccagaggacgacagtaaagaaggggctggggaacagaagacggagcacatgaccagaaccctgcggggagtgatgcgggtgggcctggtggcaaagggcctcctactcaagggggacttggatctggagctggtgctgctgtgtaaggagaagcccacaaccgccctcctggacaaggtggccgacaacctggccatccagcttgctgctgtaacagaagacaagtacgaaatactgcaatctgtcgacgatgctgcgattgtgataaaaaacacaaaagagcctccattgtccctgaccatccacctgacatcccctgttgtcagagaagaaatggagaaagtattagctggagaaacgctatcagtcaacgaccccccggacgttctggacaggcagaaatgccttgctgccttggcgtccctccgacacgccaagtggttccaggccagagccaacgggctgaagtcttgtgtcattgtgatccgggtcttgagggacctgtgcactcgcgtgcccacctggggtcccctccgaggctggcctctcgagctcctgtgtgagaaatccattggcacggccaacagaccgatgggtgctggcgaggccctgcggagagtgctggagtgcctggcgtcgggcatcgtgatgccagatggttctggcatttatgacccttgtgaaaaagaagccactgatgctattgggcatctagacagacagcaacgggaagatatcacacagagtgcgcagcacgcactgcggctcgctgccttcggccagctccataaagtcctaggcatggaccctctgccttccaagatgcccaagaaaccaaagaatgaaaacccagtggactacaccgttcagatcccaccaagcaccacctatgccattacgcccatgaaacgcccaatggaggaggacggggaggagaagtcgcccagcaaaaagaagaagaagattcagaagaaagaggagaaggcagagcccccccaggctatgaatgccctgatgcggttgaaccagctgaagccagggctgcagtacaagctggtgtcccagactgggcccgtccatgcccccatctttaccatgtctgtggaggttgatggcaattcattcgaggcctctgggccctccaaaaagacggccaagctgcacgtggccgttaaggtgttacaggacatgggcttgccgacgggtgctgaaggcagggactcgagcaagggggaggactcggctgaggagaccgaggcgaagccagcagtggtggcccctgccccagtggtagaagctgtctccacccctagtgcggcctttccctcagatgccactgccgagcaggggccgatcctgacaaagcacggcaagaacccagtcatggagctgaacgagaagaggcgtgggctcaagtacgagctcatctccgagaccgggggcagccacgacaagcgcttcgtcatggaggtcgaagtggatggacagaagttccaaggtgctggttccaacaaaaaggtggcgaaggcctacgctgctcttgctgccctagaaaagcttttccctgacacccctctcgcccttgatgccaacaaaaagaagagagccccagtacccgtcagagggggaccgaaatttgctgctaagccacataaccctggcttcggcatgggaggccccatgcacaacgaagtgcccccaccccccaaccttcgagggcggggaagaggcgggagcatccggggacgagggcgcgggcgaggatttggtggcgccaaccatggaggctacatgaatgccggtgctgggtatggaagctatgggtacggaggcaactcggcgacagcaggctacagtaagtcctccaggcccccgcccccatcccgtccacgttgctgtgtcgtgaggtgcagcgggtcaccctgtggcccgtcctgtgacccatatttagccgtgtttgggactccgtgtcttcaatggtttgttagttgccattacaactttgtctgggtagagtttttgagtttttgcagttcagtatccctctgtctattcacacttcgtgttagtggtaactcagtttgtctttaa

SEQ ID NO: 246116 - DNA, 3285 bp, Artificial Sequence
  derived and/or modified sequence
aaagggggcggggcttcagccggtcacgtgttcccgcacctccccggcgcgcgcctgcccgcccgcccgctcgcccccggtccggactcctcctcctcctcttctcgccattgcagttggacccagcagcccggcgcgcaccgcgtggcttttgggggcagaccccggcgggctgtggcaggagggcggcggcggcggctgcggtcgaagaaggggacgccgacaagagttgaagtattgataacaccaaggaactctatcacaatttgaaaagataagcaaaagtttgatttccagacactacagaagaagtaaaaatgcgtccaatgcgaatttttgtgaatgatgaccgccatgtgatggcaaagcattcttccgtttatccaacacaagaggagctggaggcagtccagaacatggtgtcccacacggagcgggcgctcaaagctgtgtccgactggatagacgagcaggaaaagggtagcagcgagcaggcagagtccgataacatggatgtgcccccagaggacgacagtaaagaaggggctggggaacagaagacggagcacatgaccagaaccctgcggggagtgatgcgggtgggcctggtggcaaagggcctcctactcaagggggacttggatctggagctggtgctgctgtgtaaggagaagcccacaaccgccctcctggacaaggtggccgacaacctggccatccagcttgctgctgtaacagaagacaagtacgaaatactgcaatctgtcgacgatgctgcgattgtgataaaaaacacaaaagagcctccattgtccctgaccatccacctgacatcccctgttgtcagagaagaaatggagaaagtattagctggagaaacgctatcagtcaacgaccccccggacgttctggacaggcagaaatgccttgctgccttggcgtccctccgacacgccaagtggttccaggccagagccaacgggctgaagtcttgtgtcattgtgatccgggtcttgagggacctgtgcactcgcgtgcccacctggggtcccctccgaggctggcctctcgagctcctgtgtgagaaatccattggcacggccaacagaccgatgggtgctggcgaggccctgcggagagtgctggagtgcctggcgtcgggcatcgtgatgccagatggttctggcatttatgacccttgtgaaaaagaagccactgatgctattgggcatctagacagacagcaacgggaagatatcacacagagtgcgcagcacgcactgcggctcgctgccttcggccagctccataaagtcctaggcatggaccctctgccttccaagatgcccaagaaaccaaagaatgaaaacccagtggactacaccgttcagatcccaccaagcaccacctatgccattacgcccatgaaacgcccaatggaggaggacggggaggagaagtcgcccagcaaaaagaagaagaagattcagaagaaagaggagaaggcagagcccccccaggctatgaatgccctgatgcggttgaaccagctgaagccagggctgcagtacaagctggtgtcccagactgggcccgtccatgcccccatctttaccatgtctgtggaggttgatggcaattcattcgaggcctctgggccctccaaaaagacggccaagctgcacgtggccgttaaggtgttacaggacatgggcttgccgacgggtgctgaaggcagggactcgagcaagggggaggactcggctgaggagaccgaggcgaagccagcagtggtggcccctgccccagtggtagaagctgtctccacccctagtgcggcctttccctcagatgccactgccgagcaggggccgatcctgacaaagcacggcaagaacccagtcatggagctgaacgagaagaggcgtgggctcaagtacgagctcatctccgagaccgggggcagccacgacaagcgcttcgtcatggaggtcgaagtggatggacagaagttccaaggtgctggttccaacaaaaaggtggcgaaggcctacgctgctcttgctgccctagaaaagcttttccctgacacccctctcgcccttgatgccaacaaaaagaagagagccccagtacccgtcagagggggaccgaaatttgctgctaagccacataaccctggcttcggcatgggaggccccatgcacaacgaagtgcccccaccccccaaccttcgagggcggggaagaggcgggagcatccggggacgagggcgcgggcgaggatttggtggcgccaaccatggaggctacatgaatgccggtgctgggtatggaagctatgggtacggaggcaactcggcgacagcaggctacacaggttttgtatgaatttttaaccttttaacaaactcccaaatctggttgatgcctttgacagtgatgaaaacgatttcaccacatctgaatccagagaaaccggctttttttcttattgcgagcatgttaaaacgttgggaacatgtggggaattgtatattgcgctgaattaacttctcccgcctcttgtaatgctctggtgggttcttgtttgggaatgcgatattttgtggctggtttagctagagagtgaactctcaaaggtatcaaaactgtgcttccattattagtgcaagaaacagacaggctttaaggggtagatgacgtgaaattttgcaagtcttaattacagctgcagatgcatgggattctggatttttttgttgctttttagtttaatgggactttaaaagtaattgaggagaaagaaccgtgatgttccctgtttctccagtaaaggactggcttttgcttgggcagaggtggtgctgctgggtgtgcagctgccacagactccaaaggcgtagaagtttgtgccaacacacggagtcattctggctctctgctgaggcccctgttttctggcaggtgccctccttggaaactggttttggctctgatcagcggttctttttgcagcaaagcctgcatctgtgttgacttgcaagattttgcgtttattcaggcaaaaactggtcaaaatggttactacatgatttgttcccagaggtttgaaacattcagtgaaactttttaaaactttgattgcatgatgtattttttttttagaaagttattgtttgagaataatgtctttttataccaggaaaatagttatcctgaatgacgttgaaaactccccctcccctttatttttttttaatcaatacatgtgaaagtaacaagc

SEQ ID NO: 246117 - protein, 169 aa, Artificial Sequence
  derived and/or modified sequence
MVFPLPTPQEPIMATPPKRRAVEATGEKVLRYETFISDVLQRDLRKVLDHRDKVYEQLAKYLQLRNVIERLQEAKHSELYMQVDLGCNFFVDTVVPDTSRIYVALGYGFFLELTLAEALKFIDRKSSLLTELSNSLTKDSMNIKAHIHMLLEGLRELQGLQNFPEKPHH

SEQ ID NO: 246118 - DNA, 510 bp, Artificial Sequence
  derived and/or modified sequence
atggtgttccccctgcccaccccccaggagcccatcatggccaccccccccaagagaagagccgtggaggccaccggcgagaaggtgctgagatacgagaccttcatcagcgacgtgctgcagagagacctgagaaaggtgctggaccacagagacaaggtgtacgagcagctggccaagtacctgcagctgagaaacgtgatcgagagactgcaggaggccaagcacagcgagctgtacatgcaggtggacctgggctgcaacttcttcgtggacaccgtggtgcccgacaccagcagaatctacgtggccctgggctacggcttcttcctggagctgaccctggccgaggccctgaagttcatcgacagaaagagcagcctgctgaccgagctgagcaacagcctgaccaaggacagcatgaacatcaaggcccacatccacatgctgctggagggcctgagagagctgcagggcctgcagaacttccccgagaagccccaccactag

SEQ ID NO: 246119 - DNA, 574 bp, Artificial Sequence
  derived and/or modified sequence
cggaagccgcggttcctaccaaccgttcttattgctggcggcctgaggagcccatcatggcgacgccccctaagcggcgggcggtggaggccacgggggagaaagtgctgcgctacgagaccttcatcagtgacgtgctgcagcgggacttgcgaaaggtgctggaccatcgagacaaggtatatgagcagctggccaaataccttcaactgagaaatgtcattgagcgactccaggaagctaagcactcggagttatatatgcaggtggatttgggctgtaacttcttcgttgacacagtggtcccagatacttcacgcatctatgtggccctgggatatggttttttcctggagttgacactggcagaagctctcaagttcattgatcgtaagagctctctcctcacagagctcagcaacagcctcaccaaggactccatgaatatcaaagcccatatccacatgttgctagaggggcttagagaactacaaggcctgcagaatttcccagagaagcctcaccattgacttcttccccccatcctcagacattaaagagcctgaatgccttt

SEQ ID NO: 246120 - DNA, 701 bp, Artificial Sequence
  derived and/or modified sequence
gaggtaaaggccgcgcttgggtgtccctgggtggtcgggtccccgagttgggaggggcggaaggctgaacctccagcttgagccggacaagccgattcccagcgttgagagggtagagatgaactgtgtgtgaggccaaactggatcggtcaacatggtcttccccctccccactccccaggagcccatcatggcgacgccccctaagcggcgggcggtggaggccacgggggagaaagtgctgcgctacgagaccttcatcagtgacgtgctgcagcgggacttgcgaaaggtgctggaccatcgagacaaggtatatgagcagctggccaaataccttcaactgagaaatgtcattgagcgactccaggaagctaagcactcggagttatatatgcaggtggatttgggctgtaacttcttcgttgacacagtggtcccagatacttcacgcatctatgtggccctgggatatggttttttcctggagttgacactggcagaagctctcaagttcattgatcgtaagagctctctcctcacagagctcagcaacagcctcaccaaggactccatgaatatcaaagcccatatccacatgttgctagaggggcttagagaactacaaggcctgcagaatttcccagagaagcctcaccattgacttcttccccccatcctcagacattaaagagcctgaa

SEQ ID NO: 246121 - DNA, 510 bp, Artificial Sequence
  derived and/or modified sequence
atggtgttccccctgcctacacctcaggaacccattatggctaccccaccaaagaggagggccgtggaagccaccggagagaaggtgttgaggtatgaaacattcatctcggatgtgctgcaacgagatctccgtaaagtcctggaccaccgggataaagtttacgagcaactcgccaaatacctgcagttgaggaatgtgattgagagactgcaggaggccaaacatagtgaattatacatgcaggtggatctggggtgtaacttctttgtcgatactgtagtgcctgacacttctcggatctatgtcgccctaggatatggcttcttcctcgaactgactttagcagaagcgttaaagttcatagaccgtaaaagtagtctcctcacagaacttagtaacagtcttaccaaggattccatgaacatcaaagctcacatccacatgttgctcgagggtctgagagaactgcaggggctgcaaaacttccctgaaaagcctcatcactag

SEQ ID NO: 246122 - DNA, 510 bp, Artificial Sequence
  derived and/or modified sequence
atggtgttccccctgcccaccccccaggagcccatcatggccaccccacccaagagaagagctgtggaggccactggagagaaggtgctgcgctatgagaccttcatcagtgatgtgctgcagagggacctgaggaaggtgctggaccaccgggacaaggtgtatgagcagctggccaagtacctgcagctgagaaatgtcatcgagcggctgcaggaggccaagcacagcgagctgtacatgcaggtggacctgggctgcaacttctttgtggacacagtggtgcctgacaccagccgcatctacgtggccctgggctacggcttcttcctggagctgaccctggccgaggccctgaagttcatcgacaggaagagcagcctgctgacagagctgagcaacagcctgaccaaggacagcatgaacatcaaggcccacatccacatgctgctggagggcctgcgggagctgcagggcctgcagaacttccctgagaagccccaccactag

SEQ ID NO: 246123 - DNA, 894 bp, Artificial Sequence
  derived and/or modified sequence
cggttcctaccaaccgttcttattgctggcggcctgaggagcccatcatggcgacgccccctaagcggcgggcggtggaggccacgggggagaaagtgctgcgctacgagaccttcatcagtgacgtgctgcagcgggacttgcgaaaggtgctggaccatcgagacaaggtatatgagcagctggccaaataccttcaactgagaaatgtcattgagcgactccaggtaaagactatgggattgggtaccatttttttggtatgtgtgggcaagggagggaaatgggaagagagactccagacccaaccctgtcacctgacctaagagttcaccactgacccctacctctttttccctggccccacaggaagctaagcactcggagttatatatgcaggtggatttgggctgtaacttcttcgttgacacagtggtgtgagtgtctacccgcccctctgagcccacagggttcagcttaccccttccctcatgcaacttatatttttttgagtatcttctatgtaccaggcactatgcgaggttttatatcccagtaggatataagctaggtgctggggatgtgacagtgaataaaataggacaaaatccctgccttcccagagcctcaatttggggaagggtggggagcaaaacataaactatgctaaacagtgataaggacttctccccacttcctctaacctctctttcctcagcccagatacttcacgcatctatgtggccctgggatatggttttttcctggagttgacactggcagaagctctcaagttcattgatcgtaagagctctctcctcacagagtaagtccattccatgaggatagtgtgtaaaaacaccaccatttccaacactcttctccctttaccca

SEQ ID NO: 246124 - DNA, 510 bp, Artificial Sequence
  derived and/or modified sequence
atggtgttccccctgcccaccccccaggagcccatcatggccacccctcccaagagacgagctgtagaagcgaccggtgagaaggttttgaggtacgaaacctttatctcagatgtgctccagagggatctgagaaaggtgcttgaccacagggacaaagtgtatgagcagttggccaaatatttgcaattgcgcaatgtgatcgagcgtctgcaggaagcaaagcactcagaactgtatatgcaggtggacctaggctgcaacttttttgtagatacggtggtgccagacacatcgcgaatatacgtggccctggggtacgggttctttctagaactaactctcgcggaggcactcaaattcattgatcgtaaatcctcgctgcttactgagttatcaaactccctaacaaaggatagcatgaacattaaggctcatattcacatgttactcgaagggcttagggagttgcaggggctgcagaacttccccgagaagcctcaccactag

SEQ ID NO: 246125 - DNA, 510 bp, Artificial Sequence
  derived and/or modified sequence
atggtctttccacttcccaccccgcaggaaccgatcatggctaccccaccaaagagacgggctgtggaggctactggggagaaagtactgaggtacgagacattcatcagtgatgtcctgcagagagacctacggaaagtccttgatcatcgggacaaggtttatgaacaactagcaaagtatctccagctgagaaacgttatcgaacgcctacaggaggctaaacactctgagctttacatgcaggtggacttgggttgcaacttctttgtggatacagtcgtgccagacaccagtcggatctacgtagccctaggttatggtttcttcctggaactgactttggctgaggcactgaaattcattgatcgtaaaagtagcctcctcaccgagctgtctaattccctgaccaaggactctatgaacatcaaagcgcatattcacatgctgctcgaaggtctgcgcgaactgcagggattgcagaacttcccagagaaacctcatcattag

SEQ ID NO: 246126 - DNA, 2004 bp, Artificial Sequence
  derived and/or modified sequence
atgggatcctcccgtctggccgcactgctcttgcctctgctactgatcgtgatcgacttgagcgactctgcaggtatcgggtttagacacctcccgcattggaacacgaggtgcccactcgcttcccacactgatgactccttcacgggaagctctgcgtacatcccatgtcggacctggtgggccctcttttctaccaagccatggtgtgtccgcgtttggcattgcagccgctgtctatgccagcatctgctcagtggcggaagcgggcttcagagaggcctctttcatcttctggtccagaagtccaagaagtcttcgacctttaagttttaccggaggcataagatgcccgcaccggctcagcgcaaactgttacctcgccgtcatctcagcgagaagagccaccacatttctatccccagccccgatatctcgcataaaggcctgagatctaaacggacacagccctccgaccctgagacatgggaatctctccctcgactggattcccaacgccatggaggcccagagttctccttcgatcttctgcctgaggctcgcgcaatccgggtgaccatatcatctggcccagaagtcagtgtccgattgtgccatcagtgggcgctcgaatgcgaagagctcagctctccctacgatgtccagaaaatcgtctccggtggccatactgtggagctaccgtacgagttcctcctgccatgtctgtgtatcgaagccagttacttacaggaggacactgtacggcgtaagaagtgcccgttccagagctggccagaggcctatgggagtgacttttggaaaagcgttcattttaccgactatagtcaacatacccagatggtgatggccttaaccttacgttgtccgctgaagctggaggcagcactctgccaaaggcatgactggcacaccctatgtaaggacttgcctaatgctacagctagagagagcgatgggtggtacgtcttggaaaaggtggatctccatccccaactatgtttcaagttcagctttggcaactcctcccacgttgagtgtcctcaccagacgggatctctgactagctggaacgtgtccatggatacccaggctcagcagctgatcttgcacttcagtagcaggatgcatgccacattctccgccgcttggtccctgccaggcctcggacaggacaccctggtgcctccagtgtacactgtaagccaagctcgcggtagctcacctgtctcactggaccttatcattccgttcttgaggcctggatgctgcgtgctcgtttggcgatctgatgtgcagtttgcctggaagcatcttttgtgccctgatgtatcttaccggcacctgggactgctcattcttgctctgttagctctattgaccctcctgggtgtggtgttagctttgacttgccggaggcctcagtcagggccagggcctgctcggcctgtgcttctcttgcacgcagctgatagcgaagcccagcgcaggcttgtcggcgcactggctgagctattgagagctgccctcggcggtggccgtgatgtaattgtggacctctgggagggtcgccacgtagccagggtgggtcccctgccgtggttatgggctgctcgtacaagggtggccagagaacagggtacagtgttgctgctgtggtctggagccgatttaagaccggtgtcaggaccagaccctagggctgcgcctttgctggccctcttacacgccgctcctcgacctctgctgctcttggcctatttttccagactctgtgcgaagggagatatcccaccgccactgagggcgctgccgagataccgcctgctccgagatttaccacggttgttgagggcactggacgctagaccattcgcagaggcgacatcgtggggcaggctgggtgccagacaaagacggcagagccgactggagctgtgttcacggctggagagagaggctgcaagactagccgaccttggatag

SEQ ID NO: 246127 - DNA, 2004 bp, Artificial Sequence
  derived and/or modified sequence
atgggatctagcagattagccgctctgctccttcctctactgctgattgtgatcgacctgagtgacagcgcagggattgggtttcgacacttgcctcactggaatacccggtgccccttggccagtcacaccgacgatagctttaccggcagttcagcatatatcccatgccgcacgtggtgggccctgttctccactaagccctggtgtgttcgcgtgtggcattgctccaggtgtctgtgtcaacatctgctctctggcggaagcggcctgcagcgcggtctgttccatctcttggtgcagaagagtaagaagtcttctaccttcaagttttatcggagacacaagatgccggcaccagctcagcgcaagctcctcccccgtaggcacttgagtgagaaaagtcaccatatcagtatcccctcgcccgatatctcccacaaggggctgaggagcaaaaggacccagccctcagatcccgagacttgggaatccttaccgagattagatagccagcgccacggcggtccagagttttcattcgacctgctcccagaagcccgagctataagggtgacaataagcagcggcccagaagttagcgtccgtttgtgtcaccagtgggcccttgagtgcgaagagctttctagcccttacgacgtacagaaaatagtgtccgggggtcacaccgtggagttgccctatgagttcctgctgccgtgtctgtgtattgaagctagctatctgcaagaggataccgtgcggagaaagaaatgcccgttccagagctggccagaagcttacggatctgatttttggaagagtgttcatttcaccgactattcgcagcatacgcagatggtgatggcacttaccctgcggtgcccgctcaagttggaagcagctctttgccagagacatgactggcataccttatgtaaagatctgccaaatgctacagcacgagaatctgatggctggtacgttttagagaaagtagacttacatccacaactttgcttcaaatttagttttggtaactcttctcatgtcgagtgcccgcatcaaactggttctctgacttcatggaatgtcagcatggacacgcaagctcagcagctgattttgcacttctcttccagaatgcatgccactttctcagccgcatggagcctgccaggtcttgggcaggacactctggtgcctccagtctacactgtgagtcaggcccgtggatccagccctgtgtccctggacttgatcatacccttccttaggcccggttgctgcgtcctcgtgtggcgatccgacgtccaatttgcatggaaacatttgctatgtcccgacgtgtcttatagacatctgggccttcttatacttgccctgctggctcttctcaccctgctcggcgtagtgctagccctcacctgtaggaggcctcagtctgggcctggacccgctaggcccgtgctgctcttacatgccgcagactctgaagcacagcgcagattggtgggcgcactggctgaactgctacgggctgctctggggggtgggcgagatgtgattgtggacctgtgggaaggaagacacgtcgcaagggtaggccctctaccctggttgtgggctgctagaacaagggttgccagggaacaaggcacagtgcttcttctgtggtccggtgctgacctgcgcccagtgtcagggccagatccgagagctgccccactgctcgccctgctccacgcagcaccacgtccactcctattgctcgcttacttttcgaggttgtgcgctaaaggtgatataccccctcctttacgggcactgcccagatatcgtcttctccgagacctccccaggcttttaagagccctggatgcacggccttttgcagaagcgacaagttggggtagactcggagcacggcaaagacgccaatccagactggaactctgttcccgcctggaacgcgaagcggcaagactggctgatttgggctag

SEQ ID NO: 246128 - DNA, 2004 bp, Artificial Sequence
  derived and/or modified sequence
atgggctcttccaggttggctgcactcttgctgcccctgctcttgatagttatcgacctctcggacagcgccggcataggctttcgtcacctgccacactggaacactcgctgccccctcgcctctcatactgacgacagcttcacagggagctctgcttatattccttgccggacatggtgggccctttttagcaccaagccatggtgcgtgagagtctggcactgctcacgctgcctctgtcagcacttgttgtcagggggaagtgggctccaacgcggactcttccatcttctggtgcagaagtctaagaagtcatctacatttaagttctacagaaggcataaaatgcccgcacccgctcaaagaaagctgctgccacgccgccacctgtcagaaaagtcccaccatatctctataccctctcccgacatctctcacaaagggttgcgctccaaacggacacagccatcggatcccgagacgtgggagtcactaccgcgattagactctcaacggcatggagggccagagttctcgttcgacctgctacctgaggctagagccattcgtgtcaccatctcatcagggccagaggtaagcgtcagactgtgtcaccagtgggctctggaatgcgaagagctgagcagcccctatgatgtccagaagatcgtttctggagggcacacagtggagcttccatacgagttcttgctaccctgcctatgcattgaggccagttaccttcaggaagacaccgttaggagaaaaaaatgcccattccagtcatggccagaagcctacggtagcgacttctggaagtctgtgcattttaccgattattcccagcatactcaaatggtgatggccctcacgttacgatgccctcttaaactcgaagctgccctgtgccagcggcacgactggcataccttgtgcaaagatctccccaatgctaccgctcgagagtccgatggctggtatgtattagagaaagtggatcttcaccctcaattgtgctttaagttcagttttggcaattcctctcacgttgaatgcccccatcagaccggcagtctcactagttggaacgtttcaatggatacccaagcacagcagttgattcttcatttctcctccaggatgcatgccacgtttagcgctgcttggtctctacctggcttaggacaagacacacttgtccccccggtgtatactgtctcccaggcccggggatcttcacccgtcagtctggacctgattattcctttccttcgtcctggctgctgcgtgttggtttggagatcggatgtgcagttcgcatggaaacacttattgtgtccggacgtgagctatagacaccttggtttactgatcttagccctcctcgctctgctgacattgctcggagtggtgcttgcgttgacatgccggcggcctcaatccggccccggaccagccaggcccgtgctgctgctgcatgcagccgacagtgaggcccagaggagactagttggggcgctagccgaactgctgagagctgcactgggtgggggccgggacgtcatcgtggacctgtgggagggacgccacgtagcccgagtcggcccgttgccatggctgtgggctgctcgcacacgggtggcacgcgagcaggggacagttctgttgctgtggtctggagccgacttaaggcccgtgtctggacctgacccccgggccgccccccttttagccttgctgcatgccgcaccaagaccccttctgttgctggcttatttttcccgcctgtgtgcaaaaggagatatcccccccccacttcgcgcgttacctagataccgactattaagggacctgcctagactcctgagggctctcgacgcccggccctttgccgaagctactagttggggacgcctgggagctcgccaaaggagacaaagtcggttggagttgtgcagccggttagaacgcgaagctgccagactggcagatcttgggtag

SEQ ID NO: 246129 - DNA, 2004 bp, Artificial Sequence
  derived and/or modified sequence
atgggatcttcccgcctcgccgccttgttactccccttgctcctgatcgtaatagacctgagcgactcagcagggattgggttcaggcacctgccccattggaatactagatgcccgctcgctagccacactgacgacagcttcactggctcatccgcgtacatcccttgtagaacgtggtgggccttgttctcaacgaagccctggtgtgttcgggtgtggcactgcagccgttgcctttgtcagcatctccttagcggcggttccgggctacagcgcggactgttccatttgttagttcagaagtccaaaaaatcgagtacattcaaattctacagacgccataaaatgcccgctcccgcacagagaaagctcttaccgcgccgtcatctctctgagaaatctcaccacattagtattccgagcccagacatatctcataagggactgagatctaagcgaacacaaccaagcgatccagagacatgggagagcctcccaaggcttgattctcagcgccacggcgggccggagttcagtttcgatctcttacctgaagcaagggctatccgggtgacaatcagttcaggccccgaggtctccgtcagactctgtcaccagtgggcactcgaatgcgaagaattaagctccccatacgacgtccagaagattgtatctgggggacacacagttgaactcccatatgaatttctcctgccttgtctgtgcattgaggcctcatatctgcaggaagacacggtgcgtcgcaaaaaatgcccctttcagtcctggccagaggcttacggaagcgacttctggaaatctgtgcatttcaccgattatagccagcacactcagatggtgatggcgctgaccctacgctgcccactgaaactcgaagctgcattgtgccaacgccacgactggcatacactttgtaaagacttacctaacgccaccgcccgggaaagcgatggctggtatgtactcgaaaaagtggatctccacccccagctctgtttcaagttcagcttcggcaactcatcgcacgtggaatgtccacatcagaccgggtcacttacatcctggaacgtatccatggacactcaagcccagcaactcatcctgcactttagtagcagaatgcatgcaactttcagtgctgcttggtcgcttccaggcctgggtcaagacactctcgtcccaccagtttacaccgtcagccaggctcggggctcttccccggtgtcactggatctcattataccttttctgaggccaggttgttgcgttcttgtgtggcggagcgacgttcagttcgcctggaagcatctcctatgccccgatgtgtcttatagacatttaggactactcatcctcgccctgctcgctctgttgactctgctgggcgtcgtccttgccctcacctgtcggagaccacaatctgggcccggcccagcgaggcccgttttgctgctccacgccgcagacagtgaggctcagagaagactcgtcggtgctcttgccgaactcctccgcgcagcactaggtggcgggcgggatgttattgtggacctgtgggaaggtcgacatgtggctagggtcggcccccttccttggctttgggccgctcgcacaagagtagcacgagagcagggaacagtcttgctcctttggtccggcgctgatctgaggcctgtgagcggacctgatccccgggccgcacctctgctagcattgctgcacgcggctccacggccgcttttattactggcatatttttcacggctctgtgccaaaggcgacattccccctccactgcgtgccttgcctcggtatcgacttcttagagacctgccccgtttactccgcgccctagatgctcgccctttcgccgaggctacttcatggggtaggctgggcgcccggcaacgccggcagagccggcttgagctttgtagccggctggaaagggaagctgcccgactcgccgatctgggctag

SEQ ID NO: 246130 - DNA, 2004 bp, Artificial Sequence
  derived and/or modified sequence
atgggttcatctcgccttgccgcactgttgctgccacttctccttatcgtcattgatctgtctgacagtgcagggattggttttcgacacctccctcattggaacactcggtgtcccctagcctcgcacactgacgatagcttcacaggctccagcgcatacatcccatgtcggacatggtgggcattgttcagtacgaaaccatggtgcgtccgggtatggcattgttcgaggtgtctatgtcagcacttactctccggcggatccggcctgcagcgtggtctgttccatctacttgtccaaaagagtaaaaagtcaagcacgtttaagttctatcgaaggcacaaaatgcccgctccagcacagaggaagctattgcctagacgacatctttctgagaaatcgcatcatatatcaattccctcccctgacatttcacataaggggctccggtctaaaagaacccagccaagcgacccagaaacctgggaatccctcccccgcctcgattcgcagcggcacggcggtcctgaattctccttcgacctcctcccagaggcgcgggcaatcagagtaaccataagtagcgggcctgaagtgagtgttagattatgtcaccagtgggccctggaatgcgaagagttgagttccccttatgacgttcagaagattgtgtctgggggccatactgtggaactgccatacgaatttttactgccttgtctgtgtattgaggcttcttatctgcaagaagacacagtgaggcgcaagaaatgtccttttcaatcctggcctgaagcttatggtagtgacttttggaaatccgttcacttcacggactacagtcagcatactcaaatggtaatggctctcacactgcgctgcccattaaagctggaggctgccctgtgccagcggcacgactggcataccttgtgcaaagatctccccaatgctaccgctcgagagtccgatggctggtatgtattagagaaagtggatcttcaccctcaattgtgctttaagttcagttttggcaattcctctcacgttgaatgcccccatcagaccggcagtctcactagttggaacgtttcaatggatacccaagcacagcagttgattcttcatttctcctccaggatgcatgccacgtttagcgctgcttggtctctacctggcttaggacaagacacacttgtgcctccggtgtacacagtttcacaggccaggggctcctcccctgtgagtttggatcttattatcccattcctgcgtcctggctgttgcgtgctagtctggagaagtgacgttcagttcgcttggaagcacctcctgtgccccgatgtctcgtatcgccatctgggactgctgatactagcacttttggccctgctcacccttctaggcgtggtactcgccctgacgtgcagacgccctcaatccggaccaggccccgccagacctgtccttcttttacatgctgccgattctgaggcccagagaaggctcgtcggggccctggccgaactgctccgagctgctttgggcgggggacgagacgtgattgttgacttgtgggagggtagacatgtcgcccgggtcggtccactcccctggctttgggccgccagaacgcgagtggcccgtgagcagggtacagtgctgcttctctggtccggcgccgacttacgtcccgtatcaggccccgatccaagggccgcgcctttacttgcattactccacgctgcccccaggcctcttctactgcttgcttatttcagccggttgtgcgctaagggcgatatcccccctccgctgcgggctctcccccgataccgactcctgcgagatctccctcgcctgctgagagccctggacgcgcgccctttcgctgaagctacctcgtggggcagattaggcgctaggcagagaagacagagtcgccttgaattgtgcagtcgacttgaacgcgaagccgctcggttagcagatcttgggtag

SEQ ID NO: 246131 - DNA, 2004 bp, Artificial Sequence
  derived and/or modified sequence
atgggctcttcgagattagccgcactgctgttgccactgcttctcattgtgattgacctgtctgattccgctgggatcggattccgccatttaccacactggaacacacgctgccctctagcttctcacaccgacgacagcttcactggttcatctgcttatatcccttgccggacgtggtgggcccttttctcaactaagccttggtgtgtccgtgtgtggcattgctcgcgctgtctttgtcagcatctcttgtctggggggagtggactacagcggggactcttccacttactcgtgcagaaaagtaaaaaatccagtaccttcaagttttatagacgccataagatgcccgcccctgcccaaagaaagctcctacctagacgccacctgtctgaaaagagtcaccacatttctataccctcccctgatatttcacacaaaggcctgcgatccaaacgcactcaaccctctgaccctgaaacatgggagagtctgcctcgccttgacagccagcgccatggcgggcccgagttctcttttgatctgctccccgaggcacgtgcgattcgtgtaaccatatctagcggcccggaggtgtccgtgcgcctctgccaccagtgggccctcgagtgtgaagagttatcctctccttacgacgtacagaaaattgtgtccggaggacacacagttgaactcccctacgagttccttctaccctgtctttgcattgaagccagttacctacaagaggatactgtgagaagaaaaaagtgtcccttccagtcatggcccgaggcctatggcagtgacttttggaaatcagtacacttcaccgactatagccagcacacgcagatggtgatggccctgactctgagatgtcctcttaagcttgaggccgcattgtgccagagacacgattggcatactctctgcaaagatctgccaaacgcaactgcccgagaatccgatggatggtacgtgttagagaaggttgacctgcacccacagctctgctttaagttttcatttggtaacagtagccatgtagaatgcccccaccagaccgggtctctgacttcctggaatgtctctatggacacccaggcccagcaactcattcttcactttagctcaagaatgcacgcaacttttagcgcagcttggtctctcccaggcttaggccaggatactttagtccccccagtatacactgtctcccaggcgcgtggttcaagccctgtgagtttggacttgatcattccctttctacggccaggctgctgtgttctggtgtggcgttccgacgtccagtttgcctggaagcacctcttgtgcccagacgtgagttaccgacatctcggactcttaatcctggctcttctagctctactcactcttctcggtgtggtgctcgccctcacgtgtcgtagacctcagtcaggacccggccccgcaagacccgtcctcctcttacatgccgctgacagtgaggcacagcggcgtctggtgggcgcattggccgagctgctccgcgcggcccttggtggcggcagggatgtcattgtcgacttatgggagggaagacatgtagcccgagtggggccgctgccatggctttgggcagcaaggacccgagttgcacgagaacagggaaccgtgcttcttctctggagtggtgcagaccttcgccccgtgtctggccccgatccacgagcagcacccctgctggctctccttcacgctgccccaagaccgctcctgctcctggcttattttagccgtttatgcgcaaaaggagacatcccacctccactgcgggccttacctcggtacagactgctgcgcgatctccctcgcctgctccgtgcactggatgctagaccatttgccgaggcaacatcctggggacgcttaggagccagacaacgccgacagtccagactcgagctatgctctaggttggagcgggaggcagccagattggccgatcttggttag

SEQ ID NO: 246132 - DNA, 2004 bp, Artificial Sequence
  derived and/or modified sequence
atgggcagcagcagactggccgccctgctgctgcccctgctgctgatcgtgatcgacctgagcgacagcgccggcatcggcttcagacacctgccccactggaacaccagatgccccctggccagccacaccgacgacagcttcaccggcagcagcgcctacatcccctgcagaacctggtgggccctgttcagcaccaagccctggtgcgtgagagtgtggcactgcagcagatgcctgtgccagcacctgctgagcggcggcagcggcctgcagagaggcctgttccacctgctggtgcagaagagcaagaagagcagcaccttcaagttctacagaagacacaagatgcccgcccccgcccagagaaagctgctgcccagaagacacctgagcgagaagagccaccacatcagcatccccagccccgacatcagccacaagggcctgagaagcaagagaacccagcccagcgaccccgagacctgggagagcctgcccagactggacagccagagacacggcggccccgagttcagcttcgacctgctgcccgaggccagagccatcagagtgaccatcagcagcggccccgaggtgagcgtgagactgtgccaccagtgggccctggagtgcgaggagctgagcagcccctacgacgtgcagaagatcgtgagcggcggccacaccgtggagctgccctacgagttcctgctgccctgcctgtgcatcgaggccagctacctgcaggaggacaccgtgagaagaaagaagtgccccttccagagctggcccgaggcctacggcagcgacttctggaagagcgtgcacttcaccgactacagccagcacacccagatggtgatggccctgaccctgagatgccccctgaagctggaggccgccctgtgccagagacacgactggcacaccctgtgcaaggacctgcccaacgccaccgccagagagagcgacggctggtacgtgctggagaaggtggacctgcacccccagctgtgcttcaagttcagcttcggcaacagcagccacgtggagtgcccccaccagaccggcagcctgaccagctggaacgtgagcatggacacccaggcccagcagctgatcctgcacttcagcagcagaatgcacgccaccttcagcgccgcctggagcctgcccggcctgggccaggacaccctggtgccccccgtgtacaccgtgagccaggccagaggcagcagccccgtgagcctggacctgatcatccccttcctgagacccggctgctgcgtgctggtgtggagaagcgacgtgcagttcgcctggaagcacctgctgtgccccgacgtgagctacagacacctgggcctgctgatcctggccctgctggccctgctgaccctgctgggcgtggtgctggccctgacctgcagaagaccccagagcggccccggccccgccagacccgtgctgctgctgcacgccgccgacagcgaggcccagagaagactggtgggcgccctggccgagctgctgagagccgccctgggcggcggcagagacgtgatcgtggacctgtgggagggcagacacgtggccagagtgggccccctgccctggctgtgggccgccagaaccagagtggccagagagcagggcaccgtgctgctgctgtggagcggcgccgacctgagacccgtgagcggccccgaccccagagccgcccccctgctggccctgctgcacgccgcccccagacccctgctgctgctggcctacttcagcagactgtgcgccaagggcgacatccccccccccctgagagccctgcccagatacagactgctgagagacctgcccagactgctgagagccctggacgccagacccttcgccgaggccaccagctggggcagactgggcgccagacagagaagacagagcagactggagctgtgcagcagactggagagagaggccgccagactggccgacctgggctag

SEQ ID NO: 246133 - DNA, 2004 bp, Artificial Sequence
  derived and/or modified sequence
atgggcagctctcggctcgccgccttgcttctgcctctgctcctaatcgtgatcgacctttctgacagcgccggaatcgggttccggcatttgccccattggaatacacgttgccctcttgcttctcacaccgatgattccttcaccggttcctccgcatacattccttgcaggacatggtgggcactcttcagcaccaagccttggtgcgtgagggtttggcattgcagtcggtgcctctgccagcacctgctctccgggggctcgggcctacagagagggttgtttcatctgcttgtccagaaatctaagaagtcatcgacattcaaattttaccgaagacacaaaatgccggcgcccgcccagcggaagttattacccaggaggcacctgtccgagaaatcccaccatatttctatccccagcccggatatctcacacaagggactcagaagcaagaggacacagccatcagaccccgaaacttgggagtccctgccccgactggattctcagcgccacgggggccctgagttctcttttgatctccttcctgaggctcgcgctattcgggtgacaatatcctctgggcctgaggtgtccgtgcggctgtgtcatcaatgggcgctggaatgtgaggagctgtctagcccctatgacgttcaaaagatcgtgagcggcggacacactgttgagcttccatatgaatttttactgccatgtctatgcatcgaggcctcttacctccaggaagataccgttaggcgaaaaaaatgcccctttcagagctggcccgaggcttatgggtccgatttttggaagagtgtacactttaccgattactcacagcatactcagatggttatggcgctcaccctccgttgcccactcaagctggaggcggctctctgtcagaggcacgattggcatactttgtgtaaagacctgcctaacgctactgctcgcgagagcgacgggtggtacgtcctcgagaaagtcgacctgcatcctcagctgtgcttcaagttctcattcggtaactccagtcacgtcgaatgcccacatcaaacaggctcactgactagttggaacgtgtcaatggacacccaagctcagcagttgatcttacatttctcaagtagaatgcacgcgactttctcagcggcgtggagcctgccgggcctgggccaggataccttggttccgcccgtctacaccgtttcccaggctagaggcagctcaccagtgtccctagacctgattatcccatttctgcgccctgggtgctgtgtcctagtatggcgttctgatgtgcagttcgcctggaagcacctgttatgccctgacgtgagttaccggcacttggggctactgattctggccctcctggcattattgacactgctcggtgtcgtgcttgctcttacatgcaggaggccccaaagcggaccgggccccgcaagacctgtactgctcctccacgccgccgattccgaagcacagcggcgactggtgggggcattggccgagcttctgcgcgcagcgcttgggggtggccgagatgttatcgtggatctctgggagggccgacacgtggcgcgggtaggacccctaccctggctgtgggcagctaggaccagggttgccagggagcagggtacagtgcttctgctgtggtctggagccgacctcaggcccgtgtcaggccccgatccacgcgccgcacctctgttagctctcctccacgcggccccaagaccgctgctgctcctggcctatttttcgagactttgtgctaagggtgatatcccaccgccgctgcgagcgttaccgcgctacaggttactccgcgatctgcccaggctgctccgggccctagatgcccgaccattcgctgaagccaccagttgggggagattaggcgcacggcagcgccgccagagtagattggaactatgctctagactagagagggaggcggccagactcgccgacctcggctag

SEQ ID NO: 246134 - DNA, 2004 bp, Artificial Sequence
  derived and/or modified sequence
atggggtccagccgcctcgccgccttattacttccactgttgctgattgtgatcgatttaagcgatagcgccggcatcggcttccgccacctgccacattggaacacaaggtgtcccctggccagccataccgatgactcttttactggctcttctgcatacattccctgtaggacgtggtgggccttgtttagcactaaaccctggtgcgttcgcgtgtggcactgtagtcgttgtctttgtcagcacctcctgtctggaggcagtggattacagcgcggcctattccatttgctggtccagaaatccaaaaaaagcagcacttttaagttctatcgtaggcacaagatgcccgcacctgcccagcgcaaacttttaccaagaaggcacctgagcgagaagtctcaccacatatccattcccagccctgatatctcacataaaggactccgatcaaagaggacacagccttcagacccagagacttgggagtccctgccaaggttagatagccagcggcacggcggcccagagttttccttcgatctgctacccgaggcaagggctatcagggttactatttcttccggaccagaagtatctgtcaggctgtgtcaccaatgggctctcgagtgtgaggaactgagctcaccctatgatgtgcaaaagatcgtgagcggggggcacacagttgaactcccctatgagtttttactgccatgtctctgcatcgaggcgtcctatctgcaggaagacaccgtgcggcggaagaagtgcccttttcaaagctggcctgaggcctacggctctgatttctggaaatccgtgcatttcactgattattcacagcatacacagatggttatggctctcacgttaaggtgccctctgaagctcgaagccgcactttgccagaggcacgactggcataccttatgcaaggaccttccaaacgcaaccgccagagaatccgatggctggtacgtgcttgaaaaggtcgacctgcatcctcagctgtgcttcaagtttagctttggcaactcatcacacgtggaatgtccccatcagactggaagcctaacaagctggaacgtgagcatggacacccaagctcagcagctcattttacacttctcgtccaggatgcacgccacattcagcgccgcttggtccctgccgggcctgggacaggacacgctggtgcctccagtgtataccgtcagccaggcacggggcagctctcccgtgtccctcgatcttattattcctttcctaaggcccggctgctgcgtgctggtctggagatctgacgtgcagtttgcctggaagcacctactctgtccagatgtgagctaccggcacctcggcctcctgattcttgccctgctggctctactgaccctccttggggtcgtcctagccttaacttgtcggagaccccagagcggcccaggacccgctaggccggtgctactgcttcatgcagctgactccgaagctcagcgacgcttggtgggagcattggcggagctgttacgtgccgcgctggggggcggcagggacgtgatcgttgatctgtgggaaggaagacatgttgccagagtggggccattaccttggctgtgggccgcccgaacgcgggtggcccgggagcagggaacagtactgctcttgtggagcggtgccgatctgcgccccgtgagcggccccgacccccgggcagcaccactgctcgcccttctgcatgccgcaccccggccccttcttcttttggcttattttagccgcctttgtgccaaaggtgacatccccccccctctcagagccctgccgaggtaccgcctcttgagagatctgccacgcttgctacgggcactggacgcacgtccgtttgcggaggcaactagctggggccgccttggggcacggcagagaaggcagtcaaggctggaactgtgttctagactggaaagggaagccgccaggctagctgacctcgggtag

SEQ ID NO: 246135 - DNA, 2004 bp, Artificial Sequence
  derived and/or modified sequence
atgggcagcagccggctggccgccctgctgctgcccctgctgctgattgtcatcgacctgagtgacagcgctggcatcggcttccgccacctgccccactggaacacccgctgccccctggccagccacacagatgacagcttcaccggcagcagcgcctacatcccctgcaggacctggtgggccctcttcagcaccaagccctggtgtgtgcgggtgtggcactgcagccgctgcctgtgccagcacctgctgagcggcggcagcggcctgcagaggggcctcttccacctgctggtgcagaagagcaagaagagcagcaccttcaagttctacagaagacacaagatgcctgccccagcccagaggaagctgctgccccggcggcacctgtctgagaagagccaccacatcagcatccccagcccagacatcagccacaagggcctgcggagcaagaggacccagcccagcgaccctgagacctgggagagcctgccccggctggacagccagagacatggaggccctgagttctcctttgacctgctgcctgaggcccgggccatccgggtgaccatcagcagcggccctgaggtgtctgtgcggctgtgccaccagtgggccctggagtgtgaggagctgagcagcccctatgatgtgcagaagatcgtgtctgggggccacacagtggagctgccctatgagttcctgctgccctgcctgtgcatcgaggccagctacctgcaggaggacacagtgcggaggaagaagtgccccttccagagctggccagaggcctacggcagtgacttctggaagtctgtgcacttcacagactacagccagcacacccagatggtgatggccctgaccctgcgctgccccctgaagctggaggccgccctgtgccagagacatgactggcacaccctgtgcaaggacctgcccaatgccacagcccgggagagtgatggctggtacgtgctggagaaggtggacctgcacccccagctgtgcttcaagttctcctttggaaacagcagccacgtggagtgcccccaccagacaggcagcctgacctcctggaatgtgtccatggacacccaggcccagcagctgatcctgcacttcagcagcaggatgcacgccaccttctctgctgcctggagcctgcccggcctgggccaggacaccctggtgccccctgtgtacacagtgtcccaggcccggggcagcagccctgtgtccctggacctgatcatccccttcctgcggcccggctgctgcgtgctggtgtggaggagtgatgtgcagtttgcctggaagcacctgctgtgcccagatgtgtcctaccgccacctgggcctgctgatcctggccctgctggccctgctgaccctgctgggcgtggtgctggccctgacctgccggcggccccagagcggccctggccctgcccggcctgtgctgctgctgcatgctgctgacagcgaggcccagaggcggctggtgggcgccctggccgagctgctgcgggccgccctgggcggcggcagagatgtgattgtggacctgtgggagggcagacatgtggcccgggtgggccccctgccctggctgtgggccgcccggaccagggtggcccgggagcagggcaccgtgctgctgctgtggagcggggctgacctgcggcctgtgtctggccctgacccccgggccgcccccctgctggccctgctgcatgctgccccccggcccctgctgctgctggcctacttcagccggctgtgtgccaagggggacatccccccacccctgcgggccctgccccgctaccgcctgctgcgggacctgccccggctgctgcgggccctggatgcccggccctttgctgaggccacctcctggggccgcctgggcgcccggcagaggcggcagagccggctggagctgtgcagccggctggagcgggaggccgcccggctggccgacctgggctag

SEQ ID NO: 246136 - DNA, 2004 bp, Artificial Sequence
  derived and/or modified sequence
atgggcagcagccggctggccgccctgctgctgcccctgctgctgatcgtgatcgatttatccgactcagccggcatcggttttcgtcatttaccccactggaacactcgctgtccattagcctcccacacagatgattcatttactgggtcttcagcttacatcccttgccgcacctggtgggccctgttcagcactaagccgtggtgtgtcagagtctggcattgtagccgctgtttatgccaacatctgttaagcggtggatcgggactgcaacggggcttgtttcacctgttggtgcagaagagcaaaaagtctagcacgtttaagttttaccgccgccacaagatgcccgcaccagcacaaaggaaactgttgccaaggcggcacctcagtgagaagagccaccacatttccattccatctcccgatatatcgcacaagggattgagaagtaagcgtactcagccctcagaccctgagacatgggaatcattaccaaggctagactctcagaggcacgggggcccggaattctcctttgacttgctcccggaagctagagctatccgggtgaccatcagtagtggccccgaagtcagtgtgagattatgtcaccagtgggctctggaatgcgaagaattatctagtccatacgacgttcagaagatcgttagcgggggacatactgtcgagcttccatacgaatttctcctcccttgtctgtgcatagaggcatcctacttgcaggaggataccgtacggcgcaagaaatgcccatttcaaagttggcccgaggcctacggcagcgacttctggaaatctgtccattttacagattattcacagcacacacagatggtcatggctctgactctgaggtgccccttgaagttggaagctgccctctgccagaggcatgattggcatactctttgtaaggacctgcctaatgcaactgcacgcgagagcgatggatggtacgtgcttgagaaagttgacctgcacccgcaactgtgctttaaattcagcttcggcaacagttcccacgtggagtgtccccatcagacaggcagtttgacatcctggaatgtctctatggatacacaagcccaacagttgatccttcacttcagctcccggatgcacgccacctttagcgctgcctggtcgcttcccggcttaggccaggatacgctcgtccccccggtatataccgtctcacaggccagagggtctagtcccgtttctttagatctcatcataccctttctccggccagggtgctgtgtgctggtttggcgaagtgatgtgcaatttgcctggaaacatctgttgtgccccgacgtgagttacagacatctgggcctgttgatattggctttgctggctctcctcacattgttgggcgtggtgttggccctcacttgccggcggcctcagagcggcccaggcccagcaagacccgtccttctgctccatgctgctgattccgaggcgcagcgtcggttagtgggcgccctggcagagttgttgcgagccgccctgggcggcgggagagatgttattgtggacctctgggaggggagacatgtggctcgcgttggtcctctgccatggttatgggctgcacgtacgagagtggccagagagcaggggacagtcctcctgctgtggtctggagccgatctccgtcccgtgagtggacccgacccccgggctgccccacttctagcattattacacgcggccccccgaccactgcttctgctcgcatacttcagccgtctgtgcgctaagggtgatatccccccgccacttcgggctctgccacgctaccggctgctgcgcgacctgccacgcctattgagagccttagacgccaggcctttcgcagaagccacttcttgggggcgcctcggggcaaggcagcgcaggcaaagtcgcctggagctgtgctctcgtcttgaacgagaggccgcccggttggcagacctcggatag

SEQ ID NO: 246137 - DNA, 2004 bp, Artificial Sequence
  derived and/or modified sequence
atgggcagcagccggctggccgccctgctgctgcccctgctgctgatcgtcattgatttatcagatagtgcgggcattggcttcagacacctcccacactggaatacaagatgtcctctggcctcccacacagatgactcctttacaggatccagcgcatacattccatgtaggacctggtgggcactgttttcgacaaaaccttggtgcgttcgtgtgtggcactgcagtagatgcttgtgccagcacctattatcagggggaagtggccttcaaagaggcctatttcacctactggttcagaagtctaagaagtctagcacttttaagttctataggaggcataagatgcccgcccctgctcagaggaagctgctccctcggcggcaccttagcgaaaaatctcatcatatctctatcccctcgccagacatatctcacaagggcctgcgttccaaaagaacccagcccagcgacccagagacctgggagtcactgccgagactagactctcagcggcacggcggacccgagtttagtttcgacctgctaccggaggctcgcgccataagggtgactatctcatccggaccggaagtgagtgtcagactgtgtcaccagtgggcattggaatgcgaggaactgagtagcccttatgatgtgcagaaaatcgtcagcggaggacatacagtggaactgccttatgaatttctgctaccttgcctgtgcattgaggctagttatctccaagaggatacagtgcggcggaaaaagtgtccctttcagtcatggcccgaggcatatggctctgacttttggaagtccgtccactttaccgattattcacagcatacgcagatggtcatggcacttacgctgcgctgtccccttaaactcgaggccgccctgtgccagcggcacgactggcacacactatgtaaagatctcccaaatgccacagctagagaatctgatggctggtatgtgctcgaaaaagtggatttacatccccagctttgcttcaaattctcgtttggtaacagctcccacgtagaatgtccacaccagacaggtagtctcacatcgtggaacgtttcgatggatacccaagctcagcaactgatcttgcatttttcatcacgtatgcacgctactttctctgccgcctggagtctacccggactgggccaagacactttggtacccccagtgtacaccgttagtcaggctcggggctcatccccggtcagccttgacctcattatcccttttttgcggcccggctgctgtgttctggtctggcgctctgatgtgcagttcgcatggaaacatctattgtgtcccgatgtttcataccgacatctgggcctgctcatcttagcactccttgctctattaaccctcttaggagtagtcttagctctgacttgcagacgaccccagagtggcccaggccctgccagacccgtactgctcctccacgcagcggactccgaagcccagcggagactggtgggagcattagcagaacttctgagggcggcgctggggggaggtagagacgtgattgtcgacctgtgggagggaaggcatgtcgcaagggtcggcccacttccgtggctgtgggccgcgcgtactcgcgtggccagagaacaagggaccgtgctgctgctgtggtcgggagccgatctgaggccagtttccgggcccgatccacgcgcagccccattgctggccttgctgcatgctgcccctcggcccctcttattgttggcctacttcagtcgtctgtgcgccaaaggagatattccgcctcccctaagggccttgccccgttaccgcttacttagggatcttcctaggctacttagggcacttgacgcaaggccgttcgccgaggcaaccagctggggtcgactaggtgccaggcaaagacggcagagtagattggaactttgtagtagactcgagagggaggctgcgcgactagccgatctcgggtag

SEQ ID NO: 246138 - RNA, 2004 nt, Artificial Sequence
  derived and/or modified sequence
augggcucuuccagguuggcugcacucuugcugccccugcucuugauaguuaucgaccucucggacagcgccggcauaggcuuucgucaccugccacacuggaacacucgcugcccccucgccucucauacugacgacagcuucacagggagcucugcuuauauuccuugccggacauggugggcccuuuuuagcaccaagccauggugcgugagagucuggcacugcucacgcugccucugucagcacuuguugucagggggaagugggcuccaacgcggacucuuccaucuucuggugcagaagucuaagaagucaucuacauuuaaguucuacagaaggcauaaaaugcccgcacccgcucaaagaaagcugcugccacgccgccaccugucagaaaagucccaccauaucucuauacccucucccgacaucucucacaaaggguugcgcuccaaacggacacagccaucggaucccgagacgugggagucacuaccgcgauuagacucucaacggcauggagggccagaguucucguucgaccugcuaccugaggcuagagccauucgugucaccaucucaucagggccagagguaagcgucagacugugucaccagugggcucuggaaugcgaagagcugagcagccccuaugauguccagaagaucguuucuggagggcacacaguggagcuuccauacgaguucuugcuacccugccuaugcauugaggccaguuaccuucaggaagacaccguuaggagaaaaaaaugcccauuccagucauggccagaagccuacgguagcgacuucuggaagucugugcauuuuaccgauuauucccagcauacucaaauggugauggcccucacguuacgaugcccucuuaaacucgaagcugcccugugccagcggcacgacuggcauaccuugugcaaagaucuccccaaugcuaccgcucgagaguccgauggcugguauguauuagagaaaguggaucuucacccucaauugugcuuuaaguucaguuuuggcaauuccucucacguugaaugcccccaucagaccggcagucucacuaguuggaacguuucaauggauacccaagcacagcaguugauucuucauuucuccuccaggaugcaugccacguuuagcgcugcuuggucucuaccuggcuuaggacaagacacacuuguccccccgguguauacugucucccaggcccggggaucuucacccgucagucuggaccugauuauuccuuuccuucguccuggcugcugcguguugguuuggagaucggaugugcaguucgcauggaaacacuuauuguguccggacgugagcuauagacaccuugguuuacugaucuuagcccuccucgcucugcugacauugcucggaguggugcuugcguugacaugccggcggccucaauccggccccggaccagccaggcccgugcugcugcugcaugcagccgacagugaggcccagaggagacuaguuggggcgcuagccgaacugcugagagcugcacugggugggggccgggacgucaucguggaccugugggagggacgccacguagcccgagucggcccguugccauggcugugggcugcucgcacacggguggcacgcgagcaggggacaguucuguugcuguggucuggagccgacuuaaggcccgugucuggaccugacccccgggccgccccccuuuuagccuugcugcaugccgcaccaagaccccuucuguugcuggcuuauuuuucccgccugugugcaaaaggagauaucccccccccacuucgcgcguuaccuagauaccgacuauuaagggaccugccuagacuccugagggcucucgacgcccggcccuuugccgaagcuacuaguuggggacgccugggagcucgccaaaggagacaaagucgguuggaguugugcagccgguuagaacgcgaagcugccagacuggcagaucuuggguag

SEQ ID NO: 246139 - RNA, 2004 nt, Artificial Sequence
  derived and/or modified sequence
augggaucuucccgccucgccgccuuguuacuccccuugcuccugaucguaauagaccugagcgacucagcagggauuggguucaggcaccugccccauuggaauacuagaugcccgcucgcuagccacacugacgacagcuucacuggcucauccgcguacaucccuuguagaacguggugggccuuguucucaacgaagcccugguguguucggguguggcacugcagccguugccuuugucagcaucuccuuagcggcgguuccgggcuacagcgcggacuguuccauuuguuaguucagaaguccaaaaaaucgaguacauucaaauucuacagacgccauaaaaugcccgcucccgcacagagaaagcucuuaccgcgccgucaucucucugagaaaucucaccacauuaguauuccgagcccagacauaucucauaagggacugagaucuaagcgaacacaaccaagcgauccagagacaugggagagccucccaaggcuugauucucagcgccacggcgggccggaguucaguuucgaucucuuaccugaagcaagggcuauccgggugacaaucaguucaggccccgaggucuccgucagacucugucaccagugggcacucgaaugcgaagaauuaagcuccccauacgacguccagaagauuguaucugggggacacacaguugaacucccauaugaauuucuccugccuugucugugcauugaggccucauaucugcaggaagacacggugcgucgcaaaaaaugccccuuucaguccuggccagaggcuuacggaagcgacuucuggaaaucugugcauuucaccgauuauagccagcacacucagauggugauggcgcugacccuacgcugcccacugaaacucgaagcugcauugugccaacgccacgacuggcauacacuuuguaaagacuuaccuaacgccaccgcccgggaaagcgauggcugguauguacucgaaaaaguggaucuccacccccagcucuguuucaaguucagcuucggcaacucaucgcacguggaauguccacaucagaccgggucacuuacauccuggaacguauccauggacacucaagcccagcaacucauccugcacuuuaguagcagaaugcaugcaacuuucagugcugcuuggucgcuuccaggccugggucaagacacucucgucccaccaguuuacaccgucagccaggcucggggcucuuccccggugucacuggaucucauuauaccuuuucugaggccagguuguugcguucuuguguggcggagcgacguucaguucgccuggaagcaucuccuaugccccgaugugucuuauagacauuuaggacuacucauccucgcccugcucgcucuguugacucugcugggcgucguccuugcccucaccugucggagaccacaaucugggcccggcccagcgaggcccguuuugcugcuccacgccgcagacagugaggcucagagaagacucgucggugcucuugccgaacuccuccgcgcagcacuagguggcgggcgggauguuauuguggaccugugggaaggucgacauguggcuagggucggcccccuuccuuggcuuugggccgcucgcacaagaguagcacgagagcagggaacagucuugcuccuuugguccggcgcugaucugaggccugugagcggaccugauccccgggccgcaccucugcuagcauugcugcacgcggcuccacggccgcuuuuauuacuggcauauuuuucacggcucugugccaaaggcgacauucccccuccacugcgugccuugccucgguaucgacuucuuagagaccugccccguuuacuccgcgcccuagaugcucgcccuuucgccgaggcuacuucaugggguaggcugggcgcccggcaacgccggcagagccggcuugagcuuuguagccggcuggaaagggaagcugcccgacucgccgaucugggcuag

SEQ ID NO: 246140 - RNA, 2004 nt, Artificial Sequence
  derived and/or modified sequence
auggguucaucucgccuugccgcacuguugcugccacuucuccuuaucgucauugaucugucugacagugcagggauugguuuucgacaccucccucauuggaacacucgguguccccuagccucgcacacugacgauagcuucacaggcuccagcgcauacaucccaugucggacauggugggcauuguucaguacgaaaccauggugcguccggguauggcauuguucgaggugucuaugucagcacuuacucuccggcggauccggccugcagcguggucuguuccaucuacuuguccaaaagaguaaaaagucaagcacguuuaaguucuaucgaaggcacaaaaugcccgcuccagcacagaggaagcuauugccuagacgacaucuuucugagaaaucgcaucauauaucaauucccuccccugacauuucacauaaggggcuccggucuaaaagaacccagccaagcgacccagaaaccugggaaucccucccccgccucgauucgcagcggcacggcgguccugaauucuccuucgaccuccucccagaggcgcgggcaaucagaguaaccauaaguagcgggccugaagugaguguuagauuaugucaccagugggcccuggaaugcgaagaguugaguuccccuuaugacguucagaagauugugucugggggccauacuguggaacugccauacgaauuuuuacugccuugucuguguauugaggcuucuuaucugcaagaagacacagugaggcgcaagaaauguccuuuucaauccuggccugaagcuuaugguagugacuuuuggaaauccguucacuucacggacuacagucagcauacucaaaugguaauggcucucacacugcgcugcccauuaaagcuggaggcugcccugugccagcggcacgacuggcauaccuugugcaaagaucuccccaaugcuaccgcucgagaguccgauggcugguauguauuagagaaaguggaucuucacccucaauugugcuuuaaguucaguuuuggcaauuccucucacguugaaugcccccaucagaccggcagucucacuaguuggaacguuucaauggauacccaagcacagcaguugauucuucauuucuccuccaggaugcaugccacguuuagcgcugcuuggucucuaccuggcuuaggacaagacacacuugugccuccgguguacacaguuucacaggccaggggcuccuccccugugaguuuggaucuuauuaucccauuccugcguccuggcuguugcgugcuagucuggagaagugacguucaguucgcuuggaagcaccuccugugccccgaugucucguaucgccaucugggacugcugauacuagcacuuuuggcccugcucacccuucuaggcgugguacucgcccugacgugcagacgcccucaauccggaccaggccccgccagaccuguccuucuuuuacaugcugccgauucugaggcccagagaaggcucgucggggcccuggccgaacugcuccgagcugcuuugggcgggggacgagacgugauuguugacuugugggaggguagacaugucgcccgggucgguccacuccccuggcuuugggccgccagaacgcgaguggcccgugagcaggguacagugcugcuucucugguccggcgccgacuuacgucccguaucaggccccgauccaagggccgcgccuuuacuugcauuacuccacgcugcccccaggccucuucuacugcuugcuuauuucagccgguugugcgcuaagggcgauauccccccuccgcugcgggcucucccccgauaccgacuccugcgagaucucccucgccugcugagagcccuggacgcgcgcccuuucgcugaagcuaccucguggggcagauuaggcgcuaggcagagaagacagagucgccuugaauugugcagucgacuugaacgcgaagccgcucgguuagcagaucuuggguag

SEQ ID NO: 246141 - RNA, 2004 nt, Artificial Sequence
  derived and/or modified sequence
augggcucuucgagauuagccgcacugcuguugccacugcuucucauugugauugaccugucugauuccgcugggaucggauuccgccauuuaccacacuggaacacacgcugcccucuagcuucucacaccgacgacagcuucacugguucaucugcuuauaucccuugccggacguggugggcccuuuucucaacuaagccuugguguguccguguguggcauugcucgcgcugucuuugucagcaucucuugucuggggggaguggacuacagcggggacucuuccacuuacucgugcagaaaaguaaaaaauccaguaccuucaaguuuuauagacgccauaagaugcccgccccugcccaaagaaagcuccuaccuagacgccaccugucugaaaagagucaccacauuucuauacccuccccugauauuucacacaaaggccugcgauccaaacgcacucaacccucugacccugaaacaugggagagucugccucgccuugacagccagcgccauggcgggcccgaguucucuuuugaucugcuccccgaggcacgugcgauucguguaaccauaucuagcggcccggagguguccgugcgccucugccaccagugggcccucgagugugaagaguuauccucuccuuacgacguacagaaaauuguguccggaggacacacaguugaacuccccuacgaguuccuucuacccugucuuugcauugaagccaguuaccuacaagaggauacugugagaagaaaaaagugucccuuccagucauggcccgaggccuauggcagugacuuuuggaaaucaguacacuucaccgacuauagccagcacacgcagauggugauggcccugacucugagauguccucuuaagcuugaggccgcauugugccagagacacgauuggcauacucucugcaaagaucugccaaacgcaacugcccgagaauccgauggaugguacguguuagagaagguugaccugcacccacagcucugcuuuaaguuuucauuugguaacaguagccauguagaaugcccccaccagaccgggucucugacuuccuggaaugucucuauggacacccaggcccagcaacucauucuucacuuuagcucaagaaugcacgcaacuuuuagcgcagcuuggucucucccaggcuuaggccaggauacuuuaguccccccaguauacacugucucccaggcgcgugguucaagcccugugaguuuggacuugaucauucccuuucuacggccaggcugcuguguucugguguggcguuccgacguccaguuugccuggaagcaccucuugugcccagacgugaguuaccgacaucucggacucuuaauccuggcucuucuagcucuacucacucuucucgguguggugcucgcccucacgugucguagaccucagucaggacccggccccgcaagacccguccuccucuuacaugccgcugacagugaggcacagcggcgucuggugggcgcauuggccgagcugcuccgcgcggcccuugguggcggcagggaugucauugucgacuuaugggagggaagacauguagcccgaguggggccgcugccauggcuuugggcagcaaggacccgaguugcacgagaacagggaaccgugcuucuucucuggaguggugcagaccuucgccccgugucuggccccgauccacgagcagcaccccugcuggcucuccuucacgcugccccaagaccgcuccugcuccuggcuuauuuuagccguuuaugcgcaaaaggagacaucccaccuccacugcgggccuuaccucgguacagacugcugcgcgaucucccucgccugcuccgugcacuggaugcuagaccauuugccgaggcaacauccuggggacgcuuaggagccagacaacgccgacaguccagacucgagcuaugcucuagguuggagcgggaggcagccagauuggccgaucuugguuag

SEQ ID NO: 246142 - DNA, 1653 bp, Artificial Sequence
  derived and/or modified sequence
ccggctccggcatctaggaagcttcttccacggagacacctctctgaaaagtcccaccacattagcatcccctctcccgatattagtcacaagggactgcgaagtaagcgcacacagccgtctgaccctgaaacctgggaatcattacccagattggattcccagagacatgggggacctgagttctccttcgatctgctcccagaagccagggcaatccgcgtgacgatttcctctggacctgaggtgagcgtgcgcctctgccatcaatgggcattggaatgcgaggagctctcatctccctacgacgtacagaagatcgtgtcaggcggacataccgttgagctcccttacgaatttctcctcccctgtctgtgcattgaagcctcataccttcaggaagatacggttaggcgcaagaagtgcccctttcaatcttggccagaggcatatggatccgacttctggaagtctgtccacttcacagattattcccaacatacccagatggtcatggccctgaccctccgttgccctttgaagttagaagccgctctttgccagcggcacgactggcatactctctgtaaggaccttcccaatgcaacagcacgggaaagtgacgggtggtacgtgctggaaaaggtggatctgcacccacagctgtgttttaagttcagtttcggcaactctagtcatgtggagtgtccacaccaaactggctcgttgacttcttggaacgtgtccatggatacacaggcccagcagctcatcttgcactttagcagtagaatgcatgccactttctccgccgcatggagcctgcccggtctgggacaggatactctggtgcctcccgtgtacacagtgagccaggctaggggttcttcaccggtatccctggatttgataatcccatttcttcgtccaggatgctgtgtgctcgtgtggcggagcgatgtccaattcgcgtggaagcacctcctgtgtccagatgtctcttatcgccatcttggactcctgatcctggctttgttggctctgttgacccttctgggcgtggtgctcgcgctgacgtgcaggcggccacagtccgggccagggccagcaaggcctgtgcttctcctgcatgccgctgactccgaagcgcaacgaaggctggttggtgccctggcagaacttcttagagcagccttaggcggaggtagggatgtcattgtcgacttatgggaagggagacacgtggcacgggtaggaccactcccttggctgtgggccgctcgaacgagagtggctcgcgagcaaggaaccgtgctgctgctgtggtcaggcgctgatctacggcctgtgtcaggcccagaccccagggccgcaccactccttgccttgctccatgccgcacccaggccgcttctgctgctggcctatttttctcgactctgcgcgaaaggcgacattccaccccctctgagagcattgccgaggtatagactgctcagggacctacctcggctcctgcgggcattagacgccaggccctttgccgaagctaccagttggggacgactgggagcaaggcaacgtcgacagagtaggttggaactgtgctctcggctggaacgagaagcggctaggctggccgatcttgggtag

SEQ ID NO: 246143 - DNA, 1653 bp, Artificial Sequence
  derived and/or modified sequence
ccagcccccgcatctcgcaaactcttgccacgtcgccacctttccgagaagtctcaccacattagcatccctagtccagatatcagccacaagggactgcgctccaagcgaacacaacccagcgacccggaaacctgggaaagcctccccagattagatagccagcgtcatggggggccggaatttagttttgacctgcttcccgaggctcgggcaattagagttaccattagttccgggcccgaggtatccgtcaggctgtgtcaccagtgggcgctggaatgtgaagaactcagctccccatatgatgtccagaaaatcgtgtctggcggccacaccgtggagctgccgtacgaatttctgctgccatgcctttgtatcgaggccagttacctccaggaggataccgtccgcagaaaaaaatgtccatttcagtcatggccagaggcgtatgggtcagacttctggaagtcggtgcacttcacagattactcacaacatacccagatggtgatggccctaacccttagatgtcccctcaaactcgaagccgctttgtgccagaggcacgactggcacaccttgtgtaaagacttacccaacgcaacagctagggagtctgatggttggtacgttctggaaaaagttgatctgcatcctcagttgtgttttaagttttcgttcggcaattcaagtcatgttgagtgtccacaccagactggatcacttacttcttggaacgtctcgatggacacccaggcgcagcaactcattttacactttagttcgcgaatgcatgcaaccttttctgctgcatggtcactgccaggccttggccaggataccctggttcccccagtatatactgtgagccaggccagaggctcaagcccagtgagcctggatctcataatcccctttctacgccccggctgctgcgtgctcgtgtggcggtcagacgtgcagtttgcatggaaacatctgctctgccccgatgtgtcatatcgacaccttggactgcttattcttgcgctgctcgcactcctaaccctgcttggcgttgttcttgccctgacttgccgacgtcctcaaagcgggcccggtcccgcccgtcccgtgttgctattgcacgctgctgatagtgaagctcaaaggcggctggtcggagccttggccgagttgctacgcgccgcactgggcggtggacgagatgtgatagttgacctttgggagggaagacatgtggccagagttggacctctaccctggctctgggctgcgcgcacacgcgtagcacgggagcagggcacagtgttgctgctatggtctggagcagatctgcggccagtaagcggaccagacccacgcgcggcacctctgctggccctactgcacgccgctccgcgacctctgctgctgctcgcttatttctctaggctttgtgcaaaaggcgacattcctccccccctacgggccctccctcgctacaggttacttagggatttgccaagactcctgagagcgctggatgcccgccccttcgcggaggcgaccagctggggcagactcggggcgcgacagcgtcgacagtctagactggaactgtgctccagacttgagagggaagctgctcgtctcgccgacctgggatag

SEQ ID NO: 246144 - DNA, 2241 bp, Artificial Sequence
  derived and/or modified sequence
cctgctcctgcctctaggaagctgctgcctcgtcgtcacctgtctgagaagagccatcacatttccatcccctccccagacatctcccacaagggacttcgctctaaaaggacccaaccttcggatccagagacatgggaaagtcttcccagattggactcacaaaggcatggaggacccgagttctcctttgatttgctgcctgaggcccgggctattcgggtgaccatatcttcaggccctgaggtcagcgtgcgtctttgtcaccagtgggcactggagtgtgaagagctgagcagtccctatgatgtccagaaaattgtgtctgggggccacactgtagagctgccttatgaattccttctgccctgtctgtgcatagaggcatcctacctgcaagaggacactgtgaggcgcaaaaaatgtcccttccagagctggccagaagcctatggctcggacttctggaagtcagtgcacttcactgactacagccagcacactcagatggtcatggccctgacactccgctgcccactgaagctggaagctgccctctgccagaggcacgactggcataccctttgcaaagacctcccgaatgccacagctcgagagtcagatgggtggtatgttttggagaaggtggacctgcacccccagctctgcttcaagttctcttttggaaacagcagccatgttgaatgcccccaccagactgggtctctcacatcctggaatgtaagcatggatacccaagcccagcagctgattcttcacttctcctcaagaatgcatgccaccttcagtgctgcctggagcctcccaggcttggggcaggacactttggtgccccccgtgtacactgtcagccaggcccggggctcaagcccagtgtcactagacctcatcattcccttcctgaggccagggtgctgtgtcctggtgtggcggtcagatgtccagtttgcctggaagcacctcttgtgtccggatgtctcttacagacacctggggctcttgatcctggcactgctggccctcctcaccctactgggtgttgttctggccctcacctgccggcgcccacagtcaggcccgggcccagcgcggccagtgctcctcctgcacgcggcggactcggaggcgcagcggcgcctggtgggagcgctggctgaactgctacgggcagcgctgggcggcgggcgcgacgtgatcgtggacctgtgggaggggaggcacgtggcgcgcgtgggcccgctgccgtggctctgggcggcgcggacgcgcgtagcgcgggagcagggcactgtgctgctgctgtggagcggcgccgaccttcgcccggtcagcggccccgacccccgcgccgcgcccctgctcgccctgctccacgctgccccgcgcccgctgctgctgctcgcttacttcagtcgcctctgcgccaagggcgacatccccccgccgctgcgcgccctgccgcgctaccgcctgctgcgcgacctgccgcgtctgctgcgggcgctggacgcgcggcctttcgcagaggccaccagctggggccgccttggggcgcggcagcgcaggcagagccgcctagagctgtgcagccggctcgaacgagaggccgcccgacttgcagacctaggttgagcagagctccaccgcagtcccgggtgtctgcggccgcaacgcaacggacactggctggaaccccggaatgagccttcgaccctgaaatccttggggtgcctcgaggacgactggccgaaaagccgcattccctgcctcacaggccggaagtcccagcccagtccccgcgcgcgtccctcttcctcctcatactttcccttgactgagagctcctctaacccctgttctgatgggggagggcggtcttcccacttcctctccagaactccagaaagagcagtgtgcttatgcttcagtccaggctggagaggttggggccggggtagggaggcaggagccatgtcagttctgaaggagggtgaggcggtgggggattgcagggggcggctgagagaaaacctccttgggggccagggattccctttcccactctgaggctctggccagagggagagaggactctggacctaggaaaagaggcttttggctccaggtggtcaggacagtgggggttgggggtggggtgggtgggtgctggcggtggggaccaagatccggaaagatgaataaagacaaacatgacaaact

SEQ ID NO: 246145 - DNA, 1653 bp, Artificial Sequence
  derived and/or modified sequence
cccgcccctgctagtcgaaagctgctgccccgcaggcacttgagcgaaaagagccaccacatatcaatccccagcccagatattagccataagggcctccgatcaaagaggactcaaccgagcgatcccgagacatgggagtccctgcccagacttgactcacagcgacatggcggccctgaattttcattcgatctgttgccagaagccagggcaatcagagtgacgatatcaagcggaccagaggttagcgtgaggctctgccaccagtgggcactagaatgcgaagaactatcctcaccatatgacgtgcaaaaaattgtctcagggggccatactgtagaactcccatatgagttcttgttaccatgcctgtgcattgaagcttcgtatctccaagaggacactgtccgcagaaaaaagtgtcccttccaatcatggcctgaggcttatggaagcgatttttggaagtctgttcactttaccgattactctcagcacacacagatggtcatggcgttaacgctccggtgcccacttaaactggaagccgcactgtgtcagagacacgattggcataccctgtgcaaggacttaccaaatgcgacagcaagagagtccgacgggtggtatgtgcttgagaaagtcgatctccatccccagctgtgctttaagttctccttcggcaacagttcacacgtggaatgcccgcatcaaactggttctttaacttcatggaatgtttctatggatacccaggctcaacaactgattctgcacttctctagccgaatgcacgccactttttcagcagcatggagtttacccggactcggccaggataccctggtcccgccagtgtatacagtttcccaggcccgaggttcctcaccagtttctctggatctaattatccctttccttagacctggatgctgtgtgctcgtttggagatcggacgtccagttcgcttggaagcatcttttgtgtcccgatgtgagttaccgtcatctgggcttgctaattctggcactgctagctctacttacgctgctgggagtcgtcctcgctttaacttgtcgtcgtccacagtctggtccaggccccgctagaccagtgcttctgctgcatgctgccgattctgaggcccagaggcgacttgtgggcgccctagctgagcttctgcgggccgctctcggggggggccgcgatgtgatagttgatttgtgggaaggtcgacatgtggccagggtgggcccactcccttggctgtgggctgctcgtacccgcgttgcgagagaacagggcacagttctgctgttgtggtcaggtgctgatctgaggcctgtttctggtccagacccccgtgctgctcccctattagcacttctccacgccgccccccgtcccctcctcctgttggcatatttttcaagattgtgtgccaaaggcgatataccaccccccttgcgtgcattgcctcgatatagactgttgcgagacctgccccgtttattaagagccctggacgcccgcccttttgcggaggccacgagctgggggagactgggtgccaggcaaagacgccaatctcggctggagctgtgttcaagactagaaagagaggccgcaagactggccgatctgggatag

SEQ ID NO: 246146 - DNA, 1653 bp, Artificial Sequence
  derived and/or modified sequence
cccgcccccgccagcagaaagctgctgcccagaagacacctgagcgagaagagccaccacatcagcatccccagccccgacatcagccacaagggcctgagaagcaagagaacccagcccagcgaccccgagacctgggagagcctgcccagactggacagccagagacacggcggccccgagttcagcttcgacctgctgcccgaggccagagccatcagagtgaccatcagcagcggccccgaggtgagcgtgagactgtgccaccagtgggccctggagtgcgaggagctgagcagcccctacgacgtgcagaagatcgtgagcggcggccacaccgtggagctgccctacgagttcctgctgccctgcctgtgcatcgaggccagctacctgcaggaggacaccgtgagaagaaagaagtgccccttccagagctggcccgaggcctacggcagcgacttctggaagagcgtgcacttcaccgactacagccagcacacccagatggtgatggccctgaccctgagatgccccctgaagctggaggccgccctgtgccagagacacgactggcacaccctgtgcaaggacctgcccaacgccaccgccagagagagcgacggctggtacgtgctggagaaggtggacctgcacccccagctgtgcttcaagttcagcttcggcaacagcagccacgtggagtgcccccaccagaccggcagcctgaccagctggaacgtgagcatggacacccaggcccagcagctgatcctgcacttcagcagcagaatgcacgccaccttcagcgccgcctggagcctgcccggcctgggccaggacaccctggtgccccccgtgtacaccgtgagccaggccagaggcagcagccccgtgagcctggacctgatcatccccttcctgagacccggctgctgcgtgctggtgtggagaagcgacgtgcagttcgcctggaagcacctgctgtgccccgacgtgagctacagacacctgggcctgctgatcctggccctgctggccctgctgaccctgctgggcgtggtgctggccctgacctgcagaagaccccagagcggccccggccccgccagacccgtgctgctgctgcacgccgccgacagcgaggcccagagaagactggtgggcgccctggccgagctgctgagagccgccctgggcggcggcagagacgtgatcgtggacctgtgggagggcagacacgtggccagagtgggccccctgccctggctgtgggccgccagaaccagagtggccagagagcagggcaccgtgctgctgctgtggagcggcgccgacctgagacccgtgagcggccccgaccccagagccgcccccctgctggccctgctgcacgccgcccccagacccctgctgctgctggcctacttcagcagactgtgcgccaagggcgacatccccccccccctgagagccctgcccagatacagactgctgagagacctgcccagactgctgagagccctggacgccagacccttcgccgaggccaccagctggggcagactgggcgccagacagagaagacagagcagactggagctgtgcagcagactggagagagaggccgccagactggccgacctgggctag

SEQ ID NO: 246147 - DNA, 1653 bp, Artificial Sequence
  derived and/or modified sequence
cccgcccccgccagcagaaaactgttaccacgacgccatttgtctgagaagtcccaccacatatctattccgtcaccagatataagtcataagggcctgaggtcaaaaagaacccaaccgagcgaccctgagacctgggagtccctgccccgacttgacagccaaaggcatggagggccagaattttcctttgacctgttgcctgaagccagggcaattagggttaccattagttctggaccagaggtgtccgtgcgcctgtgccaccaatgggcattggaatgcgaagaactttcaagcccatatgacgtacagaaaatagtgagcggcggccacaccgtcgagttaccatacgaattcctcttaccatgcctgtgcatcgaagcctcttacttacaggaggacaccgtaagacggaagaagtgtcctttccagagctggcccgaggcttatgggagcgatttttggaaatctgtccatttcacagattacagccagcatacccagatggtgatggcactgaccctacggtgtcccttgaagctggaagcagccttatgccagagacacgattggcatacgttgtgcaaggatctccccaacgctacggcacgcgagtccgatgggtggtatgtgttggaaaaggtcgatcttcatcctcagttgtgctttaaattctcattcggcaacagttctcatgtggaatgtccccatcaaacaggatcactgacatcctggaatgtatcgatggatacgcaggctcagcagctcattctgcacttttctagcagaatgcacgctaccttctcagcagcatggagtctccccggcctcggacaggataccttggttccccctgtgtatacagttagccaggccagggggagctccccagtgagcctagatctgattatcccgttcttgaggcccggttgctgcgtgctggtgtggcgttctgacgttcagtttgcctggaaacacttgttgtgcccggatgtctcttaccgtcacctcggactactgatccttgctctgctcgcactgctgactttactgggtgtcgtcctagcgttgacatgtcggaggcctcagtctggcccaggcccagcacggcccgtcctcctactgcatgcagccgactcagaagcccagcgtaggttagttggcgcactggctgagttgctgagggccgcactgggcggcggaagggacgtcatcgtggacctgtgggaagggcgccacgtggccagagtagggcccctcccctggctctgggccgcccggaccagggtcgccagggagcaaggtacagtgttattgctatggagcggcgctgacctccggccagtatccggacctgatccaagagccgcaccgctcctggccctgctgcatgccgctcctcggcctttgttgctgcttgcttacttcagtagactgtgcgctaaaggagacatcccccctccactccgagctctaccacgctaccggctcttgcgagatttgcctaggctcctccgggccttagatgcccgcccttttgccgaggctacaagttgggggaggctaggggcccggcagagaaggcagtcaagattggagctttgctcgaggcttgaacgggaggccgctcgactcgcagacctgggctag

SEQ ID NO: 246148 - DNA, 1653 bp, Artificial Sequence
  derived and/or modified sequence
ccagccccagccagcaggaagctgctgcccaggaggcacctgtctgagaagagccaccacatcagcatccccagcccagacatcagccacaagggcctgcggagcaagaggacccagcccagcgaccctgagacctgggagagcctgccccggctggacagccagagacatggaggccctgagttctcctttgacctgctgcctgaggcccgggccatccgggtgaccatcagcagcggccctgaggtgtctgtgcggctgtgccaccagtgggccctggagtgtgaggagctgagcagcccctatgatgtgcagaagatcgtgtctgggggccacacagtggagctgccctatgagttcctgctgccctgcctgtgcatcgaggccagctacctgcaggaggacacagtgcggaggaagaagtgccccttccagagctggccagaggcctacggcagtgacttctggaagtctgtgcacttcacagactacagccagcacacccagatggtgatggccctgaccctgcgctgccccctgaagctggaggccgccctgtgccagagacatgactggcacaccctgtgcaaggacctgcccaatgccacagcccgggagagtgatggctggtacgtgctggagaaggtggacctgcacccccagctgtgcttcaagttctcctttggaaacagcagccacgtggagtgcccccaccagacaggcagcctgacctcctggaatgtgtccatggacacccaggcccagcagctgatcctgcacttcagcagcaggatgcacgccaccttctctgctgcctggagcctgcccggcctgggccaggacaccctggtgccccctgtgtacacagtgtcccaggcccggggcagcagccctgtgtccctggacctgatcatccccttcctgcggcccggctgctgcgtgctggtgtggaggagtgatgtgcagtttgcctggaagcacctgctgtgcccagatgtgtcctaccgccacctgggcctgctgatcctggccctgctggccctgctgaccctgctgggcgtggtgctggccctgacctgcagaagaccccagagcggccctggccctgcccggcctgtgctgctgctgcacgccgctgacagcgaggcccagaggcggctggtgggcgccctggccgagctgctgcgggccgccctgggcggcggcagagatgtgattgtggacctgtgggagggccgccacgtggcccgggtgggccccctgccctggctgtgggccgcccggaccagggtggcccgggagcagggcaccgtgctgctgctgtggagcggggctgacctgcggcctgtgtctggccctgaccccagggctgcccccctgctggccctgctgcacgccgccccccggcccctgctgctgctggcctacttcagccggctgtgtgccaagggggacatccccccacccctgcgggccctgccccgctaccgcctgctgcgggacctgccccggctgctgcgggccctggatgcccggccctttgctgaggccacctcctggggccgcctgggcgcccggcagaggcggcagagccggctggagctgtgcagccggctggagcgggaggccgcccggctggccgacctgggctag

SEQ ID NO: 246149 - DNA, 1653 bp, Artificial Sequence
  derived and/or modified sequence
cccgcccccgccagccggaagctgctgccccggcggcacctgagcgagaagagccatcacatcagcattccatcgccagacattagtcacaaggggctgcgcagtaagaggacccagccctccgatcctgagacttgggagtcactgcctaggctggacagtcagcgccacggcggtcccgagttcagcttcgatctgttgccagaagccagggcaatccgtgttaccatctcttccgggcccgaggtgtcggtgcggctctgtcatcagtgggcgctggagtgtgaggaattgagcagtccttacgacgttcaaaagatcgtcagtggcggacacactgtggagctgccttacgagtttctgcttccttgtctgtgtattgaggcctcctacctgcaggaagatacggtgcgtaggaaaaaatgcccattccagagttggccggaggcatatggctcagatttctggaaaagtgtgcattttactgattacagtcagcatacccagatggtgatggccctcactctccggtgcccgcttaagttggaagcggctctgtgccagagacacgactggcataccttgtgcaaagatctacctaatgctaccgctcgggagagcgacggctggtatgtcctggagaaggtggacttgcatccacagttgtgtttcaaattctcctttggcaattcgtctcacgttgagtgccctcatcagactgggtccttgacttcctggaacgtgtctatggatactcaagcccagcagctcattttgcacttttcatcccgaatgcacgctacttttagtgctgcctggagccttcccggcttagggcaagacactcttgtgcctcctgtttatacggtgtcacaggcccggggtagttcaccagtgagcctggatctgattatccctttcctacgccccggctgctgcgtgctcgtgtggcggtctgatgtgcagtttgcctggaaacatttgttatgccccgatgtcagctatagacacttgggcttactgattctcgccctgctagccctcctaaccttactgggggtcgttctggcactcacgtgcaggcgaccacaatcagggcccggccccgcgagacccgttctcctgttgcatgcagctgattctgaagctcagagaaggcttgtgggagcactcgccgagttactgcgcgccgccttaggtggaggcagagacgtcatcgtcgacctgtgggaaggccggcacgtagcgcgagtgggtccactgccctggctctgggctgcacgaacccgtgttgcaagagagcaagggacagtgctgctactttggtcaggggccgatctgaggccagtgagcggccctgacccacgggcagccccattgcttgccctcctgcacgcggctccaaggccgctcctgctgctcgcctatttcagtcgcttgtgtgccaaaggagatattcctcctccccttagagccttgccccgttatcgcctcctcagagatttgcctagattgctcagagctttggacgcaaggcccttcgccgaggctacttcctggggccgcttgggcgcacggcagcggagacagtcaaggctggagttatgcagccggctggaacgcgaggcagctcgactagctgacttaggctag

SEQ ID NO: 246150 - RNA, 1653 nt, Artificial Sequence
  derived and/or modified sequence
ccagcccccgcaucucgcaaacucuugccacgucgccaccuuuccgagaagucucaccacauuagcaucccuaguccagauaucagccacaagggacugcgcuccaagcgaacacaacccagcgacccggaaaccugggaaagccuccccagauuagauagccagcgucauggggggccggaauuuaguuuugaccugcuucccgaggcucgggcaauuagaguuaccauuaguuccgggcccgagguauccgucaggcugugucaccagugggcgcuggaaugugaagaacucagcuccccauaugauguccagaaaaucgugucuggcggccacaccguggagcugccguacgaauuucugcugccaugccuuuguaucgaggccaguuaccuccaggaggauaccguccgcagaaaaaaauguccauuucagucauggccagaggcguaugggucagacuucuggaagucggugcacuucacagauuacucacaacauacccagauggugauggcccuaacccuuagauguccccucaaacucgaagccgcuuugugccagaggcacgacuggcacaccuuguguaaagacuuacccaacgcaacagcuagggagucugaugguugguacguucuggaaaaaguugaucugcauccucaguuguguuuuaaguuuucguucggcaauucaagucauguugaguguccacaccagacuggaucacuuacuucuuggaacgucucgauggacacccaggcgcagcaacucauuuuacacuuuaguucgcgaaugcaugcaaccuuuucugcugcauggucacugccaggccuuggccaggauacccugguucccccaguauauacugugagccaggccagaggcucaagcccagugagccuggaucucauaauccccuuucuacgccccggcugcugcgugcucguguggcggucagacgugcaguuugcauggaaacaucugcucugccccgaugugucauaucgacaccuuggacugcuuauucuugcgcugcucgcacuccuaacccugcuuggcguuguucuugcccugacuugccgacguccucaaagcgggcccggucccgcccgucccguguugcuauugcacgcugcugauagugaagcucaaaggcggcuggucggagccuuggccgaguugcuacgcgccgcacugggcgguggacgagaugugauaguugaccuuugggagggaagacauguggccagaguuggaccucuacccuggcucugggcugcgcgcacacgcguagcacgggagcagggcacaguguugcugcuauggucuggagcagaucugcggccaguaagcggaccagacccacgcgcggcaccucugcuggcccuacugcacgccgcuccgcgaccucugcugcugcucgcuuauuucucuaggcuuugugcaaaaggcgacauuccucccccccuacgggcccucccucgcuacagguuacuuagggauuugccaagacuccugagagcgcuggaugcccgccccuucgcggaggcgaccagcuggggcagacucggggcgcgacagcgucgacagucuagacuggaacugugcuccagacuugagagggaagcugcucgucucgccgaccugggauag

SEQ ID NO: 246151 - RNA, 1653 nt, Artificial Sequence
  derived and/or modified sequence
cccgccccugcuagucgaaagcugcugccccgcaggcacuugagcgaaaagagccaccacauaucaauccccagcccagauauuagccauaagggccuccgaucaaagaggacucaaccgagcgaucccgagacaugggagucccugcccagacuugacucacagcgacauggcggcccugaauuuucauucgaucuguugccagaagccagggcaaucagagugacgauaucaagcggaccagagguuagcgugaggcucugccaccagugggcacuagaaugcgaagaacuauccucaccauaugacgugcaaaaaauugucucagggggccauacuguagaacucccauaugaguucuuguuaccaugccugugcauugaagcuucguaucuccaagaggacacuguccgcagaaaaaagugucccuuccaaucauggccugaggcuuauggaagcgauuuuuggaagucuguucacuuuaccgauuacucucagcacacacagauggucauggcguuaacgcuccggugcccacuuaaacuggaagccgcacugugucagagacacgauuggcauacccugugcaaggacuuaccaaaugcgacagcaagagaguccgacgggugguaugugcuugagaaagucgaucuccauccccagcugugcuuuaaguucuccuucggcaacaguucacacguggaaugcccgcaucaaacugguucuuuaacuucauggaauguuucuauggauacccaggcucaacaacugauucugcacuucucuagccgaaugcacgccacuuuuucagcagcauggaguuuacccggacucggccaggauacccuggucccgccaguguauacaguuucccaggcccgagguuccucaccaguuucucuggaucuaauuaucccuuuccuuagaccuggaugcugugugcucguuuggagaucggacguccaguucgcuuggaagcaucuuuugugucccgaugugaguuaccgucaucugggcuugcuaauucuggcacugcuagcucuacuuacgcugcugggagucguccucgcuuuaacuugucgucguccacagucugguccaggccccgcuagaccagugcuucugcugcaugcugccgauucugaggcccagaggcgacuugugggcgcccuagcugagcuucugcgggccgcucucggggggggccgcgaugugauaguugauuugugggaaggucgacauguggccagggugggcccacucccuuggcugugggcugcucguacccgcguugcgagagaacagggcacaguucugcuguuguggucaggugcugaucugaggccuguuucugguccagacccccgugcugcuccccuauuagcacuucuccacgccgccccccguccccuccuccuguuggcauauuuuucaagauugugugccaaaggcgauauaccaccccccuugcgugcauugccucgauauagacuguugcgagaccugccccguuuauuaagagcccuggacgcccgcccuuuugcggaggccacgagcugggggagacugggugccaggcaaagacgccaaucucggcuggagcuguguucaagacuagaaagagaggccgcaagacuggccgaucugggauag

SEQ ID NO: 246152 - protein, 667 aa, Artificial Sequence
  derived and/or modified sequence
MGSSRLAALLLPLLLIVIDLSDSAGIGFRHLPHWNTRCPLASHTDDSFTGSSAYIPCRTWWALFSTKPWCVRVWHCSRCLCQHLLSGGSGLQRGLFHLLVQKSKKSSTFKFYRRHKMPAPAQRKLLPRRHLSEKSHHISIPSPDISHKGLRSKRTQPSDPETWESLPRLDSQRHGGPEFSFDLLPEARAIRVTISSGPEVSVRLCHQWALECEELSSPYDVQKIVSGGHTVELPYEFLLPCLCIEASYLQEDTVRRKKCPFQSWPEAYGSDFWKSVHFTDYSQHTQMVMALTLRCPLKLEAALCQRHDWHTLCKDLPNATARESDGWYVLEKVDLHPQLCFKFSFGNSSHVECPHQTGSLTSWNVSMDTQAQQLILHFSSRMHATFSAAWSLPGLGQDTLVPPVYTVSQARGSSPVSLDLIIPFLRPGCCVLVWRSDVQFAWKHLLCPDVSYRHLGLLILALLALLTLLGVVLALTCRRPQSGPGPARPVLLLHAADSEAQRRLVGALAELLRAALGGGRDVIVDLWEGRHVARVGPLPWLWAARTRVAREQGTVLLLWSGADLRPVSGPDPRAAPLLALLHAAPRPLLLLAYFSRLCAKGDIPPPLRALPRYRLLRDLPRLLRALDARPFAEATSWGRLGARQRRQSRLELCSRLEREAARLADLG

SEQ ID NO: 246153 - protein, 700 aa, Artificial Sequence
  derived and/or modified sequence
MLAPFLLLLTHSRSPLSFRPCSHVPGALIAQKPMGSSRLAALLLPLLLIVIDLSDSAGIGFRHLPHWNTRCPLASHTDDSFTGSSAYIPCRTWWALFSTKPWCVRVWHCSRCLCQHLLSGGSGLQRGLFHLLVQKSKKSSTFKFYRRHKMPAPAQRKLLPRRHLSEKSHHISIPSPDISHKGLRSKRTQPSDPETWESLPRLDSQRHGGPEFSFDLLPEARAIRVTISSGPEVSVRLCHQWALECEELSSPYDVQKIVSGGHTVELPYEFLLPCLCIEASYLQEDTVRRKKCPFQSWPEAYGSDFWKSVHFTDYSQHTQMVMALTLRCPLKLEAALCQRHDWHTLCKDLPNATARESDGWYVLEKVDLHPQLCFKFSFGNSSHVECPHQTGSLTSWNVSMDTQAQQLILHFSSRMHATFSAAWSLPGLGQDTLVPPVYTVSQARGSSPVSLDLIIPFLRPGCCVLVWRSDVQFAWKHLLCPDVSYRHLGLLILALLALLTLLGVVLALTCRRPQSGPGPARPVLLLHAADSEAQRRLVGALAELLRAALGGGRDVIVDLWEGRHVARVGPLPWLWAARTRVAREQGTVLLLWSGADLRPVSGPDPRAAPLLALLHAAPRPLLLLAYFSRLCAKGDIPPPLRALPRYRLLRDLPRLLRALDARPFAEATSWGRLGARQRRQSRLELCSRLEREAARLADLG

SEQ ID NO: 246154 - DNA, 2103 bp, Artificial Sequence
  derived and/or modified sequence
atgttggcacccttcttattgctactgactcactcacgatccccactctcctttcgcccttgcagccacgtacccggtgccctcatagcccagaagcctatgggatcttcgagacttgcagcccttcttctgccccttctgttaatcgtgattgatctgagtgactccgccggtatcggctttcgtcacctgccacactggaacactcgatgcccactggcttctcatacagacgatagctttacgggcagctcggcatacattccttgtcggacttggtgggcactgtttagtacaaagccctggtgcgtgcgagtgtggcactgttcgagatgtctctgccaacatttattgagcggtggctctggtctacagagggggctctttcatctgctggtgcagaagtccaaaaagtcctctacttttaagttttaccgccgtcataagatgccagcccctgctcagagaaagttgttgccacgtcgacacctgtcagagaaatctcatcatatcagcatcccatcacctgacattagccataaaggactgagatcaaagcggacacaacctagcgaccccgagacatgggaaagtctgccgagactggactcacaacggcatgggggacccgagtttagcttcgatctcctgcctgaggcacgcgctatccgggtgaccatttccagtggacctgaagtgtcggtgagactctgccatcagtgggctctagagtgtgaggagctgagcagcccttacgatgttcaaaagattgtatccggcggacatacagtcgagttgccctatgagttcctgctaccttgcttgtgcattgaagcatcatatctccaggaggacacagtgcgacgaaagaaatgtccttttcagtcttggcccgaagcatacggtagcgatttctggaagagcgtacacttcacagattactcccagcacacacagatggtgatggctctcaccctgcgatgtcctcttaagttagaggccgctctctgccaaagacacgattggcacaccctgtgtaaagacctccctaatgcgactgccagggagagcgatggttggtacgtcttggaaaaggtagacctgcatccccaactgtgttttaagttcagctttggaaattcttcacacgtggaatgcccacaccagaccggctctcttacatcctggaatgtgtcaatggacacccaggctcagcagctcatactgcatttctcaagccgcatgcacgctacctttagcgcggcatggtctctgcctggtctgggccaagatacccttgtgccaccggtctataccgtctctcaagcaaggggtagctctcctgtgtcccttgacttgattatccccttccttagaccagggtgttgtgtgttggtgtggaggagtgatgtgcagtttgcatggaagcatctgctatgccccgacgtgtcgtaccgtcacctgggcctactgatcctagccctgttggccctgctcacactcttgggagtagtgctggctctgacttgcaggcgcccacagtcagggccaggacccgcacggccagtgctgcttcttcacgcagctgacagtgaagcacaacggaggctcgtgggcgctctggctgaactcctgcgggcagcgctcgggggtgggagagatgttattgtggatctttgggagggcagacacgtcgctcgtgtcggccctctgccctggctatgggctgccagaaccagggtggctcgagagcaggggaccgtgcttttactatggtcaggtgccgatctgagaccagtctcagggccagatccccgagccgctccactgctcgcattgctgcacgctgccccacgaccattgctgctactagcctatttcagtcgtttatgtgccaagggcgacattcccccacctttgcgggctctgccacgatatcgccttttacgggatcttcccaggctgttacgagctctggacgcacgcccatttgccgaggccacatcttggggtcggctcggagctcgtcaaaggcgtcagtcacgtctggaattgtgtagtcgattagagagagaggctgctcgactagcagatctgggatag

SEQ ID NO: 246155 - DNA, 2158 bp, Artificial Sequence
  derived and/or modified sequence
ggtgcgtcccccaacctgatgctagcccctttcctgttacttctcacccacagcaggagccccttgtctttcaggccatgcagccatgttccgggagccctaattgcacagaagcccatggggagctccagactggcagccctgctcctgcctctcctcctcatagtcatcgacctctctgactctgctgggattggctttcgccacctgccccactggaacacccgctgtcctctggcctcccacacggatgacagtttcactggaagttctgcctatatcccttgccgcacctggtgggccctcttctccacaaagccttggtgtgtgcgagtctggcactgttcccgctgtttgtgccagcatctgctgtcaggtggctcaggtcttcaacggggcctcttccacctcctggtgcagaaatccaaaaagtcttccacattcaagttctataggagacacaagatgccagcacctgctcagaggaagctgctgcctcgtcgtcacctgtctgagaagagccatcacatttccatcccctccccagacatctcccacaagggacttcgctctaaaaggacccaaccttcggatccagagacatgggaaagtcttcccagattggactcacaaaggcatggaggacccgagttctcctttgatttgctgcctgaggcccgggctattcgggtgaccatatcttcaggccctgaggtcagcgtgcgtctttgtcaccagtgggcactggagtgtgaagagctgagcagtccctatgatgtccagaaaattgtgtctgggggccacactgtagagctgccttatgaattccttctgccctgtctgtgcatagaggcatcctacctgcaagaggacactgtgaggcgcaaaaaatgtcccttccagagctggccagaagcctatggctcggacttctggaagtcagtgcacttcactgactacagccagcacactcagatggtcatggccctgacactccgctgcccactgaagctggaagctgccctctgccagaggcacgactggcataccctttgcaaagacctcccgaatgccacagctcgagagtcagatgggtggtatgttttggagaaggtggacctgcacccccagctctgcttcaagttctcttttggaaacagcagccatgttgaatgcccccaccagactgggtctctcacatcctggaatgtaagcatggatacccaagcccagcagctgattcttcacttctcctcaagaatgcatgccaccttcagtgctgcctggagcctcccaggcttggggcaggacactttggtgccccccgtgtacactgtcagccaggcccggggctcaagcccagtgtcactagacctcatcattcccttcctgaggccagggtgctgtgtcctggtgtggcggtcagatgtccagtttgcctggaagcacctcttgtgtccggatgtctcttacagacacctggggctcttgatcctggcactgctggccctcctcaccctactgggtgttgttctggccctcacctgccggcgcccacagtcaggcccgggcccagcgcggccagtgctcctcctgcacgcggcggactcggaggcgcagcggcgcctggtgggagcgctggctgaactgctacgggcagcgctgggcggcgggcgcgacgtgatcgtggacctgtgggaggggaggcacgtggcgcgcgtgggcccgctgccgtggctctgggcggcgcggacgcgcgtagcgcgggagcagggcactgtgctgctgctgtggagcggcgccgaccttcgcccggtcagcggccccgacccccgcgccgcgcccctgctcgccctgctccacgctgccccgcgcccgctgctgctgctcgcttacttcagtcgcctctgcgccaagggcgacatccccccgccgctgcgcgccctgccgcgctaccgcctgctgcgcgacctgccgcgtctgctgcgggcgctggacgcgcggcctttcgcagaggccaccagctggggccgccttggggcgcggcagcgcaggcagagccgcctagagctgtgcagccggctcgaacgagaggccgcccgacttgcagacctaggttgagcagagctccaccgcagtcccgggtgtctgcggccgc

SEQ ID NO: 246156 - DNA, 2103 bp, Artificial Sequence
  derived and/or modified sequence
atgttagccccattccttttgctccttacccactctaggtcaccgctctcttttcgcccgtgctcacatgtgcccggtgctttgatcgctcagaagccgatgggctcctcgaggttggcagccctcctcctgccccttctgttaatagtcatagacttatccgactccgccggcatcggcttccgccatctgccgcattggaatacacgctgccccctagcatcccacaccgatgatagttttacaggatcatcagcctacattccctgtagaacatggtgggcccttttctcgaccaaaccttggtgtgtgcgtgtctggcactgtagtcggtgcttatgtcagcatctattgtcgggaggctcagggctgcagcgtggattatttcacctcttagtgcaaaagtcgaaaaaatcttctacgttcaaattttatcggcgccataagatgcctgctcctgctcaacgaaagctccttcctagaagacatttatccgaaaagagtcaccatattagtatccccagcccggacattagtcataagggcttgagatccaaacggactcagcctagcgatccagagacctgggaatccctgcccagacttgactcccagaggcatgggggcccagaattctcgttcgatctgctgcccgaagccagagcaatccgagtcactatttcaagcggccccgaggtgtccgttagactatgccaccagtgggcgctcgaatgtgaggagctttcttccccatacgacgtacagaagatcgtttctggagggcacaccgtcgaactcccttatgagttcctcctgccttgcctgtgcattgaggcgtcttatcttcaggaagacaccgtgaggagaaaaaagtgtcccttccagtcttggcctgaagcatacggtagcgatttctggaaatccgtgcactttactgattactcccaacatactcagatggtaatggctctgaccctgaggtgcccactcaagctggaagccgcactttgtcaaagacacgactggcacaccctgtgcaaagacctcccaaatgccacagctcgggaaagtgacggctggtacgtgcttgagaaggtggaccttcatcctcagttatgtttcaagttttcctttggaaacagctcacatgttgaatgtccacatcagaccggctccctgacttcttggaatgtgtctatggacacccaagcgcagcagctgattctacacttttcatcgcgcatgcacgcaacttttagcgcagcttggtcactgccaggcctcggccaggacactttggtccctcccgtgtataccgtctctcaggcacgcggctcttcccccgtttccttagatcttattattccatttctgaggcccgggtgctgcgtattagtttggcggtccgatgtacagtttgcctggaagcacctgttatgtcccgatgttagttaccgccacctgggtctgctcatccttgccctgctggctctgcttacattgctcggggtcgtgcttgctctgacctgtcgaagaccgcaaagcggaccaggccccgcccggccagtgttactgctgcatgccgccgactccgaagcccagcgtcgcctggtaggcgctctggctgagctcctgcgagctgccctgggcggaggccgggatgtcattgtggacctgtgggagggcagacatgtggctcgcgtggggccattgccctggttatgggccgccaggacacgggtcgcccgggagcagggcaccgtcctgcttctgtggtcaggggccgatctgagacccgtgagtggacctgacccacgggctgccccactgctcgcgctcctacacgccgcgccacgaccactcctcctcctcgcgtacttttccagactgtgtgccaagggtgatatcccaccacccctaagagctttgccaagatatcggctgttaagggatctgcctcggctgttgagagccctggacgctagaccctttgccgaagctacctcatggggtagactaggggccaggcaaagaaggcagagtcggttggagctgtgcagcagactggaaagggaagccgcccgcttggcagatctggggtag

SEQ ID NO: 246157 - DNA, 2103 bp, Artificial Sequence
  derived and/or modified sequence
atgctcgcccctttccttctccttttgactcacagcagatccccgcttagcttcagaccttgttcacatgtgcctggggcactcatcgcacagaagccaatgggctcttctcgacttgctgcattactcctgcccctgctcctgatcgtcatcgacctctccgactctgcaggcattggctttagacacttaccacattggaatactcggtgtcccctcgccagccataccgatgatagctttacaggatcgtccgcatacatcccttgcagaacttggtgggcattgttctcaactaagccttggtgtgtgcgtgtctggcactgtagtcggtgcttatgtcagcatctattgtcgggaggctcagggctgcagcgtggattatttcacctcttagtgcaaaagtcgaaaaaatcttctacgttcaaattttatcggcgccataagatgcctgctcctgctcaacgaaagctccttcctagaagacatttatccgaaaagagtcaccatattagtatccccagcccggacattagtcataagggcttgagatccaaacggactcagcctagcgatccagagacctgggaatccctgccccggctcgactctcagcgccatggaggcccagagttttcattcgatctcttacctgaggccagagccatccgtgttactatatccagcggtcccgaagtcagtgtacgcctgtgccaccagtgggccttagaatgcgaggagctttcatcaccctacgacgtccagaaaatagtcagtggtggacacaccgtggagctaccatacgaattcctgcttccatgcctttgtatcgaagcatcctatcttcaggaagatactgtcagaagaaagaagtgtcccttccagtcttggcctgaagcctatggcagtgacttctggaagagcgtacacttcaccgactactcccagcacacacaaatggtgatggcccttacactgagatgcccattgaaattggaagcagcactttgtcagcggcacgactggcacactttatgtaaagacctgcctaatgcgaccgcgagggaatctgatggctggtacgtcctcgagaaggtggatctgcatccccagctgtgctttaagttttctttcggtaactcgtctcacgttgagtgtccacatcagacaggctcacttacgagctggaatgtttctatggatacccaggcccaacagctgatacttcatttctcctccaggatgcatgccacctttagtgctgcttggtcccttcccggcctcggtcaggacactcttgtcccacccgtctacaccgtgtcccaggcccgtggtagcagtcctgtgtctctggatctaatcataccttttctgcggcccggatgctgcgtacttgtttggcgaagtgacgtgcaattcgcgtggaaacacctactgtgccccgatgtctcctatcggcaccttggtttactgattcttgctctgctggcgctgttgacccttcttggggtggtcctggctttgacctgtcgcagacctcagagcggacctggcccagcgagacccgtgctcttactgcacgccgctgactcagaagcacagaggagacttgtgggagccctcgctgagctgttgagagccgctctaggcggtggacgcgacgtcatcgttgacctttgggaaggcaggcacgtcgctagggttggtccacttccatggctttgggcagcgaggactcgtgtagcccgggaacaggggaccgtgttactcctttggagcggagccgaccttagacccgtaagcgggcctgatccgcgtgctgccccactgctcgcactcctccacgccgcaccaagaccccttcttctgctggcatacttttctcgactatgcgccaaaggcgacatcccccctccactccgcgcgctcccaagataccgcctgctccgcgatcttcctagactgctcagggctctggacgctcggccttttgcggaggccacaagctggggtcgcctgggcgccagacaaagacgccaaagcaggttagaactttgctccagactcgagcgtgaagccgcacggctcgctgatctgggctag

SEQ ID NO: 246158 - DNA, 2709 bp, Artificial Sequence
  derived and/or modified sequence
ggtgcgtcccccaacctgatgctagcccctttcctgttacttctcacccacagcaggagccccttgtctttcaggccatgcagccatgttccgggagccctaattgcacagaagcccatggggagctccagactggcagccctgctcctgcctctcctcctcatagtcatcgacctctctgactctgctgggattggctttcgccacctgccccactggaacacccgctgtcctctggcctcccacacggatgacagtttcactggaagttctgcctatatcccttgccgcacctggtgggccctcttctccacaaagccttggtgtgtgcgagtctggcactgttcccgctgtttgtgccagcatctgctgtcaggtggctcaggtcttcaacggggcctcttccacctcctggtgcagaaatccaaaaagtcttccacattcaagttctataggagacacaagatgccagcacctgctcagaggaagctgctgcctcgtcgtcacctgtctgagaagagccatcacatttccatcccctccccagacatctcccacaagggacttcgctctaaaaggacccaaccttcggatccagagacatgggaaagtcttcccagattggactcacaaaggcatggaggacccgagttctcctttgatttgctgcctgaggcccgggctattcgggtgaccatatcttcaggccctgaggtcagcgtgcgtctttgtcaccagtgggcactggagtgtgaagagctgagcagtccctatgatgtccagaaaattgtgtctgggggccacactgtagagctgccttatgaattccttctgccctgtctgtgcatagaggcatcctacctgcaagaggacactgtgaggcgcaaaaaatgtcccttccagagctggccagaagcctatggctcggacttctggaagtcagtgcacttcactgactacagccagcacactcagatggtcatggccctgacactccgctgcccactgaagctggaagctgccctctgccagaggcacgactggcataccctttgcaaagacctcccgaatgccacagctcgagagtcagatgggtggtatgttttggagaaggtggacctgcacccccagctctgcttcaagttctcttttggaaacagcagccatgttgaatgcccccaccagactgggtctctcacatcctggaatgtaagcatggatacccaagcccagcagctgattcttcacttctcctcaagaatgcatgccaccttcagtgctgcctggagcctcccaggcttggggcaggacactttggtgccccccgtgtacactgtcagccaggcccggggctcaagcccagtgtcactagacctcatcattcccttcctgaggccagggtgctgtgtcctggtgtggcggtcagatgtccagtttgcctggaagcacctcttgtgtccggatgtctcttacagacacctggggctcttgatcctggcactgctggccctcctcaccctactgggtgttgttctggccctcacctgccggcgcccacagtcaggcccgggcccagcgcggccagtgctcctcctgcacgcggcggactcggaggcgcagcggcgcctggtgggagcgctggctgaactgctacgggcagcgctgggcggcgggcgcgacgtgatcgtggacctgtgggaggggaggcacgtggcgcgcgtgggcccgctgccgtggctctgggcggcgcggacgcgcgtagcgcgggagcagggcactgtgctgctgctgtggagcggcgccgaccttcgcccggtcagcggccccgacccccgcgccgcgcccctgctcgccctgctccacgctgccccgcgcccgctgctgctgctcgcttacttcagtcgcctctgcgccaagggcgacatccccccgccgctgcgcgccctgccgcgctaccgcctgctgcgcgacctgccgcgtctgctgcgggcgctggacgcgcggcctttcgcagaggccaccagctggggccgccttggggcgcggcagcgcaggcagagccgcctagagctgtgcagccggctcgaacgagaggccgcccgacttgcagacctaggttgagcagagctccaccgcagtcccgggtgtctgcggccgcaacgcaacggacactggctggaaccccggaatgagccttcgaccctgaaatccttggggtgcctcgaggacgactggccgaaaagccgcattccctgcctcacaggccggaagtcccagcccagtccccgcgcgcgtccctcttcctcctcatactttcccttgactgagagctcctctaacccctgttctgatgggggagggcggtcttcccacttcctctccagaactccagaaagagcagtgtgcttatgcttcagtccaggctggagaggttggggccggggtagggaggcaggagccatgtcagttctgaaggagggtgaggcggtgggggattgcagggggcggctgagagaaaacctccttgggggccagggattccctttcccactctgaggctctggccagagggagagaggactctggacctaggaaaagaggcttttggctccaggtggtcaggacagtgggggttgggggtggggtgggtgggtgctggcggtggggaccaagatccggaaagatgaataaagacaaacatgacaaact

SEQ ID NO: 246159 - DNA, 2103 bp, Artificial Sequence
  derived and/or modified sequence
atgctggcccccttcctgctgctgctgacccacagcagaagccccctgagcttcagaccctgcagccacgtgcccggcgccctgatcgcccagaagcccatgggcagcagcagactggccgccctgctgctgcccctgctgctgatcgtgatcgacctgagcgacagcgccggcatcggcttcagacacctgccccactggaacaccagatgccccctggccagccacaccgacgacagcttcaccggcagcagcgcctacatcccctgcagaacctggtgggccctgttcagcaccaagccctggtgcgtgagagtgtggcactgcagcagatgcctgtgccagcacctgctgagcggcggcagcggcctgcagagaggcctgttccacctgctggtgcagaagagcaagaagagcagcaccttcaagttctacagaagacacaagatgcccgcccccgcccagagaaagctgctgcccagaagacacctgagcgagaagagccaccacatcagcatccccagccccgacatcagccacaagggcctgagaagcaagagaacccagcccagcgaccccgagacctgggagagcctgcccagactggacagccagagacacggcggccccgagttcagcttcgacctgctgcccgaggccagagccatcagagtgaccatcagcagcggccccgaggtgagcgtgagactgtgccaccagtgggccctggagtgcgaggagctgagcagcccctacgacgtgcagaagatcgtgagcggcggccacaccgtggagctgccctacgagttcctgctgccctgcctgtgcatcgaggccagctacctgcaggaggacaccgtgagaagaaagaagtgccccttccagagctggcccgaggcctacggcagcgacttctggaagagcgtgcacttcaccgactacagccagcacacccagatggtgatggccctgaccctgagatgccccctgaagctggaggccgccctgtgccagagacacgactggcacaccctgtgcaaggacctgcccaacgccaccgccagagagagcgacggctggtacgtgctggagaaggtggacctgcacccccagctgtgcttcaagttcagcttcggcaacagcagccacgtggagtgcccccaccagaccggcagcctgaccagctggaacgtgagcatggacacccaggcccagcagctgatcctgcacttcagcagcagaatgcacgccaccttcagcgccgcctggagcctgcccggcctgggccaggacaccctggtgccccccgtgtacaccgtgagccaggccagaggcagcagccccgtgagcctggacctgatcatccccttcctgagacccggctgctgcgtgctggtgtggagaagcgacgtgcagttcgcctggaagcacctgctgtgccccgacgtgagctacagacacctgggcctgctgatcctggccctgctggccctgctgaccctgctgggcgtggtgctggccctgacctgcagaagaccccagagcggccccggccccgccagacccgtgctgctgctgcacgccgccgacagcgaggcccagagaagactggtgggcgccctggccgagctgctgagagccgccctgggcggcggcagagacgtgatcgtggacctgtgggagggcagacacgtggccagagtgggccccctgccctggctgtgggccgccagaaccagagtggccagagagcagggcaccgtgctgctgctgtggagcggcgccgacctgagacccgtgagcggccccgaccccagagccgcccccctgctggccctgctgcacgccgcccccagacccctgctgctgctggcctacttcagcagactgtgcgccaagggcgacatccccccccccctgagagccctgcccagatacagactgctgagagacctgcccagactgctgagagccctggacgccagacccttcgccgaggccaccagctggggcagactgggcgccagacagagaagacagagcagactggagctgtgcagcagactggagagagaggccgccagactggccgacctgggctag

SEQ ID NO: 246160 - DNA, 2103 bp, Artificial Sequence
  derived and/or modified sequence
atgcttgcacctttccttctgctgttgactcattctagatcccccctgtcatttcgtccgtgttcccatgtccctggtgctcttattgcccagaagccaatgggttcaagtagactggctgccctgctgcttccacttttattgatagtgatagatctctctgactccgccggtattgggtttaggcatctgccccattggaacacacgctgccccctcgcttcacacaccgatgatagctttactggatcgagcgcatacatcccttgtcgcacttggtgggctctcttctcaaccaagccctggtgcgtgagggtgtggcattgtagccgttgtctgtgtcagcacttactgagcggaggtagcggactccagaggggtttatttcacttactagtgcagaaatctaagaagtcatcgacctttaaattctaccgtaggcacaagatgccagcccctgcgcagaggaagctcctgccacgccggcatttaagtgaaaaaagtcatcacatttcaatcccaagtccagatatttctcacaaaggcttgagaagcaagcgcactcaacccagcgatcctgaaacatgggaatcactgcctaggctcgacagtcagcgacatggcggtcctgaattttcattcgacctgctgccagaggccagggctatccgcgtgaccatatcatctggcccggaagtgtccgttaggctatgccatcagtgggcccttgaatgtgaagaattaagctccccgtacgatgtgcaaaaaatcgtgtcaggcggacatacagtggaactgccgtatgaattcctgctcccctgcctctgcatcgaggcctcttatcttcaggaagatactgtgcgacggaaaaagtgtccattccagagctggcccgaggcatatggctccgacttttggaagagtgttcatttcacagattactcacagcacactcaaatggtgatggcattgacactccggtgtcccctaaagctggaagcagctctttgtcagcggcacgactggcacacactctgtaaggacctgcctaatgcgacagcccgcgagagcgacggatggtacgttcttgagaaagtggacctgcacccgcagttatgcttcaagtttagcttcggaaactcctctcatgtggaatgtcctcatcaaacaggatctctgacatcctggaacgtgagcatggatacccaggcccagcagctgattttgcatttcagctctagaatgcatgccacattctcagcagcctggagccttcctgggcttggacaggacacactcgttcctcctgtttacacggtcagtcaggcccgaggctcaagtcctgtatcattagatctgattattcctttcttgagaccgggttgctgcgtcctggtatggcggagcgatgtccagttcgcctggaagcatctcttatgtcccgacgtgtcttaccgccacttgggtctccttattctcgctctgctggccctcctgacattattgggtgttgtcttagctctgacctgtaggaggcctcagagcgggccggggccagctcgtcccgtgctgctgctgcacgccgctgactctgaagcacaacgtcggcttgtgggtgctttagccgagcttctaagagcagcccttggtgggggcagagatgttatagtggatctttgggagggacgtcatgtggctcgtgtggggccgttaccttggctgtgggctgctagaacaagggtagcaagggagcaggggaccgtactcctgctgtggtccggcgcagacttaaggcctgtgtctggccctgaccctagggctgcgccactgctggccttactccacgctgcccctaggcccctcctgttattggcctacttttccagattgtgtgctaaaggagacataccgccccccctgcgggccctgccacgatacaggcttcttagagacctgcccagactcttgcgggccctcgacgccaggccattcgctgaggctacctcctgggggagactgggtgcacgacagaggaggcagtctagactggagttgtgctccaggctggaacgggaggccgcgcggctggcagatcttggctag

SEQ ID NO: 246161 - DNA, 2103 bp, Artificial Sequence
  derived and/or modified sequence
atgctggcccccttcctgctgctgctgacccacagccgcagccccctgtccttccggccctgcagccacgtgcctggggccctgattgcccagaagcccatgggcagcagccggctggccgccctgctgctgcccctgctgctgattgtgattgacctgagtgacagcgctggcatcggcttccgccacctgccccactggaacacccgctgccccctggccagccacacagatgacagcttcaccggcagcagcgcctacatcccctgcaggacctggtgggccctcttcagcaccaagccctggtgtgtgcgggtgtggcactgcagccgctgcctgtgccagcacctgctgagcggcggcagcggcctgcagaggggcctcttccacctgctggtgcagaagagcaagaagagcagcaccttcaagttctaccgccgccacaagatgcctgccccagcccagaggaagctgctgcccaggaggcacctgtctgagaagagccaccacatcagcatccccagcccagacatcagccacaagggcctgcggagcaagaggacccagcccagcgaccctgagacctgggagagcctgccccggctggacagccagagacatggaggccctgagttctcctttgacctgctgcctgaggcccgggccatccgggtgaccatcagcagcggccctgaggtgtctgtgcggctgtgccaccagtgggccctggagtgtgaggagctgagcagcccctatgatgtgcagaagatcgtgtctgggggccacacagtggagctgccctatgagttcctgctgccctgcctgtgcatcgaggccagctacctgcaggaggacacagtgcggaggaagaagtgccccttccagagctggccagaggcctacggcagtgacttctggaagtctgtgcacttcacagactacagccagcacacccagatggtgatggccctgaccctgcgctgccccctgaagctggaggccgccctgtgccagagacatgactggcacaccctgtgcaaggacctgcccaatgccacagcccgggagagtgatggctggtacgtgctggagaaggtggacctgcacccccagctgtgcttcaagttctcctttggaaacagcagccacgtggagtgcccccaccagacaggcagcctgacctcctggaatgtgtccatggacacccaggcccagcagctgatcctgcacttcagcagcaggatgcacgccaccttctctgctgcctggagcctgcccggcctgggccaggacaccctggtgccccctgtgtacacagtgtcccaggcccggggcagcagccctgtgtccctggacctgatcatccccttcctgcggcccggctgctgcgtgctggtgtggaggagtgatgtgcagtttgcctggaagcacctgctgtgcccagatgtgtcctaccgccacctgggcctgctgatcctggccctgctggccctgctgaccctgctgggcgtggtgctggccctgacctgcagaagaccccagagcggccctggccctgcccggcctgtgctgctgctgcacgccgctgacagcgaggcccagaggcggctggtgggcgccctggccgagctgctgcgggccgccctgggcggcggcagagatgtgattgtggacctgtgggagggccgccacgtggcccgggtgggccccctgccctggctgtgggccgcccggaccagggtggcccgggagcagggcaccgtgctgctgctgtggagcggggctgacctgcggcctgtgtctggccctgaccccagggctgcccccctgctggccctgctgcacgccgccccccggcccctgctgctgctggcctacttcagccggctgtgtgccaagggggacatccccccacccctgcgggccctgccccgctaccgcctgctgcgggacctgccccggctgctgcgggccctggatgcccggccctttgctgaggccacctcctggggccgcctgggcgcccggcagaggcggcagagccggctggagctgtgcagccggctggagcgggaggccgcccggctggccgacctgggctag

SEQ ID NO: 246162 - DNA, 2704 bp, Artificial Sequence
  derived and/or modified sequence
cgagggctcctgctggtactgtgttcgctgctgcacagcaaggccctgccacccaccttcaggccatgcagccatgttccgggagccctaattgcacagaagcccatggggagctccagactggcagccctgctcctgcctctcctcctcatagtcatcgacctctctgactctgctgggattggctttcgccacctgccccactggaacacccgctgtcctctggcctcccacacggatgacagtttcactggaagttctgcctatatcccttgccgcacctggtgggccctcttctccacaaagccttggtgtgtgcgagtctggcactgttcccgctgtttgtgccagcatctgctgtcaggtggctcaggtcttcaacggggcctcttccacctcctggtgcagaaatccaaaaagtcttccacattcaagttctataggagacacaagatgccagcacctgctcagaggaagctgctgcctcgtcgtcacctgtctgagaagagccatcacatttccatcccctccccagacatctcccacaagggacttcgctctaaaaggacccaaccttcggatccagagacatgggaaagtcttcccagattggactcacaaaggcatggaggacccgagttctcctttgatttgctgcctgaggcccgggctattcgggtgaccatatcttcaggccctgaggtcagcgtgcgtctttgtcaccagtgggcactggagtgtgaagagctgagcagtccctatgatgtccagaaaattgtgtctgggggccacactgtagagctgccttatgaattccttctgccctgtctgtgcatagaggcatcctacctgcaagaggacactgtgaggcgcaaaaaatgtcccttccagagctggccagaagcctatggctcggacttctggaagtcagtgcacttcactgactacagccagcacactcagatggtcatggccctgacactccgctgcccactgaagctggaagctgccctctgccagaggcacgactggcataccctttgcaaagacctcccgaatgccacagctcgagagtcagatgggtggtatgttttggagaaggtggacctgcacccccagctctgcttcaagttctcttttggaaacagcagccatgttgaatgcccccaccagactgggtctctcacatcctggaatgtaagcatggatacccaagcccagcagctgattcttcacttctcctcaagaatgcatgccaccttcagtgctgcctggagcctcccaggcttggggcaggacactttggtgccccccgtgtacactgtcagccaggcccggggctcaagcccagtgtcactagacctcatcattcccttcctgaggccagggtgctgtgtcctggtgtggcggtcagatgtccagtttgcctggaagcacctcttgtgtccggatgtctcttacagacacctggggctcttgatcctggcactgctggccctcctcaccctactgggtgttgttctggccctcacctgccggcgcccacagtcaggcccgggcccagcgcggccagtgctcctcctgcacgcggcggactcggaggcgcagcggcgcctggtgggagcgctggctgaactgctacgggcagcgctgggcggcgggcgcgacgtgatcgtggacctgtgggaggggaggcacgtggcgcgcgtgggcccgctgccgtggctctgggcggcgcggacgcgcgtagcgcgggagcagggcactgtgctgctgctgtggagcggcgccgaccttcgcccggtcagcggccccgacccccgcgccgcgcccctgctcgccctgctccacgctgccccgcgcccgctgctgctgctcgcttacttcagtcgcctctgcgccaagggcgacatccccccgccgctgcgcgccctgccgcgctaccgcctgctgcgcgacctgccgcgtctgctgcgggcgctggacgcgcggcctttcgcagaggccaccagctggggccgccttggggcgcggcagcgcaggcagagccgcctagagctgtgcagccggctcgaacgagaggccgcccgacttgcagacctaggttgagcagagctccaccgcagtcccgggtgtctgcggccgcaacgcaacggacactggctggaaccccggaatgagccttcgaccctgaaatccttggggtgcctcgaggacgactggccgaaaagccgcattccctgcctcacaggccggaagtcccagcccagtccccgcgcgcgtccctcttcctcctcatactttcccttgactgagagctcctctaacccctgttctgatgggggagggcggtcttcccacttcctctccagaactccagaaagagcagtgtgcttatgcttcagtccaggctggagaggttggggccggggtagggaggcaggagccatgtcagttctgaaggagggtgaggcggtgggggattgcagggggcggctgagagaaaacctccttgggggccagggattccctttcccactctgaggctctggccagagggagagaggactctggacctaggaaaagaggcttttggctccaggtggtcaggacagtgggggttgggggtggggtgggtgggtgctggcggtggggaccaagatccggaaagatgaataaagacaaacatgacaaactaagaaaa

SEQ ID NO: 246163 - DNA, 2103 bp, Artificial Sequence
  derived and/or modified sequence
atgctggcccccttcctgctgctgctgacccacagccggagccccctgtcgtttcgaccttgttcccatgtacccggagctctgattgcccagaaaccaatggggtcctctcgtctggctgccctgcttcttcccttgctgctcatagtcatcgatctatcggactcagccgggattggctttcgccacttgccccactggaacaccagatgtcctttagcaagtcacactgacgacagtttcactggcagttcagcttacatcccttgtagaacctggtgggccttgttcagcactaaaccctggtgcgttcgcgtgtggcactgctcgcggtgtttgtgccagcatctactctccggtggttccggcctgcagcgcggattatttcacctgcttgtgcagaaatctaaaaaaagctccactttcaagttttacagacggcacaagatgccggccccagcgcaaagaaaacttctgccaaggcggcatctcagcgagaagagtcaccacatctccatcccaagtcccgatatctcacataaggggctgcgatcaaaacggactcagccttctgatcccgaaacatgggagtcgcttcctcgactggacagccagcggcatggcggtcccgagttctcctttgacctactgccagaggctcgggctatcagagttacgatctcctcggggccggaagtgtcagttcgactgtgtcaccagtgggctctggagtgcgaggagctgtccagcccctacgacgtccagaaaattgtgtccggaggccatactgttgaacttccatacgaatttttactgccctgcctctgtattgaagccagctatcttcaagaggacaccgtgagaaggaaaaagtgccctttccagtcctggccagaggcctatgggtctgacttctggaagagcgtgcatttcactgattactcacagcacacacagatggtgatggcgctgaccctgaggtgccctctaaaactcgaagctgcactctgccagcgccacgattggcacacgctgtgcaaggatctaccaaatgccacagctcgggaaagcgatggatggtatgttctggagaaagtcgacctgcacccacagctgtgtttcaaattctcattcggcaatagttctcacgtggagtgtccacaccagaccggtagcctgacttcatggaatgtttctatggatactcaggcgcagcagctcattcttcattttagtagcagaatgcacgccacattctctgcagcctggtcactccccggtttgggccaggatacacttgtgccccccgtctacactgtctcccaggctcgggggagctctcccgtgagcctcgatctcataatcccatttctgcgccctggttgttgtgttctagtgtggcgctcggatgtgcagtttgcctggaaacatctgttgtgccccgacgttagttatagacacctgggattactcattctggccttacttgctctgcttaccctgctgggtgtggtgttagcactcacatgtcgtagacctcagagtgggcccgggcccgcccgccctgtgctcttacttcatgcagctgactcagaggcccaacggaggcttgttggagcccttgctgagcttctcagagcggctctgggcggggggcgcgatgtaatcgttgacctctgggagggtcgccacgtagccagggtgggacctctgccttggctgtgggctgcacgtactcgggtggctagggagcaagggacagtgttgctgctctggtccggcgcggatctgcggcctgttagtggcccggatccccgcgcggctccactgctcgccctgctacacgcagctccacggcccctgcttctcctggcttacttttcgagattgtgtgccaaaggggatatccccccacctctccgcgctctccctaggtatcgtctattgcgcgacctgccacgactcctacgcgcgcttgacgctcgtccgtttgcagaggctactagctggggacgattgggggccagacagcggcgtcaatcaaggctcgagttgtgctcgcggcttgagcgagaggcagccaggcttgctgatctgggatag

SEQ ID NO: 246164 - RNA, 2103 nt, Artificial Sequence
  derived and/or modified sequence
auguuagccccauuccuuuugcuccuuacccacucuaggucaccgcucucuuuucgcccgugcucacaugugcccggugcuuugaucgcucagaagccgaugggcuccucgagguuggcagcccuccuccugccccuucuguuaauagucauagacuuauccgacuccgccggcaucggcuuccgccaucugccgcauuggaauacacgcugcccccuagcaucccacaccgaugauaguuuuacaggaucaucagccuacauucccuguagaacauggugggcccuuuucucgaccaaaccuuggugugugcgugucuggcacuguagucggugcuuaugucagcaucuauugucgggaggcucagggcugcagcguggauuauuucaccucuuagugcaaaagucgaaaaaaucuucuacguucaaauuuuaucggcgccauaagaugccugcuccugcucaacgaaagcuccuuccuagaagacauuuauccgaaaagagucaccauauuaguauccccagcccggacauuagucauaagggcuugagauccaaacggacucagccuagcgauccagagaccugggaaucccugcccagacuugacucccagaggcaugggggcccagaauucucguucgaucugcugcccgaagccagagcaauccgagucacuauuucaagcggccccgagguguccguuagacuaugccaccagugggcgcucgaaugugaggagcuuucuuccccauacgacguacagaagaucguuucuggagggcacaccgucgaacucccuuaugaguuccuccugccuugccugugcauugaggcgucuuaucuucaggaagacaccgugaggagaaaaaagugucccuuccagucuuggccugaagcauacgguagcgauuucuggaaauccgugcacuuuacugauuacucccaacauacucagaugguaauggcucugacccugaggugcccacucaagcuggaagccgcacuuugucaaagacacgacuggcacacccugugcaaagaccucccaaaugccacagcucgggaaagugacggcugguacgugcuugagaagguggaccuucauccucaguuauguuucaaguuuuccuuuggaaacagcucacauguugaauguccacaucagaccggcucccugacuucuuggaaugugucuauggacacccaagcgcagcagcugauucuacacuuuucaucgcgcaugcacgcaacuuuuagcgcagcuuggucacugccaggccucggccaggacacuuuggucccucccguguauaccgucucucaggcacgcggcucuucccccguuuccuuagaucuuauuauuccauuucugaggcccgggugcugcguauuaguuuggcgguccgauguacaguuugccuggaagcaccuguuaugucccgauguuaguuaccgccaccugggucugcucauccuugcccugcuggcucugcuuacauugcucggggucgugcuugcucugaccugucgaagaccgcaaagcggaccaggccccgcccggccaguguuacugcugcaugccgccgacuccgaagcccagcgucgccugguaggcgcucuggcugagcuccugcgagcugcccugggcggaggccgggaugucauuguggaccugugggagggcagacauguggcucgcguggggccauugcccugguuaugggccgccaggacacgggucgcccgggagcagggcaccguccugcuucuguggucaggggccgaucugagacccgugaguggaccugacccacgggcugccccacugcucgcgcuccuacacgccgcgccacgaccacuccuccuccucgcguacuuuuccagacugugugccaagggugauaucccaccaccccuaagagcuuugccaagauaucggcuguuaagggaucugccucggcuguugagagcccuggacgcuagacccuuugccgaagcuaccucaugggguagacuaggggccaggcaaagaaggcagagucgguuggagcugugcagcagacuggaaagggaagccgcccgcuuggcagaucugggguag

SEQ ID NO: 246165 - RNA, 2103 nt, Artificial Sequence
  derived and/or modified sequence
augcucgccccuuuccuucuccuuuugacucacagcagauccccgcuuagcuucagaccuuguucacaugugccuggggcacucaucgcacagaagccaaugggcucuucucgacuugcugcauuacuccugccccugcuccugaucgucaucgaccucuccgacucugcaggcauuggcuuuagacacuuaccacauuggaauacucgguguccccucgccagccauaccgaugauagcuuuacaggaucguccgcauacaucccuugcagaacuuggugggcauuguucucaacuaagccuuggugugugcgugucuggcacuguagucggugcuuaugucagcaucuauugucgggaggcucagggcugcagcguggauuauuucaccucuuagugcaaaagucgaaaaaaucuucuacguucaaauuuuaucggcgccauaagaugccugcuccugcucaacgaaagcuccuuccuagaagacauuuauccgaaaagagucaccauauuaguauccccagcccggacauuagucauaagggcuugagauccaaacggacucagccuagcgauccagagaccugggaaucccugccccggcucgacucucagcgccauggaggcccagaguuuucauucgaucucuuaccugaggccagagccauccguguuacuauauccagcggucccgaagucaguguacgccugugccaccagugggccuuagaaugcgaggagcuuucaucacccuacgacguccagaaaauagucagugguggacacaccguggagcuaccauacgaauuccugcuuccaugccuuuguaucgaagcauccuaucuucaggaagauacugucagaagaaagaagugucccuuccagucuuggccugaagccuauggcagugacuucuggaagagcguacacuucaccgacuacucccagcacacacaaauggugauggcccuuacacugagaugcccauugaaauuggaagcagcacuuugucagcggcacgacuggcacacuuuauguaaagaccugccuaaugcgaccgcgagggaaucugauggcugguacguccucgagaagguggaucugcauccccagcugugcuuuaaguuuucuuucgguaacucgucucacguugaguguccacaucagacaggcucacuuacgagcuggaauguuucuauggauacccaggcccaacagcugauacuucauuucuccuccaggaugcaugccaccuuuagugcugcuuggucccuucccggccucggucaggacacucuugucccacccgucuacaccgugucccaggcccgugguagcaguccugugucucuggaucuaaucauaccuuuucugcggcccggaugcugcguacuuguuuggcgaagugacgugcaauucgcguggaaacaccuacugugccccgaugucuccuaucggcaccuugguuuacugauucuugcucugcuggcgcuguugacccuucuuggggugguccuggcuuugaccugucgcagaccucagagcggaccuggcccagcgagacccgugcucuuacugcacgccgcugacucagaagcacagaggagacuugugggagcccucgcugagcuguugagagccgcucuaggcgguggacgcgacgucaucguugaccuuugggaaggcaggcacgucgcuaggguugguccacuuccauggcuuugggcagcgaggacucguguagcccgggaacaggggaccguguuacuccuuuggagcggagccgaccuuagacccguaagcgggccugauccgcgugcugccccacugcucgcacuccuccacgccgcaccaagaccccuucuucugcuggcauacuuuucucgacuaugcgccaaaggcgacauccccccuccacuccgcgcgcucccaagauaccgccugcuccgcgaucuuccuagacugcucagggcucuggacgcucggccuuuugcggaggccacaagcuggggucgccugggcgccagacaaagacgccaaagcagguuagaacuuugcuccagacucgagcgugaagccgcacggcucgcugaucugggcuag

SEQ ID NO: 246166 - protein, 1391 aa, Artificial Sequence
  derived and/or modified sequence
MPSSLLGAAMPASTSAAALQEALENAGRLIDRQLQEDRMYPDLSELLMVSAPNNPTVSGMSDMDYPLQGPGLLSVPNLPEISSIRRVPLPPELVEQFGHMQCNCMMGVFPPISRAWLTIDSDIFMWNYEDGGDLAYFDGLSETILAVGLVKPKAGIFQPHVRHLLVLATPVDIVILGLSYANLQTGSGVLNDSLSGGMQLLPDPLYSLPTDNTYLLTITSTDNGRIFLAGKDGCLYEVAYQAEAGWFSQRCRKINHSKSSLSFLVPSLLQFTFSEDDPILQIAIDNSRNILYTRSEKGVIQVYDLGQDGQGMSRVASVSQNAIVSAAGNIARTIDRSVFKPIVQIAVIENSESLDCQLLAVTHAGVRLYFSTCPFRQPLARPNTLTLVHVRLPPGFSASSTVEKPSKVHRALYSKGILLMAASENEDNDILWCVNHDTFPFQKPMMETQMTAGVDGHSWALSAIDELKVDKIITPLNKDHIPITDSPVVVQQHMLPPKKFVLLSAQGSLMFHKLRPVDQLRHLLVSNVGGDGEEIERFFKLHQEDQACATCLILACSTAACDREVSAWATRAFFRYGGEAQMRFPTTLPPPSNVGPILGSPVYSSSPVPSGSPYPNPSFLGTPSHGIQPPAMSTPVCALGNPATQATNMSCVTGPEIVYSGKHNGICIYFSRIMGNIWDASLVVERIFKSGNREITAIESSVPCQLLESVLQELKGLQEFLDRNSQFAGGPLGNPNTTAKVQQRLIGFMRPENGNPQQMQQELQRKFHEAQLSEKISLQAIQQLVRKSYQALALWKLLCEHQFTIIVAELQKELQEQLKITTFKDLVIRDKELTGALIASLINCYIRDNAAVDGISLHLQDICPLLYSTDDAICSKANELLQRSRQVQNKTEKERMLRESLKEYQKISNQVDLSNVCAQYRQVRFYEGVVELSLTAAEKKDPQGLGLHFYKHGEPEEDIVGLQAFQERLNSYKCITDTLQELVNQSKAAPQSPSVPKKPGPPVLSSDPNMLSNEEAGHHFEQMLKLSQRSKDELFSIALYNWLIQVDLADKLLQVASPFLEPHLVRMAKVDQNRVRYMDLLWRYYEKNRSFSNAARVLSRLADMHSTEISLQQRLEYIARAILSAKSSTAISSIAADGEFLHELEEKMEVARIQLQIQETLQRQYSHHSSVQDAVSQLDSELMDITKLYGEFADPFKLAECKLAIIHCAGYSDPILVQTLWQDIIEKELSDSVTLSSSDRMHALSLKIVLLGKIYAGTPRFFPLDFIVQFLEQQVCTLNWDVGFVIQTMNEIGVPLPRLLEVYDQLFKSRDPFWNRMKKPLHLLDCIHVLLIRYVENPSQVLNCERRRFTNLCLDAVCGYLVELQSMSSSVAVQAITGNFKSLQAKLERLH

SEQ ID NO: 246167 - protein, 1332 aa, Artificial Sequence
  derived and/or modified sequence
MSDMDYPLQGPGLLSVPNLPEISSIRRVPLPPELVEQFGHMQCNCMMGVFPPISRAWLTIDSDIFMWNYEDGGDLAYFDGLSETILAVGLVKPKAGIFQPHVRHLLVLATPVDIVILGLSYANLQTGSGVLNDSLSGGMQLLPDPLYSLPTDNTYLLTITSTDNGRIFLAGKDGCLYEVAYQAEAGWFSQRCRKINHSKSSLSFLVPSLLQFTFSEDDPILQIAIDNSRNILYTRSEKGVIQVYDLGQDGQGMSRVASVSQNAIVSAAGNIARTIDRSVFKPIVQIAVIENSESLDCQLLAVTHAGVRLYFSTCPFRQPLARPNTLTLVHVRLPPGFSASSTVEKPSKVHRALYSKGILLMAASENEDNDILWCVNHDTFPFQKPMMETQMTAGVDGHSWALSAIDELKVDKIITPLNKDHIPITDSPVVVQQHMLPPKKFVLLSAQGSLMFHKLRPVDQLRHLLVSNVGGDGEEIERFFKLHQEDQACATCLILACSTAACDREVSAWATRAFFRYGGEAQMRFPTTLPPPSNVGPILGSPVYSSSPVPSGSPYPNPSFLGTPSHGIQPPAMSTPVCALGNPATQATNMSCVTGPEIVYSGKHNGICIYFSRIMGNIWDASLVVERIFKSGNREITAIESSVPCQLLESVLQELKGLQEFLDRNSQFAGGPLGNPNTTAKVQQRLIGFMRPENGNPQQMQQELQRKFHEAQLSEKISLQAIQQLVRKSYQALALWKLLCEHQFTIIVAELQKELQEQLKITTFKDLVIRDKELTGALIASLINCYIRDNAAVDGISLHLQDICPLLYSTDDAICSKANELLQRSRQVQNKTEKERMLRESLKEYQKISNQVDLSNVCAQYRQVRFYEGVVELSLTAAEKKDPQGLGLHFYKHGEPEEDIVGLQAFQERLNSYKCITDTLQELVNQSKAAPQSPSVPKKPGPPVLSSDPNMLSNEEAGHHFEQMLKLSQRSKDELFSIALYNWLIQVDLADKLLQVASPFLEPHLVRMAKVDQNRVRYMDLLWRYYEKNRSFSNAARVLSRLADMHSTEISLQQRLEYIARAILSAKSSTAISSIAADGEFLHELEEKMEVARIQLQIQETLQRQYSHHSSVQDAVSQLDSELMDITKLYGEFADPFKLAECKLAIIHCAGYSDPILVQTLWQDIIEKELSDSVTLSSSDRMHALSLKIVLLGKIYAGTPRFFPLDFIVQFLEQQVCTLNWDVGFVIQTMNEIGVPLPRLLEVYDQLFKSRDPFWNRMKKPLHLLDCIHVLLIRYVENPSQVLNCERRRFTNLCLDAVCGYLVELQSMSSSVAVQAITGNFKSLQAKLERLH

SEQ ID NO: 246168 - protein, 1353 aa, Artificial Sequence
  derived and/or modified sequence
MYPDLSELLMVSAPNNPTVSGMSDMDYPLQGPGLLSVPNLPEISSIRRVPLPPELVEQFGHMQCNCMMGVFPPISRAWLTIDSDIFMWNYEDGGDLAYFDGLSETILAVGLVKPKAGIFQPHVRHLLVLATPVDIVILGLSYANLQTGSGVLNDSLSGGMQLLPDPLYSLPTDNTYLLTITSTDNGRIFLAGKDGCLYEVAYQAEAGWFSQRCRKINHSKSSLSFLVPSLLQFTFSEDDPILQIAIDNSRNILYTRSEKGVIQVYDLGQDGQGMSRVASVSQNAIVSAAGNIARTIDRSVFKPIVQIAVIENSESLDCQLLAVTHAGVRLYFSTCPFRQPLARPNTLTLVHVRLPPGFSASSTVEKPSKVHRALYSKGILLMAASENEDNDILWCVNHDTFPFQKPMMETQMTAGVDGHSWALSAIDELKVDKIITPLNKDHIPITDSPVVVQQHMLPPKKFVLLSAQGSLMFHKLRPVDQLRHLLVSNVGGDGEEIERFFKLHQEDQACATCLILACSTAACDREVSAWATRAFFRYGGEAQMRFPTTLPPPSNVGPILGSPVYSSSPVPSGSPYPNPSFLGTPSHGIQPPAMSTPVCALGNPATQATNMSCVTGPEIVYSGKHNGICIYFSRIMGNIWDASLVVERIFKSGNREITAIESSVPCQLLESVLQELKGLQEFLDRNSQFAGGPLGNPNTTAKVQQRLIGFMRPENGNPQQMQQELQRKFHEAQLSEKISLQAIQQLVRKSYQALALWKLLCEHQFTIIVAELQKELQEQLKITTFKDLVIRDKELTGALIASLINCYIRDNAAVDGISLHLQDICPLLYSTDDAICSKANELLQRSRQVQNKTEKERMLRESLKEYQKISNQVDLSNVCAQYRQVRFYEGVVELSLTAAEKKDPQGLGLHFYKHGEPEEDIVGLQAFQERLNSYKCITDTLQELVNQSKAAPQSPSVPKKPGPPVLSSDPNMLSNEEAGHHFEQMLKLSQRSKDELFSIALYNWLIQVDLADKLLQVASPFLEPHLVRMAKVDQNRVRYMDLLWRYYEKNRSFSNAARVLSRLADMHSTEISLQQRLEYIARAILSAKSSTAISSIAADGEFLHELEEKMEVARIQLQIQETLQRQYSHHSSVQDAVSQLDSELMDITKLYGEFADPFKLAECKLAIIHCAGYSDPILVQTLWQDIIEKELSDSVTLSSSDRMHALSLKIVLLGKIYAGTPRFFPLDFIVQFLEQQVCTLNWDVGFVIQTMNEIGVPLPRLLEVYDQLFKSRDPFWNRMKKPLHLLDCIHVLLIRYVENPSQVLNCERRRFTNLCLDAVCGYLVELQSMSSSVAVQAITGNFKSLQAKLERLH

SEQ ID NO: 246169 - DNA, 4176 bp, Artificial Sequence
  derived and/or modified sequence
atgcccagcagcctgctgggcgccgccatgcccgccagcaccagcgccgccgccctgcaggaggccctggagaacgccggcagactgatcgacagacagctgcaggaggacagaatgtaccccgacctgagcgagctgctgatggtgagcgcccccaacaaccccaccgtgagcggcatgagcgacatggactaccccctgcagggccccggcctgctgagcgtgcccaacctgcccgagatcagcagcatcagaagagtgcccctgccccccgagctggtggagcagttcggccacatgcagtgcaactgcatgatgggcgtgttcccccccatcagcagagcctggctgaccatcgacagcgacatcttcatgtggaactacgaggacggcggcgacctggcctacttcgacggcctgagcgagaccatcctggccgtgggcctggtgaagcccaaggccggcatcttccagccccacgtgagacacctgctggtgctggccacccccgtggacatcgtgatcctgggcctgagctacgccaacctgcagaccggcagcggcgtgctgaacgacagcctgagcggcggcatgcagctgctgcccgaccccctgtacagcctgcccaccgacaacacctacctgctgaccatcaccagcaccgacaacggcagaatcttcctggccggcaaggacggctgcctgtacgaggtggcctaccaggccgaggccggctggttcagccagagatgcagaaagatcaaccacagcaagagcagcctgagcttcctggtgcccagcctgctgcagttcaccttcagcgaggacgaccccatcctgcagatcgccatcgacaacagcagaaacatcctgtacaccagaagcgagaagggcgtgatccaggtgtacgacctgggccaggacggccagggcatgagcagagtggccagcgtgagccagaacgccatcgtgagcgccgccggcaacatcgccagaaccatcgacagaagcgtgttcaagcccatcgtgcagatcgccgtgatcgagaacagcgagagcctggactgccagctgctggccgtgacccacgccggcgtgagactgtacttcagcacctgccccttcagacagcccctggccagacccaacaccctgaccctggtgcacgtgagactgccccccggcttcagcgccagcagcaccgtggagaagcccagcaaggtgcacagagccctgtacagcaagggcatcctgctgatggccgccagcgagaacgaggacaacgacatcctgtggtgcgtgaaccacgacaccttccccttccagaagcccatgatggagacccagatgaccgccggcgtggacggccacagctgggccctgagcgccatcgacgagctgaaggtggacaagatcatcacccccctgaacaaggaccacatccccatcaccgacagccccgtggtggtgcagcagcacatgctgccccccaagaagttcgtgctgctgagcgcccagggcagcctgatgttccacaagctgagacccgtggaccagctgagacacctgctggtgagcaacgtgggcggcgacggcgaggagatcgagagattcttcaagctgcaccaggaggaccaggcctgcgccacctgcctgatcctggcctgcagcaccgccgcctgcgacagagaggtgagcgcctgggccaccagagccttcttcagatacggcggcgaggcccagatgagattccccaccaccctgcccccccccagcaacgtgggccccatcctgggcagccccgtgtacagcagcagccccgtgcccagcggcagcccctaccccaaccccagcttcctgggcacccccagccacggcatccagccccccgccatgagcacccccgtgtgcgccctgggcaaccccgccacccaggccaccaacatgagctgcgtgaccggccccgagatcgtgtacagcggcaagcacaacggcatctgcatctacttcagcagaatcatgggcaacatctgggacgccagcctggtggtggagagaatcttcaagagcggcaacagagagatcaccgccatcgagagcagcgtgccctgccagctgctggagagcgtgctgcaggagctgaagggcctgcaggagttcctggacagaaacagccagttcgccggcggccccctgggcaaccccaacaccaccgccaaggtgcagcagagactgatcggcttcatgagacccgagaacggcaacccccagcagatgcagcaggagctgcagagaaagttccacgaggcccagctgagcgagaagatcagcctgcaggccatccagcagctggtgagaaagagctaccaggccctggccctgtggaagctgctgtgcgagcaccagttcaccatcatcgtggccgagctgcagaaggagctgcaggagcagctgaagatcaccaccttcaaggacctggtgatcagagacaaggagctgaccggcgccctgatcgccagcctgatcaactgctacatcagagacaacgccgccgtggacggcatcagcctgcacctgcaggacatctgccccctgctgtacagcaccgacgacgccatctgcagcaaggccaacgagctgctgcagagaagcagacaggtgcagaacaagaccgagaaggagagaatgctgagagagagcctgaaggagtaccagaagatcagcaaccaggtggacctgagcaacgtgtgcgcccagtacagacaggtgagattctacgagggcgtggtggagctgagcctgaccgccgccgagaagaaggacccccagggcctgggcctgcacttctacaagcacggcgagcccgaggaggacatcgtgggcctgcaggccttccaggagagactgaacagctacaagtgcatcaccgacaccctgcaggagctggtgaaccagagcaaggccgccccccagagccccagcgtgcccaagaagcccggcccccccgtgctgagcagcgaccccaacatgctgagcaacgaggaggccggccaccacttcgagcagatgctgaagctgagccagagaagcaaggacgagctgttcagcatcgccctgtacaactggctgatccaggtggacctggccgacaagctgctgcaggtggccagccccttcctggagccccacctggtgagaatggccaaggtggaccagaacagagtgagatacatggacctgctgtggagatactacgagaagaacagaagcttcagcaacgccgccagagtgctgagcagactggccgacatgcacagcaccgagatcagcctgcagcagagactggagtacatcgccagagccatcctgagcgccaagagcagcaccgccatcagcagcatcgccgccgacggcgagttcctgcacgagctggaggagaagatggaggtggccagaatccagctgcagatccaggagaccctgcagagacagtacagccaccacagcagcgtgcaggacgccgtgagccagctggacagcgagctgatggacatcaccaagctgtacggcgagttcgccgaccccttcaagctggccgagtgcaagctggccatcatccactgcgccggctacagcgaccccatcctggtgcagaccctgtggcaggacatcatcgagaaggagctgagcgacagcgtgaccctgagcagcagcgacagaatgcacgccctgagcctgaagatcgtgctgctgggcaagatctacgccggcacccccagattcttccccctggacttcatcgtgcagttcctggagcagcaggtgtgcaccctgaactgggacgtgggcttcgtgatccagaccatgaacgagatcggcgtgcccctgcccagactgctggaggtgtacgaccagctgttcaagagcagagaccccttctggaacagaatgaagaagcccctgcacctgctggactgcatccacgtgctgctgatcagatacgtggagaaccccagccaggtgctgaactgcgagagaagaagattcaccaacctgtgcctggacgccgtgtgcggctacctggtggagctgcagagcatgagcagcagcgtggccgtgcaggccatcaccggcaacttcaagagcctgcaggccaagctggagagactgcactag

SEQ ID NO: 246170 - DNA, 4176 bp, Artificial Sequence
  derived and/or modified sequence
atgccctcgtctttgctcggggccgccatgccagcctccaccagcgcagcggccctgcaggaggcgctggagaacgcaggacgtctcatagatcgacagttacaggaggatagaatgtatcctgacttgagtgagttattgatggtgtcagcgcctaataaccctaccgtctcaggcatgagcgatatggattaccctctccaggggccaggtctgctgtctgtgccaaacctccccgaaatatctagcattcgacgggtgcctcttccgcccgaactggtggagcagttcggccatatgcagtgcaattgtatgatgggcgtatttccgccaatcagtcgggcgtggctcacaattgatagcgatattttcatgtggaactatgaggatggaggtgatctggcgtactttgatggtcttagcgaaactatcctagctgtgggcttggtcaagccaaaagccggaatattccaaccgcatgtcagacacctcttggtgcttgcaacaccggtggacattgtcatcttagggctgtcctacgcgaacctgcagactggctccggcgtactaaacgacagcctctccggcggcatgcaactcctgccagatcctctgtacagcctcccaaccgacaacacatacctcctaacaatcactagcacagataacggacgtattttcctggccggaaaagatggctgtctttatgaagtcgcttatcaggctgaagcggggtggtttagccagcgctgccgcaagataaaccattctaaatcaagcttatcctttctcgtccccagcctcctgcagttcacatttagcgaagatgaccccatcctccagatcgctattgacaatagtcggaacatactgtatacaagatctgaaaagggcgttatccaagtttacgacctggggcaggacggccagggcatgagtcgggtggccagcgttagccagaacgcgatcgtctcggcggcaggcaatatagctcgcacaattgatagaagtgtgttcaagccgattgtccagattgccgtcatcgaaaattcggagtccctggactgccagttgctagccgtcacccacgctggagtgcgactctatttctccacctgtccattccgccaacccctggctcgacccaacacacttaccctggtgcacgttagactgccaccagggttcagcgcgagttcaactgtggaaaagcccagtaaagtgcacagggctctgtatagtaaggggatcctcttgatggccgctagcgagaacgaggataatgatattttatggtgcgtgaaccacgacaccttcccttttcagaaacccatgatggagactcagatgaccgccggcgtagacggccatagttgggccctgtcggccatcgatgagctgaaggtagacaaaatcataacacctttaaataaagatcacatcccaatcacagacagtcccgtagtggttcagcagcacatgctgccacctaagaaattcgttctgctcagcgctcaggggagcctgatgtttcacaaattgcggcccgtggatcaattgagacacttgcttgtatcgaatgtcggcggggatggtgaggagatcgaaagattctttaaattacatcaagaagaccaggcatgtgcgacatgcctgatcctcgcttgctctacagctgcttgtgatagagaggtctccgcctgggccacacgcgccttttttcgatatgggggtgaagcccagatgcggtttccgacaacattacctccaccctccaacgtgggacctatacttgggagtccagtctatagttctagccccgtccccagcggcagcccttacccaaatccctcctttctgggaactcctagtcatgggatccaacccccagccatgtctacgccagtctgcgccctgggaaacccggccactcaggctacaaatatgtcctgcgttacaggtcctgaaattgtttatagcggtaagcataacggaatttgtatttatttcagcaggattatgggtaacatatgggatgcctccctggtggtggagcgaatcttcaaaagtggaaatcgggaaatcactgccattgagtccagtgtcccctgccagctccttgagagtgtgttgcaggagctaaagggtctgcaggagtttctagatcgcaattcccagtttgcaggtgggcctctcggaaaccctaacactacagccaaggtgcagcagaggctcataggatttatgaggccagaaaacgggaatcctcagcagatgcagcaggagctacaaagaaagtttcatgaggctcagctgtccgagaaaattagcctacaggcaatccaacagctggtgagaaagtcttaccaggccttggccctatggaaactcctgtgcgagcatcagtttacaatcatcgtagccgaattacagaaagaactccaggaacaactcaagataactacattcaaagatttggtcatccgcgacaaagagctgaccggtgccctgatagcatcattgattaactgctacatacgtgataatgcagcggtagacggaatctcccttcatcttcaggacatatgtcccctgttgtacagcactgacgacgctatttgctcaaaggcgaatgaattgctgcagaggagccgccaagtgcagaacaaaacagagaaggaacgtatgctgagggaatcactcaaagagtatcagaaaatatccaatcaggtcgacctgtcgaacgtgtgtgcccagtaccgacaagtacgcttttacgagggcgtggtggagcttagcttaacggccgccgaaaaaaaggatcctcagggcttaggactacatttttacaaacacggtgagccggaagaggacattgtggggctgcaggcgttccaagaacgactgaacagctacaagtgtattaccgacaccctgcaagaattggtaaaccagagcaaggcagcgccacagagcccttctgtcccaaaaaaaccgggaccccccgtgctgtcatcagatcctaatatgctctccaatgaggaggctggacatcatttcgagcaaatgctcaagctgtcacaaagaagcaaggatgagttgttttctattgccctgtacaattggctcattcaagtagacctggcagacaagctgctgcaagtcgcaagccctttccttgagccccatctcgtccgtatggcaaaggttgaccagaacagagtccgatacatggacctcctttggaggtattacgaaaaaaaccgctcattttctaacgccgctcgcgtcctgagccgcctcgcagacatgcattccactgaaatctctttgcaacaacgcctggagtatatcgctcgagcgatcctgagtgcgaagagtagcactgcgatctcaagcatagctgcagacggggagttcctccatgaacttgaggaaaaaatggaggtggcaaggattcaactccagattcaggagacattgcagcgacagtatagccaccattcatccgtccaagatgcggtgtctcagctggatagcgagctcatggacatcaccaagctctacggggaattcgccgatcccttcaaactcgcagagtgtaagctcgcaattatacactgcgccgggtacagcgaccctatactggtacagactttgtggcaggatattatagagaaggagcttagtgacagcgttacgctctcctcgtcagatcggatgcacgctttaagtctgaagattgtgcttctgggtaagatttacgccggaacacctaggtttttccccttagattttatcgtccagtttctggagcagcaggtgtgtaccctgaattgggacgttggcttcgtcattcaaaccatgaacgaaataggcgtcccattaccacgtctgctcgaagtttacgatcagctctttaaatctcgggacccgttttggaatcgaatgaaaaagccccttcacttattggattgtatccatgttcttcttattaggtatgtagagaaccccagccaggttctgaactgcgaacgtaggcgcttcactaatctctgtctagacgccgtgtgtggatacttggtggagctgcaaagcatgtcaagtagcgtagcggtacaggcaatcaccggcaattttaagagcctccaagccaagttagaacggttgcactag

SEQ ID NO: 246171 - DNA, 4176 bp, Artificial Sequence
  derived and/or modified sequence
atgcccagcagcctgctgggcgccgccatgcctgccagcaccagcgctgctgccctgcaggaggccctggagaatgccggccgcctgattgaccggcagctgcaggaggacaggatgtacccagacctgtctgagctgctgatggtgtctgcccccaacaaccccaccgtgtctggcatgtctgacatggactaccccctgcagggccctggcctgctgtctgtgcccaacctgcctgagatcagcagcatcagaagagtgcccctgcccccagagctggtggagcagtttggccacatgcagtgcaactgcatgatgggcgtcttcccccccatcagccgggcctggctgaccatcgacagcgacatcttcatgtggaactatgaagatggaggagacctggcctactttgatggcctgtctgagaccatcctggccgtgggcctggtgaagcccaaggccggcatcttccagccccacgtgcgccacctgctggtgctggccacccctgtggacatcgtcatcctgggcctgtcctatgccaacctgcagacaggcagcggcgtgctgaatgacagcctgagcggcggcatgcagctgctgcctgaccccctgtacagcctgcccacagacaacacctacctgctgaccatcaccagcacagacaatggccgcatcttcctggccggcaaggatggctgcctgtatgaggtggcctaccaggccgaggccggctggttcagccagcgctgcaggaagatcaaccacagcaagagcagcctgtccttcctggtgcccagcctgctgcagttcaccttctctgaagatgaccccatcctgcagatcgccatcgacaacagcaggaacatcctgtacaccaggtctgagaagggcgtcatccaggtgtatgacctgggccaggacggccagggcatgagccgggtggcctctgtgtcccagaatgccatcgtgtctgctgctggcaacatcgcccggaccatcgacagatctgtgttcaagcccatcgtgcagattgctgtgattgaaaattctgagagcctggactgccagctgctggccgtgacccacgccggcgtgcggctgtacttcagcacctgccccttccggcagcccctggcccggcccaacaccctgaccctggtgcacgtgcggctgcccccaggcttcagcgccagcagcacagtggagaagcccagcaaggtgcaccgggccctgtacagcaagggcatcctgctgatggccgcctctgaaaatgaagataatgacatcctgtggtgtgtgaaccacgacaccttccccttccagaagcccatgatggagacccagatgacagctggggtggatggccacagctgggccctgagcgccattgatgagctgaaggtggacaagatcatcacccccctgaacaaggaccacatccccatcacagacagccctgtggtggtgcagcagcacatgctgccccccaagaagtttgtgctgctgagcgcccagggcagcctgatgttccacaagctgcggcctgtggaccagctgcggcacctgctggtgtccaatgtgggcggagatggagaggagattgagcgcttcttcaagctgcaccaggaggaccaggcctgtgccacctgcctgatcctggcctgcagcacagctgcctgtgaccgggaggtgtctgcctgggccacccgggccttcttccgctatggaggagaggcccagatgaggttccccaccaccctgcccccacccagcaatgtgggccccatcctgggcagccctgtgtacagcagcagccctgtgcccagcggcagcccctaccccaaccccagcttcctgggcacccccagccacggcatccagcccccagccatgagcacccctgtgtgtgccctgggcaacccagccacccaggccaccaacatgagctgtgtgactggacctgagatcgtgtacagcggcaagcacaacggcatctgcatctacttcagccgcatcatgggcaacatctgggatgccagcctggtggtggagcgcatcttcaagagcggcaaccgggagatcacagccatcgagagctctgtgccctgccagctgctggagagcgtgctgcaggagctgaagggcctgcaggagttcctggacaggaacagccagtttgctgggggccccctgggcaaccccaacaccacagccaaggtgcagcagaggctcatcggcttcatgaggccagaaaatggaaacccccagcagatgcagcaggagctgcagaggaagttccacgaggcccagctgtctgagaagatcagcctgcaggccatccagcagctggtgaggaagagctaccaggccctggccctgtggaagctgctgtgtgagcaccagttcaccatcatcgtggccgagctgcagaaggagctgcaggagcagctgaagatcaccaccttcaaggacctggtgatccgggacaaggagctgaccggggccctgattgccagcctcatcaactgctacatccgggacaatgctgctgtggatggcatcagcctgcacctgcaggacatctgccccctgctgtacagcacagatgatgccatctgcagcaaggccaatgagctgctgcagaggagccggcaggtgcagaacaagacagagaaggagaggatgctgcgggagagcctgaaggagtaccagaagatcagcaaccaggtggacctgagcaatgtgtgtgcccagtaccggcaggtgcgcttctatgagggcgtggtggagctgagcctgacagctgctgagaagaaggacccccagggcctgggcctgcacttctacaagcacggggagccagaagaagatattgtgggcctgcaggccttccaggagcggctgaacagctacaagtgcatcacagacaccctgcaggagctggtgaaccagagcaaggccgccccccagagccccagcgtgcccaagaagccaggcccccctgtgctgagcagtgaccccaacatgctgagcaatgaggaggccggccaccactttgagcagatgctgaagctgagccagaggagcaaggatgagctgttcagcatcgccctgtacaactggctgatccaggtggacctggccgacaagctgctgcaggtggccagccccttcctggagccccacctggtgaggatggccaaggtggaccagaacagagtgcgctacatggacctgctgtggagatactatgagaagaacagaagcttcagcaatgctgcccgggtgctgagccggctggccgacatgcacagcacagagatcagcctgcagcagaggctggagtacatcgcccgggccatcctgagcgccaagagcagcacagccatcagcagcattgctgctgatggagagttcctgcacgagctggaggagaagatggaggtggcccgcatccagctgcagatccaggagaccctgcagaggcagtacagccaccacagctctgtgcaggatgctgtgtcccagctggacagcgagctgatggacatcaccaagctgtatggagaatttgctgaccccttcaagctggccgagtgcaagctggccatcatccactgtgccggctacagcgaccccatcctggtgcagaccctgtggcaggacatcatcgagaaggagctgagtgacagcgtgaccctgagcagcagtgacaggatgcacgccctgagcctgaagatcgtgctgctgggcaagatctatgccggcaccccccgcttcttccccctggacttcatcgtgcagttcctggagcagcaggtgtgcaccctgaactgggatgtgggcttcgtcatccagaccatgaatgaaattggagtgcccctgccccggctgctggaggtgtatgaccagctgttcaagagccgggaccccttctggaacaggatgaagaagcccctgcacctgctggactgcatccacgtgctgctgatccgctacgtggagaaccccagccaggtgctgaactgtgagcggcggcgcttcaccaacctgtgcctggatgctgtgtgtggctacctggtggagctgcagagcatgagcagctctgtggccgtgcaggccatcactggaaacttcaagagcctgcaggccaagctggagcggctgcactag

SEQ ID NO: 246172 - DNA, 4176 bp, Artificial Sequence
  derived and/or modified sequence
atgcccagcagcctgctgggcgccgccatgcccgccagcaccagcgccgctgcacttcaggaagcgttggaaaatgccggaaggcttattgatcgccagctgcaggaggaccgtatgtatcccgatctctctgagctacttatggtttctgcgcccaacaaccccaccgtcagcggaatgagtgacatggattatcctctgcagggaccgggcctcctctcggtacctaatctccctgagatcagttctattaggagagtgccactaccacccgagctagtggaacagttcggtcatatgcagtgcaactgtatgatgggtgtgttcccccctattagccgagcctggctcaccatcgacagcgacatcttcatgtggaactatgaggatggcggagatcttgcttactttgacggactttcagagacgatccttgcggtgggtcttgtcaaaccaaaggcaggcatatttcagccccatgtgcgccatctcctggtcctggccacgccagtcgacatagtgatcctggggttatcttatgctaacctgcaaactggaagcggcgtcctgaatgattctctgtcaggaggtatgcaactgctccctgatcccctgtactccctccctaccgataacacttatttattgaccataacaagtacggataacgggagaatcttcctggctggcaaagacgggtgcttgtacgaagttgcctaccaggcggaggccggatggttcagtcagagatgccggaaaatcaaccatagcaagtcttccctttccttccttgtcccctctttgctccaattcacattctcagaagacgatcccatcctgcagattgccattgataacagtagaaacatcctttacacgagaagtgagaagggtgtgatccaagtatacgatctgggccaggacggccagggcatgtcgagagtcgcatcggtgtcacagaatgcaattgtatctgccgcaggtaatatcgctagaaccatagatagaagtgtttttaaacctattgtacagatcgctgtgatcgaaaatagcgaatcacttgactgccagctgttagctgttacacacgcaggcgtgcgactctatttcagcacctgtcctttccggcagcctctggcgcggccaaacaccctgaccctggtgcatgtgaggttgccacctggattctctgcctcgtcaaccgtcgaaaagcctagcaaggttcatagggcactgtattccaaaggaatcctgctcatggcggcttctgaaaatgaggataacgatatcctgtggtgcgtgaatcacgatacgttccctttccagaaaccaatgatggagacccagatgaccgctggggtcgatggccatagctgggctctctctgccattgacgaactgaaggtggacaagattatcacccccttgaacaaggaccacataccaatcacagacagccccgtagttgttcagcaacatatgttgccgccaaagaaatttgtactgctctctgctcaaggatcgctgatgtttcataaattgcgccccgtcgaccaactccggcacctgctagtctctaacgtgggcggcgacggtgaagaaatcgagcgtttcttcaaactccatcaggaggatcaggcctgtgccacatgcctgatcctcgcctgcagcaccgcggcctgtgacagggaagtatccgcatgggcaactagagcattcttccgttatggcggcgaagcccaaatgaggtttcctactaccctgccaccaccgtccaatgtgggccctattctcgggtctccagtgtacagctcttcccccgtgcccagcggtagtccctaccctaacccttcctttcttggcaccccttcgcacggaatacagccccctgccatgagtaccccagtgtgcgcactgggcaaccccgccactcaagccaccaatatgtcatgcgttaccggccccgaaatcgtgtatagcggtaagcacaacggtatatgtatctatttctcacgcataatgggtaatatctgggatgcatcactggtggtcgagcgtattttcaagtcaggcaacagagaaatcaccgctattgaatcatccgtaccatgtcaactgttggagtcggtgctgcaggagcttaaaggacttcaagaattcctcgacagaaattctcagtttgccggcgggcctctgggtaatccgaatacaactgctaaggtccagcagcgactgattgggttcatgagacccgagaacggaaacccacagcaaatgcagcaggagctccagagaaagtttcatgaagcccagttaagcgagaaaatcagtctgcaagcgattcagcagctcgtgcgcaaatcttatcaagcactcgccctgtggaagctcctatgcgagcatcaatttaccatcatagttgctgagctccaaaaggaattgcaggagcaactgaagatcactaccttcaaggatctagtgatacgggacaaagagttaaccggtgctcttatcgccagtcttattaattgctacattcgggacaatgcagccgtggacgggatcagtctgcacctgcaggatatttgtccactcttgtacagcaccgatgatgccatttgttctaaagccaacgaactacttcagcgttcccgacaggttcagaataagaccgagaaagaaaggatgttgagagagagtctaaaggaataccagaaaatttccaatcaggttgacttgtccaatgtgtgcgcgcagtaccgccaggtgcggttctacgaaggggtggtagaactctcactgaccgctgccgaaaaaaaagacccgcagggcctgggcctacacttttataagcatggagaaccagaggaagacattgtaggtttacaagcatttcaggagagactaaacagctacaaatgcatcacagacacccttcaggagttggtgaaccagtctaaggccgcaccacagtcgccttccgtgcccaagaagccaggcccccctgtgctgtcctcagaccctaatatgctttccaacgaagaggctggacaccacttcgagcagatgctcaagctgtcacagcggagtaaggacgaactgtttagcatcgccctgtacaactggctgatccaagtggatcttgctgacaagctgcttcaggtggctagccccttcctcgaacctcatttagtgagaatggctaaggtggaccagaaccgcgtgaggtatatggatcttctttggcggtattacgaaaagaatagatccttttctaacgccgccagggtgttatctcgtctggccgatatgcactccacggaaatttccctccagcagagactggaatacatcgccagagccatcctctctgccaagtcctctacagccatttccagtatcgccgcagacggtgaatttctccacgaattagaggagaaaatggaggtagctcgcatccagctccagatacaggagacgctccagaggcagtattcacaccactcttcggtccaagacgctgtctctcagctcgactctgagctgatggatataacaaagctctacggggaattcgcggatccatttaagctggccgaatgtaagttagcaatcatacactgcgctgggtatagcgaccccattttggtgcaaacactgtggcaagatatcatcgaaaaggagctgtctgatagcgtgaccctgtcttcttcagacaggatgcacgcactgtccttaaagatcgtattgttgggtaagatatacgccggaacacctaggtttttcccccttgactttatcgtccaatttctggagcagcaggtatgcactctaaattgggacgtcggctttgttatccaaacgatgaatgagattggagtgcctctgccacgattgttagaggtgtacgaccagctatttaagagtagggaccctttttggaataggatgaaaaagcctcttcacctgttggattgcatacacgtgcttctgatcaggtacgtcgaaaatccaagtcaggtgctgaactgcgagcggaggcggttcaccaacctttgcctggacgcggtatgcgggtaccttgtagagctgcaatctatgtcatctagtgtcgctgtccaagctatcactggtaacttcaaatccctgcaggctaaactggaaagactgcactag

SEQ ID NO: 246173 - DNA, 4176 bp, Artificial Sequence
  derived and/or modified sequence
atgcccagtagcctccttggcgctgcaatgcccgcttcaacatcagctgccgctttacaggaggcactggagaatgcgggacgactaatagaccgacaactgcaggaagaccgcatgtatcctgatctctccgagctgctaatggtgtccgccccaaacaaccccacagtctcaggtatgtcggatatggactacccacttcaaggccctggcctgctttctgtgcctaaccttcctgaaatttccagtataaggcgggtccccctgcctccagaactagtcgagcagtttggccatatgcagtgtaattgcatgatgggggtatttcctcccatttccagggcatggctgacgatcgactccgacatttttatgtggaattacgaagacgggggtgatctggcgtactttgacggcttgtcagaaacaatcttggcggtagggctggtgaaacccaaagccggaatctttcaacctcatgttagacatttgctagtgctcgctactcccgtggacattgtcattctgggactctcgtatgcgaacctgcagacaggcagcggtgttctcaacgattcgctgtctggcggaatgcagctgctgccggacccactctacagtcttcctacagataacacttatctgctgacaatcacctctaccgataatggtcgcatcttccttgctggtaaggatggatgtttgtatgaggtggcttaccaagccgaagctggctggttctcccagcggtgtaggaagatcaatcatagtaaatccagtctgtccttcctcgtgccgtccctgctacagtttactttttctgaggacgatccaattctgcaaattgcgatcgacaattccaggaatattctctacaccagatctgagaaaggagtgatacaggtgtatgacctcgggcaggacggccagggaatgtctagagtggcctccgtttcccagaacgccattgtttcagctgctggaaatattgcacgcaccattgacagatccgtcttcaaacctattgtccagatcgctgtgatcgagaacagcgagtcacttgactgccagctccttgccgtgacacatgctggcgttaggctgtacttcagtacttgtcctttcaggcagccccttgcaaggcctaacacactgaccttggtgcatgtacgacttccaccaggatttagcgcgtcctctactgtcgagaagccctcaaaggtgcaccgggctctttatagtaaggggattcttctcatggcagcgtctgagaacgaagacaacgatatcctctggtgtgtgaatcacgacacttttccttttcagaagccaatgatggagacacagatgactgccggagtcgatgggcattcttgggccctgtccgctatcgacgaactcaaggttgataagataatcactccacttaataaagatcacataccaattactgattcccctgtggttgtccagcaacatatgctgcctcctaaaaagttcgtcctgctctcagctcaaggcagcctcatgtttcacaagctgaggcccgtggaccaactgcggcatctgctcgtgagcaacgtcggtggagacggagaagaaatcgagagattcttcaagttacaccaagaggaccaggcctgcgccacctgtctcatccttgcttgtagtacggctgcatgcgaccgagaagtgtcagcctgggccaccagggccttcttccgttacggaggtgaggcgcagatgaggttcccaactacactgccccctcccagcaacgtgggccctatcctaggcagtcctgtatacagctcctctccagtgccttctggcagtccataccccaatccaagtttcttaggtactccttcgcatggcatccagcctcccgctatgtctactcccgtatgcgcattggggaatcctgcaacccaggctaccaatatgtcttgcgtcaccggacccgaaattgtgtacagtgggaagcataatggaatctgcatttacttctcgcgcatcatggggaacatctgggatgcatcactggttgtcgagcgcatcttcaaatcggggaacagggagatcactgcgattgagagttccgttccgtgtcagttactggaatccgttctgcaggagcttaagggtctgcaagagtttctggaccggaactctcaattcgccggtggaccactcggtaaccccaatactacagctaaggtgcaacagcggctcattggctttatgcgccctgagaacggtaatcctcagcagatgcagcaagagcttcagcggaagtttcatgaagcccagttaagcgagaaaatctccttacaggctatccagcagcttgtccgaaaatcataccaagcattggcactttggaaactattgtgcgaacaccagttcactattattgtggccgaactgcagaaggaactccaggaacagttaaagatcacaacattcaaggaccttgtgattagggataaagagctgacaggcgctcttatagcctccctgataaactgctatatacgggacaatgcagccgtcgacgggatcagtctccacctgcaggatatttgccctctcttgtattcaacggatgatgccatctgcagcaaagcaaacgaactactacagcgatcgcgacaagtccagaataaaaccgagaaggagaggatgttacgagagtctctgaaggaataccaaaagatatccaaccaagtcgacctgtctaacgtgtgcgcacagtacagacaggtgagattttatgaaggggtggttgagctgtctctgactgccgcagagaaaaaagatccccaggggctcggcctgcacttttacaaacacggcgaaccagaggaggatatagtgggactgcaggctttccaggagagacttaattcgtataaatgtataactgatacgttgcaggagctggtgaatcagtccaaagctgcaccgcaatcaccctccgtgccaaaaaaaccagggccacccgtgctcagtagtgaccctaacatgctctctaacgaggaggccggtcaccacttcgagcagatgctaaaattgagccaacgttccaaggacgaacttttttctatcgcgctgtacaattggttgatccaggtcgatcttgccgacaagctgctccaagttgcctcacccttcctggaaccccacctcgtccgcatggctaaggtggaccagaatagggtccgatacatggacctgctctggcggtattacgaaaaaaatcgaagcttcagcaatgcagcccgtgttctctcccgacttgctgatatgcactctacagagatcagtctacaacagcgcctagagtatatcgcaagggccatcctgtccgccaaaagttcgacagctatctcgagtatagctgccgacggcgagtttctacacgaactggaggagaagatggaagttgcgcgaatacaacttcagattcaggaaactctgcagcgccaatactcacaccactccagcgtacaggacgctgtatctcagcttgattccgaactcatggatatcactaagctgtacggcgaattcgccgatccatttaaactcgcagagtgcaagttggcaatcatccattgcgccggatactctgatccaatcctagttcaaaccttgtggcaggatattatagaaaaagagctgtcagacagcgtgacgttatcctcttcagatcgaatgcatgcgctgtctctgaaaatcgtgttactcgggaagatatacgcaggtacaccaagattctttcctctggacttcatagtgcagttcctcgagcaacaggtgtgtactctcaactgggacgtcggattcgttatccagaccatgaacgaaataggtgtccccctccccaggctgctggaggtttatgatcagcttttcaagagtcgggatcccttctggaatcgcatgaaaaaacctcttcacctgctggactgcattcatgttctgctcattaggtacgtggaaaacccttctcaagtacttaactgcgaacgcaggcgcttcactaatttgtgcttggacgcggtctgtggttacctagtggagctgcagtctatgagttcctccgttgctgtgcaagcaattactggcaattttaagagtttacaggctaagttggaaaggctgcactag

SEQ ID NO: 246174 - DNA, 4062 bp, Artificial Sequence
  derived and/or modified sequence
atgtacccagatttgagcgagctgcttatggtgagtgctccgaacaatccaacggtttccggcatgtctgacatggactatcctttgcagggccccggtctcttgtcagtccccaatctacccgagatttcttccatcagacgagttccgctgccgccagagctggtcgagcaattcggccacatgcagtgtaactgtatgatgggtgtcttcccaccaatctcacgggcatggctgacaattgattcagacatattcatgtggaactatgaggacggaggggatttagcatacttcgacggcctgagcgaaaccatcttagccgtgggcctggtcaaaccaaaagctggcatcttccagccacacgttagacaccttctggttctggctaccccagttgacatcgtgatcctgggactctcttatgcgaatctccagactgggtcgggcgtgctgaacgacagcctgtccggcgggatgcagctgctgccagacccgctgtattctcttccaacagataacacatatttactgacaattaccagtaccgataatggtagaatctttctggcgggcaaggacggatgtctctatgaagtggcctaccaggcagaagctggttggtttagccaacgctgcagaaagatcaatcattcaaaaagttccctgagcttcctggttcccagcttactccaattcacgttcagtgaagatgaccctattcttcaaatcgccatcgacaattcccggaacatcctgtacacacgcagcgagaagggggtgatacaagtctacgatttaggacaggatggacagggcatgtcgcgagtagcgtccgtgtcacagaacgcaattgtgagcgccgctggtaatatagccaggacaatcgatagaagcgtcttcaagccaattgtgcagattgcagtgatcgagaacagcgagtctctcgattgccaattgttggctgtgactcatgccggcgtgagactgtatttctcaacatgtccttttcggcagcccctggctagacccaacactctgaccctggtgcatgtccgcctccctcccggatttagcgctagttctacagtagaaaagccgtccaaggtgcaccgtgccctctattctaagggtattctactgatggccgcttcagagaatgaagacaatgatatactgtggtgtgttaaccacgacaccttccccttccaaaagcccatgatggagactcagatgaccgccggtgtggatgggcactcttgggcgctttctgccatcgacgagttgaaagtcgataagattattactccactcaacaaagatcacattcccattactgattctccggtggtcgttcagcagcacatgctgccacccaagaagtttgtgcttctcagcgcccaaggttcactgatgttccataagctgaggcccgtcgaccagctgagacacctcctggttagtaacgtgggaggtgacggggaagaaatagaaagattttttaaactacaccaggaagaccaagcctgtgccacctgtctgatactggcctgctcaaccgcggcatgtgatcgcgaagtgtctgcatgggctacgcgagccttttttagatacggcggcgaggcccagatgagattccctaccactttacctcctcccagcaatgtcggacctattctcgggagtcccgtgtactcctccagccctgtgccctctggctcgccataccctaaccctagctttctaggcacaccttctcacggcatccaaccacccgccatgtcgaccccagtctgcgctctgggaaatccggcaactcaggcaaccaatatgagctgcgtgactggcccagagatcgtgtattcaggaaaacataacggtatctgtatctacttctccagaataatgggtaatatttgggacgcttcgcttgtggtggagcgaatttttaaatctggtaatagggagatcaccgccatcgagtccagcgtgccctgtcaattactagaaagtgtgttgcaggaactcaagggattgcaagagttcctggaccgaaactcccaatttgcagggggacccttggggaatccgaataccactgctaaggtccaacagcgactcataggattcatgagacctgaaaatggaaatccacaacagatgcagcaggagctgcagcgcaaatttcacgaagcccagctcagcgagaaaatcagtctccaagctatccagcaactggttcgaaagtcctaccaggcccttgcgctgtggaagttgctgtgcgaacatcagttcacaataatcgtggcagaattacagaaagagttgcaggagcagctcaaaataactactttcaaagatctcgtgattagggataaagaactaaccggagctcttattgcatcgttaattaattgttatatccgagacaacgcggctgtcgacggcatcagcctgcacctccaggatatctgtcctctgctctatagtacagatgatgctatctgttccaaggcgaatgagctgcttcagaggtccaggcaggtccagaataaaaccgaaaaagaaagaatgcttcgggagtctctgaaggagtatcagaagatctccaatcaggtagacttaagtaatgtgtgcgcccagtacaggcaggtccgcttttacgagggagtggtggagttatctttgacagcagctgaaaaaaaagacccgcaaggtttaggattgcatttctataagcatggtgagccagaggaggatatcgtggggctccaggcctttcaggagcgtttaaattcctataagtgtattactgacactttacaggagctcgtgaatcagagcaaagcggccccacagtctcctagtgtgcctaagaagccaggccctccagtactgagttcagaccctaatatgctgagcaatgaagaggccgggcaccactttgaacagatgttgaaactctcacagcgaagcaaggatgagcttttctcgattgccctgtacaactggctaatacaggttgatctggccgataagctgctgcaggtcgccagcccctttctggaacctcacctcgtgaggatggcaaaggtggaccaaaatagagttcgatatatggacttactgtggaggtactacgaaaagaatcgcagcttcagcaatgctgcccgggtcttgtcccggctggctgatatgcattcaaccgagatcagcctgcagcagagactggaatatatagccagagccatcttatccgccaaatcttcaactgcaataagcagcatcgccgccgatggggagtttttgcacgagttggaggagaaaatggaagtcgcacgaattcaacttcagattcaggaaaccctccagcgacagtattcccatcattccagcgtccaggatgctgttagtcagttggactctgagcttatggacattaccaaactgtatggcgagttcgccgatccctttaagctggcagagtgtaaacttgccattattcattgcgccggttactccgaccctattctggttcagaccttatggcaggacatcatagaaaaggaactgtcggactccgttacactgtcctcctctgaccgcatgcacgcactatctctgaaaatcgtccttctcggaaagatttacgcgggaaccccgaggtttttcccactggactttattgtccagttcttagagcagcaggtgtgcacactgaactgggatgtggggtttgtgatccagacgatgaatgagattggcgtaccactaccgcgactactagaagtatacgatcaattgttcaagagccgggacccattctggaatcggatgaagaaaccgctgcaccttttggactgtatccacgtgctgcttatccgctatgtcgagaacccttctcaagtccttaattgtgaaaggagacgctttactaatctgtgtcttgacgcggtctgtggctacttggtggaactccaatcgatgagcagctccgtcgctgtccaggccattacaggtaacttcaaaagtctacaagccaagctggagaggctgcactag

SEQ ID NO: 246175 - DNA, 4062 bp, Artificial Sequence
  derived and/or modified sequence
atgtacccagacctgtctgagctgctgatggtgtctgcccccaacaaccccaccgtgtctggcatgtctgacatggactaccccctgcagggccctggcctgctgtctgtgcccaacctgcctgagatcagcagcatcagaagagtgcccctgcccccagagctggtggagcagtttggccacatgcagtgcaactgcatgatgggcgtcttcccccccatcagccgggcctggctgaccatcgacagcgacatcttcatgtggaactatgaagatggaggagacctggcctactttgatggcctgtctgagaccatcctggccgtgggcctggtgaagcccaaggccggcatcttccagccccacgtgcgccacctgctggtgctggccacccctgtggacatcgtcatcctgggcctgtcctatgccaacctgcagacaggcagcggcgtgctgaatgacagcctgagcggcggcatgcagctgctgcctgaccccctgtacagcctgcccacagacaacacctacctgctgaccatcaccagcacagacaatggccgcatcttcctggccggcaaggatggctgcctgtatgaggtggcctaccaggccgaggccggctggttcagccagcgctgcaggaagatcaaccacagcaagagcagcctgtccttcctggtgcccagcctgctgcagttcaccttctctgaagatgaccccatcctgcagatcgccatcgacaacagcaggaacatcctgtacaccaggtctgagaagggcgtcatccaggtgtatgacctgggccaggacggccagggcatgagccgggtggcctctgtgtcccagaatgccatcgtgtctgctgctggcaacatcgcccggaccatcgacagatctgtgttcaagcccatcgtgcagattgctgtgattgaaaattctgagagcctggactgccagctgctggccgtgacccacgccggcgtgcggctgtacttcagcacctgccccttccggcagcccctggcccggcccaacaccctgaccctggtgcacgtgcggctgcccccaggcttcagcgccagcagcacagtggagaagcccagcaaggtgcaccgggccctgtacagcaagggcatcctgctgatggccgcctctgaaaatgaagataatgacatcctgtggtgtgtgaaccacgacaccttccccttccagaagcccatgatggagacccagatgacagctggggtggatggccacagctgggccctgagcgccattgatgagctgaaggtggacaagatcatcacccccctgaacaaggaccacatccccatcacagacagccctgtggtggtgcagcagcacatgctgccccccaagaagtttgtgctgctgagcgcccagggcagcctgatgttccacaagctgcggcctgtggaccagctgcggcacctgctggtgtccaatgtgggcggagatggagaggagattgagcgcttcttcaagctgcaccaggaggaccaggcctgtgccacctgcctgatcctggcctgcagcacagctgcctgtgaccgggaggtgtctgcctgggccacccgggccttcttccgctatggaggagaggcccagatgaggttccccaccaccctgcccccacccagcaatgtgggccccatcctgggcagccctgtgtacagcagcagccctgtgcccagcggcagcccctaccccaaccccagcttcctgggcacccccagccacggcatccagcccccagccatgagcacccctgtgtgtgccctgggcaacccagccacccaggccaccaacatgagctgtgtgactggacctgagatcgtgtacagcggcaagcacaacggcatctgcatctacttcagccgcatcatgggcaacatctgggatgccagcctggtggtggagcgcatcttcaagagcggcaaccgggagatcacagccatcgagagctctgtgccctgccagctgctggagagcgtgctgcaggagctgaagggcctgcaggagttcctggacaggaacagccagtttgctgggggccccctgggcaaccccaacaccacagccaaggtgcagcagaggctcatcggcttcatgaggccagaaaatggaaacccccagcagatgcagcaggagctgcagaggaagttccacgaggcccagctgtctgagaagatcagcctgcaggccatccagcagctggtgaggaagagctaccaggccctggccctgtggaagctgctgtgtgagcaccagttcaccatcatcgtggccgagctgcagaaggagctgcaggagcagctgaagatcaccaccttcaaggacctggtgatccgggacaaggagctgaccggggccctgattgccagcctcatcaactgctacatccgggacaatgctgctgtggatggcatcagcctgcacctgcaggacatctgccccctgctgtacagcacagatgatgccatctgcagcaaggccaatgagctgctgcagaggagccggcaggtgcagaacaagacagagaaggagaggatgctgcgggagagcctgaaggagtaccagaagatcagcaaccaggtggacctgagcaatgtgtgtgcccagtaccggcaggtgcgcttctatgagggcgtggtggagctgagcctgacagctgctgagaagaaggacccccagggcctgggcctgcacttctacaagcacggggagccagaagaagatattgtgggcctgcaggccttccaggagcggctgaacagctacaagtgcatcacagacaccctgcaggagctggtgaaccagagcaaggccgccccccagagccccagcgtgcccaagaagccaggcccccctgtgctgagcagtgaccccaacatgctgagcaatgaggaggccggccaccactttgagcagatgctgaagctgagccagaggagcaaggatgagctgttcagcatcgccctgtacaactggctgatccaggtggacctggccgacaagctgctgcaggtggccagccccttcctggagccccacctggtgaggatggccaaggtggaccagaacagagtgcgctacatggacctgctgtggagatactatgagaagaacagaagcttcagcaatgctgcccgggtgctgagccggctggccgacatgcacagcacagagatcagcctgcagcagaggctggagtacatcgcccgggccatcctgagcgccaagagcagcacagccatcagcagcattgctgctgatggagagttcctgcacgagctggaggagaagatggaggtggcccgcatccagctgcagatccaggagaccctgcagaggcagtacagccaccacagctctgtgcaggatgctgtgtcccagctggacagcgagctgatggacatcaccaagctgtatggagaatttgctgaccccttcaagctggccgagtgcaagctggccatcatccactgtgccggctacagcgaccccatcctggtgcagaccctgtggcaggacatcatcgagaaggagctgagtgacagcgtgaccctgagcagcagtgacaggatgcacgccctgagcctgaagatcgtgctgctgggcaagatctatgccggcaccccccgcttcttccccctggacttcatcgtgcagttcctggagcagcaggtgtgcaccctgaactgggatgtgggcttcgtcatccagaccatgaatgaaattggagtgcccctgccccggctgctggaggtgtatgaccagctgttcaagagccgggaccccttctggaacaggatgaagaagcccctgcacctgctggactgcatccacgtgctgctgatccgctacgtggagaaccccagccaggtgctgaactgtgagcggcggcgcttcaccaacctgtgcctggatgctgtgtgtggctacctggtggagctgcagagcatgagcagctctgtggccgtgcaggccatcactggaaacttcaagagcctgcaggccaagctggagcggctgcactag

SEQ ID NO: 246176 - DNA, 4062 bp, Artificial Sequence
  derived and/or modified sequence
atgtaccccgacctgagcgagctgctgatggtgagcgcccccaacaatcccaccgtgtcgggcatgagcgatatggattaccccctccagggaccaggcctcctttctgtgcccaacctcccagagattagtagcatcagaagagttccactgccgccagaactcgtcgaacagttcggccatatgcaatgtaactgcatgatgggagtgtttccccctatcagtagggcctggttaacgatcgactccgacatcttcatgtggaattatgaggacggcggtgacctcgcctacttcgacggtcttagtgagaccatcctcgccgtgggactggtaaaaccaaaagcaggaatttttcagccacacgtgagacatctactcgttctggctacccccgtggatatagtaatcctaggcctgagttatgcaaacctgcaaactggaagtggtgtgctgaatgactccctctcgggcggtatgcagctactgccagacccactttactccttgccaaccgacaatacttatctcttaacaattacgtctaccgacaacggccggatatttctggcggggaaggatggatgcctctacgaggtcgcctaccaggctgaagcaggttggttttctcaacgttgcagaaagataaaccattcaaagagttctctgtccttcctggtgccttctctcctgcagtttacattctcagaggatgaccccattcttcagattgccattgacaactcccgcaacatcctttatacacgctcagaaaagggggtgatacaggtgtacgatctgggacaggatgggcaagggatgtcgcgggtggcctctgtaagtcagaatgccatcgtatcagccgctggcaatatagcccggacaatcgacagatccgtgttcaaaccaatcgttcagattgccgtgatcgagaatagcgagagtcttgactgccagttgctggccgtgacccatgcgggcgtacgcctctatttctcaacatgtccctttcgacaacctctggcgagacccaatacgctgacactcgtgcacgtcaggctgccccctggctttagcgcatcatccactgtggagaagcctagcaaggtacacagggctctgtactccaaggggatcttgctcatggcagcctcagagaacgaagacaatgatattctgtggtgcgtgaaccacgataccttcccctttcagaaacccatgatggagacacagatgacagccggtgtggacggacacagttgggccctgtccgctatcgacgaactgaaagtggacaagattattacccccctgaacaaggaccatattcctattaccgatagtccagtggtagtgcagcagcacatgctgcctcccaagaaattcgtactgctctcagcccaaggatccctcatgttccacaaattgcggcccgtggatcagctcagacacctgctcgtttcgaatgttggcggggacggagaagaaatcgagcggttttttaaattgcaccaggaggatcaggcctgtgccacctgcctcatcttagcctgctcaaccgctgcctgcgatcgcgaagtatctgcatgggccactagagcatttttccgctacggcggagaggcccagatgagatttccaacaacgctgcctcctccttctaatgtgggacccattctgggctcccctgtgtactcaagcagccctgtcccttccggttcaccgtatcctaatccatcgttcttgggcaccccctcacatggtatccagccaccagccatgtccacccctgtttgcgcattaggaaatcccgccacacaagcaaccaatatgtcatgcgtgaccggtcccgaaattgtgtactctggaaagcataacggaatctgtatctacttctctagaatcatgggaaatatttgggacgcaagcctggttgtggagcgcatttttaagtccgggaacagagagatcactgccatcgagtcaagtgtcccctgtcagctgctcgagagcgtattacaagagctaaaggggctccaggagttcctggatcgcaactcgcagtttgcgggggggcctttgggcaacccgaacacaacagcgaaagtgcaacagagactgatcggattcatgcgacctgagaatggtaatccacagcagatgcagcaggagctccagagaaagttccacgaagcgcagctctcagagaaaattagtctccaagccatccagcagcttgtgcgcaaaagctatcaggctcttgctctatggaagctcctgtgtgagcaccaattcaccatcatcgtggcagagctgcagaaggagctgcaggagcagctgaagatcactaccttcaaagatcttgttatccgagacaaggaattgactggcgccctcattgcctccctgataaactgttacatcagagataacgcggctgttgatggtatttcccttcacttacaggatatctgccctctactgtattctactgatgacgcaatctgttctaaagcgaatgagctactgcaaagaagtcgccaagtgcagaacaagactgaaaaagaacggatgctaagagagtctttgaaggaatatcagaaaattagtaatcaggtcgatctgtcgaacgtgtgtgcccagtacaggcaggtgcgtttctatgaaggggtagtggaattgagcttaacagcagccgagaagaaagacccccagggactgggtctccacttttataagcacggagagcctgaggaagatattgtaggactgcaagcttttcaggaaaggctgaactcatacaaatgtatcacagacactctccaggaactggtgaaccaaagcaaggccgccccccaatcgccctctgtgcccaaaaagccaggacctcccgtgctgtcctccgaccctaatatgctatccaatgaggaggcaggccaccacttcgagcagatgttaaaactgtctcagaggagcaaagacgagctgttctcgatcgcgctctataactggctgattcaggtggacctggcagacaaactgcttcaggttgcaagtccatttctggagccgcatcttgttcggatggcaaaggtggaccagaaccgtgttcgctatatggatcttttatggcgatattacgaaaaaaatagatcgttttccaatgctgcaagggtactcagcagactggctgatatgcactccaccgagatctccctgcaacagcggttggagtatattgctcgggccattctttccgcaaagtccagcacagccattagtagcatcgcggctgacggcgaattcttgcacgagctggaggagaagatggaggtcgctagaatacaactccaaatccaagagactctgcaaaggcagtactcccatcactcctccgtgcaggacgccgtcagccagctggatagtgagcttatggacataaccaagctgtacggcgaattcgccgaccctttcaagctcgccgagtgtaaactggctattatacattgcgcaggctattcagaccccattttggttcaaactctctggcaggatatcattgagaaggagctgtcagacagcgtcactctctcatcctccgatagaatgcacgcactatctcttaagatcgtgctgctagggaagatctacgcagggacgcctaggttctttcctctggattttatagttcagttcttggagcaacaggtgtgtacgctgaattgggacgtgggattcgttattcagactatgaatgaaattggcgttccactcccacgacttctggaagtgtatgatcaacttttcaaatctcgggacccattttggaaccgcatgaagaaacctctccacttgctggattgtatccacgttctgctcataagatacgttgagaatccatcccaggtgttgaactgtgagaggagacggttcacaaatctgtgcctggatgccgtctgcggttatttggttgagctgcaaagcatgagttcctctgtggccgtccaggctatcaccggcaacttcaagagcttacaggcaaagctcgaacgtcttcactag

SEQ ID NO: 246177 - DNA, 8143 bp, Artificial Sequence
  derived and/or modified sequence
ctcccaacagcttcctcttcccaggccagaacggcgtcttccagttccccaccggatgaagcggaagtgcgtcatgtcgaggcgccaaggcgctcgtttggcgcgcgcgccctaggcggcggatctaagctaacttcttggatcttttcttgtttctccttggtttttgactttttctggaccctggtgtctacgatttccgagatgccgtcttctttgttgggcgcggcgatgccggcctctacatctgccgcagccctgcaggaagctctggaaaatgctggacggctcatcgaccgtcagttgcaagaggaccgcatgtacccggacctttccgagctgcttatggtgtctgccccaaataatcccaccgtttctggcatgtcagatatggattatcctttgcaaggacctggtttgctgtccgtacccaaccttccagagatcagttccatccgaagagttcctctcccacctgaacttgttgagcagtttggacatatgcagtgtaattgcatgatgggtgtgttccctcctatcagcagagcttggctcacaattgacagtgatatattcatgtggaactatgaggatggaggagaccttgcctattttgatggacttagtgagactattcttgctgtggggcttgtgaagccaaaagcaggcatctttcaacctcatgtgcgacacctcctggttttggcgacccctgtagacatagtaattcttggactcagctatgctaatttgcaaacaggttctggagttcttaatgatagtttgtctggtggaatgcagttgcttccagatcctttatattctcttcctactgataatacttaccttttaacaataacttccactgataatggcagaattttcttggctggaaaggatggctgtttatatgaagtagcctaccaggctgaagcagggtggtttagccaaagatgtaggaaaataaaccactcaaagagctcactttctttccttgttccttccttgctacaattcacgttctcagaagatgatcctattcttcaaattgcaattgataattctagaaatattttatatacacgatctgagaaaggagtaatacaggtgtatgatttgggacaagatggacaaggaatgagcagagttgcctctgtgtcacagaatgccattgtctctgctgctggtaacattgctaggaccatcgatcgttctgtttttaaaccaattgtccaaatagcagtgattgaaaattctgaatcactggactgtcagttattggctgtcacacatgcaggtgttaggttatattttagcacttgtccattcagacagccattagcacggcctaatacactgacgctggttcatgtccgcttacctcctggattctcagcatcttcaaccgtggaaaagccttcaaaagtacatagagctctttatagtaaaggtattctattgatggcagcctcagaaaatgaggataatgatattttatggtgtgtcaaccatgatacttttcctttccaaaagccaatgatggaaacccagatgacagctggtgttgatggtcattcctgggctctttctgcgatagatgaattgaaagtagataaaataattacacctttaaacaaggatcatattccaataactgattcaccagttgttgtacagcagcacatgttacctccgaagaaatttgttctcctctcagcacaggggagccttatgtttcataaacttagacctgtagatcaactgaggcatctacttgtgagtaatgtgggaggagatggagaagagattgaaagattctttaaattacatcaggaagaccaggcttgtgcaacttgccttattcttgcttgctccactgctgcctgtgatagagaagtatctgcctgggctactcgggctttctttaggtatggtggtgaagcacagatgagatttccaaccactcttccgcctccaagtaatgttggtcccatcttggggtctcctgtctattctagttctcctgttcctagtggtagtccctatccaaatccatcctttttgggaacaccgtctcatggtatacagcctcctgccatgtcaactccagtgtgtgctctgggaaacccagcaactcaggccacaaatatgagttgtgtgactggaccagagattgtgtactctggaaaacacaatggtatttgcatttacttttctcggatcatgggaaacatttgggatgcaagcttagttgtggagagaatattcaagagtggcaacagagagatcactgcaattgaaagtagtgttccctgccaactgctagagtcagtgctacaagaactaaagggtttgcaggaatttctagacagaaactcccagtttgcaggaggaccattaggaaatccaaatactactgctaaagtgcagcagaggctgataggattcatgcgtcctgaaaacggaaatccccagcaaatgcaacaggaactgcagaggaagtttcatgaggctcaactaagtgaaaagatttcacttcaggcaattcagcagttggttcgaaaatcatatcaggctctggctttatggaaacttctttgtgaacatcaattcactatcattgtggcagaacttcagaaggaacttcaagagcagctgaagatcaccacctttaaagatcttgtaatcagggacaaagaactcacaggggcattaattgcttctcttatcaactgctacatcagagataatgccgctgttgatggcattagtttacatttacaggatatctgcccacttctatatagcactgatgatgcaatttgttctaaggcaaatgagcttctccagcgttcccgacaagttcaaaataagactgaaaaagaaagaatgttaagggaatcattaaaggaatatcaaaaaattagcaatcaagtggacctttccaatgtttgtgctcagtatagacaagtgagattttatgagggtgtggtggaactttctcttacggctgcagagaaaaaagatcctcaaggtcttgggcttcatttctataaacatggagaaccagaagaagacatagttggacttcaggccttccaagaaagattaaacagttacaaatgcattacagacacacttcaagaactggtaaatcaaagtaaggccgctcctcagtctcccagtgtacccaaaaaacctggtcctccagtgttgtcatctgatccaaatatgctgagtaatgaagaagcaggacatcattttgaacaaatgcttaaattgtcacagcgatccaaggatgagctctttagtattgccctttataattggctaatacaagtcgaccttgcagataagctgctacaggttgcttctccatttctggagccacatctagtccgaatggccaaagttgatcaaaacagagttcgttatatggatttactctggcggtattacgagaagaacagaagtttcagtaatgctgctcgtgtactgtccagactggctgacatgcatagcacagaaatttcacttcagcagcgactagagtacattgctcgagccattcttagtgccaaaagttccactgccatttcatcaatagctgccgatggtgaatttcttcatgaattagaagaaaaaatggaggttgctaggatccaacttcagatacaggagacactacaaaggcagtattcccatcattcttctgtacaggatgcagtttctcagctggattctgagctgatggacataactaagctttatggggaatttgctgacccatttaaacttgcagagtgcaaacttgcaataattcattgtgccggttattcagaccctatattggtgcagacactttggcaagatatcatagagaaagaattgagtgacagtgtgacattgagctcctcggatagaatgcatgctcttagtctcaagattgttctccttggcaaaatttatgctggcacaccacgcttctttcctttagattttattgtacagtttttagaacagcaggtttgtactttgaactgggatgtgggcttcgtaatacagacaatgaatgaaattggagtaccattacctagactactagaagtttatgatcagttgttcaaatcacgggatccattctggaacagaatgaagaagccactgcaccttttggattgtatacatgtattattgataagatatgttgagaatcccagccaagttttaaattgtgaaaggagaagatttacaaatctctgcctggatgctgtttgtggttaccttgttgagctccagtctatgagctcgtcagtagcagtacaagccatcactgggaattttaaatctcttcaagctaaattagaacggcttcattaattactgtgatatactttcatccgttttatgatctgtaaaataaaaactcagctgggtccagatatcaggtgttctaaatctaagaatgtaagaacaatcttaatagaaatatgtttttaataagtggctaatatctacaaatagtacctttgctaaatgaattcttttttatgactattttgttttttagtaattgggtgaaaaaacaactgaaatgagattatttattattttaacataaggattaaaaaaatttagaaactcttattttgaattgtactgcaggcagaaatttcgaatttatattattcattttcaagttagtccaaggatattggcattaaaactccactaggcggccaggcacagtgacttacacctgtaatcccagcactttgggaggccaaggtgggcgaatcacgaggccaagagtttgagaccaacctggccaacatggtgaaaccccatctctactaaaaatacaaaaaaaaatagccaggcgtggtggcgggcgcctgtaatcccagctactcgggaggctgagggaggcgaatcacttgaacccgggaggcagaggtttcagtgagtcaaaatcgcaccattgcactccagcccaggcaacagggcgagactctgtctcaaaaaacaaaaaaacctcaaataggctaagcagatccattcccataatagtggattctaaaaccgtccttaaataggcaaataactgactttttcaaaactttttttaggtgttgggttcacccttgaaagaactgtcctctaacaactggttttgtcagttaaagcccttgagaattgacatagctatatacctggttgagcaggtgataaaacttgtaactaatgttgtgtcctgaaaacctacacagggaggtactgttttcccttagtgtctacctggctgcttggccttgtgactactgattccattagagcagtggttctcaaagtatgtgctccaaaccagaagcatcagcatcagcatcagcatcacctaggaatttgttagaaatgcaaattctcgagccccaacccagacctactgaatcaaaaacgtgggggatgaggccctgctttctatgttttaacaagctctccaggagattttggtgcatgtcaaatttgaaagccactgcagtaaaggatactgctaccttccatagtttatggactgagctacctatctggctcctcctctgtgaataaccacacacacaaattttgcccaaggcacacaatatataaagcaaaactgttagtaatgtactttttaattattccttaacaaaatagaataaccaaaccaaatgcttcaaagtaatagcaacaagagagaagaagagtgggaatgaccagagctaacaaaacactctattcctttctctcttttttttttttttggagacagaatctcaccctgtagcccagcctggagtgcagtggtgcgatcccggctcactgcaacctctgcctcacaggtttgaagcaatttgcctgcctcagcctctcgagtagctgggattgcaggtgtgcgccaccatacccagctaatttttgtatttttagtagagatgggtttcaccatgttggccaggctggtcttgaactcctgacctcaagtgatctgcccgcctccacctcccaaagtgttgagattacagacgtgagccaatgtgcctggcctattcccttctctctttatgctaccacaaataattaccttctgtttattgtaagtgatgcatgtctaacaatttgtacaatacattttgaatatatttttccttccattattgtcttttcccaagaccatagggttgccttctctacatttgttctcttagaattcagctcccttttccctataatcttctaatgtagaatatttaatagaatgccagaacgtcactcagtgggtactactacctcttatttttcaacttttcagtttcttaagtttagcgttttttgaatatgtaaagtgaatgtatgcgatacattaattcgttttataaatttaaaattctgtcatgtctacttaaaaggaaggccttgtctgaatgttgtaatttaggtgtgactccagttctgctagagataagaacttcatttttgttttaagcacatttacatactagcaatatgttgttatatatactcagctcacaacattgaaagtacatgttttaaaagggctgtaggcttccatggttagatggtctgttagagtcagaaatctgaacactgtccttttattcacacagcatgctttgagaggttttaggaattccagccccacaacagatgcttgcaataccttttggggggtaagattcctaagagagaagaaattaggtcccctcatttttacccttggaacagtgtttctaaaactttcacattcagaacaatcagccggatagcctgttatgacagattcttgagttccatctgtagtgtcatgctgatcctggcagtcagtggatcagagttggagtagcatttatccactgtattagtatactttgtacttggtgtttgttcaacgcattacttttttgaatttttttgttttttgaagacaagggcttgccctggagtgcagtggcatgatcttggctcactgcagcctcgagctcctgggctcaactcagtcttcccacctcatcctcttaaatagctgggactacaggcacgtgctgctacaccctgctattgtctgtttgtttgtttgagactgagttttgctcttgttgcccaggctggagtgcaatggcacaatcttggctcaccacagccttttttatgagactgagttttgctcttgttgcccaggctggagtgcaatggcacgatcttggctcaccacaacctccacttcctgggttcaagcaattcttctgcctcagcctcccgagtagctgagattacaggcatgcgccaccatgcctggctaattttttttttttgtatttttagtagagatggggtttcaccgtgttggtcaggctggtcttgaactcctgacctcaggtgatccaccccccttggcctcccaaagagctgggattacaggcatgagccactgcgcctagccccaccccccctactttttttttttttttttttttaattttttgtgtagccaaaagatctcactctgttgcccagactgctctcaaaactcctggccttaagtgattcccctgcctcagtctcccaaagtgctgggattataggcatgagccaccatgcctgtccattatttctttatagtgactattatatgtaggcaatgtataattggtagaacatagtctatgaaacagtgcgttaattgtgggcagtgaagaatcattgaagttgtgaaatttgtattttaactagatcattgtagtatggcaaaacggttaggaaagagaaagctatcttgactaactgtttatgctatgagatactgactgatgtacatgtacatttagtgtttctttaggtatacctgacttattcattgaacacctatccactgatctcaaaagtattcctcagggtagtctccattcctgtcatttttcctcctattcatgagacggaaaaattatgaccatggtacagagttgtatcaaggaaatgaagaactagaacattgaattgaaaggttttgaaagggttcacaatttcttttcattttctattaatgtcttcttttaaattctcttaagaataaaacttttttctaata

SEQ ID NO: 246178 - DNA, 4200 bp, Artificial Sequence
  derived and/or modified sequence
gactctcgcctgacttcctaatttgctacttatccccagcgttggtcccggcgaggatatgctgagatttatggcactgttggctgcatttttggagaacagcaagcagcttcttttcagataatcccaccgtttctggcatgtcagatatggattatcctttgcaaggacctggtttgctgtccgtacccaaccttccagagatcagttccatccgaagagttcctctcccacctgaacttgttgagcagtttggacatatgcagtgtaattgcatgatgggtgtgttccctcctatcagcagagcttggctcacaattgacagtgatatattcatgtggaactatgaggatggaggagaccttgcctattttgatggacttagtgagactattcttgctgtggggcttgtgaagccaaaagcaggcatctttcaacctcatgtgcgacacctcctggttttggcgacccctgtagacatagtaattcttggactcagctatgctaatttgcaaacaggttctggagttcttaatgatagtttgtctggtggaatgcagttgcttccagatcctttatattctcttcctactgataatacttaccttttaacaataacttccactgataatggcagaattttcttggctggaaaggatggctgtttatatgaagtagcctaccaggctgaagcagggtggtttagccaaagatgtaggaaaataaaccactcaaagagctcactttctttccttgttccttccttgctacaattcacgttctcagaagatgatcctattcttcaaattgcaattgataattctagaaatattttatatacacgatctgagaaaggagtaatacaggtgtatgatttgggacaagatggacaaggaatgagcagagttgcctctgtgtcacagaatgccattgtctctgctgctggtaacattgctaggaccatcgatcgttctgtttttaaaccaattgtccaaatagcagtgattgaaaattctgaatcactggactgtcagttattggctgtcacacatgcaggtgttaggttatattttagcacttgtccattcagacagccattagcacggcctaatacactgacgctggttcatgtccgcttacctcctggattctcagcatcttcaaccgtggaaaagccttcaaaagtacatagagctctttatagtaaaggtattctattgatggcagcctcagaaaatgaggataatgatattttatggtgtgtcaaccatgatacttttcctttccaaaagccaatgatggaaacccagatgacagctggtgttgatggtcattcctgggctctttctgcgatagatgaattgaaagtagataaaataattacacctttaaacaaggatcatattccaataactgattcaccagttgttgtacagcagcacatgttacctccgaagaaatttgttctcctctcagcacaggggagccttatgtttcataaacttagacctgtagatcaactgaggcatctacttgtgagtaatgtgggaggagatggagaagagattgaaagattctttaaattacatcaggaagaccaggcttgtgcaacttgccttattcttgcttgctccactgctgcctgtgatagagaagtatctgcctgggctactcgggctttctttaggtatggtggtgaagcacagatgagatttccaaccactcttccgcctccaagtaatgttggtcccatcttggggtctcctgtctattctagttctcctgttcctagtggtagtccctatccaaatccatcctttttgggaacaccgtctcatggtatacagcctcctgccatgtcaactccagtgtgtgctctgggaaacccagcaactcaggccacaaatatgagttgtgtgactggaccagagattgtgtactctggaaaacacaatggtatttgcatttacttttctcggatcatgggaaacatttgggatgcaagcttagttgtggagagaatattcaagagtggcaacagagagatcactgcaattgaaagtagtgttccctgccaactgctagagtcagtgctacaagaactaaagggtttgcaggaatttctagacagaaactcccagtttgcaggaggaccattaggaaatccaaatactactgctaaagtgcagcagaggctgataggattcatgcgtcctgaaaacggaaatccccagcaaatgcaacaggaactgcagaggaagtttcatgaggctcaactaagtgaaaagatttcacttcaggcaattcagcagttggttcgaaaatcatatcaggctctggctttatggaaacttctttgtgaacatcaattcactatcattgtggcagaacttcagaaggaacttcaagagcagctgaagatcaccacctttaaagatcttgtaatcagggacaaagaactcacaggggcattaattgcttctcttatcaactgctacatcagagataatgccgctgttgatggcattagtttacatttacaggatatctgcccacttctatatagcactgatgatgcaatttgttctaaggcaaatgagcttctccagcgttcccgacaagttcaaaataagactgaaaaagaaagaatgttaagggaatcattaaaggaatatcaaaaaattagcaatcaagtggacctttccaatgtttgtgctcagtatagacaagtgagattttatgagggtgtggtggaactttctcttacggctgcagagaaaaaagatcctcaaggtcttgggcttcatttctataaacatggagaaccagaagaagacatagttggacttcaggccttccaagaaagattaaacagttacaaatgcattacagacacacttcaagaactggtaaatcaaagtaaggccgctcctcagtctcccagtgtacccaaaaaacctggtcctccagtgttgtcatctgatccaaatatgctgagtaatgaagaagcaggacatcattttgaacaaatgcttaaattgtcacagcgatccaaggatgagctctttagtattgccctttataattggctaatacaagtcgaccttgcagataagctgctacaggttgcttctccatttctggagccacatctagtccgaatggccaaagttgatcaaaacagagttcgttatatggatttactctggcggtattacgagaagaacagaagtttcagtaatgctgctcgtgtactgtccagactggctgacatgcatagcacagaaatttcacttcagcagcgactagagtacattgctcgagccattcttagtgccaaaagttccactgccatttcatcaatagctgccgatggtgaatttcttcatgaattagaagaaaaaatggaggttgctaggatccaacttcagatacaggagacactacaaaggcagtattcccatcattcttctgtacaggatgcagtttctcagctggattctgagctgatggacataactaagctttatggggaatttgctgacccatttaaacttgcagagtgcaaacttgcaataattcattgtgccggttattcagaccctatattggtgcagacactttggcaagatatcatagagaaagaattgagtgacagtgtgacattgagctcctcggatagaatgcatgctcttagtctcaagattgttctccttggcaaaatttatgctggcacaccacgcttctttcctttagattttattgtacagtttttagaacagcaggtttgtactttgaactgggatgtgggcttcgtaatacagacaatgaatgaaattggagtaccattacctagactactagaagtttatgatcagttgttcaaatcacgggatccattctggaacagaatgaagaagccactgcaccttttggattgtatacatgtattattgataagatatgttgagaatcccagccaagttttaaattgtgaaaggagaagatttacaaatctctgcctggatgctgtttgtggttaccttgttgagctccagtctatgagctcgtcagtagcagtacaagccatcactgggaattttaaatctcttcaagctaaattagaacggcttcattaattactgtgatatactttcatccgttttatgatctgtaaaataaaaactcagctgggtccag

SEQ ID NO: 246179 - DNA, 4224 bp, Artificial Sequence
  derived and/or modified sequence
gaggcgccaaggcgctcgtttggcgcgcgcgccctaggcggcggatctaagctctggaaaatgctggacggctcatcgaccgtcagttgcaagaggaccgcatgtacccggacctttccgagctgcttatggtgtctgccccaaataatcccaccgtttctggcatgtcagatatggattatcctttgcaaggacctggtttgctgtccgtacccaaccttccagagatcagttccatccgaagagttcctctcccacctgaacttgttgagcagtttggacatatgcagtgtaattgcatgatgggtgtgttccctcctatcagcagagcttggctcacaattgacagtgatatattcatgtggaactatgaggatggaggagaccttgcctattttgatggacttagtgagactattcttgctgtggggcttgtgaagccaaaagcaggcatctttcaacctcatgtgcgacacctcctggttttggcgacccctgtagacatagtaattcttggactcagctatgctaatttgcaaacaggttctggagttcttaatgatagtttgtctggtggaatgcagttgcttccagatcctttatattctcttcctactgataatacttaccttttaacaataacttccactgataatggcagaattttcttggctggaaaggatggctgtttatatgaagtagcctaccaggctgaagcagggtggtttagccaaagatgtaggaaaataaaccactcaaagagctcactttctttccttgttccttccttgctacaattcacgttctcagaagatgatcctattcttcaaattgcaattgataattctagaaatattttatatacacgatctgagaaaggagtaatacaggtgtatgatttgggacaagatggacaaggaatgagcagagttgcctctgtgtcacagaatgccattgtctctgctgctggtaacattgctaggaccatcgatcgttctgtttttaaaccaattgtccaaatagcagtgattgaaaattctgaatcactggactgtcagttattggctgtcacacatgcaggtgttaggttatattttagcacttgtccattcagacagccattagcacggcctaatacactgacgctggttcatgtccgcttacctcctggattctcagcatcttcaaccgtggaaaagccttcaaaagtacatagagctctttatagtaaaggtattctattgatggcagcctcagaaaatgaggataatgatattttatggtgtgtcaaccatgatacttttcctttccaaaagccaatgatggaaacccagatgacagctggtgttgatggtcattcctgggctctttctgcgatagatgaattgaaagtagataaaataattacacctttaaacaaggatcatattccaataactgattcaccagttgttgtacagcagcacatgttacctccgaagaaatttgttctcctctcagcacaggggagccttatgtttcataaacttagacctgtagatcaactgaggcatctacttgtgagtaatgtgggaggagatggagaagagattgaaagattctttaaattacatcaggaagaccaggcttgtgcaacttgccttattcttgcttgctccactgctgcctgtgatagagaagtatctgcctgggctactcgggctttctttaggtatggtggtgaagcacagatgagatttccaaccactcttccgcctccaagtaatgttggtcccatcttggggtctcctgtctattctagttctcctgttcctagtggtagtccctatccaaatccatcctttttgggaacaccgtctcatggtatacagcctcctgccatgtcaactccagtgtgtgctctgggaaacccagcaactcaggccacaaatatgagttgtgtgactggaccagagattgtgtactctggaaaacacaatggtatttgcatttacttttctcggatcatgggaaacatttgggatgcaagcttagttgtggagagaatattcaagagtggcaacagagagatcactgcaattgaaagtagtgttccctgccaactgctagagtcagtgctacaagaactaaagggtttgcaggaatttctagacagaaactcccagtttgcaggaggaccattaggaaatccaaatactactgctaaagtgcagcagaggctgataggattcatgcgtcctgaaaacggaaatccccagcaaatgcaacaggaactgcagaggaagtttcatgaggctcaactaagtgaaaagatttcacttcaggcaattcagcagttggttcgaaaatcatatcaggctctggctttatggaaacttctttgtgaacatcaattcactatcattgtggcagaacttcagaaggaacttcaagagcagctgaagatcaccacctttaaagatcttgtaatcagggacaaagaactcacaggggcattaattgcttctcttatcaactgctacatcagagataatgccgctgttgatggcattagtttacatttacaggatatctgcccacttctatatagcactgatgatgcaatttgttctaaggcaaatgagcttctccagcgttcccgacaagttcaaaataagactgaaaaagaaagaatgttaagggaatcattaaaggaatatcaaaaaattagcaatcaagtggacctttccaatgtttgtgctcagtatagacaagtgagattttatgagggtgtggtggaactttctcttacggctgcagagaaaaaagatcctcaaggtcttgggcttcatttctataaacatggagaaccagaagaagacatagttggacttcaggccttccaagaaagattaaacagttacaaatgcattacagacacacttcaagaactggtaaatcaaagtaaggccgctcctcagtctcccagtgtacccaaaaaacctggtcctccagtgttgtcatctgatccaaatatgctgagtaatgaagaagcaggacatcattttgaacaaatgcttaaattgtcacagcgatccaaggatgagctctttagtattgccctttataattggctaatacaagtcgaccttgcagataagctgctacaggttgcttctccatttctggagccacatctagtccgaatggccaaagttgatcaaaacagagttcgttatatggatttactctggcggtattacgagaagaacagaagtttcagtaatgctgctcgtgtactgtccagactggctgacatgcatagcacagaaatttcacttcagcagcgactagagtacattgctcgagccattcttagtgccaaaagttccactgccatttcatcaatagctgccgatggtgaatttcttcatgaattagaagaaaaaatggaggttgctaggatccaacttcagatacaggagacactacaaaggcagtattcccatcattcttctgtacaggatgcagtttctcagctggattctgagctgatggacataactaagctttatggggaatttgctgacccatttaaacttgcagagtgcaaacttgcaataattcattgtgccggttattcagaccctatattggtgcagacactttggcaagatatcatagagaaagaattgagtgacagtgtgacattgagctcctcggatagaatgcatgctcttagtctcaagattgttctccttggcaaaatttatgctggcacaccacgcttctttcctttagattttattgtacagtttttagaacagcaggtttgtactttgaactgggatgtgggcttcgtaatacagacaatgaatgaaattggagtaccattacctagactactagaagtttatgatcagttgttcaaatcacgggatccattctggaacagaatgaagaagccactgcaccttttggattgtatacatgtattattgataagatatgttgagaatcccagccaagttttaaattgtgaaaggagaagatttacaaatctctgcctggatgctgtttgtggttaccttgttgagctccagtctatgagctcgtcagtagcagtacaagccatcactgggaattttaaatctcttcaagctaaattagaacggcttcattaattactgtgatatactttcatccgttttatgatctgtaaaataaaaactcagctgggtccag

SEQ ID NO: 246180 - DNA, 4062 bp, Artificial Sequence
  derived and/or modified sequence
atgtacccggatctgagcgagcttctcatggtcagtgcgccaaataatccaaccgtgtccggaatgtctgacatggactatccgctccagggccctgggctcctgagtgtccctaacttgcccgagatctcctccattagacgggtgcccctccccccagaacttgtagaacagtttgggcatatgcagtgcaactgtatgatgggcgtgttccctcctataagtcgcgcttggctgacaatcgattcagatatttttatgtggaattatgaggacggaggtgaccttgcatacttcgatggcctgtcagagacaatcctggctgtcggactggtaaagccgaaagctggcatttttcaaccacatgtgcggcatctgctggttttggccacaccagtggacattgtaatactgggattaagctacgctaacttgcaaacagggtcaggggtgctgaatgattcacttagcgggggaatgcagttgctcccggaccccctgtatagccttccgacagacaatacatacctgcttactattacatcgactgataatgggaggattttcctggccggaaaagacggatgtctctacgaggtcgcataccaggctgaagcaggctggtttagccagcgttgccgtaagataaatcattcgaaaagctccctgtcgttcctggttcctagtctcctacagttcacctttagcgaggacgatcccatccttcagatcgccatcgataactctcgcaatattctctacactcggagtgagaagggggtgatccaagtatacgacctgggccaggatgggcagggaatgtctcgagtggcttcagtgtcacagaatgctattgtctccgctgctgggaacatcgccagaactatcgaccgcagtgtcttcaaacctattgtgcagatcgctgttatcgaaaattctgagagccttgactgccaattgctggccgtcacccacgcgggtgtgagactgtacttctccacatgtccgtttaggcagcccctggccagaccaaacaccctgacactggtccacgtacggctgccgcctggctttagcgcctcctccaccgtcgagaaaccctctaaagtgcacagggccttatatagtaagggcatactccttatggctgccagcgaaaacgaggataacgatatactctggtgcgtgaaccacgatactttcccattccagaagcctatgatggagacacagatgaccgcaggagttgacggccactcctgggcactctccgcaattgatgaattgaaagtggacaagattataaccccactgaacaaggatcacataccaattaccgactcccccgtagtggtgcagcaacatatgctacctcccaagaagtttgtcctgctgtcagctcaaggatctctgatgttccataagctgaggccggtggaccagttgaggcatctgctggtgagcaacgttggaggagatggcgaggaaatcgagagattcttcaaactgcatcaggaagaccaggcatgcgcaacgtgcttaattctagcatgcagcacagcagcatgcgaccgggaagtctcagcatgggcaaccagggccttctttcggtatggtggcgaggcccaaatgcggtttccaactacacttcctccacctagcaacgtagggcctattctgggcagccccgtatacagtagctccccagtgccgtccggctcaccttatccaaatccttcttttttgggtaccccgtcccatggtatccagccacctgccatgtctacaccagtctgcgcactcggaaatcctgcaacccaggccaccaacatgtcctgtgtgaccggacctgaaattgtgtactctggaaaacacaacggcatttgcatctacttctcccgcatcatgggtaatatatgggatgctagcctcgttgttgagaggatattcaagagcggtaatcgcgaaataaccgcaattgaatcttctgtcccctgccagctgctagagagcgtattacaggaactgaagggactccaagaatttttagatcgtaactctcagttcgccggaggccctctggggaatccaaacacgacagccaaagtccagcaacgattaatcggatttatgcgccctgaaaacgggaatccccagcagatgcagcaggaactccagcgcaaatttcacgaggcacagttgagtgagaaaatcagcctgcaagccattcagcagctggtcaggaagtcataccaggccttagccctttggaagctgttgtgtgaacatcaattcaccattatagtggctgagttacaaaaagagctccaagagcagttgaaaattactacgtttaaggacctcgtgatccgcgacaaggaactgaccggggctctgatcgcctcattaatcaactgttatatcagagacaacgctgccgttgatggcatatccctgcatctgcaggatatttgccctttattatattccaccgacgatgccatctgcagcaaggccaacgaactgctgcaaagatctcgccaagtacagaataagactgaaaaggaacgcatgcttcgtgagagccttaaagaataccagaagatttccaatcaggttgatctcagcaatgtgtgcgctcagtaccggcaggtcaggttctacgaaggggtggtggagttaagcctgacggccgctgagaagaaggaccctcagggcctgggcctgcacttctacaagcacggcgagccagaagaggatattgtcggcttgcaggctttccaggaacgtttgaactcctacaagtgtattacggatacgttgcaagagcttgtcaaccagtcgaaggccgcaccacagtctcccagcgtgccaaagaagcccggtcctcctgtgctgagttcagaccctaatatgttgtcaaatgaggaggccggacatcactttgagcagatgctcaaactgtcacagcgaagtaaggatgagctgttcagcatcgccctttacaactggttgattcaggtagacctcgctgacaaactcttgcaggtcgcgtccccctttttggagccacacctggtgaggatggccaaggtggaccagaaccgcgttaggtacatggacctgctttggcgatactacgagaaaaacagatctttctcaaacgctgccagggtcctgtccagactggccgacatgcacagcacagaaattagcctgcagcagcggcttgagtacatcgcaagggcgatcttgtccgccaaatcatccaccgctattagtagtatagcagccgatggcgagtttctacacgagctggaggagaaaatggaagtggccaggattcagctgcagatccaggaaacattacagagacagtactcccaccacagtagtgtgcaagatgccgtatctcagctggattccgaactcatggatattactaaactatatggcgaattcgcagatcccttcaagctggccgaatgtaaactggcgattattcattgtgctggttattctgaccctattctggtccagacactttggcaagacataattgagaaagagctttccgattccgtgactctgtcctccagtgacagaatgcacgccctcagcttgaagatcgtactcttgggcaaaatctacgccggaacacccagatttttccctttggacttcattgtgcaatttttggaacaacaggtttgcactctgaattgggacgtggggtttgtcatacagaccatgaatgagattggtgtccctcttcctcggctgctcgaggtgtacgaccagctgtttaagagccgcgaccctttctggaaccggatgaaaaaacctctccatctgctggattgtattcacgtcttattgatacggtatgtggagaacccctcccaggtcttgaattgcgaaagacggcgattcactaatttgtgtctcgatgccgtttgcggctacctggttgagcttcagagcatgtcttcgtccgtcgcagtacaagctataacgggtaatttcaaatcccttcaggctaagctggagagactgcattag

SEQ ID NO: 246181 - DNA, 4062 bp, Artificial Sequence
  derived and/or modified sequence
atgtaccccgacctgagcgagctgctgatggtgagcgcccccaacaaccccaccgtgagcggcatgagcgacatggactaccccctgcagggccccggcctgctgagcgtgcccaacctgcccgagatcagcagcatcagaagagtgcccctgccccccgagctggtggagcagttcggccacatgcagtgcaactgcatgatgggcgtgttcccccccatcagcagagcctggctgaccatcgacagcgacatcttcatgtggaactacgaggacggcggcgacctggcctacttcgacggcctgagcgagaccatcctggccgtgggcctggtgaagcccaaggccggcatcttccagccccacgtgagacacctgctggtgctggccacccccgtggacatcgtgatcctgggcctgagctacgccaacctgcagaccggcagcggcgtgctgaacgacagcctgagcggcggcatgcagctgctgcccgaccccctgtacagcctgcccaccgacaacacctacctgctgaccatcaccagcaccgacaacggcagaatcttcctggccggcaaggacggctgcctgtacgaggtggcctaccaggccgaggccggctggttcagccagagatgcagaaagatcaaccacagcaagagcagcctgagcttcctggtgcccagcctgctgcagttcaccttcagcgaggacgaccccatcctgcagatcgccatcgacaacagcagaaacatcctgtacaccagaagcgagaagggcgtgatccaggtgtacgacctgggccaggacggccagggcatgagcagagtggccagcgtgagccagaacgccatcgtgagcgccgccggcaacatcgccagaaccatcgacagaagcgtgttcaagcccatcgtgcagatcgccgtgatcgagaacagcgagagcctggactgccagctgctggccgtgacccacgccggcgtgagactgtacttcagcacctgccccttcagacagcccctggccagacccaacaccctgaccctggtgcacgtgagactgccccccggcttcagcgccagcagcaccgtggagaagcccagcaaggtgcacagagccctgtacagcaagggcatcctgctgatggccgccagcgagaacgaggacaacgacatcctgtggtgcgtgaaccacgacaccttccccttccagaagcccatgatggagacccagatgaccgccggcgtggacggccacagctgggccctgagcgccatcgacgagctgaaggtggacaagatcatcacccccctgaacaaggaccacatccccatcaccgacagccccgtggtggtgcagcagcacatgctgccccccaagaagttcgtgctgctgagcgcccagggcagcctgatgttccacaagctgagacccgtggaccagctgagacacctgctggtgagcaacgtgggcggcgacggcgaggagatcgagagattcttcaagctgcaccaggaggaccaggcctgcgccacctgcctgatcctggcctgcagcaccgccgcctgcgacagagaggtgagcgcctgggccaccagagccttcttcagatacggcggcgaggcccagatgagattccccaccaccctgcccccccccagcaacgtgggccccatcctgggcagccccgtgtacagcagcagccccgtgcccagcggcagcccctaccccaaccccagcttcctgggcacccccagccacggcatccagccccccgccatgagcacccccgtgtgcgccctgggcaaccccgccacccaggccaccaacatgagctgcgtgaccggccccgagatcgtgtacagcggcaagcacaacggcatctgcatctacttcagcagaatcatgggcaacatctgggacgccagcctggtggtggagagaatcttcaagagcggcaacagagagatcaccgccatcgagagcagcgtgccctgccagctgctggagagcgtgctgcaggagctgaagggcctgcaggagttcctggacagaaacagccagttcgccggcggccccctgggcaaccccaacaccaccgccaaggtgcagcagagactgatcggcttcatgagacccgagaacggcaacccccagcagatgcagcaggagctgcagagaaagttccacgaggcccagctgagcgagaagatcagcctgcaggccatccagcagctggtgagaaagagctaccaggccctggccctgtggaagctgctgtgcgagcaccagttcaccatcatcgtggccgagctgcagaaggagctgcaggagcagctgaagatcaccaccttcaaggacctggtgatcagagacaaggagctgaccggcgccctgatcgccagcctgatcaactgctacatcagagacaacgccgccgtggacggcatcagcctgcacctgcaggacatctgccccctgctgtacagcaccgacgacgccatctgcagcaaggccaacgagctgctgcagagaagcagacaggtgcagaacaagaccgagaaggagagaatgctgagagagagcctgaaggagtaccagaagatcagcaaccaggtggacctgagcaacgtgtgcgcccagtacagacaggtgagattctacgagggcgtggtggagctgagcctgaccgccgccgagaagaaggacccccagggcctgggcctgcacttctacaagcacggcgagcccgaggaggacatcgtgggcctgcaggccttccaggagagactgaacagctacaagtgcatcaccgacaccctgcaggagctggtgaaccagagcaaggccgccccccagagccccagcgtgcccaagaagcccggcccccccgtgctgagcagcgaccccaacatgctgagcaacgaggaggccggccaccacttcgagcagatgctgaagctgagccagagaagcaaggacgagctgttcagcatcgccctgtacaactggctgatccaggtggacctggccgacaagctgctgcaggtggccagccccttcctggagccccacctggtgagaatggccaaggtggaccagaacagagtgagatacatggacctgctgtggagatactacgagaagaacagaagcttcagcaacgccgccagagtgctgagcagactggccgacatgcacagcaccgagatcagcctgcagcagagactggagtacatcgccagagccatcctgagcgccaagagcagcaccgccatcagcagcatcgccgccgacggcgagttcctgcacgagctggaggagaagatggaggtggccagaatccagctgcagatccaggagaccctgcagagacagtacagccaccacagcagcgtgcaggacgccgtgagccagctggacagcgagctgatggacatcaccaagctgtacggcgagttcgccgaccccttcaagctggccgagtgcaagctggccatcatccactgcgccggctacagcgaccccatcctggtgcagaccctgtggcaggacatcatcgagaaggagctgagcgacagcgtgaccctgagcagcagcgacagaatgcacgccctgagcctgaagatcgtgctgctgggcaagatctacgccggcacccccagattcttccccctggacttcatcgtgcagttcctggagcagcaggtgtgcaccctgaactgggacgtgggcttcgtgatccagaccatgaacgagatcggcgtgcccctgcccagactgctggaggtgtacgaccagctgttcaagagcagagaccccttctggaacagaatgaagaagcccctgcacctgctggactgcatccacgtgctgctgatcagatacgtggagaaccccagccaggtgctgaactgcgagagaagaagattcaccaacctgtgcctggacgccgtgtgcggctacctggtggagctgcagagcatgagcagcagcgtggccgtgcaggccatcaccggcaacttcaagagcctgcaggccaagctggagagactgcactag

SEQ ID NO: 246182 - protein, 507 aa, Artificial Sequence
  derived and/or modified sequence
MARLLRSATWELFPWRGYCSQKAKGELCRDFVEALKAVVGGSHVSTAAVVREQHGRDESVHRCEPPDAVVWPQNVEQVSRLAALCYRQGVPIIPFGTGTGLEGGVCAVQGGVCVNLTHMDRILELNQEDFSVVVEPGVTRKALNAHLRDSGLWFPVDPGADASLCGMAATGASGTNAVRYGTMRDNVLNLEVVLPDGRLLHTAGRGRHFRFGFWPEIPHHTAWYSPCVSLGRRKSAAGYNLTGLFVGSEGTLGLITATTLRLHPAPEATVAATCAFPSVQAAVDSTVHILQAAVPVARIEFLDEVMMDACNRYSKLNCLVAPTLFLEFHGSQQALEEQLQRTEEIVQQNGASDFSWAKEAEERSRLWTARHNAWYAALATRPGCKGYSTDVCVPISRLPEIVVQTKEDLNASGLTGSIVGHVGDGNFHCILLVNPDDAEELGRVKAFAEQLGRRALALHGTCTGEHGIGMGKRQLLQEEVGAVGVETMRQLKAVLDPQGLMNPGKVL

SEQ ID NO: 246183 - DNA, 1524 bp, Artificial Sequence
  derived and/or modified sequence
atggcccggctcctgcggagtgctacctgggagctatttccctggagaggatactgctctcagaaagctaaaggggagctgtgcagagacttcgtggaagctcttaaggcagttgtcggaggttcccacgtgagcacagccgccgtagtgcgggagcagcacggacgagatgaatccgtccatcgctgcgagccaccagacgccgtggtgtggcctcagaacgtggagcaggtgagtaggctggcggccctttgttaccggcagggagttcccattattccttttggtaccggaacagggctggaaggtggggtttgtgccgtgcagggcggcgtgtgcgttaacctaacccatatggatagaattctcgagcttaaccaagaggattttagtgtggttgtcgaaccgggggttacgcgcaaagccttaaatgcgcatctcagagattcaggactgtggtttcctgtcgatcccggggcggacgcaagtctttgtggaatggccgccacaggcgcttccggaaccaatgcagtccgttatgggacaatgagagacaacgtcctaaatttagaggtggtgctgcctgatgggcgcctgttgcacacagccggtcggggcagacactttaggtttgggttctggcccgaaattccacaccacacagcctggtacagtccatgtgtaagtttaggcaggaggaaaagcgcagcgggatacaatctgaccggcctgttcgtcggctctgagggaacactcgggctgataaccgctacaacgcttaggcttcaccctgctccggaagccactgtcgccgctacatgcgccttcccttctgtgcaggcggctgtagattcgaccgtccatattctccaggccgccgtgcccgtggctcgcattgagtttctcgacgaggttatgatggatgcttgcaatcgatactctaagctaaactgtctggtggcccccacgcttttcctggaattccacggcagtcagcaggccctagaggagcagctgcagcgcactgaggaaattgtccagcagaacggtgcaagtgattttagttgggccaaggaagcagaggagagatccaggttatggacagcccggcacaacgcatggtatgcagcactggctacacgtccgggatgcaagggatactccacagatgtttgtgtgccaatttcaagactccccgaaatcgttgttcagacaaaggaagacctgaacgcatccgggctcaccggaagcatagtgggtcacgtgggtgacggtaatttccattgtatcctgctggtgaaccccgatgatgctgaagaactcggaagagtgaaggccttcgcggagcaactggggcgccgcgcattggctcttcacggaacctgcaccggggagcacggcattggaatgggcaaacgccaactgctgcaggaagaggtaggagcggtaggcgtcgaaaccatgagacagctgaaggctgttctcgacccgcagggtttgatgaatccaggaaaagtcctgtag

SEQ ID NO: 246184 - DNA, 2063 bp, Artificial Sequence
  derived and/or modified sequence
ggtcaccctgccacccagtgctcacaccctctggccagtgcctggctatggcccgactgctcaggtctgcaacctgggagctgttcccctggaggggctactgctcccagaaggcaaagggagagctctgcagggacttcgtagaggctctgaaggccgtggtgggcggctcccacgtgtccactgccgcggtggtccgagagcagcacgggcgcgatgagtcggtgcacaggtgcgaacctcctgatgctgtggtgtggccccagaacgtggagcaggtcagccggctggcagccctgtgctatcgccaaggtgtgcccatcatcccattcggcaccggcaccgggcttgagggtggcgtctgtgctgtgcagggcggcgtctgcgttaacctgacgcatatggaccgaatcctggagctgaaccaggaggacttctctgtggtggtggagccaggtgtcacccgcaaagccctcaacgcccacctgcgggacagcggcctctggtttcccgtggacccaggcgcggacgcctctctctgtggcatggcggccaccggggcgtcggggaccaacgcggtccgctacggcaccatgcgggacaacgtgctcaacctggaggtggtgctgcccgacgggcggctgctgcacacggcgggccgaggccggcatttccgcttcggcttctggccagaaatccctcatcacacagcctggtactcaccttgtgtgtccctgggacgtaggaagagtgcagccggctacaacctcacggggctcttcgtgggctccgaggggacgctgggcctcatcacagccaccaccctgcgcctgcaccctgcccctgaggccacagtggccgccacgtgtgcgttccccagtgtccaggctgctgtggacagcactgtacacatcctccaggctgcagtgcccgtagcccgcattgagttcctggatgaagtcatgatggatgcctgcaacaggtacagcaagctgaattgcttagtggcgcccacactcttcctggagttccatggctcccagcaggcactggaggagcagctgcagcgcacagaggagatagtccagcagaacggagcctctgacttctcctgggccaaggaggccgaggagcgcagccggctttggacagcacggcacaatgcctggtacgcagccctggccacgcggccaggctgcaagggctactccacggatgtgtgtgtgcccatctcccggctgccggagatcgtggtgcagaccaaggaggatctgaatgcctcaggactcacaggaagcattgtcgggcatgtgggtgacggcaacttccactgcatcctgctggtcaaccctgatgacgccgaggaactgggcagggtcaaggcttttgcagaacagctgggcaggcgggcactggctctccacggaacgtgcacgggggagcatggcatcggaatgggcaagcggcagctgctgcaggaggaggtgggcgccgtgggcgtggagaccatgcggcagctcaaggccgtgctagacccccaaggcctcatgaatccaggcaaagtgctgtgaagggggtctgagcacttagcccacaagttccctgactacggagccggttctggaacttttcttcatgccacggcccctgcaaggaaatagatgctgaggcagtcttcctgccagcgagcccactgtatctgggcccaaggccagagggcccagagagaagcctgagcaccgtgttacctccctggccctctggctggccccaggagcctttggttcagtaaacgacccagggtggttcccagcaaagctgcttcctctctgctcctacgcatcctgtcctggcgggaagagagcgtctgggtccattcaagactctgatgacacccctccccgaggcctcccactgccggggtcccaggacccttcccccttcacctggtgacaggaacactcctttcctggtatggaacgtgagctcccgtgacatgatgataggtcttctccttggggcctcccccaataaatctgtaataaacctgaaacccacctaca

SEQ ID NO: 246185 - DNA, 1524 bp, Artificial Sequence
  derived and/or modified sequence
atggcccggctgctgcggagcgccacctgggagctgttcccctggaggggctactgcagccagaaggccaagggggagctgtgccgggactttgtggaggccctgaaggctgtggtgggcggcagccacgtgtccacagctgctgtggtgcgggagcagcacggcagagatgaatctgtgcaccgctgtgagcccccagatgctgtggtgtggccccagaatgtggagcaggtgtcccggctggccgccctgtgctaccggcagggcgtgcccatcatcccctttggaactggaacaggcctggagggcggcgtgtgtgctgtgcagggcggcgtgtgtgtgaacctgacccacatggaccgcatcctggagctgaaccaggaggacttctctgtggtggtggagcccggggtgaccaggaaggccctgaatgcccacctgcgggacagcggcctgtggttccctgtggaccccggggctgatgccagcctgtgtggcatggccgccaccggggccagcggcaccaatgctgtgcgctatggcaccatgagggacaacgtgctgaacctggaggtggtgctgcctgatggccgcctgctgcacacagctggccggggccgccacttccgcttcggcttctggccagagatcccccaccacacagcctggtacagcccctgtgtgtccctgggccgcaggaagtctgctgctggctacaacctgaccggcctgtttgtgggcagcgagggcaccctgggcctcatcacagccaccaccctgcggctgcacccagcccctgaggccaccgtggccgccacctgtgccttccccagcgtgcaggccgctgtggacagcacagtgcacatcctgcaggccgctgtgcctgtggccagaattgagttcctggatgaggtgatgatggatgcctgcaaccgctacagcaagctgaactgcctggtggcccccaccctcttcctggagttccacggcagccagcaggccctggaggagcagctgcagaggacagaggagatcgtgcagcagaatggagccagtgacttctcctgggccaaggaggccgaggagaggagccggctgtggacagcccggcacaatgcctggtacgccgccctggccacccggcccggctgcaagggctacagcacagatgtgtgtgtgcccatcagccggctgcctgagatcgtggtgcagaccaaggaggacctgaatgccagcggcctgaccggcagcatcgtgggccacgtgggagatggcaacttccactgcatcctgctggtgaacccagatgatgctgaggagctgggccgggtgaaggcctttgctgagcagctgggcagaagagccctggccctgcacggcacctgcacaggagagcacggcatcggcatgggcaagaggcagctgctgcaggaggaggtgggcgctgtgggcgtggagaccatgaggcagctgaaggctgtgctggacccccagggcctgatgaaccctgggaaggtgctgtag

SEQ ID NO: 246186 - DNA, 1524 bp, Artificial Sequence
  derived and/or modified sequence
atggcccggctgctgcggagcgccacctgggagctgttcccctggagagggtactgctcccagaaagccaagggagagttatgccgagatttcgtggaagcgctcaaggctgttgtgggtggttctcacgtaagcactgcagccgtcgttcgcgagcaacacgggcgggacgagagcgtccacagatgcgagccccctgacgcagtcgtatggcctcaaaacgtcgaacaggtgagtaggcttgccgctctttgctataggcaaggagtgcccattataccattcgggacgggcacaggcctggagggcggggtatgtgcagtacaaggcggcgtctgtgttaacctcactcatatggataggatcttggagctgaaccaggaagacttttctgttgtggtggagccgggcgtgactagaaaagcactgaatgctcacctgagagactcaggactgtggtttcccgtggaccccggagcggatgcatcgctgtgtggaatggcagcgaccggcgccagcggcaccaatgccgtgcggtacggcaccatgcgcgataacgtcctgaatttggaagtggtgctgcctgatgggcggctgctccatactgccggtagaggtaggcattttagatttgggttctggcctgagataccccatcacacagcctggtattccccctgtgtgtctctgggccgtcgtaaatccgcagcaggatacaaccttacaggcttatttgttggttctgagggcacactgggtctgatcactgcaacaaccctgaggctccacccagcacctgaagcgacagtggcggcgacttgcgcgtttccatccgtgcaggccgccgtggacagcactgtgcatatcttgcaggcagccgtccccgtggcgcggatcgaatttctggatgaggtcatgatggacgcctgtaacagatactcgaagctcaactgtctggtcgcccccactctcttcttagaatttcatggcagccagcaagcgctcgaggaacagctccagaggaccgaagaaattgtgcagcagaatggggcctcggatttttcatgggctaaggaggcggaggaacgaagcaggctgtggacagcgagacacaatgcttggtacgctgcactggcaactcgccctggctgtaagggttactcgaccgacgtatgcgtgcctatcagcaggctgccagagatcgtagtgcagaccaaagaggacctaaacgcatcaggtttaacagggtccatcgtcggacacgttggcgacggaaatttccactgtattctgttggtaaatcctgacgacgccgaggagttgggtagggtgaaggcattcgccgagcagctgggccgcagggccctggcgctgcacggcacttgcactggcgagcatgggattggaatgggcaaacggcaactattgcaggaagaagtaggagctgtcggggtggagacaatgagacagctcaaagcagttttagatccgcagggtcttatgaaccctggaaaggtgctctag

SEQ ID NO: 246187 - DNA, 1524 bp, Artificial Sequence
  derived and/or modified sequence
atggctaggctcttgcgatcagccacctgggaactctttccctggcgtggttattgttctcagaaggccaagggagaactttgtcgggatttcgttgaagcattgaaagcagtggtcgggggaagtcatgtttccaccgccgctgtagttagagaacagcacggcagagatgaatccgtgcacaggtgtgagcccccagacgccgtggtgtggcctcagaacgtggagcaggtctcccgtcttgcagcattatgctatcgccagggtgtgcctataattccctttgggaccggcacaggactcgagggaggggtgtgcgccgtgcagggaggcgtgtgtgtgaacctaacccacatggacaggattctcgagctcaaccaggaagacttcagcgtcgtggttgaaccgggagttacacggaaagcacttaacgctcacttacgcgattcaggattgtggtttcctgtggacccgggtgcagacgccagtctctgcgggatggcggcaactggggctagcggcactaacgccgtgcgatacggcacgatgagggataatgtgctgaacttggaggtggtcctgccggatggtaggctcctccacaccgcgggtagaggcaggcattttcgctttggattttggcccgagatcccccatcatacggcttggtatagcccatgcgtcagtctcggtcgacgaaagagtgccgctggctataatcttaccggcctgttcgtcggatccgaaggaaccttaggactaattacagctactacactgcggctacaccccgctcccgaggcgaccgtggccgctacttgcgcttttccttccgtccaggcggcagtagatagtacagttcacattctccaagccgcagtgcccgtggctagaatcgaatttctcgatgaggtcatgatggacgcttgtaacagatatagcaaactgaattgcttggtggcccctacattatttctggagttccatggatcccaacaggccctggaagaacagcttcagaggaccgaagaaatcgtgcagcagaacggcgcatctgacttttcatgggctaaggaagcagaggaacggtcaagactttggaccgccagacataatgcatggtatgcagccctcgccaccaggcccggatgcaagggatacagcaccgatgtctgtgtgcccattagccgccttccagaaattgtcgtgcagactaaggaagatctgaacgcttcagggctcacaggtagcatcgtgggacatgtgggtgatggtaacttccattgcattcttctagtaaatcctgatgacgcagaagagttgggacgggtcaaggcttttgcggagcagctgggcaggcgcgctctggccttgcacggaacctgcacgggagagcacggtattggcatgggcaagcggcagctgctgcaagaagaagtaggcgcagtgggcgtagaaaccatgaggcagctgaaggctgtgctcgacccccaggggctgatgaaccctggtaaagtcctatag

SEQ ID NO: 246188 - DNA, 1524 bp, Artificial Sequence
  derived and/or modified sequence
atggccagactgctgagaagcgccacctgggagctgttcccctggagaggctactgcagccagaaggccaagggcgagctgtgcagagacttcgtggaggccctgaaggccgtggtgggcggcagccacgtgagcaccgccgccgtggtgagagagcagcacggcagagacgagagcgtgcacagatgcgagccccccgacgccgtggtgtggccccagaacgtggagcaggtgagcagactggccgccctgtgctacagacagggcgtgcccatcatccccttcggcaccggcaccggcctggagggcggcgtgtgcgccgtgcagggcggcgtgtgcgtgaacctgacccacatggacagaatcctggagctgaaccaggaggacttcagcgtggtggtggagcccggcgtgaccagaaaggccctgaacgcccacctgagagacagcggcctgtggttccccgtggaccccggcgccgacgccagcctgtgcggcatggccgccaccggcgccagcggcaccaacgccgtgagatacggcaccatgagagacaacgtgctgaacctggaggtggtgctgcccgacggcagactgctgcacaccgccggcagaggcagacacttcagattcggcttctggcccgagatcccccaccacaccgcctggtacagcccctgcgtgagcctgggcagaagaaagagcgccgccggctacaacctgaccggcctgttcgtgggcagcgagggcaccctgggcctgatcaccgccaccaccctgagactgcaccccgcccccgaggccaccgtggccgccacctgcgccttccccagcgtgcaggccgccgtggacagcaccgtgcacatcctgcaggccgccgtgcccgtggccagaatcgagttcctggacgaggtgatgatggacgcctgcaacagatacagcaagctgaactgcctggtggcccccaccctgttcctggagttccacggcagccagcaggccctggaggagcagctgcagagaaccgaggagatcgtgcagcagaacggcgccagcgacttcagctgggccaaggaggccgaggagagaagcagactgtggaccgccagacacaacgcctggtacgccgccctggccaccagacccggctgcaagggctacagcaccgacgtgtgcgtgcccatcagcagactgcccgagatcgtggtgcagaccaaggaggacctgaacgccagcggcctgaccggcagcatcgtgggccacgtgggcgacggcaacttccactgcatcctgctggtgaaccccgacgacgccgaggagctgggcagagtgaaggccttcgccgagcagctgggcagaagagccctggccctgcacggcacctgcaccggcgagcacggcatcggcatgggcaagagacagctgctgcaggaggaggtgggcgccgtgggcgtggagaccatgagacagctgaaggccgtgctggacccccagggcctgatgaaccccggcaaggtgctgtag

SEQ ID NO: 246189 - protein, 959 aa, Artificial Sequence
  derived and/or modified sequence
MEVTCLLLLALIPFHCRGQGVYAPAQAQIVHAGQACVVKEDNISERVYTIREGDTLMLQCLVTGHPRPQVRWTKTAGSASDKFQETSVFNETLRIERIARTQGGRYYCKAENGVGVPAIKSIRVDVQYLDEPMLTVHQTVSDVRGNFYQEKTVFLRCTVNSNPPARFIWKRGSDTLSHSQDNGVDIYEPLYTQGETKVLKLKNLRPQDYASYTCQVSVRNVCGIPDKAITFRLTNTTAPPALKLSVNETLVVNPGENVTVQCLLTGGDPLPQLQWSHGPGPLPLGALAQGGTLSIPSVQARDSGYYNCTATNNVGNPAKKTVNLLVRSMKNATFQITPDVIKESENIQLGQDLKLSCHVDAVPQEKVTYQWFKNGKPARMSKRLLVTRNDPELPAVTSSLELIDLHFSDYGTYLCMASFPGAPVPDLSVEVNISSETVPPTISVPKGRAVVTVREGSPAELQCEVRGKPRPPVLWSRVDKEAALLPSGLPLEETPDGKLRLERVSRDMSGTYRCQTARYNGFNVRPREAQVQLNVQSPCFPPEVEPSSQDVRQALGRPVLLRCSLLRGSPQRIASAVWRFKGQLLPPPPVVPAAAEAPDHAELRLDAVTRDSSGSYECSVSNDVGSAACLFQVSAKAYSPEFYFDTPNPTRSHKLSKNYSYVLQWTQREPDAVDPVLNYRLSIRQLNQHNAVVKAIPVRRVEKGQLLEYILTDLRVPHSYEVRLTPYTTFGAGDMASRIIHYTELLALRTLSSDNTCHFEDEKICGYTQDLTDNFDWTRQNALTQNPKRSPNTGPPTDISGTPEGYYMFIETSRPRELGDRARLVSPLYNASAKFYCVSFFYHMYGKHIGSLNLLVRSRNKGALDTHAWSLSGNKGNVWQQAHVPISPSGPFQIIFEGVRGPGYLGDIAIDDVTLKKGECPRKQTDPNKVVVMPGSGAPCQSSPQLWGPMAIFLLALQR

SEQ ID NO: 246190 - protein, 955 aa, Artificial Sequence
  derived and/or modified sequence
MEVTCLLLLALIPFHCRGQGVYAPAQAQIVHAGQACVVKEDNISERVYTIREGDTLMLQCLVTGHPRPQVRWTKTAGSASDKFQETSVFNETLRIERIARTQGGRYYCKAENGVGVPAIKSIRVDVQYLDEPMLTVHQTVSDVRGNFYQEKTVFLRCTVNSNPPARFIWKRGSDTLSHSQDNGVDIYEPLYTQGETKVLKLKNLRPQDYASYTCQVSVRNVCGIPDKAITFRLTNTTAPPALKLSVNETLVVNPGENVTVQCLLTGGDPLPQLQWSHGPGPLPLGALAQGGTLSIPSVQARDSGYYNCTATNNVGNPAKKTVNLLVRSMKNATFQITPDVIKESENIQLGQDLKLSCHVDAVPQEKVTYQWFKNGKPARMSKRLLVTRNDPELPAVTSSLELIDLHFSDYGTYLCMASFPGAPVPDLSVEVNISSETVPPTISVPKGRAVVTVREGSPAELQCEVRGKPRPPVLWSRVDKEAALLPSGLPLEETPDGKLRLERVSRDMSGTYRCQTARYNGFNVRPREAQVQLNVQFPPEVEPSSQDVRQALGRPVLLRCSLLRGSPQRIASAVWRFKGQLLPPPPVVPAAAEAPDHAELRLDAVTRDSSGSYECSVSNDVGSAACLFQVSAKAYSPEFYFDTPNPTRSHKLSKNYSYVLQWTQREPDAVDPVLNYRLSIRQLNQHNAVVKAIPVRRVEKGQLLEYILTDLRVPHSYEVRLTPYTTFGAGDMASRIIHYTEPINSPNLSDNTCHFEDEKICGYTQDLTDNFDWTRQNALTQNPKRSPNTGPPTDISGTPEGYYMFIETSRPRELGDRARLVSPLYNASAKFYCVSFFYHMYGKHIGSLNLLVRSRNKGALDTHAWSLSGNKGNVWQQAHVPISPSGPFQIIFEGVRGPGYLGDIAIDDVTLKKGECPRKQTDPNKVVVMPGSGAPCQSSPQLWGPMAIFLLALQR

SEQ ID NO: 246191 - DNA, 2880 bp, Artificial Sequence
  derived and/or modified sequence
atggaagtaacttgcttgctgctccttgccctcattccattccattgccgaggccagggggtgtatgctcccgcccaagcgcagatcgtgcacgccggccaggcctgtgtggtcaaggaggacaacatctcagagcgagtgtatacaatcagggagggagatactctgatgcttcaatgtctcgtaactggccatcctaggccccaagttcgttggaccaaaaccgccggctcagctagtgataagtttcaggagacatctgtttttaatgaaaccctccgcattgagaggatcgcccggacacaaggagggcgatactactgcaaggctgaaaatggggtgggggtgccagccattaaatcgattcgcgttgacgtccagtatctcgatgaacccatgctcacagttcaccagacggtcagtgacgtgagggggaatttctaccaggagaaaaccgtcttcctgcgatgcacagtaaactcaaaccccccagccagatttatatggaaacgcggcagcgataccctgagccattctcaggataatggagttgacatctacgagcccttatatactcagggagagaccaaggtgttgaagctgaagaacttgaggccgcaggactacgcatcttatacatgccaggtctctgtgcgaaacgtttgtggaatccccgataaagctattaccttccggctgactaacactacagcaccccccgctctcaagctcagcgtcaatgagacactggtggtgaatccaggcgagaatgtcaccgttcagtgcctgcttacgggcggcgatcccttgccccagctccaatggtctcatgggcccggtcccctccctctgggggctctcgcacagggtggcaccctgtcaatacctagtgtgcaggccagggacagtggatactacaactgtaccgctactaacaacgttgggaaccctgcaaagaaaaccgtcaacttactcgtccggtccatgaaaaacgctacattccagattaccccagacgtcattaaggaatccgagaatatccagttagggcaggacttgaagctttcttgtcacgtggacgctgtaccccaggagaaagtcacataccaatggttcaagaatggaaaacccgccaggatgtctaagcggctgctcgtcacgagaaacgacccggaacttcccgctgttacctcttctcttgagttaattgacctccacttttccgattatggaacttatctttgtatggcatcctttccgggcgctccggtgcccgacctgtcagttgaagtgaatatctcatccgaaaccgtgccacctacaatctccgtacccaagggcagggctgtggtcaccgttcgcgaagggagcccagccgaactgcaatgcgaagttaggggaaagccccggccacctgtgttgtggagccgggtggataaggaagccgccctccttccctctggactgccattggaggagactccggatggtaaactgagactagagcgggtgtctcgtgatatgagcgggacatacagatgccagaccgcccggtataatgggttcaacgtgcgacctagggaggcccaggttcagctgaatgtgcagagcccttgttttccacccgaagtcgaaccttctagtcaggacgtccgccaggctctcggcagacctgtgctgttgagatgtagcctgttacggggctctccccagcgcatagcctcagctgtctggcgttttaaagggcagcttctgcctccccctcccgtggtgcccgctgccgccgaggccccggaccacgcggaattgagattggatgctgtcacacgggattctagcggctcatatgagtgttcggtctctaacgatgtggggagcgccgcctgcctgttccaggtctccgcaaaagcttactcgccggagttctacttcgacacccccaaccccaccaggagtcataaactcagcaagaattactcatacgtactgcagtggactcagcgagaacccgatgccgtggatcctgttttaaactaccgcttgtcgatccgacagctgaatcagcataatgctgtcgtcaaggctatccctgttcggcgagttgagaagggccagcttttggagtacatcttgaccgacttgagggtgccacatagctacgaggtgcgcctcaccccatataccacctttggggccggagacatggccagccgaataattcattataccgagctgcttgccttgcggactctatcttccgacaatacctgtcactttgaggacgaaaagatctgtggctacacgcaggacctgaccgacaattttgactggacgagacagaatgcgttaacgcagaaccccaagcgctcccctaatactgggcctccgaccgatattagcggcactcctgagggatactatatgtttatcgaaactagcaggccccgagagctgggagaccgagcgagattggtctccccgttgtataatgccagcgctaagttctattgcgtctcatttttctatcacatgtatggcaaacatatcggttcgctcaatctcctagtgaggagccgcaataaaggtgcactggatacccatgcttggtcgctttccggcaataagggcaacgtctggcaacaggcacatgtacctattagcccctctggtcccttccagattatttttgaaggcgtgcggggacctggatacttgggggacattgctatcgacgacgtgaccctcaagaagggagagtgcccaaggaagcagactgatcccaataaggtggtggttatgcctggctctggcgctccctgccagtcttctccgcagctgtggggccctatggccatattcctcctcgcgctccaacgatag

SEQ ID NO: 246192 - DNA, 2868 bp, Artificial Sequence
  derived and/or modified sequence
atggaggtcacctgcctcttacttctggccctaattccgttccactgcaggggccaaggtgtgtatgcacctgcacaggcacaaatcgtgcacgccggccaggcctgcgtagtgaaggaggataacattagcgagagagtgtatacaattcgtgaaggtgatactctgatgctgcaatgcttagtgactgggcaccccagacctcaggtgaggtggacaaagactgcaggttccgcttccgataaattccaggaaacatctgtcttcaacgagaccctgcggattgagaggatagccaggactcaaggaggtcgctattattgcaaggcagagaacggagtgggggttcctgccattaagtccatccgggttgatgtgcagtaccttgatgagccaatgctgacagtccatcagaccgtgagcgacgtgcgaggaaatttctaccaggagaagactgtgtttctgagatgtaccgtgaactccaaccctcctgccagatttatttggaagcggggctccgataccctgagccatagtcaggacaacggggttgatatttacgagccactctacacccagggcgaaacaaaagtgctgaagctaaaaaatcttcgccctcaggactacgcatcatacacctgccaagtgagcgttcgcaacgtttgtgggattccagataaagccatcaccttcaggctgacgaacaccaccgccccacccgccttgaagctgagcgtgaatgagaccctggtggtgaatcccggagagaacgtcacggtccaatgtcttttaaccggcggcgacccgctgccccaactccagtggtcccacggacccgggccactgcccctcggcgcactcgcacagggcggcacgctgagtatcccctccgtgcaggccagggactctggatattacaactgtaccgcaactaataatgtcggcaacccagctaagaagactgtgaacctactcgtgcggagcatgaaaaatgccacttttcagataacccctgatgttattaaggaatctgagaatattcagctcggacaggatttgaaactgtcctgtcacgttgacgccgtgccccaggaaaaagtgacatatcaatggtttaagaacggcaaaccagctcgtatgagtaagagactgcttgtgacaagaaatgatcccgagctgcctgccgtcaccagtagtctggaacttatagacttacacttctccgactatgggacatacctttgcatggccagttttccgggggccccagtgccagacctcagcgtcgaggttaacattagttccgaaaccgtcccacccacaatctccgttcccaaaggaagagccgttgtgacagtcagagaggggtccccggctgagctgcaatgcgaagttagagggaagccgaggcctccggtcttgtggagcagagtggacaaagaggcggctctactcccctccggtctcccactagaagaaacccctgatggaaagttgaggctcgagagagtgagccgggacatgagcggtacgtacagatgccaaacagcccgctacaacgggttcaacgtccgtcctcgcgaggcccaggtgcaacttaacgtgcagttcccccccgaagtcgaaccttcatcccaggacgtccgtcaggccctgggccggcccgtccttttacgatgtagtctccttagaggatccccccagcgaatagcctcagcagtgtggcgattcaagggacagctcctgccacctcccccagtcgtgccagccgctgccgaggcacctgatcatgccgaactccgtttggatgcggtcacgagagactcatcagggtcttatgagtgcagtgtcagcaatgacgtgggttcagccgcctgcttgtttcaggtgagtgcaaaagcatacagccccgagttctattttgacacccctaaccccactagatcacacaaactttccaagaattactcctacgtcctgcaatggactcaaagagaacctgacgctgttgacccagtgttaaattaccgcctgagcattcgccagttgaaccagcacaacgccgtggtcaaagccatacccgtgcgccgtgtcgagaaaggacagttgcttgaatacatactgactgatctgagggtaccacatagctacgaggtccgactcaccccttatactactttcggggcgggcgatatggcttctaggattatccactatacggagcccattaactcaccaaacctgagtgataatacatgccactttgaagatgagaaaatttgtggctacacccaggacctcacagataacttcgactggacacgtcagaatgcacttacccagaatcctaaaaggtctcctaacaccggccccccgactgacatcagcggtaccccagaaggctactatatgtttatcgaaacctcccgcccaagggagctcggggatagggctaggctggtaagtccactgtacaatgcctcagccaagttctattgcgtttctttcttttaccacatgtacggtaaacacataggctcactgaatcttcttgttcgtagcagaaacaagggggctttggacacgcacgcctggagcctgtccggaaataagggtaatgtgtggcagcaggcacacgttcctatttctccatccggcccttttcaaatcattttcgaaggcgtcagaggacctggatatctgggcgatatcgcgattgacgacgtcaccctgaagaaaggtgagtgcccccgtaaacagaccgatcctaataaggtggtagtgatgcccggctccggtgccccttgccagtcaagcccacaactctggggccccatggcaatattcctcctggctttgcaacgatag

SEQ ID NO: 246193 - DNA, 2880 bp, Artificial Sequence
  derived and/or modified sequence
atggaggtgacctgcctgctgctgctggccctgatccccttccactgccggggccagggcgtgtatgccccagcccaggcccagatcgtgcacgccggccaggcctgtgtggtgaaggaggacaacatcagcgagcgggtgtacaccatccgggagggggacaccctgatgctgcagtgcctggtgacaggccacccccggccccaggtgcgctggaccaagacagctggcagcgccagtgacaagttccaggagacctctgtgttcaatgagaccctgagaattgagcgcatcgcccggacccagggcggccgctactactgcaaggcagaaaatggagtgggcgtgcctgccatcaagagcatccgggtggatgtgcagtacctggatgagcccatgctgactgtgcaccagacagtgtctgatgtgcggggcaacttctaccaggagaagacagtgttcctgcgctgcaccgtgaacagcaaccccccagcccgcttcatctggaagaggggcagtgacaccctgagccacagccaggacaacggggtggacatctatgagcccctgtacacccagggcgagaccaaggtgctgaagctgaagaacctgcggccccaggactatgccagctacacctgccaggtgtctgtgagaaatgtgtgtggcatcccagacaaggccatcaccttccggctgaccaacaccacagcccccccagccctgaagctgtctgtgaatgagaccctggtggtgaaccctggagaaaatgtgacagtgcagtgcctgctgactggaggagaccccctgccccagctgcagtggagccacggccctggccccctgcccctgggcgccctggcccagggcggcaccctgagcatccccagcgtgcaggcccgggacagcggctactacaactgcacagccaccaacaacgtgggcaacccagccaagaagacagtgaacctgctggtgcgctccatgaagaatgccaccttccagatcaccccagatgtgatcaaggagagcgagaacatccagctgggccaggacctgaagctgagctgccacgtggatgctgtgccccaggagaaggtgacctaccagtggttcaagaatggcaagccagccaggatgagcaagaggctgctggtgaccagaaatgaccctgagctgcctgctgtgaccagcagcctggagctgattgacctgcacttcagtgactatggcacctacctgtgcatggccagcttccctggggcccctgtgcctgacctgtctgtggaggtgaacatcagcagcgagaccgtgccccccaccatctctgtgcccaagggccgggctgtggtgacagtgcgggagggcagccctgctgagctgcagtgtgaggtgcggggcaagcccaggcctcctgtgctgtggagccgggtggacaaggaggccgccctgctgcccagcggcctgcccctggaggagaccccagatggcaagctgcggctggagcgggtgtcccgggacatgagcggcacctaccgctgccagacagcccgctacaacggcttcaacgtgcggccccgggaggcccaggtgcagctgaatgtgcagagcccctgcttccccccagaggtggagcccagcagccaggatgtgcggcaggccctgggccggcctgtgctgctgcgctgcagcctgctgcggggcagcccccagagaattgccagcgctgtgtggaggttcaagggccagctgctgcccccacctcctgtggtgcctgctgctgctgaggccccagaccatgctgagctgcggctggatgctgtgacccgggacagcagcggcagctatgaatgttctgtgtccaatgatgtgggcagcgctgcctgcctcttccaggtgtctgccaaggcctacagccctgagttctactttgacacccccaaccccaccaggagccacaagctgagcaagaactacagctatgtgctgcagtggacccagcgggagccagatgctgtggaccctgtgctgaactaccgcctgagcatccggcagctgaaccagcacaatgctgtggtgaaggccatccctgtgagaagagtggagaagggccagctgctggagtacatcctgacagacctgcgggtgccccacagctatgaggtgcggctgaccccctacaccaccttcggggccggggacatggccagccgcatcatccactacacagagctgctggccctgcggaccctgagcagtgacaacacctgccactttgaagatgagaagatctgtggctacacccaggacctgacagacaactttgactggacccggcagaatgccctgacccagaaccccaagaggagccccaacacaggccccccaacagacatcagcggcaccccagagggctactacatgttcatcgagaccagccggccccgggagctgggggaccgggcccggctggtgagccccctgtacaatgccagcgccaagttctactgtgtgtccttcttctaccacatgtatggcaagcacatcggcagcctgaacctgctggtgcgcagcagaaataaaggagccctggacacccacgcctggagcctgagcggcaacaagggaaatgtgtggcagcaggcccacgtgcccatcagccccagcggccccttccagatcatctttgagggcgtgcggggccctggctacctgggggacatcgccattgatgatgtgaccctgaagaagggagaatgtcccaggaagcagacagaccccaacaaggtggtggtgatgcctggcagcggggccccctgccagagcagcccccagctgtggggccccatggccatcttcctgctggccctgcagaggtag

SEQ ID NO: 246194 - DNA, 2868 bp, Artificial Sequence
  derived and/or modified sequence
atggaggtgacctgcctgctgctgctggccctgatccccttccactgccggggccagggcgtgtatgccccagcccaggcccagatcgtgcacgccggccaggcctgtgtggtgaaggaggacaacatcagcgagcgggtgtacaccatccgggagggggacaccctgatgctgcagtgcctggtgacaggccacccccggccccaggtgcgctggaccaagacagctggcagcgccagtgacaagttccaggagacctctgtgttcaatgagaccctgagaattgagcgcatcgcccggacccagggcggccgctactactgcaaggcagaaaatggagtgggcgtgcctgccatcaagagcatccgggtggatgtgcagtacctggatgagcccatgctgactgtgcaccagacagtgtctgatgtgcggggcaacttctaccaggagaagacagtgttcctgcgctgcaccgtgaacagcaaccccccagcccgcttcatctggaagaggggcagtgacaccctgagccacagccaggacaacggggtggacatctatgagcccctgtacacccagggcgagaccaaggtgctgaagctgaagaacctgcggccccaggactatgccagctacacctgccaggtgtctgtgagaaatgtgtgtggcatcccagacaaggccatcaccttccggctgaccaacaccacagcccccccagccctgaagctgtctgtgaatgagaccctggtggtgaaccctggagaaaatgtgacagtgcagtgcctgctgactggaggagaccccctgccccagctgcagtggagccacggccctggccccctgcccctgggcgccctggcccagggcggcaccctgagcatccccagcgtgcaggcccgggacagcggctactacaactgcacagccaccaacaacgtgggcaacccagccaagaagacagtgaacctgctggtgcgctccatgaagaatgccaccttccagatcaccccagatgtgatcaaggagagcgagaacatccagctgggccaggacctgaagctgagctgccacgtggatgctgtgccccaggagaaggtgacctaccagtggttcaagaatggcaagccagccaggatgagcaagaggctgctggtgaccagaaatgaccctgagctgcctgctgtgaccagcagcctggagctgattgacctgcacttcagtgactatggcacctacctgtgcatggccagcttccctggggcccctgtgcctgacctgtctgtggaggtgaacatcagcagcgagaccgtgccccccaccatctctgtgcccaagggccgggctgtggtgacagtgcgggagggcagccctgctgagctgcagtgtgaggtgcggggcaagcccaggcctcctgtgctgtggagccgggtggacaaggaggccgccctgctgcccagcggcctgcccctggaggagaccccagatggcaagctgcggctggagcgggtgtcccgggacatgagcggcacctaccgctgccagacagcccgctacaacggcttcaacgtgcggccccgggaggcccaggtgcagctgaatgtgcagttccccccagaggtggagcccagcagccaggatgtgcggcaggccctgggccggcctgtgctgctgcgctgcagcctgctgcggggcagcccccagagaattgccagcgctgtgtggaggttcaagggccagctgctgcccccacctcctgtggtgcctgctgctgctgaggccccagaccacgccgagctgcggctggatgctgtgacccgggacagcagcggcagctatgagtgcagcgtgtccaatgatgtgggcagcgctgcctgcctcttccaggtgtctgccaaggcctacagccctgagttctactttgacacccccaaccccaccaggagccacaagctgagcaagaactacagctatgtgctgcagtggacccagcgggagccagatgctgtggaccctgtgctgaactaccgcctgagcatccggcagctgaaccagcacaatgctgtggtgaaggccatccctgtgcggcgggtggagaagggccagctgctggagtacatcctgacagacctgcgggtgccccacagctatgaggtgcggctgaccccctacaccacctttggagctggggacatggccagccgcatcatccactacacagagcccatcaacagccccaacctgagtgacaacacctgccactttgaagatgagaagatctgtggctacacccaggacctgacagacaactttgactggacccggcagaatgccctgacccagaaccccaagaggagccccaacacaggccccccaacagacatcagcggcaccccagagggctactacatgttcatcgagaccagccggccccgggagctgggggaccgggcccggctggtgagccccctgtacaatgccagcgccaagttctactgtgtgtccttcttctaccacatgtatggcaagcacatcggcagcctgaacctgctggtgcgcagcagaaataaaggagccctggacacccacgcctggagcctgagcggcaacaagggaaatgtgtggcagcaggcccacgtgcccatcagccccagcggccccttccagatcatctttgagggcgtgcggggccctggctacctgggggacatcgccattgatgatgtgaccctgaagaagggagaatgtcccaggaagcagacagaccccaacaaggtggtggtgatgcctggcagcggggccccctgccagagcagcccccagctgtggggccccatggccatcttcctgctggccctgcagaggtag

SEQ ID NO: 246195 - DNA, 8919 bp, Artificial Sequence
  derived and/or modified sequence
ggagagcgagagaccgaacgaggagacgcgaggaggagggaggaggaagagagggagggaggcgggaggagcgcggaatgaaaagctcggaggggcgaaaaagcagcacagcaaagcccaagttgctgagcgagcggagcgctcccgcggcccggagccgagcggccgccgcgccccggagcccggcccggccccgcccgctctgggcccccgcaggccaaggccgccgggcgggggcggggacgaccaacttggggcgcggcgtagccccgctctcccgagagctcggagcccgggagggctacggccgcggccagacggcgggagaggagcgcggcgagcggaggcggcgagcggcgcccgcgccgcagccccggcctgggcgagagcgcgaatatttttcaaaagactcaaactttcctcctttccccgttttctggggcccttcttgcctggaattgctctccagattcccgcggggcgccgggctgctattcttcccccgggtttatcggcggctcggctaacttcacggacccggggacccgcggcgctcgtccctcggccgaacccagcccgcgctgctccccggatcaggagggccgggcccggggctgcttcgccgccgcgagtgctttcagcccggccccctggagtcgggccgctgagcccacggcagcggccgcaggactggaaacagcagattgattaactcgagcggagccccggcctccccgactccgctccgctgaggggcggccccagtgcggggaaacgacaagtttgtcagtcgtccgtggcctgttggatcgaagcgccgcctccgccgccgagaggtccccggcgcctagcatcccgcgcggacggccctgggtacccggggcggctcggcggccgggctcctcgggtcggggcgctggctgctgtgccgggcgcgccgaggcacccggggctgggccagcgccccctgcgtccccacgcgggcagcggccccgccggaggagaaacacgggtcgccgccacctccgcctcttcagtctcctggtcttcgtcgccgctctctctctcacctctcagggaaagggggggacataggggcgtcgcggggccccggcgaatgcgccccccgccgcctctcgggctgcgccgcctcgcggggatgaagcaccggccgtgaagatggaggtgacctgccttctacttctggcgctgatccccttccactgccggggacaaggagtctacgctccagcccaggcgcagatcgtgcatgcgggccaggcatgtgtggtgaaagaggacaatatcagcgagcgtgtctacaccatccgggagggggacaccctcatgctgcagtgccttgtaacagggcaccctcgaccccaggtacggtggaccaagacggcaggtagcgcctcggacaagttccaggagacatcggtgttcaacgagacgctgcgcatcgagcgtattgcacgcacgcagggcggccgctactactgcaaggctgagaacggcgtgggggtgccggccatcaagtccatccgcgtggacgtgcagtacctggatgagccaatgctgacggtgcaccagacggtgagcgatgtgcgaggcaacttctaccaggagaagacggtgttcctgcgctgtactgtcaactccaacccgcctgcccgcttcatctggaagcggggttccgataccctatcccacagccaggacaatggggttgacatctatgagcccctctacactcagggggagaccaaggtcctgaagctgaagaacctgcggccccaggactatgccagctacacctgccaggtgtctgtgcgtaacgtgtgcggcatcccagacaaggccatcaccttccggctcaccaacaccacggcaccaccagccctgaagctgtctgtgaacgaaactctggtggtgaaccctggggagaatgtgacggtgcagtgtctgctgacaggcggtgatcccctcccccagctgcagtggtcccatgggcctggcccactgcccctgggtgctctggcccagggtggcaccctcagcatcccttcagtgcaggcccgggactctggctactacaactgcacagccaccaacaatgtgggcaaccctgccaagaagactgtcaacctgctggtgcgatccatgaagaacgctacattccagatcactcctgacgtgatcaaagagagtgagaacatccagctgggccaggacctgaagctatcgtgccacgtggatgcagtgccccaggagaaggtgacctaccagtggttcaagaatggcaagccggcacgcatgtccaagcggctgctggtgacccgcaatgatcctgagctgcccgcagtcaccagcagcctagagctcattgacctgcacttcagtgactatggcacctacctgtgcatggcttctttcccaggggcacccgtgcccgacctcagcgtcgaggtcaacatctcctctgagacagtgccgcccaccatcagtgtgcccaagggtagggccgtggtgaccgtgcgcgagggatcgcctgccgagctgcaatgcgaggtgcggggcaagccgcggccgccagtgctctggtcccgcgtggacaaggaggctgcactgctgccctcggggctgcccctggaggagactccggacgggaagctgcggctggagcgagtgagccgagacatgagcgggacctaccgctgccagacggcccgctataatggcttcaacgtgcgcccccgtgaggcccaggtgcagctgaacgtgcagtccccatgcttcccgccggaggtggagcccagttcccaggacgtgcgccaggcgctgggccggcccgtgctcctgcgctgctcgctgctgcgaggcagcccccagcgcatcgcctcggctgtgtggcgtttcaaagggcagctgctgccgccgccgcctgttgttcccgccgccgccgaggcgccggatcacgcggagctgcgcctcgacgccgtaactcgcgacagcagcggcagctacgagtgcagcgtctccaacgatgtgggctcggctgcctgcctcttccaggtctccgccaaagcctacagcccggagttttacttcgacacccccaaccccacccgcagccacaagctgtccaagaactactcctacgtgctgcagtggactcagagggagcccgacgctgtcgaccctgtgctcaactacagactcagcatccgccagttgaaccagcacaatgcggtggtcaaggccatcccggtccggcgtgtggagaaggggcagctgctggagtacatcctgaccgatctccgtgtgccccacagctatgaggtccgcctcacaccctataccaccttcggggctggtgacatggcctcccgcatcatccactacacagagctcctggctctgaggaccctgtcctctgacaacacctgccactttgaggatgagaagatctgtggctatacccaggacctgacagacaactttgactggacgcggcagaatgccctcacccagaaccccaaacgctcccccaacactggtccccccaccgacataagtggcacccctgagggctactacatgttcatcgagacatcgaggcctcgggagctgggggaccgtgcaaggttagtgagtcccctctacaatgccagcgccaagttctactgtgtctccttcttctaccacatgtacgggaaacacatcggctccctcaacctcctggtgcggtcccggaacaaaggggctctggacacgcacgcctggtctctcagtggcaataagggcaatgtgtggcagcaggcccatgtgcccatcagccccagtgggcccttccagattatttttgagggggttcgaggcccgggctacctgggggatattgccatagatgacgtcacactgaagaagggggagtgtccccggaagcagacggatcccaataaagtggtggtgatgccgggcagtggagccccctgccagtccagcccacagctgtgggggcccatggccatcttcctcttggcgttgcagagatgatgagagctgtgtggccacccccccaaccttgcccccggcacaccaaagtgtccacattgtaccaaagactgacccccgccagctggggtgcccaggggcagggccggcccgccagggagggggcctgcattggctgcaaggatgagcagagaacaaggacagaggccaggcactgaggccctggagacagctgttccacttgcacacacgcacacactcatgctcacacacacagagatatattaaagcacaagtttctatctgacctgccagcaccttctttactgcaaagacaggggacttgcctgaatggcatccgccaacccagggacctcggcgcaacataggccttgtccttgctgcactcgtggtgtgcttctgactttaccctgtcccctaagtcaaggccgaactccagcctggtggctttgccagaagggagccagaagtggggcagacatggagcccctcccttggtcagactctgggactcctgagatgggagaggcagggatcagaggacgaacaggtgggactttgcgagctctgtgactgtcccacgtccaggagacaaggaaggtagggcacctgctgcacacgattctgtccagagtgagcactggatggtggagaccataggtcaccccagattccttgacctatttctgggacaccatatttccctcctcagtgtgcaccctttgaagggacccagcacagggtcttgggcctgggcagtctgaagactgataacttccccactccaccctacaagcagtgggactcctgagaacacggttctctcctagcctcagcccccagctgggtctcagaggagctgggggagcggtggccagcccattttctggggtgaggcttgacttggagaaaggcagaagagacgtcccgcttctgtgatttggtgcccccatatcagacaatgaatttggaagtggagaggggccttcatttcttatctacttggcatgaaagggtgccctggataggagggtgtgtacagggcaaaatgccaaaaagcactgtctagttgaaagttcccttctccacccaggggcagtgaaggaggaggggcttatagagctgggattggtggagggagcaggtgccagtcccctcactctctgggagctgtgaaagggatccctgtccttgggtcctgggttaggcacctgagattgacatgatgggatctagatctttcctccttgacatcacctgagcccccacctagccatccatgggagagagaaggcccagccccttctagaatgactctttaggcatgcgtgcatatgtgtgtatgtgtttgtgcccgtctgtgtctaggtaccaccgtgggtacattgttgggcaggagtgtgtgcaaacacaggtctgtgtgtgcaatctcacatatctgcctgtgagactggattgagacccattcgtttctatgaatgtccgtgtacgtcagcgtgtgtgtccaccttcctgagtgatgtgttcgcttgtagggtgctggctgaatagactctgtccagccctgttctgtagtctcaagctgcctgcgatggcctgaaattccacctttcatcccctatggatgacggagagcttacagatgaccctattgaatgcaagcacctttggtgaggagcatcacagggctccttctggagcatttggtggggacagctgcagagaagaggcctggaactcgggcagcactgcagtgccaggaggcaggcggggaaccgaggcaaaggctgcccatctccccctgccaggcctgtgtgatcattatcaccaacagctggtgggtggccgggccaggatgcagcggggccttctgatgcccaatcagcacggctgccttcctgacccagtcaaggcctctgtctgaaatgagtcgctccaggttctcagcatacacttccatcgcgtctgtcgggtattgttccttaactgtcccatctgtgcagagtccattgccccaactagactgtgagctcctcctctgagccttccaagtcccccctccaccttcgccacctcccgctcgtgcccagcacaagtgagcctggtgtggaaaccactccattgcccggtggaatggattctgtaatcagtggttcctggccttgcctgcagaatagaaccaccagagtcctttaaaaagtattgctgcttggttcccacctcagaggttctgagttaattggactggagcgcagtcggacatcaagaaatgttgaaaagctccttgggttctcctgacagcaggaaccactggcctggcaccacctgggtgcttcctctgtgccctcgctggggtaggcattggagcaccagagatgaatagccccaagtgctccctctttggggttcccaaggcaccctgtgcctgcttccctcagaggaccttccaatccatttgccccgcaaccctggctgctccgacaggggagacttgtctcccttgttcccctcaggatccatagagtggacagtaaaggtgctcagtacatgttggctgagctgaactgcatacatgtggcccccaggttcctggtctttatggacgaagggcacaaggtggaggggggatggggggatgctgctggaggtctcagtgggtgcagacagccctgccttgaggatggcttgacctgggattgacaaaatgtgtctgctgaaatgctgaggtccccacgtgtgaatgggtgaggctgatgtggatgtctgtgtgtgccagcaggtgggtgggggatgtgggtgtcagtgtatgccagtgggcactgtaaatgtctaggcatgtgctggtctctgtgtgtttgtgtgttcctcagcaggaatgagtgtctttgtgtatcacctggtgacttgtcagtgtctgtgtctgtgtgtgcctgtgagccagcatctctgtatcagtgttgctcatgctgtgtctttgtgcgccatggtgtgtcagtgtctgtgtgttgatgggtggcccatgagtgacccccgccaggggagaccaggctggctggatccagcacatctccccagtggcagcctcgccctctgggtcagggtgactgaggcattttgtggccttaaaacggggtgttcagggtcagccctcagggtgctggggcccttccatcccttgtccccttcaggttggtgaaaaggactccgggggccaggtgctgtatagcagcttatggaagtctcagctgggctatcctgcccttgggagcacagacaggctcctagggtgctgagtgaagcctgaagaccaagccccctcctcctggaatgctccttccacccctacctctcagagatgggcctgacacctctttctcattcattctccttttccctgtgctctgggaaagcccctggctcaggctgtcagagtgaggatggacctcaaaagtttgatcccctcgtgcagatgaagaagctgaagcccagagtggggaaggggagtggcccaaggtcacacagctagtttgagtagagccagtcttgggagagccaagtactacagccctgggggtgtcacaccgcttgtcactgcccctgaggtctcctgccaaacaactgcagggagtttggctaacagtcctgtgtccagggtgccggtggggatgttatagatgttgctgggatcctgccctcggctccaaattctggcctctcatcccaggctgcagacccttctgccccatgacaggcctgggtgccacacagaggtggccaccctcccaccacagtgtctgcagctgctgcccttctcccaggcccccagacagaagagaccctgtttcccctcctctcccctgtgacttcacaagagcttgggctaggagtgaaggtcagcatgttctcatgtgctcatcctcttggtttccccaaagaccgggagggtcacggatggggcgtgcagaatccttgtgttttttctcgctgggcagcttgaggggctggggagtattcccagggtctttgctctggagagtccctgcagagccactggctgaggttgggttcagggttcagcggagtcctccatgcttccaaaggccgggaagcacccgcctctctatcgagtcagtgctgtgcgtgtgtgtctgagaatgtgtgtgatgtgtggagtgtgcgtgtgtttgtgtgtgtgtgtgtgtgtgttggggcagaaggaccactctttcctggggatcccttgacccttataactagaagggaccttagggagcatctaagctggtgcccccattgtacaggcgaggtccagagggatggcatctgcccaccccaccccttgccctcttgttgcctgcactcatttcccagggaccctcctaggataggactgccctccttcctggccccctcccgccatcctcccagccacccacataatcaccatctcagcccaactctggtggccctctaggtctccatgcattcttcctgccctagagtagccagctcaccaaggcctttatccccagcccaggagaagggtcagggagggaaggggctgcaccagccctgagacctcaaagacttgggagaaaagccaaaactcctcatgcccaggcccacatgtctgaccaccccagcccaccccgccaccaaggtaaaagcacaacaggagacccccttattaatgggtgaaatgattggggttgtttttttagtcacacagccccatcctcacccctttgccttgctgtctgtctccaccccagcctctgttccccatttgcctctctttcacctccaagcccccaaatgtaacctctagttgcggacgcggttgttctatcaataaagctgcagtgttctagcgctcagcgt

SEQ ID NO: 246196 - DNA, 10736 bp, Artificial Sequence
  derived and/or modified sequence
ggagagcgagagaccgaacgaggagacgcgaggaggagggaggaggaagagagggagggaggcgggaggagcgcggaatgaaaagctcggaggggcgaaaaagcagcacagcaaagcccaagttgctgagcgagcggagcgctcccgcggcccggagccgagcggccgccgcgccccggagcccggcccggccccgcccgctctgggcccccgcaggccaaggccgccgggcgggggcggggacgaccaacttggggcgcggcgtagccccgctctcccgagagctcggagcccgggagggctacggccgcggccagacggcgggagaggagcgcggcgagcggaggcggcgagcggcgcccgcgccgcagccccggcctgggcgagagcgcgaatatttttcaaaagactcaaactttcctcctttccccgttttctggggcccttcttgcctggaattgctctccagattcccgcggggcgccgggctgctattcttcccccgggtttatcggcggctcggctaacttcacggacccggggacccgcggcgctcgtccctcggccgaacccagcccgcgctgctccccggatcaggagggccgggcccggggctgcttcgccgccgcgagtgctttcagcccggccccctggagtcgggccgctgagcccacggcagcggccgcaggactggaaacagcagattgattaactcgagcggagccccggcctccccgactccgctccgctgaggggcggccccagtgcggggaaacgacaagtttgtcagtcgtccgtggcctgttggatcgaagcgccgcctccgccgccgagaggtccccggcgcctagcatcccgcgcggacggccctgggtacccggggcggctcggcggccgggctcctcgggtcggggcgctggctgctgtgccgggcgcgccgaggcacccggggctgggccagcgccccctgcgtccccacgcgggcagcggccccgccggaggagaaacacgggtcgccgccacctccgcctcttcagtctcctggtcttcgtcgccgctctctctctcacctctcagggaaagggggggacataggggcgtcgcggggccccggcgaatgcgccccccgccgcctctcgggctgcgccgcctcgcggggatgaagcaccggccgtgaagatggaggtgacctgccttctacttctggcgctgatccccttccactgccggggacaaggagtctacgctccagcccaggcgcagatcgtgcatgcgggccaggcatgtgtggtgaaagaggacaatatcagcgagcgtgtctacaccatccgggagggggacaccctcatgctgcagtgccttgtaacagggcaccctcgaccccaggtacggtggaccaagacggcaggtagcgcctcggacaagttccaggagacatcggtgttcaacgagacgctgcgcatcgagcgtattgcacgcacgcagggcggccgctactactgcaaggctgagaacggcgtgggggtgccggccatcaagtccatccgcgtggacgtgcagtacctggatgagccaatgctgacggtgcaccagacggtgagcgatgtgcgaggcaacttctaccaggagaagacggtgttcctgcgctgtactgtcaactccaacccgcctgcccgcttcatctggaagcggggttccgataccctatcccacagccaggacaatggggttgacatctatgagcccctctacactcagggggagaccaaggtcctgaagctgaagaacctgcggccccaggactatgccagctacacctgccaggtgtctgtgcgtaacgtgtgcggcatcccagacaaggccatcaccttccggctcaccaacaccacggcaccaccagccctgaagctgtctgtgaacgaaactctggtggtgaaccctggggagaatgtgacggtgcagtgtctgctgacaggcggtgatcccctcccccagctgcagtggtcccatgggcctggcccactgcccctgggtgctctggcccagggtggcaccctcagcatcccttcagtgcaggcccgggactctggctactacaactgcacagccaccaacaatgtgggcaaccctgccaagaagactgtcaacctgctggtgcgatccatgaagaacgctacattccagatcactcctgacgtgatcaaagagagtgagaacatccagctgggccaggacctgaagctatcgtgccacgtggatgcagtgccccaggagaaggtgacctaccagtggttcaagaatggcaagccggcacgcatgtccaagcggctgctggtgacccgcaatgatcctgagctgcccgcagtcaccagcagcctagagctcattgacctgcacttcagtgactatggcacctacctgtgcatggcttctttcccaggggcacccgtgcccgacctcagcgtcgaggtcaacatctcctctgagacagtgccgcccaccatcagtgtgcccaagggtagggccgtggtgaccgtgcgcgagggatcgcctgccgagctgcaatgcgaggtgcggggcaagccgcggccgccagtgctctggtcccgcgtggacaaggaggctgcactgctgccctcggggctgcccctggaggagactccggacgggaagctgcggctggagcgagtgagccgagacatgagcgggacctaccgctgccagacggcccgctataatggcttcaacgtgcgcccccgtgaggcccaggtgcagctgaacgtgcagttcccgccggaggtggagcccagttcccaggacgtgcgccaggcgctgggccggcccgtgctcctgcgctgctcgctgctgcgaggcagcccccagcgcatcgcctcggctgtgtggcgtttcaaagggcagctgctgccgccgccgcctgttgttcccgccgccgccgaggcgccggatcacgcggagctgcgcctcgacgccgtaactcgcgacagcagcggcagctacgagtgcagcgtctccaacgatgtgggctcggctgcctgcctcttccaggtctccgccaaagcctacagcccggagttttacttcgacacccccaaccccacccgcagccacaagctgtccaagaactactcctacgtgctgcagtggactcagagggagcccgacgctgtcgaccctgtgctcaactacagactcagcatccgccagttgaaccagcacaatgcggtggtcaaggccatcccggtccggcgtgtggagaaggggcagctgctggagtacatcctgaccgatctccgtgtgccccacagctatgaggtccgcctcacaccctataccaccttcggggctggtgacatggcctcccgcatcatccactacacagagcccatcaactctccgaacctttcagacaacacctgccactttgaggatgagaagatctgtggctatacccaggacctgacagacaactttgactggacgcggcagaatgccctcacccagaaccccaaacgctcccccaacactggtccccccaccgacataagtggcacccctgagggctactacatgttcatcgagacatcgaggcctcgggagctgggggaccgtgcaaggttagtgagtcccctctacaatgccagcgccaagttctactgtgtctccttcttctaccacatgtacgggaaacacatcggctccctcaacctcctggtgcggtcccggaacaaaggggctctggacacgcacgcctggtctctcagtggcaataagggcaatgtgtggcagcaggcccatgtgcccatcagccccagtgggcccttccagattatttttgagggggttcgaggcccgggctacctgggggatattgccatagatgacgtcacactgaagaagggggagtgtccccggaagcagacggatcccaataaagtggtggtgatgccgggcagtggagccccctgccagtccagcccacagctgtgggggcccatggccatcttcctcttggcgttgcagagatgatgagagctgtgtggccacccccccaaccttgcccccggcacaccaaagtgtccacattgtaccaaagactgacccccgccagctggggtgcccaggggcagggccggcccgccagggagggggcctgcattggctgcaaggatgagcagagaacaaggacagaggccaggcactgaggccctggagacagctgttccacttgcacacacgcacacactcatgctcacacacacagagatatattaaagcacaagtttctatctgacctgccagcaccttctttactgcaaagacaggggacttgcctgaatggcatccgccaacccagggacctcggcgcaacataggccttgtccttgctgcactcgtggtgtgcttctgactttaccctgtcccctaagtcaaggccgaactccagcctggtggctttgccagaagggagccagaagtggggcagacatggagcccctcccttggtcagactctgggactcctgagatgggagaggcagggatcagaggacgaacaggtgggactttgcgagctctgtgactgtcccacgtccaggagacaaggaaggtagggcacctgctgcacacgattctgtccagagtgagcactggatggtggagaccataggtcaccccagattccttgacctatttctgggacaccatatttccctcctcagtgtgcaccctttgaagggacccagcacagggtcttgggcctgggcagtctgaagactgataacttccccactccaccctacaagcagtgggactcctgagaacacggttctctcctagcctcagcccccagctgggtctcagaggagctgggggagcggtggccagcccattttctggggtgaggcttgacttggagaaaggcagaagagacgtcccgcttctgtgatttggtgcccccatatcagacaatgaatttggaagtggagaggggccttcatttcttatctacttggcatgaaagggtgccctggataggagggtgtgtacagggcaaaatgccaaaaagcactgtctagttgaaagttcccttctccacccaggggcagtgaaggaggaggggcttatagagctgggattggtggagggagcaggtgccagtcccctcactctctgggagctgtgaaagggatccctgtccttgggtcctgggttaggcacctgagattgacatgatgggatctagatctttcctccttgacatcacctgagcccccacctagccatccatgggagagagaaggcccagccccttctagaatgactctttaggcatgcgtgcatatgtgtgtatgtgtttgtgcccgtctgtgtctaggtaccaccgtgggtacattgttgggcaggagtgtgtgcaaacacaggtctgtgtgtgcaatctcacatatctgcctgtgagactggattgagacccattcgtttctatgaatgtccgtgtacgtcagcgtgtgtgtccaccttcctgagtgatgtgttcgcttgtagggtgctggctgaatagactctgtccagccctgttctgtagtctcaagctgcctgcgatggcctgaaattccacctttcatcccctatggatgacggagagcttacagatgaccctattgaatgcaagcacctttggtgaggagcatcacagggctccttctggagcatttggtggggacagctgcagagaagaggcctggaactcgggcagcactgcagtgccaggaggcaggcggggaaccgaggcaaaggctgcccatctccccctgccaggcctgtgtgatcattatcaccaacagctggtgggtggccgggccaggatgcagcggggccttctgatgcccaatcagcacggctgccttcctgacccagtcaaggcctctgtctgaaatgagtcgctccaggttctcagcatacacttccatcgcgtctgtcgggtattgttccttaactgtcccatctgtgcagagtccattgccccaactagactgtgagctcctcctctgagccttccaagtcccccctccaccttcgccacctcccgctcgtgcccagcacaagtgagcctggtgtggaaaccactccattgcccggtggaatggattctgtaatcagtggttcctggccttgcctgcagaatagaaccaccagagtcctttaaaaagtattgctgcttggttcccacctcagaggttctgagttaattggactggagcgcagtcggacatcaagaaatgttgaaaagctccttgggttctcctgacagcaggaaccactggcctggcaccacctgggtgcttcctctgtgccctcgctggggtaggcattggagcaccagagatgaatagccccaagtgctccctctttggggttcccaaggcaccctgtgcctgcttccctcagaggaccttccaatccatttgccccgcaaccctggctgctccgacaggggagacttgtctcccttgttcccctcaggatccatagagtggacagtaaaggtgctcagtacatgttggctgagctgaactgcatacatgtggcccccaggttcctggtctttatggacgaagggcacaaggtggaggggggatggggggatgctgctggaggtctcagtgggtgcagacagccctgccttgaggatggcttgacctgggattgacaaaatgtgtctgctgaaatgctgaggtccccacgtgtgaatgggtgaggctgatgtggatgtctgtgtgtgccagcaggtgggtgggggatgtgggtgtcagtgtatgccagtgggcactgtaaatgtctaggcatgtgctggtctctgtgtgtttgtgtgttcctcagcaggaatgagtgtctttgtgtatcacctggtgacttgtcagtgtctgtgtctgtgtgtgcctgtgagccagcatctctgtatcagtgttgctcatgctgtgtctttgtgcgccatggtgtgtcagtgtctgtgtgttgatgggtggcccatgagtgacccccgccaggggagaccaggctggctggatccagcacatctccccagtggcagcctcgccctctgggtcagggtgactgaggcattttgtggccttaaaacggggtgttcagggtcagccctcagggtgctggggcccttccatcccttgtccccttcaggttggtgaaaaggactccgggggccaggtgctgtatagcagcttatggaagtctcagctgggctatcctgcccttgggagcacagacaggctcctagggtgctgagtgaagcctgaagaccaagccccctcctcctggaatgctccttccacccctacctctcagagatgggcctgacacctctttctcattcattctccttttccctgtgctctgggaaagcccctggctcaggctgtcagagtgaggatggacctcaaaagtttgatcccctcgtgcagatgaagaagctgaagcccagagtggggaaggggagtggcccaaggtcacacagctagtttgagtagagccagtcttgggagagccaagtactacagccctgggggtgtcacaccgcttgtcactgcccctgaggtctcctgccaaacaactgcagggagtttggctaacagtcctgtgtccagggtgccggtggggatgttatagatgttgctgggatcctgccctcggctccaaattctggcctctcatcccaggctgcagacccttctgccccatgacaggcctgggtgccacacagaggtggccaccctcccaccacagtgtctgcagctgctgcccttctcccaggcccccagacagaagagaccctgtttcccctcctctcccctgtgacttcacaagagcttgggctaggagtgaaggtcagcatgttctcatgtgctcatcctcttggtttccccaaagaccgggagggtcacggatggggcgtgcagaatccttgtgttttttctcgctgggcagcttgaggggctggggagtattcccagggtctttgctctggagagtccctgcagagccactggctgaggttgggttcagggttcagcggagtcctccatgcttccaaaggccgggaagcacccgcctctctatcgagtcagtgctgtgcgtgtgtgtctgagaatgtgtgtgatgtgtggagtgtgcgtgtgtttgtgtgtgtgtgtgtgtgtgttggggcagaaggaccactctttcctggggatcccttgacccttataactagaagggaccttagggagcatctaagctggtgcccccattgtacaggcgaggtccagagggatggcatctgcccaccccaccccttgccctcttgttgcctgcactcatttcccagggaccctcctaggataggactgccctccttcctggccccctcccgccatcctcccagccacccacataatcaccatctcagcccaactctggtggccctctaggtctccatgcattcttcctgccctagagtagccagctcaccaaggcctttatccccagcccaggagaagggtcagggagggaaggggctgcaccagccctgagacctcaaagacttgggagaaaagccaaaactcctcatgcccaggcccacatgtctgaccaccccagcccaccccgccaccaaggtaaaagcacaacaggagacccccttattaatgggtgaaatgattggggttgtttttttagtcacacagccccatcctcacccctttgccttgctgtctgtctccaccccagcctctgttccccatttgcctctctttcacctccaagcccccaaatgtaacctctagttgcggacgcggttgttctatcaataaagctgcagtgttctagcgctcagcgtcagccgtgtgtgttggcagggcagagtgggccagggtcggggccggggcactggagggctcctctcagctccctgggggcagcctttcttctctttggcacctgtcgacagggatcctgctctgtggcctggacagtgaggacctgcatcctggtctgctcccagtgaacttgtgtgcatttgttcattcagcaaataccaaccaaacactgcctttgtggaagcccctgtttaatgggagagatggacagtaagctaataatgacaccaagacatatataatgatgtgtacagtgagggctgggaagggaaattggtgctatgaaagaaggtatgaagagggttcttatttgggttggggcttcggggaagacttctctaagagacatttaggagagacagaatgattggagttagcctgttgggattgggagaggcttctgagcagagggaacagaatatgcaaaggccaacagggcccaaaaacttagaaggctcaaggaaggggagtaagggcaaaggaggaggactaaagttggtatggtggttgaaatgccattttcccttctcggcacccaaccctaccatccctcctacacgcttggagtcccttccctcttaatctctattctggccctacagaccccaccctgcaccctacttggggctgcctcccttattcaccaccagctagctgcatccttgccctaagatcaagttatgccaacctttccctttaccccagacctctcagaattctagaatttcagagctaggaggtccttaaaggtcacttatttcaaacatctactcatatattgtaggtgagatgggcttgccaaggtcatggggataggcagtgatgagcatttgcaaagtgaccccaaatcaagggtgtggatgtcatgatatggactacatcatatcaggcaaatgacaggaagtgtctttcaggttacttggttacaatgattcaggtaggtcgattgggcagtttcacttccatgttccagatggggaaactgaagctcagattacaagaccaagggctccctctccctaccacctaagttttattggctctcatgttgggtaacttcttgctggcacacctggcctttcttttctaatggaagaggaagggtctaagggactcaccactgctgtaggttggctccctgagcacaggaagagaaatccgctcaagctcactcaagtacaggtgcattattgtgaggacaaacacagtgagggggatgggcactcagaaatccaaacaggagttgcaacagggatggttttcctgaaccagatgggcattttggattcaaggtagctctaggatcatcatctacagaagtttctggtgcttctgtattcttctggtgcttctgtattctacctgtggtagaataaagatggctgcaaatcccatgttatccttcctgtagagaggcagagtctaattcccttcctcttgaatctgggttgctcttagtgccttgtttgtgcaatagaatgtgacatgctgagttgaagatgccttggagcttcagctcaggcctcttggaacgttctctctggaagccctgaactgccacctaggatgtcctctgagttgctctgagaccgtcatgctggaggggctctggctgaccatcccagctgagtccagccttccagccatctccaccaaagcaccagaagatatgggagtgcagctgcctcagaccttccagaccagcctaactgccacctgaattgctcggccaagctctgtccaaattcctgacccatcgtcatgggatataataaaatagttgttttaa

SEQ ID NO: 246197 - DNA, 2880 bp, Artificial Sequence
  derived and/or modified sequence
atggaggtgacctgcctgctgctgctggccctgatccccttccactgccgaggtcaaggcgtgtatgccccggctcaggcccagatagtacatgccggtcaggcatgtgtggtgaaggaggacaatataagcgagagagtctacaccattcgggagggggacacactgatgctgcagtgcctagtcaccggccacccgcggccacaggtgcggtggacgaaaacagccggaagtgccagcgataagtttcaagaaacatcagtgttcaacgagaccctacggatcgagcggattgccaggacacaaggggggcgatattattgcaaagccgagaatggtgtgggggtgcctgcaattaagagcatccgggttgatgtccagtaccttgacgagccgatgttgacagtgcatcaaaccgtctcggatgtccgaggcaatttttatcaggaaaagaccgtgtttctcaggtgtacagtgaactccaatccaccggctcggttcatctggaagcgaggaagtgataccctgagccattcgcaggacaatggcgttgacatctatgagcctctatatacacagggcgagacaaaagtgttgaagctgaagaatctccgcccgcaggattacgcctcctatacatgtcaggtatccgtgagaaacgtgtgcggtattcccgataaggcaatcacatttcgactgacgaatacaacagctcctcccgccctgaagttgagcgtaaatgaaacactcgtggtgaaccccggtgagaacgtcaccgtgcaatgtctgctaaccggcggcgatcccttgccccagctgcagtggtcgcatggccccggccctctgccattaggcgccctcgcccaggggggtacactgagtatcccttctgtccaggcacgagattctggctattataattgcaccgcaaccaacaacgtgggaaacccggctaaaaaaactgtaaacctgcttgtccgctccatgaaaaacgcaacctttcagatcacgccagatgttattaaagagtctgagaacatccagctcggacaagatctcaaactgagctgtcacgtggacgccgtgccccaagagaaggtgacttaccagtggttcaagaacggaaaacctgccagaatgagcaaacggctgctcgtgacgcgcaatgatccagaactgcctgccgtgacatcttctcttgagctgatcgacttacacttttcagactacggcacctacctgtgcatggcaagctttcccggggcccccgttcctgatcttagcgtggaggtgaatataagttcggaaacggtgccacctacaatcagtgtgcctaaaggacgcgcagtggttactgttcgtgaaggatcccctgcagaacttcagtgtgaggtgcgtggcaaacctcgccctcccgttctgtggtcccgagtagataaagaggctgcattgctgccctcaggattgccacttgaggagacccccgacggtaaactgcgcctagagcgcgtgtcaagggacatgtccggaacttatcggtgccaaacagctaggtacaacggttttaatgtcagacccagggaagcacaggtgcaattaaacgttcagtcaccctgctttcctccggaagtggaacccagcagccaggatgtgaggcaggccctcggtaggcccgtgctcctcagatgcagcctgctgcgtggtagccctcagcggattgcttcagcggtgtggaggttcaagggacagctgctgcctcctccccctgtggttcctgctgcagctgaggcacctgaccacgcggagctccgactggatgctgtaacaagagactcaagcggaagttacgagtgctccgtgtctaacgatgttggtagtgcggcttgcctgtttcaggtctcggcaaaggcgtacagccccgaattctacttcgacacgccgaatccaactcgaagccacaagctctccaagaactactcctatgtgctgcaatggacccagagggaacccgacgcagtcgatccggtgctgaactatagactctctatccgccagcttaaccagcataacgcggttgttaaggctattcctgtcagaagggtagagaaaggacagctactcgaatatatactgaccgatctgcgtgtccctcactcttacgaggtgcgactgactccttacacaacattcggcgcaggagatatggcctctcgcatcatacattacaccgagctcctggcccttcgaacactgtccagcgataatacgtgccactttgaagatgaaaagatctgcgggtacacacaggatctgacagacaactttgactggacccggcagaatgctctcacacagaatccaaaacgttctccaaatacgggcccgcctactgatatttctggaactccggagggatattacatgtttattgaaacaagccggccccgcgagctgggtgatcgtgcaagactggttagccccctatacaatgctagcgcaaagttttattgtgtttcctttttctatcatatgtacggtaaacatattggatctctgaatctgcttgtcaggtcccgcaacaaaggggcactggacacccacgcctggagtctgagtggaaataagggcaatgtctggcagcaagcccacgtgccaatcagccctagcggtcccttccagattatcttcgagggcgtacggggaccaggctaccttggggatattgccatcgacgatgtcaccctgaagaagggggagtgtcctcgcaaacaaacagaccctaacaaggtcgtggttatgccaggcagtggcgctccgtgccagtcctctccacaactgtggggcccaatggccatttttctactcgcactgcagcgctag

SEQ ID NO: 246198 - DNA, 2868 bp, Artificial Sequence
  derived and/or modified sequence
atggaggtgacctgcctgctgctgctggccctgatccccttccactgcagagggcaaggggtgtacgcccctgctcaagcgcaaattgttcacgcagggcaggcctgcgtcgtcaaggaagataacatcagcgaacgcgtctacacaattcgggaaggagacacactgatgttacaatgcctggtcactggacaccccagaccacaagtcaggtggactaaaaccgccggcagcgctagcgataaatttcaagagactagcgtgtttaacgaaacgctcaggatcgagcggattgccagaactcagggaggacgctactattgcaaggccgagaatggcgtgggagtccctgcgatcaaatccattcgggtggacgttcagtatctggacgaaccaatgctaaccgtccaccagactgtgtccgacgtgagaggaaacttttaccaggagaaaactgtctttctgcgctgtacagttaacagcaacccacccgctcgtttcatttggaagaggggttctgatactttatcccatagtcaggacaacggcgttgatatctacgagccactgtatacacagggggagaccaaggtattgaagctgaaaaacttgcgcccacaagattatgcttcctacacctgtcaggtgtctgttcgaaatgtctgcgggatccctgacaaagccatcaccttccgattgactaatactaccgcccccccagcgctcaaattgtctgtcaatgaaactttggtagtcaaccctggagaaaatgtcactgttcaatgtttactcactggtggggatccactacctcagctacaatggtcccacgggccgggtcctctcccactgggcgctttggcccaagggggaactcttagcataccaagtgtgcaggccagggattccgggtactacaattgcacagctaccaacaacgttgggaaccccgccaaaaagaccgtgaaccttttggtgaggtccatgaaaaacgcaacctttcagatcacacctgatgttataaaggaatctgaaaacattcagctaggccaggacctgaagctgtcatgccatgtggacgcggtgccgcaggaaaaagtgacataccagtggttcaaaaatggaaaacccgcccgcatgagcaaacggttgctcgtgacaagaaacgatcccgagctgccagctgtcactagcagtcttgagcttattgatctccatttttctgactatgggacatatctctgcatggcctccttccctggagcccccgttccagatctctcggtggaggtgaatatttcaagcgaaactgtccccccaaccatctcagtcccaaaaggcagggccgtcgttacagttcgggagggaagtcccgcagaactacagtgcgaggtgagggggaagcctcgtcctcctgtgctgtggtccagggttgataaagaagcagctttgctgccttctggactgccactcgaggaaactccagacggcaaattgcgcttagagagggtgtcccgagacatgtccggtacctatcgctgccagaccgcccggtataatggcttcaatgtacgaccgcgagaggcacaagtacaactgaatgtccagttccctcccgaagttgagcccagttctcaagacgtcaggcaggctttgggccggccagttcttttacgctgttcactgctcaggggatctcctcagcgtatagcctcagccgtctggcgcttcaaaggccagctcctgcctcctccccctgtggtgcccgctgcagccgaggcaccggatcacgccgaactgagattggatgccgttaccagggattcctcggggtcttacgaatgttctgtgtccaatgatgtgggctctgcggcctgtctctttcaagtgtcagccaaagcatacagtcccgagttctactttgacaccccgaatcccacaaggtcacacaaactgagcaaaaactacagctatgtgttgcagtggactcagagagagccagacgccgtggatccagtgctaaattatcggctttctattcggcagctgaaccagcacaatgctgtggttaaagcaattcctgttcgccgagtggagaaagggcagctcttggagtacatcctaactgacctcagagttccgcactcctacgaagtcagactaaccccctacacgacctttggggctggtgacatggcctcacgcatcatccactacaccgagccaattaacagccctaatctgtccgacaacacatgtcacttcgaggacgagaagatttgtgggtacacacaggatcttaccgacaatttcgattggactcgtcaaaacgctctgacacagaatccaaaaagaagtccaaacaccggaccaccaactgatatttccggtacccccgaggggtactacatgttcatcgaaactagccggcccagggagcttggagatcgcgcaaggttagtaagcccattatacaatgctagcgcaaaattctactgtgtgtcttttttctatcacatgtatgggaagcacatcggatcactgaatctcctggtacggtctcggaacaagggggccctcgatacccatgcgtggtccctgagcggaaacaaaggcaacgtatggcagcaggcccacgtgccaatttcgccttccggcccctttcagatcatcttcgagggtgttaggggacccggatacctcggcgatatcgcaatagatgatgtgactctcaagaagggcgagtgccctcggaaacagactgaccccaataaggtcgttgtgatgccgggatctggggcgccatgtcagtcgagccctcaactttggggccctatggccatattccttttggcactgcagagatag

SEQ ID NO: 246199 - DNA, 2880 bp, Artificial Sequence
  derived and/or modified sequence
atggaggttacgtgcttgctgttactcgccctgatcccctttcattgtagaggtcagggagtttacgccccagcccaggcccagatcgttcacgcaggccaggcatgcgtagtcaaggaagacaacatcagcgaaagggtgtacacaatcagggaaggggacaccctcatgctacagtgcttagtgaccggccacccccgaccccaggttagatggacgaagacagccggttcggcgtccgataagtttcaggagacctctgtgtttaacgagaccctgaggatagagcgaatcgcaagaacacagggcggtagatattactgcaaggccgaaaatggggtgggagttccagccatcaaaagcattcgggtcgatgtgcaatacctcgatgagcccatgttaacggtgcaccagacagtgtcagacgtgaggggcaatttctaccaagagaaaacggtatttttgagatgtaccgtcaatagtaatcccccagccaggttcatctggaagaggggatctgacacgctctcgcacagccaggacaatggggttgacatttacgagccgctgtacacccagggagagactaaggtcctgaaactgaaaaacctgaggccgcaggactacgcatcatacacctgccaggtctcagtgcgaaatgtgtgtgggatcccggataaggccatcacatttagacttacaaatacaaccgctccccctgccctgaaactgtcagtaaatgagacactcgtggttaatccgggagagaatgtaactgtgcagtgcctgctgaccggtggagatcctctgccccagctgcagtggtcgcacggaccgggaccgctccccttaggagcactggcgcagggaggaaccctctctatacctagtgttcaggcacgcgacagtggctactataactgtaccgcaacaaataacgttggtaatcctgctaagaagaccgtgaaccttttggtaagatctatgaagaatgcaaccttccagattacacccgatgtcattaaagagtccgaaaatatacagctcgggcaggatttgaaactgtcttgtcacgtcgacgctgttccgcaggaaaaggttacataccagtggttcaagaacggcaagcccgcaagaatgtctaagaggttgctagtgacccgcaatgatcctgagctgcccgcagttacttcctcgctggaactcatcgatctacacttttccgattatggcacatatctgtgtatggcatctttccctggggcacctgttcctgatctgtctgtggaagtcaatatctcttccgagactgttcctcccaccatcagcgtgccaaagggtagagctgtcgtaactgttcgggaaggcagcccggcagagctgcagtgtgaggttagaggcaagcccagaccccctgtcctgtggagtagggtggacaaggaggctgctctactcccatccggcttgccgcttgaggagacacccgatgggaaactcagattggagcgtgtgtcccgggacatgtctggcacatatcggtgtcaaactgcacggtacaatggctttaacgtgagacctcgggaggcccaggtgcaactgaatgtacagtccccttgcttcccacccgaagtcgagccaagcagccaggatgtgcggcaggcactcggcaggcctgtgctgcttcgctgttccctgttgaggggatccccacagaggattgcctcagccgtctggaggttcaagggccagctcctgccccctccccctgtggtcccagcagccgctgaagcccctgatcatgccgaactgagacttgacgctgtcaccagagatagtagtggatcttatgaatgcagtgtttcaaacgatgtggggtccgccgcatgcctcttccaagttagtgccaaggcctactcccccgagttttactttgatacacctaaccccacccggtcccacaagttatccaagaattacagctatgtactgcagtggacccaaagggagcctgacgcggtcgaccccgtactaaattatcgcctctccatacgacagctcaatcagcacaatgcggtggtgaaggccatccccgtgagaagggtggagaaaggccagcttttggagtacatcctcactgatctgcgggtcccccactcgtatgaggtgcgacttacaccatatacaaccttcggggctggcgatatggccagtcgcatcatccattacaccgagctgttagccctcaggactttgagctccgataatacatgccattttgaagacgaaaaaatttgcggctatactcaggacctaactgacaacttcgattggacccggcagaatgccctgactcagaatccaaagcgatcccctaatacggggccacccaccgacatctcagggacgccagaaggatactacatgtttatagagacctctcgccctcgtgaattgggcgatcgggcaagactcgtctccccactctacaatgcatccgcgaaattctactgtgtctcattcttttaccacatgtacggaaagcacattggcagcttgaatcttctggtgagatcccgcaacaagggggcacttgatactcacgcatggtccctgtcaggcaataaaggtaatgtatggcagcaggcacacgtccccattagccctagtgggccatttcagatcatttttgagggcgtgaggggacccggttatctaggggacatcgcgatcgatgacgtaaccctgaagaagggcgagtgtcctaggaagcagaccgaccctaataaggtggtggtgatgccgggaagcggcgctccgtgccagtcttctccccagctgtggggcccaatggcaatctttcttttggccttgcagagatag

SEQ ID NO: 246200 - DNA, 2868 bp, Artificial Sequence
  derived and/or modified sequence
atggaggttacgtgcttgcttttgcttgccttgataccctttcattgccggggtcagggagtctatgcccctgcacaagcccaaatcgtgcacgctgggcaggcttgtgtagtaaaagaggacaatattagtgagcgcgtctatacaattagggagggggacactctcatgctgcagtgcttagtgactggccacccaagacctcaggtgcgctggactaagaccgcgggatcagcaagtgataagttccaggagacctccgtttttaatgagacccttcggattgaaagaatcgcaagaacacaaggaggcaggtactattgcaaagctgagaatggagtgggagtgcctgccatcaagtctatcagagtagacgtgcagtacttggatgaaccaatgctgacagtgcatcagaccgtgtcggatgttcggggtaatttctatcaggagaaaacagttttcctgaggtgtactgtcaattccaacccaccagcgagattcatatggaaaaggggctccgatactttgtcccatagccaggacaatggcgtggacatttatgagcctctttacacccaaggggagaccaaagtgctaaaactgaaaaatcttagaccacaggactatgcatcatacacttgtcaggtttccgtgaggaatgtgtgtgggatccctgacaaggccattacttttcgcctaacaaatacaaccgctccaccagccctgaaactgtccgtcaatgagacactggtcgttaaccctggcgaaaacgtgactgtgcagtgtctccttaccggaggggacccgttgccacagttacagtggtcccatggcccaggccctcttcctctgggagctctcgcccagggtggaactctctccattccatcggtgcaagccagagattcaggatactacaactgcacggcaacgaacaacgtcggcaacccagcaaaaaagaccgtcaacctcttggtacgctcaatgaagaacgcaacattccagatcacaccagacgtgattaaggaaagcgaaaatatacaattaggccaggacctgaaattgtcttgtcacgtcgacgctgtgccccaggaaaaagtgacctaccagtggttcaagaatggcaagcctgcgagaatgtctaagaggctactcgtgacccgaaacgacccagaacttcccgctgtgacctccagtctcgagctcatcgacctccacttttctgactatggaacctatctgtgtatggcatccttcccaggggcaccagtacccgatttgtcagtggaggtgaacattagctctgaaacagtaccacccaccatttcagtgccaaaggggcgtgcggttgtgaccgtgcgcgaaggcagtccggcagagctgcagtgtgaagttcgcggaaagcccagaccgcctgtgctgtggagtcgcgtggataaggaagccgctttgctcccaagcggcctgcccctcgaggaaacccctgatggtaaattacggttggaacgggtcagcagagacatgagcggcacgtatcggtgtcagactgccaggtataacggctttaacgtgcgcccacgagaagcccaggttcagctaaatgtgcaatttccgccagaagtggaacctagtagccaggatgtcaggcaggcgctggggaggccggttttgctgagatgttctctgctgagagggtctccacaacggattgccagtgcggtgtggagattcaagggccagctgctgccccctccccctgtggtgccagctgccgctgaagcacccgaccacgctgagctgcgtctggatgctgtaacccgcgatagcagcgggagctacgaatgttcggtgtctaatgatgtcggctccgctgcctgcctctttcaggtctcagctaaggcctacagcccagaattttactttgacactcccaatcctacccgcagccacaagctgtctaagaactactcatacgtgctacagtggacacaacgagagcctgatgctgtggacccagttctgaactacaggctatccattcgccagctcaatcaacacaatgctgtggtgaaggccatcccagtgcggcgagtggagaaagggcaactcctggagtatatactgaccgatctgcgcgttcctcactcttatgaggttagactaacaccttacactacctttggggctggagacatggcatcccggattatacactataccgagccaattaacagtcctaacctgtctgataacacctgtcactttgaggacgagaagatttgtggatacacccaggacttaactgacaacttcgattggacacgccaaaacgcacttacccaaaatcccaaacgctcgcctaatactggtccgcctactgacatttccgggacccccgaagggtactacatgttcattgaaactagccgtccacgtgagctgggagaccgcgctcgcttggtttctcctctgtataacgcttccgccaagttctattgcgtgtctttcttctatcacatgtatggcaagcatatcggctcacttaacctcctggttaggagtagaaataagggcgctctagacacccatgcttggtcactgagcgggaacaagggaaacgtgtggcaacaggcacatgtgcccatcagtccgagtggcccattccaaattattttcgaaggagtgaggggccctgggtatcttggagacatcgccatagatgatgtcacgctgaagaaaggtgaatgccccagaaaacagaccgatccgaataaggttgtggtgatgcctggctccggagctccatgccaaagctctccacaactgtggggacccatggccatttttctgctggcactgcagcgctag

SEQ ID NO: 246201 - DNA, 2880 bp, Artificial Sequence
  derived and/or modified sequence
atggaggtgacctgcctgctgctgctggccctgatccccttccactgcagaggccagggcgtgtacgcccccgcccaggcccagatcgtgcacgccggccaggcctgcgtggtgaaggaggacaacatcagcgagagagtgtacaccatcagagagggcgacaccctgatgctgcagtgcctggtgaccggccaccccagaccccaggtgagatggaccaagaccgccggcagcgccagcgacaagttccaggagaccagcgtgttcaacgagaccctgagaatcgagagaatcgccagaacccagggcggcagatactactgcaaggccgagaacggcgtgggcgtgcccgccatcaagagcatcagagtggacgtgcagtacctggacgagcccatgctgaccgtgcaccagaccgtgagcgacgtgagaggcaacttctaccaggagaagaccgtgttcctgagatgcaccgtgaacagcaacccccccgccagattcatctggaagagaggcagcgacaccctgagccacagccaggacaacggcgtggacatctacgagcccctgtacacccagggcgagaccaaggtgctgaagctgaagaacctgagaccccaggactacgccagctacacctgccaggtgagcgtgagaaacgtgtgcggcatccccgacaaggccatcaccttcagactgaccaacaccaccgccccccccgccctgaagctgagcgtgaacgagaccctggtggtgaaccccggcgagaacgtgaccgtgcagtgcctgctgaccggcggcgaccccctgccccagctgcagtggagccacggccccggccccctgcccctgggcgccctggcccagggcggcaccctgagcatccccagcgtgcaggccagagacagcggctactacaactgcaccgccaccaacaacgtgggcaaccccgccaagaagaccgtgaacctgctggtgagaagcatgaagaacgccaccttccagatcacccccgacgtgatcaaggagagcgagaacatccagctgggccaggacctgaagctgagctgccacgtggacgccgtgccccaggagaaggtgacctaccagtggttcaagaacggcaagcccgccagaatgagcaagagactgctggtgaccagaaacgaccccgagctgcccgccgtgaccagcagcctggagctgatcgacctgcacttcagcgactacggcacctacctgtgcatggccagcttccccggcgcccccgtgcccgacctgagcgtggaggtgaacatcagcagcgagaccgtgccccccaccatcagcgtgcccaagggcagagccgtggtgaccgtgagagagggcagccccgccgagctgcagtgcgaggtgagaggcaagcccagaccccccgtgctgtggagcagagtggacaaggaggccgccctgctgcccagcggcctgcccctggaggagacccccgacggcaagctgagactggagagagtgagcagagacatgagcggcacctacagatgccagaccgccagatacaacggcttcaacgtgagacccagagaggcccaggtgcagctgaacgtgcagagcccctgcttcccccccgaggtggagcccagcagccaggacgtgagacaggccctgggcagacccgtgctgctgagatgcagcctgctgagaggcagcccccagagaatcgccagcgccgtgtggagattcaagggccagctgctgccccccccccccgtggtgcccgccgccgccgaggcccccgaccacgccgagctgagactggacgccgtgaccagagacagcagcggcagctacgagtgcagcgtgagcaacgacgtgggcagcgccgcctgcctgttccaggtgagcgccaaggcctacagccccgagttctacttcgacacccccaaccccaccagaagccacaagctgagcaagaactacagctacgtgctgcagtggacccagagagagcccgacgccgtggaccccgtgctgaactacagactgagcatcagacagctgaaccagcacaacgccgtggtgaaggccatccccgtgagaagagtggagaagggccagctgctggagtacatcctgaccgacctgagagtgccccacagctacgaggtgagactgaccccctacaccaccttcggcgccggcgacatggccagcagaatcatccactacaccgagctgctggccctgagaaccctgagcagcgacaacacctgccacttcgaggacgagaagatctgcggctacacccaggacctgaccgacaacttcgactggaccagacagaacgccctgacccagaaccccaagagaagccccaacaccggcccccccaccgacatcagcggcacccccgagggctactacatgttcatcgagaccagcagacccagagagctgggcgacagagccagactggtgagccccctgtacaacgccagcgccaagttctactgcgtgagcttcttctaccacatgtacggcaagcacatcggcagcctgaacctgctggtgagaagcagaaacaagggcgccctggacacccacgcctggagcctgagcggcaacaagggcaacgtgtggcagcaggcccacgtgcccatcagccccagcggccccttccagatcatcttcgagggcgtgagaggccccggctacctgggcgacatcgccatcgacgacgtgaccctgaagaagggcgagtgccccagaaagcagaccgaccccaacaaggtggtggtgatgcccggcagcggcgccccctgccagagcagcccccagctgtggggccccatggccatcttcctgctggccctgcagagatag

SEQ ID NO: 246202 - DNA, 2868 bp, Artificial Sequence
  derived and/or modified sequence
atggaggtgacctgcctgctgctgctggccctgatccccttccactgcagaggccagggcgtgtacgcccccgcccaggcccagatcgtgcacgccggccaggcctgcgtggtgaaggaggacaacatcagcgagagagtgtacaccatcagagagggcgacaccctgatgctgcagtgcctggtgaccggccaccccagaccccaggtgagatggaccaagaccgccggcagcgccagcgacaagttccaggagaccagcgtgttcaacgagaccctgagaatcgagagaatcgccagaacccagggcggcagatactactgcaaggccgagaacggcgtgggcgtgcccgccatcaagagcatcagagtggacgtgcagtacctggacgagcccatgctgaccgtgcaccagaccgtgagcgacgtgagaggcaacttctaccaggagaagaccgtgttcctgagatgcaccgtgaacagcaacccccccgccagattcatctggaagagaggcagcgacaccctgagccacagccaggacaacggcgtggacatctacgagcccctgtacacccagggcgagaccaaggtgctgaagctgaagaacctgagaccccaggactacgccagctacacctgccaggtgagcgtgagaaacgtgtgcggcatccccgacaaggccatcaccttcagactgaccaacaccaccgccccccccgccctgaagctgagcgtgaacgagaccctggtggtgaaccccggcgagaacgtgaccgtgcagtgcctgctgaccggcggcgaccccctgccccagctgcagtggagccacggccccggccccctgcccctgggcgccctggcccagggcggcaccctgagcatccccagcgtgcaggccagagacagcggctactacaactgcaccgccaccaacaacgtgggcaaccccgccaagaagaccgtgaacctgctggtgagaagcatgaagaacgccaccttccagatcacccccgacgtgatcaaggagagcgagaacatccagctgggccaggacctgaagctgagctgccacgtggacgccgtgccccaggagaaggtgacctaccagtggttcaagaacggcaagcccgccagaatgagcaagagactgctggtgaccagaaacgaccccgagctgcccgccgtgaccagcagcctggagctgatcgacctgcacttcagcgactacggcacctacctgtgcatggccagcttccccggcgcccccgtgcccgacctgagcgtggaggtgaacatcagcagcgagaccgtgccccccaccatcagcgtgcccaagggcagagccgtggtgaccgtgagagagggcagccccgccgagctgcagtgcgaggtgagaggcaagcccagaccccccgtgctgtggagcagagtggacaaggaggccgccctgctgcccagcggcctgcccctggaggagacccccgacggcaagctgagactggagagagtgagcagagacatgagcggcacctacagatgccagaccgccagatacaacggcttcaacgtgagacccagagaggcccaggtgcagctgaacgtgcagttcccccccgaggtggagcccagcagccaggacgtgagacaggccctgggcagacccgtgctgctgagatgcagcctgctgagaggcagcccccagagaatcgccagcgccgtgtggagattcaagggccagctgctgccccccccccccgtggtgcccgccgccgccgaggcccccgaccacgccgagctgagactggacgccgtgaccagagacagcagcggcagctacgagtgcagcgtgagcaacgacgtgggcagcgccgcctgcctgttccaggtgagcgccaaggcctacagccccgagttctacttcgacacccccaaccccaccagaagccacaagctgagcaagaactacagctacgtgctgcagtggacccagagagagcccgacgccgtggaccccgtgctgaactacagactgagcatcagacagctgaaccagcacaacgccgtggtgaaggccatccccgtgagaagagtggagaagggccagctgctggagtacatcctgaccgacctgagagtgccccacagctacgaggtgagactgaccccctacaccaccttcggcgccggcgacatggccagcagaatcatccactacaccgagcccatcaacagccccaacctgagcgacaacacctgccacttcgaggacgagaagatctgcggctacacccaggacctgaccgacaacttcgactggaccagacagaacgccctgacccagaaccccaagagaagccccaacaccggcccccccaccgacatcagcggcacccccgagggctactacatgttcatcgagaccagcagacccagagagctgggcgacagagccagactggtgagccccctgtacaacgccagcgccaagttctactgcgtgagcttcttctaccacatgtacggcaagcacatcggcagcctgaacctgctggtgagaagcagaaacaagggcgccctggacacccacgcctggagcctgagcggcaacaagggcaacgtgtggcagcaggcccacgtgcccatcagccccagcggccccttccagatcatcttcgagggcgtgagaggccccggctacctgggcgacatcgccatcgacgacgtgaccctgaagaagggcgagtgccccagaaagcagaccgaccccaacaaggtggtggtgatgcccggcagcggcgccccctgccagagcagcccccagctgtggggccccatggccatcttcctgctggccctgcagagatag

SEQ ID NO: 246203 - protein, 314 aa, Artificial Sequence
  derived and/or modified sequence
MPLEQRSQHCKPEEGLEARGEALGLVGAQAPATEEQQTASSSSTLVEVTLGEVPAADSPSPPHSPQGASSFSTTINYTLWRQSDEGSSNQEEEGPRMFPDLESEFQAAISRKMVELVHFLLLKYRAREPVTKAEMLESVLRNCQDFFPVIFSKASEYLQLVFGIEVVEVVPISHLYILVTCLGLSYDGLLGDNQVMPKTGLLIIVLAIIAIEGDCAPEEKIWEELSMLEVFEGREDSVFAHPRKLLMQDLVQENYLEYRQVPGSDPACYEFLWGPRALIETSYVKVLHHTLKIGGEPHISYPPLHERALREGEE

SEQ ID NO: 246204 - protein, 120 aa, Artificial Sequence
  derived and/or modified sequence
MPLEQRSQHCKPEEGLEARGEALGLVGAQAPATEEQQTASSSSTLVEVTLGEVPAADSPSPPHSPQGASSFSTTINYTLWRQSDEGSSNQEEEGPRMFPDLESEFQAAISRKMVELVHFL

SEQ ID NO: 246205 - protein, 152 aa, Artificial Sequence
  derived and/or modified sequence
MPLEQRSQHCKPEEGLEARGEALGLVGAQAPATEEQQTASSSSTLVEVTLGEVPAADSPSPPHSPQGASSFSTTINYTLWRQSDEGSSNQEEEGPRMFPDLESEFQAAISRKMVELVHFLLLKYRAREPVTKAEMLESVLRNCQDFFPVIFS

SEQ ID NO: 246206 - protein, 89 aa, Artificial Sequence
  derived and/or modified sequence
MPLEQRSQHCKPEEGLEARGEALGLVGAQAPATEEQQTASSSSTLVEVTLGEVPAADSPSPPHSPQGASSFSTTINYTLWRQSDEGSSN

SEQ ID NO: 246207 - protein, 148 aa, Artificial Sequence
  derived and/or modified sequence
MPLEQRSQHCKPEEGLEARGEALGLVGAQAPATEEQQTASSSSTLVEVTLGEVPAADSPSPPHSPQGASSFSTTINYTLWRQSDEGSSNQEEEGPRMFPDLESEFQAAISRKMVELVHFLLLKYRAREPVTKAEMLESVLRNCQDFFP

SEQ ID NO: 246208 - protein, 37 aa, Artificial Sequence
  derived and/or modified sequence
MPLEQRSQHCKPEEGLEARGEALGLVGAQAPATEEQQ

SEQ ID NO: 246209 - DNA, 945 bp, Artificial Sequence
  derived and/or modified sequence
atgcccctggagcagagaagccagcactgcaagcccgaggagggcctggaggccagaggcgaggccctgggcctggtgggcgcccaggcccccgccaccgaggagcagcagaccgccagcagcagcagcaccctggtggaggtgaccctgggcgaggtgcccgccgccgacagccccagccccccccacagcccccagggcgccagcagcttcagcaccaccatcaactacaccctgtggagacagagcgacgagggcagcagcaaccaggaggaggagggccccagaatgttccccgacctggagagcgagttccaggccgccatcagcagaaagatggtggagctggtgcacttcctgctgctgaagtacagagccagagagcccgtgaccaaggccgagatgctggagagcgtgctgagaaactgccaggacttcttccccgtgatcttcagcaaggccagcgagtacctgcagctggtgttcggcatcgaggtggtggaggtggtgcccatcagccacctgtacatcctggtgacctgcctgggcctgagctacgacggcctgctgggcgacaaccaggtgatgcccaagaccggcctgctgatcatcgtgctggccatcatcgccatcgagggcgactgcgcccccgaggagaagatctgggaggagctgagcatgctggaggtgttcgagggcagagaggacagcgtgttcgcccaccccagaaagctgctgatgcaggacctggtgcaggagaactacctggagtacagacaggtgcccggcagcgaccccgcctgctacgagttcctgtggggccccagagccctgatcgagaccagctacgtgaaggtgctgcaccacaccctgaagatcggcggcgagccccacatcagctacccccccctgcacgagagagccctgagagagggcgaggagtag

SEQ ID NO: 246210 - DNA, 102 bp, Artificial Sequence
  derived and/or modified sequence
atgcccctggagcagagaagccagcactgcaagcccgaggagggcctggaggccagaggcgaggccctgggcctggtgggcgcccaggcccccgccacctag

SEQ ID NO: 246211 - DNA, 363 bp, Artificial Sequence
  derived and/or modified sequence
atgcccctggagcagagaagccagcactgcaagcccgaggagggcctggaggccagaggcgaggccctgggcctggtgggcgcccaggcccccgccaccgaggagcagcagaccgccagcagcagcagcaccctggtggaggtgaccctgggcgaggtgcccgccgccgacagccccagccccccccacagcccccagggcgccagcagcttcagcaccaccatcaactacaccctgtggagacagagcgacgagggcagcagcaaccaggaggaggagggccccagaatgttccccgacctggagagcgagttccaggccgccatcagcagaaagatggtggagctggtgcacttcctgtag

SEQ ID NO: 246212 - DNA, 459 bp, Artificial Sequence
  derived and/or modified sequence
atgcccctggagcagagaagccagcactgcaagcccgaggagggcctggaggccagaggcgaggccctgggcctggtgggcgcccaggcccccgccaccgaggagcagcagaccgccagcagcagcagcaccctggtggaggtgaccctgggcgaggtgcccgccgccgacagccccagccccccccacagcccccagggcgccagcagcttcagcaccaccatcaactacaccctgtggagacagagcgacgagggcagcagcaaccaggaggaggagggccccagaatgttccccgacctggagagcgagttccaggccgccatcagcagaaagatggtggagctggtgcacttcctgctgctgaagtacagagccagagagcccgtgaccaaggccgagatgctggagagcgtgctgagaaactgccaggacttcttccccgtgatcttcagctag

SEQ ID NO: 246213 - DNA, 270 bp, Artificial Sequence
  derived and/or modified sequence
atgcccctggagcagagaagccagcactgcaagcccgaggagggcctggaggccagaggcgaggccctgggcctggtgggcgcccaggcccccgccaccgaggagcagcagaccgccagcagcagcagcaccctggtggaggtgaccctgggcgaggtgcccgccgccgacagccccagccccccccacagcccccagggcgccagcagcttcagcaccaccatcaactacaccctgtggagacagagcgacgagggcagcagcaactag

SEQ ID NO: 246214 - DNA, 447 bp, Artificial Sequence
  derived and/or modified sequence
atgcccctggagcagagaagccagcactgcaagcccgaggagggcctggaggccagaggcgaggccctgggcctggtgggcgcccaggcccccgccaccgaggagcagcagaccgccagcagcagcagcaccctggtggaggtgaccctgggcgaggtgcccgccgccgacagccccagccccccccacagcccccagggcgccagcagcttcagcaccaccatcaactacaccctgtggagacagagcgacgagggcagcagcaaccaggaggaggagggccccagaatgttccccgacctggagagcgagttccaggccgccatcagcagaaagatggtggagctggtgcacttcctgctgctgaagtacagagccagagagcccgtgaccaaggccgagatgctggagagcgtgctgagaaactgccaggacttcttcccctag

SEQ ID NO: 246215 - DNA, 114 bp, Artificial Sequence
  derived and/or modified sequence
atgcccctggagcagagaagccagcactgcaagcccgaggagggcctggaggccagaggcgaggccctgggcctggtgggcgcccaggcccccgccaccgaggagcagcagtag

SEQ ID NO: 246216 - DNA, 945 bp, Artificial Sequence
  derived and/or modified sequence
atgccgctggaacagcgcagccagcattgcaaacccgaagagggtcttgaggcacgcggtgaggcacttgggctcgtaggcgcacaagcaccggcaaccgaggaacagcaaactgcttcttcatcctctaccctggtggaagtcacactgggtgaagtccctgctgccgatagtccaagcccgccccactccccccagggagcgagtagcttttccactacgatcaattacactctgtggcggcagagtgatgagggcagctccaaccaggaagaggaagggcccagaatgttccccgatctcgaaagcgaattccaggccgcaatttcacgaaagatggtggagctcgtgcatttcctcctcttgaagtacagagcaagagagccagtgacgaaggctgaaatgcttgagagtgtgctgcggaattgccaggacttctttccagttatcttctccaaggcaagcgagtatctgcagctggtgtttgggatcgaggtggtagaggtcgtgcctatttctcacctgtatattttggtgacttgtctggggttaagctacgatggcttgttgggggacaatcaggtgatgccgaaaactggactactgataattgtattggccattatagcgattgagggcgattgtgctcccgaagagaagatctgggaggaactgtctatgctcgaggtattcgaaggaagagaagactctgttttcgctcacccgcgaaaactacttatgcaggacttagtgcaagaaaactatctcgagtataggcaagtccctggctcggacccagcctgctatgaatttttatgggggcccagagcgctgattgaaacaagctatgtcaaggttctacatcacactctaaaaatcggtggtgagccgcatatttcgtacccaccccttcatgagagggctctcagagagggggaggagtag

SEQ ID NO: 246217 - DNA, 945 bp, Artificial Sequence
  derived and/or modified sequence
atgcccctcgaacagcggtctcagcattgtaaaccagaagaaggcttggaagcgcgcggagaagctttaggcctggtcggcgcccaggcgcctgcgactgaagaacagcagaccgcttcctcctcatctaccttggtcgaagtgacactgggcgaagtccccgctgcagacagcccaagtcccccccatagtccccagggggcctcctccttcagcaccacaataaactacaccctttggagacagagtgatgagggaagcagcaaccaagaggaggaaggtccacgcatgtttcccgatctggaatctgagttccaggccgcaatatccagaaaaatggtggagctggtgcacttcttactgctgaagtatcgggctcgcgagccagttaccaaagctgagatgctcgagtctgtcctccggaactgccaagatttttttcctgttatcttctcaaaggcaagtgagtacctgcaactggtctttggtatcgaagtggtggaggttgtgcctatcagccatctgtacatactcgtgacctgtctgggccttagctacgatggcctattaggagataaccaagtcatgcctaagacgggcctgctgattatcgtgttggctattatcgccatcgaaggagactgcgcacccgaggagaagatatgggaagaactctcaatgttagaagtatttgaggggagggaggatagcgtctttgctcacccacgcaaattattgatgcaggatctggtgcaggaaaattacctcgagtatcgccaggtccctggttccgatcccgcatgttatgagttcttgtggggcccgagagcgttaattgagacatcatatgtaaaagtgctgcaccacacgttgaaaataggcggcgaaccacacatctcttacccccccctgcacgaaagggcgctcagagaaggcgaagaatag

SEQ ID NO: 246218 - DNA, 102 bp, Artificial Sequence
  derived and/or modified sequence
atgcctttggagcagcgatcccaacattgtaagcccgaagaaggactcgaagcaagaggcgaggctctgggcctcgtaggggcccaggccccggcgacttag

SEQ ID NO: 246219 - DNA, 363 bp, Artificial Sequence
  derived and/or modified sequence
atgcccttggaacaaagaagccaacattgcaaaccagaggaaggcctggaggcacgaggggaggctcttggcctggtgggggcccaggcaccggcaaccgaggagcaacagacagccagcagctcatcaacattggttgaagtcaccctcggcgaagtgcctgcagccgacagtccaagccctcctcactccccacagggagcttcctccttctccacaacaatcaattatacactgtggcgccagagcgatgaaggcagtagcaatcaggaggaggaaggaccacgtatgttccccgaccttgagagtgaattccaggccgccatctcacggaaaatggtggaactcgtgcacttcctgtag

SEQ ID NO: 246220 - DNA, 459 bp, Artificial Sequence
  derived and/or modified sequence
atgccacttgagcaaaggtcgcagcactgtaagcccgaggagggattagaggctcgcggcgaggctttgggcttggtaggggcccaggcacctgccactgaggagcagcaaacagcaagttcttcaagtacactggtcgaggtgaccttaggcgaagttccggcagcggactcaccttcccctccacacagcccccaaggtgccagtagcttctctactactattaactacacgctgtggcggcagtctgacgagggaagctccaatcaggaggaagagggcccaagaatgtttccagacctcgagagcgaattccaagccgccatttctaggaaaatggtcgagcttgttcactttctgctgctcaaatatcgggctcgcgaaccagtcaccaaagctgaaatgctggaatccgtgctgcggaactgccaggatttcttccctgttatctttagctag

SEQ ID NO: 246221 - DNA, 270 bp, Artificial Sequence
  derived and/or modified sequence
atgcccctggagcagcgctctcagcattgcaaacctgaagagggactggaggctcgaggcgaggccctgggccttgtgggggcacaggccccagcaacagaagagcagcagaccgctagtagctcatccaccctggtggaggtcacgttaggagaggttccggcagccgatagccccagccctccacattcccctcagggcgcttcctccttctccaccaccatcaattacacgctgtggcgacagagtgacgagggctcttctaattag

SEQ ID NO: 246222 - DNA, 447 bp, Artificial Sequence
  derived and/or modified sequence
atgcctctcgagcagaggtcacagcattgcaaacccgaggaggggctcgaggccaggggtgaggccctcggacttgtgggcgcccaggctccagcaacggaggaacaacagacagcttccagcagttctactctggtcgaggtgacgctgggcgaagtgccagcagccgacagcccgagcccaccccattcgccacagggagcgtctagctttagcacaacgataaattacacgctgtggcggcaatcagacgagggctcaagcaatcaggaagaagaaggccctcgcatgttcccagatctcgagagtgagttccaggccgcaatatcgcggaagatggtggagttggtgcactttctgctgttaaagtacagagcccgtgaacccgttaccaaggcagagatgcttgagtcagtgttgcggaactgccaggatttcttcccctag

SEQ ID NO: 246223 - DNA, 114 bp, Artificial Sequence
  derived and/or modified sequence
atgcctctggagcagaggtcacaacactgcaagcccgaggaggggctggaggcacgcggggaagcactgggcctggtgggcgcccaagctccagccaccgaggagcaacagtag

SEQ ID NO: 246224 - DNA, 945 bp, Artificial Sequence
  derived and/or modified sequence
atgcccctggagcagaggagccagcactgcaagccagaggagggcctggaggcccggggggaggccctgggcctggtgggcgcccaggccccagccacagaggagcagcagacagccagcagcagcagcaccctggtggaggtgaccctgggggaggtgcctgctgctgacagccccagccccccccacagcccccagggcgccagcagcttcagcaccaccatcaactacaccctgtggaggcagagtgatgagggcagcagcaaccaggaggaggagggccccaggatgtttcctgacctggagagcgagttccaggccgccatcagcaggaagatggtggagctggtgcacttcctgctgctgaagtaccgggcccgggagcctgtgaccaaggccgagatgctggagagcgtgctgaggaactgccaggacttcttccctgtgatcttcagcaaggccagcgagtacctgcagctggtgtttggcatcgaggtggtggaggtggtgcccatcagccacctgtacatcctggtgacctgcctgggcctgtcctatgatggcctgctgggggacaaccaggtgatgcccaagacaggcctgctgatcatcgtgctggccatcatcgccattgaaggagactgtgcccctgaggagaagatctgggaggagctgtccatgctggaggtgtttgagggcagagaagattctgtgtttgcccaccccaggaagctgctgatgcaggacctggtgcaggagaactacctggagtaccggcaggtgcccggcagtgaccctgcctgctatgagttcctgtggggcccccgggccctgattgagaccagctatgtgaaggtgctgcaccacaccctgaagattggaggagagccccacatctcctacccacccctgcacgagcgggccctgcgggagggggaggagtag

SEQ ID NO: 246225 - DNA, 102 bp, Artificial Sequence
  derived and/or modified sequence
atgcccctggagcagaggagccagcactgcaagccagaggagggcctggaggcccggggggaggccctgggcctggtgggcgcccaggccccagccacctag

SEQ ID NO: 246226 - DNA, 363 bp, Artificial Sequence
  derived and/or modified sequence
atgcccctggagcagaggagccagcactgcaagccagaggagggcctggaggcccggggggaggccctgggcctggtgggcgcccaggccccagccacagaggagcagcagacagccagcagcagcagcaccctggtggaggtgaccctgggggaggtgcctgctgctgacagccccagccccccccacagcccccagggcgccagcagcttcagcaccaccatcaactacaccctgtggaggcagagtgatgagggcagcagcaaccaggaggaggagggccccaggatgtttcctgacctggagagcgagttccaggccgccatcagcaggaagatggtggagctggtgcacttcctgtag

SEQ ID NO: 246227 - DNA, 459 bp, Artificial Sequence
  derived and/or modified sequence
atgcccctggagcagaggagccagcactgcaagccagaggagggcctggaggcccggggggaggccctgggcctggtgggcgcccaggccccagccacagaggagcagcagacagccagcagcagcagcaccctggtggaggtgaccctgggggaggtgcctgctgctgacagccccagccccccccacagcccccagggcgccagcagcttcagcaccaccatcaactacaccctgtggaggcagagtgatgagggcagcagcaaccaggaggaggagggccccaggatgtttcctgacctggagagcgagttccaggccgccatcagcaggaagatggtggagctggtgcacttcctgctgctgaagtaccgggcccgggagcctgtgaccaaggccgagatgctggagagcgtgctgaggaactgccaggacttcttccctgtgatcttctcctag

SEQ ID NO: 246228 - DNA, 270 bp, Artificial Sequence
  derived and/or modified sequence
atgcccctggagcagaggagccagcactgcaagccagaggagggcctggaggcccggggggaggccctgggcctggtgggcgcccaggccccagccacagaggagcagcagacagccagcagcagcagcaccctggtggaggtgaccctgggggaggtgcctgctgctgacagccccagccccccccacagcccccagggcgccagcagcttcagcaccaccatcaactacaccctgtggaggcagagtgatgagggcagcagcaactag

SEQ ID NO: 246229 - DNA, 447 bp, Artificial Sequence
  derived and/or modified sequence
atgcccctggagcagaggagccagcactgcaagccagaggagggcctggaggcccggggggaggccctgggcctggtgggcgcccaggccccagccacagaggagcagcagacagccagcagcagcagcaccctggtggaggtgaccctgggggaggtgcctgctgctgacagccccagccccccccacagcccccagggcgccagcagcttcagcaccaccatcaactacaccctgtggaggcagagtgatgagggcagcagcaaccaggaggaggagggccccaggatgtttcctgacctggagagcgagttccaggccgccatcagcaggaagatggtggagctggtgcacttcctgctgctgaagtaccgggcccgggagcctgtgaccaaggccgagatgctggagagcgtgctgaggaactgccaggacttcttcccctag

SEQ ID NO: 246230 - DNA, 114 bp, Artificial Sequence
  derived and/or modified sequence
atgcccctggagcagaggagccagcactgcaagccagaggagggcctggaggcccggggggaggccctgggcctggtgggcgcccaggccccagccacagaggagcagcagtag

SEQ ID NO: 246231 - DNA, 945 bp, Artificial Sequence
  derived and/or modified sequence
atgcccctggagcagcggagccagcactgcaagcccgaggagggcttggaagctcggggtgaagcactggggcttgtgggggcgcaggctcctgctactgaagaacaacagacagcatcaagctcatctactctagtggaggtgacactgggagaggttccagctgcagattccccgagccctccccacagtccacagggcgcgagcagttttagcacgactatcaactatactctctggaggcagagtgacgagggctcatctaaccaggaggaggaggggcctcgaatgttcccggacctcgagtctgaattccaagccgcaatcagccggaaaatggtggagttggttcatttccttttgctcaagtaccgggcacgcgagcccgtgactaaggccgagatgcttgagtccgtcctgagaaactgccaggactttttcccggtaattttctcaaaggcttctgagtacttacagctcgtctttggcatcgaggtggtggaggtggttccgattagtcacctttacatactcgttacttgccttgggctgagttatgatgggctgttgggagacaaccaggtcatgccaaagacggggctcctgatcatcgttctagccattatagctattgagggtgattgtgcccccgaggaaaaaatctgggaagagctctccatgcttgaggtctttgagggacgggaagattccgtctttgcccacccacggaaactgctcatgcaggatctggtccaggagaattacctggagtacaggcaggtccccggctcagaccccgcatgctacgaattcctctgggggcctagggctcttattgagaccagctacgtgaaggtgctgcatcacactctcaaaatcgggggggagcctcatataagctacccaccactacacgaacgcgctctgcgagaaggcgaggagtag

SEQ ID NO: 246232 - DNA, 945 bp, Artificial Sequence
  derived and/or modified sequence
atgcccctggagcagcggagccagcactgcaagcccgaggagggcctggaagcaagaggagaggccctagggcttgtgggcgcgcaggcacctgctaccgaggagcagcagaccgccagtagttcaagtacactggtggaggtgacactgggagaagtcccagccgcagactcccccagcccgccccactctcctcagggtgcctccagcttctccacaaccattaattacaccctgtggcgacagtcggatgagggttccagtaaccaggaagaggaggggcctaggatgtttcctgatctggagtcagaattccaggccgcgattagcagaaagatggtggagcttgtgcacttcctgttactgaagtaccgggctcgagagcctgtcaccaaggccgagatgctggagtccgttctgcgcaattgtcaggactttttccccgtcattttttcgaaggcttctgagtacctgcagttggtcttcggcatagaagtggtggaggtggtgcccatctcccacctgtatatcctcgtgacatgtctggggctgtcttatgacgggttactgggcgataaccaagtcatgcctaaaacaggcctcctaatcatagttctggccataatcgccattgagggggactgtgctcccgaggaaaaaatctgggaagaactgagtatgttagaggtgttcgaggggcgcgaggattcagtgttcgcccatccgaggaaactgctcatgcaggatctggtgcaggaaaactacctggaatatcggcaagtccccggctccgaccctgcctgctatgagttcttgtggggccccagggccctgatcgaaacttcgtatgtgaaagtccttcaccatacgcttaaaattggaggcgagcctcacatctcctacccccctctccacgaacgcgcactgcgggaaggtgaggaatag

SEQ ID NO: 246233 - DNA, 102 bp, Artificial Sequence
  derived and/or modified sequence
atgcccctggagcagcggagccagcactgcaagcccgaggagggcctggaagctaggggtgaagccctgggtctggtgggagctcaggcacctgcaacctag

SEQ ID NO: 246234 - DNA, 363 bp, Artificial Sequence
  derived and/or modified sequence
atgcccctggagcagcggagccagcactgcaagcccgaggagggcctagaagccaggggggaggctctgggcctggtgggtgcccaggcccccgccacagaagagcagcagactgcctcctcttcaagcaccctcgtggaagtgacactgggcgaagtccctgctgcagatagtcctagccccccacacagcccgcagggcgcctctagcttctccaccaccatcaactacacactgtggcgacaatctgatgaaggtagctccaatcaagaagaagaaggaccccgaatgtttcccgaccttgaatcagagttccaggccgctattagtcggaagatggtggaactggtgcactttctctag

SEQ ID NO: 246235 - DNA, 459 bp, Artificial Sequence
  derived and/or modified sequence
atgcccctggagcagcggagccagcactgcaagcccgaggagggcttagaggcacggggtgaggccctggggcttgtgggggcccaggcgcctgctactgaggagcaacagacagcgtcatcttcaagcactctggtggaggtgactttaggagaggttcccgcagctgactcaccatcccccccacattccccccagggtgctagcagtttctcaacaacgatcaactatactctgtggcggcagtccgacgaagggtcctctaatcaggaagaggagggccctagaatgtttccagatctcgagagcgagtttcaggcggctatcagccggaaaatggtggagctggtgcatttccttctactcaaataccgagcccgtgagcccgtgactaaagctgagatgttggagtccgtcttgcggaactgccaggatttcttcccggtgattttctcctag

SEQ ID NO: 246236 - DNA, 270 bp, Artificial Sequence
  derived and/or modified sequence
atgcccctggagcagcggagccagcactgcaagcccgaggagggcctggaggcccggggagaggctcttgggctcgtaggagcacaggcccccgccaccgaggaacagcaaacagcaagttcatcgtctactttggtggaggtcacactgggagaggtcccggccgctgactctcccagcccaccacattctcctcagggagccagctcattcagcaccaccataaattacaccctgtggcggcagtccgacgagggatcctccaattag

SEQ ID NO: 246237 - DNA, 447 bp, Artificial Sequence
  derived and/or modified sequence
atgcccctggagcagcggagccagcactgcaagcccgaggagggcctcgaagcccggggggaagccctgggcctggtgggcgcccaggcgcctgccaccgaagaacaacagactgccagctcatcctccaccctcgtcgaggttacgctgggggaggtgccagcagccgattccccttcgccaccacactcccctcagggtgcctcctccttctcaaccacaattaactatactctttggcgccaatcagatgaggggtcgagcaaccaagaggaagaaggaccccgcatgttccctgacctggaatcagagttccaggctgctatcagcaggaagatggtagagttggtacattttcttctgctgaaatacagggccagggaacccgtgaccaaagccgagatgctggaaagcgtccttcgaaactgccaagacttctttccatag

SEQ ID NO: 246238 - DNA, 114 bp, Artificial Sequence
  derived and/or modified sequence
atgcccctggagcagcggagccagcactgcaagcccgaggagggcctcgaggctagaggggaggccttaggtctagtcggagctcaagcccctgctacagaagagcagcagtag

SEQ ID NO: 246239 - DNA, 1981 bp, Artificial Sequence
  derived and/or modified sequence
aacggcctgacgtcggcggagggaagcaggcgcaggctccgtgaggaggcaagaatccgggctttgcccctgcaatcaacccacggaagctccgggaatggcggccaagcacgcggatcctgacgttcacatatctcagggagttgatgaccttgttttcagaaggtgactcaggtcaacacaggggcccccatctggtcgacagatgcagtggttctaggatctgccaagcatccaggtggagagcctgaggaatcaggagctccaggaaccaggcagtgaggccttggtctgagtcagtgtcctcaggtcacagagcagaggggacgcagacagtgccaacactgaaggttctgagggggacaggctgacaagtaggacccgaggcactggaggagcattgaaggagaagatctgcctgtgggtcttcattgcccagctcctgcccgcactcctgcctgctgccctgaccagagtcatcatgcctcttgagcagaggagtcagcactgcaagcctgaagaaggccttgaggcccgaggagaggccctgggcctggtgggtgcgcaggctcctgctactgaggagcagcagaccgcttcttcctcttctactctagtggaagttaccctgggggaggtgcctgctgccgactcaccgagtcctccccacagtcctcagggagcctccagcttctcgactaccatcaactacactctttggagacaatccgatgagggctccagcaaccaagaagaggaggggccaagaatgtttcccgacctggagtccgagttccaagcagcaatcagtaggaagatggttgagttggttcattttctgctcctcaagtatcgagccagggagccggtcacaaaggcagaaatgctggagagtgtcctcagaaattgccaggacttctttcccgtgatcttcagcaaagcctccgagtacttgcagctggtctttggcatcgaggtggtggaagtggtccccatcagccacttgtacatccttgtcacctgcctgggcctctcctacgatggcctgctgggcgacaatcaggtcatgcccaagacaggcctcctgataatcgtcctggccataatcgcaatagagggcgactgtgcccctgaggagaaaatctgggaggagctgagtatgttggaggtgtttgaggggagggaggacagtgtcttcgcacatcccaggaagctgctcatgcaagatctggtgcaggaaaactacctggagtaccggcaggtgcccggcagtgatcctgcatgctacgagttcctgtggggtccaagggccctcattgaaaccagctatgtgaaagtcctgcaccatacactaaagatcggtggagaacctcacatttcctacccacccctgcatgaacgggctttgagagagggagaagagtgagtctcagcacatgttgcagccagggccagtgggagggggtctgggccagtgcaccttccagggccccatccattagcttccactgcctcgtgtgatatgaggcccattcctgcctctttgaagagagcagtcagcattcttagcagtgagtttctgttctgttggatgactttgagatttatctttgtttcctgttggaattgttcaaatgttccttttaacaaatggttggatgaacttcagcatccaagtttatgaatgacagtagtcacacatagtgctgtttatatagtttaggggtaagagtcctgttttttattcagattgggaaatccattccattttgtgagttgtcacataataacagcagtggaatatgtatttgcctatattgtgaacgaattagcagtaaaatacatgatacaaggaactcaaaagatagttaattcttgccttatacctcagtctattatgtaaaattaaaaatatgtgtatgtttttgcttctttgagaatgcaaaagaaattaaatctgaataaataattcttcctgttc

SEQ ID NO: 246240 - DNA, 1714 bp, Artificial Sequence
  derived and/or modified sequence
cagaggacagcgagattctcgccctgagcaacggcctgacgtcggcggagggaagcaggcgcaggctccgtgaggaggcaaggttctgagggggacaggctgacaagtaggacccgaggcactggaggagcattgaaggagaagatctgcctgtgggtcttcattgcccagctcctgcccgcactcctgcctgctgccctgaccagagtcatcatgcctcttgagcagaggagtcagcactgcaagcctgaagaaggccttgaggcccgaggagaggccctgggcctggtgggtgcgcaggctcctgctactgaggagcagcagaccgcttcttcctcttctactctagtggaagttaccctgggggaggtgcctgctgccgactcaccgagtcctccccacagtcctcagggagcctccagcttctcgactaccatcaactacactctttggagacaatccgatgagggctccagcaaccaagaagaggaggggccaagaatgtttcccgacctggagtccgagttccaagcagcaatcagtaggaagatggttgagttggttcattttctgctcctcaagtatcgagccagggagccggtcacaaaggcagaaatgctggagagtgtcctcagaaattgccaggacttctttcccgtgatcttcagcaaagcctccgagtacttgcagctggtctttggcatcgaggtggtggaagtggtccccatcagccacttgtacatccttgtcacctgcctgggcctctcctacgatggcctgctgggcgacaatcaggtcatgcccaagacaggcctcctgataatcgtcctggccataatcgcaatagagggcgactgtgcccctgaggagaaaatctgggaggagctgagtatgttggaggtgtttgaggggagggaggacagtgtcttcgcacatcccaggaagctgctcatgcaagatctggtgcaggaaaactacctggagtaccggcaggtgcccggcagtgatcctgcatgctacgagttcctgtggggtccaagggccctcattgaaaccagctatgtgaaagtcctgcaccatacactaaagatcggtggagaacctcacatttcctacccacccctgcatgaacgggctttgagagagggagaagagtgagtctcagcacatgttgcagccagggccagtgggagggggtctgggccagtgcaccttccagggccccatccattagcttccactgcctcgtgtgatatgaggcccattcctgcctctttgaagagagcagtcagcattcttagcagtgagtttctgttctgttggatgactttgagatttatctttgtttcctgttggaattgttcaaatgttccttttaacaaatggttggatgaacttcagcatccaagtttatgaatgacagtagtcacacatagtgctgtttatatagtttaggggtaagagtcctgttttttattcagattgggaaatccattccattttgtgagttgtcacataataacagcagtggaatatgtatttgcctatattgtgaacgaattagcagtaaaatacatgatacaaggaactcaaaagatagttaattcttgccttatacctcagtctattatgtaaaattaaaaatatgtgtatgtttttgcttctttgagaatgcaaaagaaattaaatctgaataaataattcttcctgttca

SEQ ID NO: 246241 - DNA, 652 bp, Artificial Sequence
  derived and/or modified sequence
tcggcggagggaagcaggcgcaggctccgtgaggaggcaagatctcagggagttgatgaccttgttttcagaaggtgactcaggtcaacacaggggcccccatctggtcgacagatgcagtggttctaggatctgccaagcatccaggtggagagcctgaggttctgagggggacaggctgacaagtaggacccgaggcactggaggagcattgaaggagaagatctgcctgtgggtcttcattgcccagctcctgcccgcactcctgcctgctgccctgaccagagtcatcatgcctcttgagcagaggagtcagcactgcaagcctgaagaaggccttgaggcccgaggagaggccctgggcctggtgggtgcgcaggctcctgctactgaggagcagcagaccgcttcttcctcttctactctagtggaagttaccctgggggaggtgcctgctgccgactcaccgagtcctccccacagtcctcagggagcctccagcttctcgactaccatcaactacactctttggagacaatccgatgagggctccagcaaccaagaagaggaggggccaagaatgtttcccgacctggagtccgagttccaagcagcaatcagtaggaagatggttgagttggttcattttctg

SEQ ID NO: 246242 - DNA, 879 bp, Artificial Sequence
  derived and/or modified sequence
agcgagattctcgccctgagcaacggcctgacgtcggcggagggaagcaggcgcaggctccgtgaggaggcaagatctcagggagttgatgaccttgttttcagaaggtgactcaggtcaacacaggggcccccatctggtcgacagatgcagtggttctaggatctgccaagcatccaggtggagagcctgaggaatcaggagctccaggaaccaggcagtgaggccttggtctgagtcagtgtcctcaggtcacagagcagaggggacgcagacagtgccaacactgaaggttctgagggggacaggctgacaagtaggacccgaggcactggaggagcattgaaggagaagatctgcctgtgggtcttcattgcccagctcctgcccgcactcctgcctgctgccctgaccagagtcatcatgcctcttgagcagaggagtcagcactgcaagcctgaagaaggccttgaggcccgaggagaggccctgggcctggtgggtgcgcaggctcctgctactgaggagcagcagaccgcttcttcctcttctactctagtggaagttaccctgggggaggtgcctgctgccgactcaccgagtcctccccacagtcctcagggagcctccagcttctcgactaccatcaactacactctttggagacaatccgatgagggctccagcaaccaagaagaggaggggccaagaatgtttcccgacctggagtccgagttccaagcagcaatcagtaggaagatggttgagttggttcattttctgctcctcaagtatcgagccagggagccggtcacaaaggcagaaatgctggagagtgtcctcagaaattgccaggacttctttcccgtgatcttcagc

SEQ ID NO: 246243 - DNA, 750 bp, Artificial Sequence
  derived and/or modified sequence
gcaacggcctgacgtcggcggagggaagcaggcgcaggctccgtgaggaggcaagaatccgggctttgcccctgcaatcaacccacggaagctccgggaatggcggccaagcacgcggatcctgacgttcacatatctcagggagttgatgaccttgttttcagaaggtgactcaggtcaacacaggggcccccatctggtcgacagatgcagtggttctaggatctgccaagcatccaggtggagagcctgaggaatcaggagctccaggaaccaggcagtgaggccttggtctgagtcagtgtcctcaggtcacagagcagaggggacgcagacagtgccaacactgaaggttctgagggggacaggctgacaagtaggacccgaggcactggaggagcattgaaggagaagatctgcctgtgggtcttcattgcccagctcctgcccgcactcctgcctgctgccctgaccagagtcatcatgcctcttgagcagaggagtcagcactgcaagcctgaagaaggccttgaggcccgaggagaggccctgggcctggtgggtgcgcaggctcctgctactgaggagcagcagaccgcttcttcctcttctactctagtggaagttaccctgggggaggtgcctgctgccgactcaccgagtcctccccacagtcctcagggagcctccagcttctcgactaccatcaactacactctttggagacaatccgatgagggctccagcaac

SEQ ID NO: 246244 - DNA, 753 bp, Artificial Sequence
  derived and/or modified sequence
aggtaagacgccgagggaggactgaggcgggcctcaccccagacagagggcccccaataatccagcgctgcctctgctgccgggcctggaccaccctgcaggggaagacttctcaggctgagtcgccaccacctcaccccgccaccccccgccgctttaaccgcagggaactctggcgttctgagggggacaggctgacaagtaggacccgaggcactggaggagcattgaaggagaagatctgcctgtgggtcttcattgcccagctcctgcccgcactcctgcctgctgccctgaccagagtcatcatgcctcttgagcagaggagtcagcactgcaagcctgaagaaggccttgaggcccgaggagaggccctgggcctggtgggtgcgcaggctcctgctactgaggagcagcagaccgcttcttcctcttctactctagtggaagttaccctgggggaggtgcctgctgccgactcaccgagtcctccccacagtcctcagggagcctccagcttctcgactaccatcaactacactctttggagacaatccgatgagggctccagcaaccaagaagaggaggggccaagaatgtttcccgacctggagtccgagttccaagcagcaatcagtaggaagatggttgagttggttcattttctgctcctcaagtatcgagccagggagccggtcacaaaggcagaaatgctggagagtgtcctcagaaattgccaggacttctttcccg

SEQ ID NO: 246245 - DNA, 945 bp, Artificial Sequence
  derived and/or modified sequence
atgcctctggagcagcggagtcaacactgtaaaccagaggagggcttggaggctaggggcgaggcgctgggacttgtcggggctcaggctccagcaacagaagagcaacagactgctagctctagtagcacattggtggaagtaacactgggagaggttcctgccgctgatagtccgtctcccccacacagtcctcaaggggcttcgtctttcagtaccaccattaactataccctatggcgtcagtccgatgaaggttcaagtaatcaggaagaggaggggcctcgcatgttcccagacctcgagagtgaatttcaagcggctatcagccgcaagatggtcgagctcgtgcactttcttcttcttaaataccgggcacgggagcctgttactaaggcagaaatgctggagtctgtgttgcgcaactgccaggattttttccctgtgattttttcgaaggccagcgagtacctccaactcgtgttcggaatagaggtagtagaagtggttcccatttcacatctctatatccttgtaacctgcctcgggctgagctatgacggactcttaggtgacaaccaggtaatgccaaaaacggggctgctgatcatcgtgctcgcgataattgcaattgaaggggattgtgctcctgaggagaaaatctgggaggagctgtcaatgttggaggttttcgagggcagggaagatagcgtgttcgcccatccaagaaaacttctcatgcaggacctcgtccaggaaaattacctcgagtatcgccaggtaccgggaagcgatccggcttgctatgagttcctctggggcccaagagccttgattgaaacttcgtacgtgaaggtgctccatcacactcttaaaattgggggagaacctcacatctcttatcctccacttcatgaacgtgcgctgcgcgaaggggaggagtag

SEQ ID NO: 246246 - DNA, 945 bp, Artificial Sequence
  derived and/or modified sequence
atgccgttggaacaacgttcgcagcactgcaagccggaggaaggcctcgaggcgaggggagaagcgctcggcctggttggcgctcaggccccagcaaccgaagaacagcagacagcaagctccagtagtaccctcgtggaagttacccttggcgaagtccccgctgctgattcccccagtccacctcatagcccccagggagcctcatccttttctaccactatcaactatacattatggagacagagtgatgaggggagttctaaccaggaggaagaaggccctaggatgttcccggatctggaaagcgaatttcaggcagccatttcccgaaaaatggtggagctggtacacttccttctgctcaagtaccgtgctagggagcctgtgaccaaagcggagatgctagaaagcgtgctgagaaactgccaggactttttccccgttatatttagcaaggcaagcgaatatctgcagcttgttttcggcatagaagtcgttgaggtcgtccctatctcgcacttgtacatactggttacatgcttgggcctgtcatacgacgggttgctcggtgataatcaggtcatgccaaaaaccgggctgctcataatcgtgctggcaatcattgccattgaaggggattgcgccccagaggaaaaaatatgggaagaattatcgatgctcgaagtctttgagggtcgcgaggatagcgtcttcgcccatcccagaaagcttctgatgcaagacctcgtccaagagaactacttagaatataggcaggttcccggatcagacccagcctgttatgagtttttgtggggtccccgtgcacttattgagaccagttatgtcaaagtgttacatcatacactcaagattgggggagaaccccacatctcgtacccacccctgcacgagagggcattaagagagggggaggagtag

SEQ ID NO: 246247 - DNA, 102 bp, Artificial Sequence
  derived and/or modified sequence
atgccactcgagcaaaggagtcagcactgtaagccagaggagggcctggaagctaggggagaggcacttggactggtgggcgcacaagcccctgctacctag

SEQ ID NO: 246248 - DNA, 363 bp, Artificial Sequence
  derived and/or modified sequence
atgccacttgagcagcggagccagcactgtaagcctgaggagggactggaagcgaggggcgaggccctgggccttgtgggagcacaggcccctgcaacagaagagcaacagacagcctcttctagctcaacccttgtggaagtcactcttggagaggtgcccgcagcggattccccgagcccacctcactcaccccagggggcttccagtttctccactaccatcaactatactctgtggcgccagagcgacgaaggctcatcaaaccaggaggaggaaggccctcgaatgtttcccgacctggagagcgagtttcaggcagctataagccgcaagatggtggagctggtccactttctgtag

SEQ ID NO: 246249 - DNA, 459 bp, Artificial Sequence
  derived and/or modified sequence
atgcctctggaacagcgctctcagcactgcaagccagaagaaggattggaggctcgcggtgaggcgctgggactggtcggagcacaggcacctgcaactgaagaacaacagacagcgtcatccagttcgacactggtcgaggtcactctcggcgaagtgccagccgctgatagcccctcacctccacactcccctcagggtgcctcttcatttagcacaaccatcaactatactctgtggagacagagcgatgaaggctccagcaatcaggaggaagaggggcctaggatgtttcccgatcttgagtctgagttccaggctgcaatcagcaggaaaatggtggaactagtgcacttcttactgcttaagtatagagcgagggaacctgtcaccaaagctgagatgctggagagtgtcctgcggaattgtcaggattttttccccgtcatcttctcatag

SEQ ID NO: 246250 - DNA, 270 bp, Artificial Sequence
  derived and/or modified sequence
atgcccttagagcaacgatcccaacattgtaaacctgaggaggggctcgaagccaggggagaggcactcggtctggttggggcacaggcgcctgctacagaggaacagcagaccgcctcttcatcaagtaccctcgtcgaggtgacattaggggaggtgcctgcagccgactctcccagccctccccactctccccaaggagcctcttccttctccacaacgattaactatactctatggcgccagtctgatgaagggtctagcaattag

SEQ ID NO: 246251 - DNA, 447 bp, Artificial Sequence
  derived and/or modified sequence
atgcctctagaacagcggtcccagcattgtaagcccgaggagggactggaagcacgcggtgaggcacttggcttggtaggcgcacaagcgccagctacggaagagcagcagacagcctccagcagtagtaccctcgtcgaagtgaccctcggcgaggtgccggctgctgactcaccatcacccccacattcccctcagggggctagttctttctccacaactataaactacacgctatggagacagtcagatgaggggtcaagcaaccaggaagaggagggaccgagaatgttccctgacctcgagtccgaatttcaggccgctattagccgaaagatggtggagttggtgcacttcctgctgcttaagtacagggcaagggagcccgtcactaaagcagaaatgttggagagtgttctgcggaattgccaggatttcttcccatag

SEQ ID NO: 246252 - DNA, 114 bp, Artificial Sequence
  derived and/or modified sequence
atgcccctggaacagcgaagccaacactgtaaaccagaagaagggctggaagccaggggtgaggccctgggcctggttggagctcaagctccggcaaccgaggagcagcagtag

SEQ ID NO: 246253 - DNA, 945 bp, Artificial Sequence
  derived and/or modified sequence
atgcctcttgagcagagatcacagcactgcaagcctgaagaagggctggaggcacgcggcgaggctttggggctggttggcgcacaagctccagcgacggaggaacaacaaacggcctcaagctccagcacactggtcgaggtgactctgggggaagtaccggccgcagattccccttcaccgccccactccccacagggggcttcaagtttttccaccaccataaattacaccctgtggaggcagagtgacgaaggaagcagtaatcaagaggaagaaggcccgcgcatgttccccgatctcgagtccgaattccaagccgctatttcccgtaaaatggtggaattggtgcactttctcctactgaagtaccgggcgcgagagcccgttactaaagcagaaatgctggagtccgtgctgagaaattgccaggacttttttcccgtcatcttttccaaggcatccgagtatctgcagctcgtgtttggtatcgaagtggtggaggtggtgccaattagccacctgtatatccttgtgacttgcctaggcctcagttatgatggcttacttggagacaatcaagtgatgcccaagactgggctgctcatcatcgtgctggcaattatagcaatcgagggtgactgcgcccctgaggaaaaaatctgggaggagctctccatgctggaggtcttcgaaggtcgcgaagacagtgtttttgcacatcctagaaaacttttgatgcaggatctggtgcaagagaattatcttgaatacagacaggttcccgggtccgatcccgcctgctatgaatttctgtgggggccacgcgcgctgatcgaaacctcttatgtcaaggtcctgcatcatactctgaagatcggaggggagcctcacatcagttatccgccactgcacgagcgagccctccgcgagggagaagagtag

SEQ ID NO: 246254 - DNA, 945 bp, Artificial Sequence
  derived and/or modified sequence
atgcccctggagcagagaagtcagcactgcaaacccgaagagggtctggaggcacgtggcgaagctctcggcctggttggggctcaagccccagccaccgaggaacaacagactgccagtagttcttcaaccctggtcgaagtgacacttggtgaagtaccggcagccgattcacccagtcctcctcactctccccagggcgcctcgtccttcagcacgacaattaattacactctgtggagacagtcagacgaaggctcaagtaatcaggaggaggagggccccagaatgttccccgacctggagtcagagttccaggccgcaatctccaggaaaatggtggagctggtccactttctgctccttaagtaccgggctcgagagcccgtcactaaagctgaaatgctggagtccgtgcttcggaactgccaggattttttccccgtgatattttccaaggcctctgagtatttacagctcgtgttcggtattgaggtcgtagaagtggtcccaatatctcatttgtacattctggtcacttgtctgggattgagttacgatggcctcctaggggataaccaggtaatgccgaagacaggtttgcttataattgttcttgccatcatcgctatcgagggggactgcgcacctgaggagaagatttgggaggaactctcaatgcttgaagtgttcgagggaagggaggactcagttttcgcacacccaagaaagctgctgatgcaggacctggtccaggaaaattatctggaatatcgccaggtacccggcagtgatccggcctgttacgagttcttgtggggccccagagccctgattgagacttcatacgttaaagtgcttcaccatacgctgaaaatcggtggagaacctcacatttcatacccaccattacatgagcgggctctgagagagggggaagaatag

SEQ ID NO: 246255 - DNA, 945 bp, Artificial Sequence
  derived and/or modified sequence
atgccattggaacagcgttcgcagcactgtaagcctgaagagggccttgaggcacgcggggaagctctcggactcgtcggcgctcaggcaccagccaccgaagagcagcagacagcaagcagctcaagtactctcgtagaagtgaccttaggggaagttccagccgcagactccccatctcccccccacagcccccaaggggcgagtagttttagtactaccatcaactacacgctctggaggcaaagtgacgaggggtccagtaatcaggaggaagaagggccgcggatgttcccagatctggagagcgaattccaggcagccatcagtcgaaaaatggtggagttggtccatttccttttgctcaagtatcgggccagagaaccagtcaccaaagcggaaatgctcgagagtgtcctgcggaattgtcaggatttcttcccagtgatctttagcaaagcttccgaatacttacagcttgtgttcggtatagaggttgtggaggtagtgccaattagtcacctttatatcctcgtgacgtgcttaggcctcagttacgacggactcctgggagataatcaagtcatgccgaaaacgggcttactaattattgtgttggccatcatagcaattgagggggattgcgcaccagaggagaaaatttgggaggagctttctatgctggaggtttttgagggaagagaggactccgtgtttgcccatccaagaaaactcctgatgcaggatctggtccaagagaattacctcgaatatcgtcaggtgccgggtagcgatcctgcctgttatgagttcctctgggggcccagggcactcatcgagactagctacgtaaaggtcctccaccacacattgaagatcggtggggagccacacatttcctatcctcctctgcacgagcgggccttacgcgaaggggaagaatag

SEQ ID NO: 246256 - DNA, 945 bp, Artificial Sequence
  derived and/or modified sequence
atgcctctggagcaaagatctcagcattgcaagccagaggagggcctagaggctagaggtgaggccttgggtttggtgggggcccaggcccctgcaacagaagagcagcagactgccagttcaagcagcaccctggttgaagtcacgctcggggaagtgcctgctgctgactctcccagcccaccacactctccacagggggctagctccttctccaccactatcaattacacgctgtggcgtcagtcagatgagggatctagcaatcaggaggaagaaggacctcgaatgttcccagaccttgagtcagaatttcaggccgccatctccagaaaaatggtggaactcgtgcacttcctgctgctcaaatatcgcgctagggagcctgtcactaaggccgagatgctggagagtgtgctgaggaattgccaggatttttttcccgtgatttttagtaaggccagcgaatatctccagctcgtctttggaatagaggtggtggaagtcgttcccattagtcatttgtatatcctcgtaacttgccttgggctctcctacgatggattactgggtgataatcaagtcatgccaaagacggggctcctcattattgtcctggcaattatcgccatcgagggggactgcgctccggaggagaagatttgggaagaactctccatgctagaagtgtttgagggcagggaggatagcgtgttcgctcacccccggaaacttctcatgcaggaccttgttcaggaaaattatctcgagtataggcaggtgccgggctccgacccagcctgttacgaatttctttgggggcctcgagctttgattgagacctcatatgtcaaagtgctgcaccatacacttaagatcggcggcgaaccacacatctcctacccccctctccatgaacgggcactgagagagggcgaagaatag

SEQ ID NO: 246257 - DNA, 1661 bp, Artificial Sequence
  derived and/or modified sequence
agcaggcgcaggctccgtgaggaggcaaggttctgagggggacaggctgacaagtaggacccgaggcactggaggagcattgaaggagaagatctgcctgtgggtcttcattgcccagctcctgcccgcactcctgcctgctgccctgaccagagtcatcatgcctcttgagcagaggagtcagcactgcaagcctgaagaaggccttgaggcccgaggagaggccctgggcctggtgggtgcgcaggctcctgctactgaggagcagcagaccgcttcttcctcttctactctagtggaagttaccctgggggaggtgcctgctgccgactcaccgagtcctccccacagtcctcagggagcctccagcttctcgactaccatcaactacactctttggagacaatccgatgagggctccagcaaccaagaagaggaggggccaagaatgtttcccgacctggagtccgagttccaagcagcaatcagtaggaagatggttgagttggttcattttctgctcctcaagtatcgagccagggagccggtcacaaaggcagaaatgctggagagtgtcctcagaaattgccaggacttctttcccgtgatcttcagcaaagcctccgagtacttgcagctggtctttggcatcgaggtggtggaagtggtccccatcagccacttgtacatccttgtcacctgcctgggcctctcctacgatggcctgctgggcgacaatcaggtcatgcccaagacaggcctcctgataatcgtcctggccataatcgcaatagagggcgactgtgcccctgaggagaaaatctgggaggagctgagtatgttggaggtgtttgaggggagggaggacagtgtcttcgcacatcccaggaagctgctcatgcaagatctggtgcaggaaaactacctggagtaccggcaggtgcccggcagtgatcctgcatgctacgagttcctgtggggtccaagggccctcattgaaaccagctatgtgaaagtcctgcaccatacactaaagatcggtggagaacctcacatttcctacccacccctgcatgaacgggctttgagagagggagaagagtgagtctcagcacatgttgcagccagggccagtgggagggggtctgggccagtgcaccttccagggccccatccattagcttccactgcctcgtgtgatatgaggcccattcctgcctctttgaagagagcagtcagcattcttagcagtgagtttctgttctgttggatgactttgagatttatctttgtttcctgttggaattgttcaaatgttccttttaacaaatggttggatgaacttcagcatccaagtttatgaatgacagtagtcacacatagtgctgtttatatagtttaggggtaagagtcctgttttttattcagattgggaaatccattccattttgtgagttgtcacataataacagcagtggaatatgtatttgcctatattgtgaacgaattagcagtaaaatacatgatacaaggaactcaaaagatagttaattcttgccttatacctcagtctattatgtaaaattaaaaatatgtgtatgtttttgcttctttgagaatgcaaaagaaattaaatctgaataaataattcttcctgttca

SEQ ID NO: 246258 - DNA, 1965 bp, Artificial Sequence
  derived and/or modified sequence
aacggcctgacgtcggcggagggaagcaggcgcaggctccgtgaggaggcaagggaactctggcgtaagagctttgtgtgaccagggcagggctggttagaagtgctcagggcccagactcagccaggaatcaagaatccgggctttgcccctgcaatcaacccacggaagctccgggaatggcggccaagcacgcggatcctgacgttcacatatctcagggagttgatgaccttgttttcagaaggtgactcaggtcaacacaggggcccccatctggtcgacagatgcagtggttctaggatctgccaagcatccaggtggagagcctgaggttctgagggggacaggctgacaagtaggacccgaggcactggaggagcattgaaggagaagatctgcctgtgggtcttcattgcccagctcctgcccgcactcctgcctgctgccctgaccagagtcatcatgcctcttgagcagaggagtcagcactgcaagcctgaagaaggccttgaggcccgaggagaggccctgggcctggtgggtgcgcaggctcctgctactgaggagcagcagaccgcttcttcctcttctactctagtggaagttaccctgggggaggtgcctgctgccgactcaccgagtcctccccacagtcctcagggagcctccagcttctcgactaccatcaactacactctttggagacaatccgatgagggctccagcaaccaagaagaggaggggccaagaatgtttcccgacctggagtccgagttccaagcagcaatcagtaggaagatggttgagttggttcattttctgctcctcaagtatcgagccagggagccggtcacaaaggcagaaatgctggagagtgtcctcagaaattgccaggacttctttcccgtgatcttcagcaaagcctccgagtacttgcagctggtctttggcatcgaggtggtggaagtggtccccatcagccacttgtacatccttgtcacctgcctgggcctctcctacgatggcctgctgggcgacaatcaggtcatgcccaagacaggcctcctgataatcgtcctggccataatcgcaatagagggcgactgtgcccctgaggagaaaatctgggaggagctgagtatgttggaggtgtttgaggggagggaggacagtgtcttcgcacatcccaggaagctgctcatgcaagatctggtgcaggaaaactacctggagtaccggcaggtgcccggcagtgatcctgcatgctacgagttcctgtggggtccaagggccctcattgaaaccagctatgtgaaagtcctgcaccatacactaaagatcggtggagaacctcacatttcctacccacccctgcatgaacgggctttgagagagggagaagagtgagtctcagcacatgttgcagccagggccagtgggagggggtctgggccagtgcaccttccagggccccatccattagcttccactgcctcgtgtgatatgaggcccattcctgcctctttgaagagagcagtcagcattcttagcagtgagtttctgttctgttggatgactttgagatttatctttgtttcctgttggaattgttcaaatgttccttttaacaaatggttggatgaacttcagcatccaagtttatgaatgacagtagtcacacatagtgctgtttatatagtttaggggtaagagtcctgttttttattcagattgggaaatccattccattttgtgagttgtcacataataacagcagtggaatatgtatttgcctatattgtgaacgaattagcagtaaaatacatgatacaaggaactcaaaagatagttaattcttgccttatacctcagtctattatgtaaaattaaaaatatgtgtatgtttttgcttctttgagaatgcaaaagaaattaaatctgaataaataattcttcctgttc

SEQ ID NO: 246259 - DNA, 1979 bp, Artificial Sequence
  derived and/or modified sequence
aacggcctgacgtcggcggagggaagcaggcgcaggctccgtgaggaggcaaggtaagacgccgagggaggactgaggcgggcctcaccccagacagagggcccccaataatccagcgctgcctctgctgccgggcctggaccaccctgcaggggaagacttctcaggctcagtcgccaccacctcaccccgccaccccccgccgctttaaccgcagggaactctggcatctcagggagttgatgaccttgttttcagaaggtgactcaggtcaacacaggggcccccatctggtcgacagatgcagtggttctaggatctgccaagcatccaggtggagagcctgaggttctgagggggacaggctgacaagtaggacccgaggcactggaggagcattgaaggagaagatctgcctgtgggtcttcattgcccagctcctgcccgcactcctgcctgctgccctgaccagagtcatcatgcctcttgagcagaggagtcagcactgcaagcctgaagaaggccttgaggcccgaggagaggccctgggcctggtgggtgcgcaggctcctgctactgaggagcagcagaccgcttcttcctcttctactctagtggaagttaccctgggggaggtgcctgctgccgactcaccgagtcctccccacagtcctcagggagcctccagcttctcgactaccatcaactacactctttggagacaatccgatgagggctccagcaaccaagaagaggaggggccaagaatgtttcccgacctggagtccgagttccaagcagcaatcagtaggaagatggttgagttggttcattttctgctcctcaagtatcgagccagggagccggtcacaaaggcagaaatgctggagagtgtcctcagaaattgccaggacttctttcccgtgatcttcagcaaagcctccgagtacttgcagctggtctttggcatcgaggtggtggaagtggtccccatcagccacttgtacatccttgtcacctgcctgggcctctcctacgatggcctgctgggcgacaatcaggtcatgcccaagacaggcctcctgataatcgtcctggccataatcgcaatagagggcgactgtgcccctgaggagaaaatctgggaggagctgagtatgttggaggtgtttgaggggagggaggacagtgtcttcgcacatcccaggaagctgctcatgcaagatctggtgcaggaaaactacctggagtaccggcaggtgcccggcagtgatcctgcatgctacgagttcctgtggggtccaagggccctcattgaaaccagctatgtgaaagtcctgcaccatacactaaagatcggtggagaacctcacatttcctacccacccctgcatgaacgggctttgagagagggagaagagtgagtctcagcacatgttgcagccagggccagtgggagggggtctgggccagtgcaccttccagggccccatccattagcttccactgcctcgtgtgatatgaggcccattcctgcctctttgaagagagcagtcagcattcttagcagtgagtttctgttctgttggatgactttgagatttatctttgtttcctgttggaattgttcaaatgttccttttaacaaatggttggatgaacttcagcatccaagtttatgaatgacagtagtcacacatagtgctgtttatatagtttaggggtaagagtcctgttttttattcagattgggaaatccattccattttgtgagttgtcacataataacagcagtggaatatgtatttgcctatattgtgaacgaattagcagtaaaatacatgatacaaggaactcaaaagatagttaattcttgccttatacctcagtctattatgtaaaattaaaaatatgtgtatgtttttgcttctttgagaatgcaaaagaaattaaatctgaataaataattcttcctgttc

SEQ ID NO: 246260 - DNA, 945 bp, Artificial Sequence
  derived and/or modified sequence
atgcccctggagcagcggagccagcactgcaagcccgaggagggcctggaggcccgcggagaggcactcggtctggtcggcgcacaggctcccgccactgaggagcagcagacggcctccagcagttctacccttgtggaggtgacgttgggagaggtccctgccgccgattctccctctcctccgcatagccctcagggcgcctcttccttctccacgacaatcaactatacactctggcggcagagtgacgagggttcctcaaaccaggaagaggaggggccacgtatgttccccgatttggagagcgaattccaggcagccatctctcgaaagatggtggagttggtgcattttctgctgttaaaataccgcgcacgcgaacctgtgactaaagccgagatgttagaaagtgttttacggaattgccaggatttttttccggtcatcttctcaaaagccagtgaatatctacagctcgtgttcggcatcgaagtggttgaagtcgtccccatttctcacttgtacatcctggtcacttgcttaggcttaagttatgacggactcctcggagacaatcaagtcatgcccaaaaccggactcttgattattgtgctggcgatcatcgcgatcgaaggagattgcgcccccgaggagaaaatctgggaagagcttagcatgctggaagtcttcgagggaagggaagatagcgtattcgcccacccccgaaaattactaatgcaggatctcgtacaggaaaactacttagaataccggcaggtgcctggctcagaccccgcatgctacgaatttctttgggggcccagagccctcattgaaacgtcatatgtcaaagtcctgcatcacacgttgaagattggcggggaaccgcacatatcttatcctcccctccacgagcgtgctctccgcgagggggaggagtag

SEQ ID NO: 246261 - DNA, 945 bp, Artificial Sequence
  derived and/or modified sequence
atgcccctggagcagcggagccagcactgcaagcccgaggagggcttggaggccagaggcgaggccctggggctcgttggagcacaggcccctgccactgaagagcaacagaccgccagctctagttccactctggttgaagtgacgctcggggaagtcccggcagcagacagtccatctcctccgcactccccgcaaggcgcgtcaagtttttcgaccacaatcaattacactctgtggcgccagtccgatgagggttcctcaaatcaggaggaagagggccctcgcatgttcccagatctggaatcagagttccaggctgctatatcaaggaagatggttgaactggttcattttctgttgctgaaatatagagcaagagagcctgtcaccaaggcggagatgctggaatccgtgcttagaaattgtcaggacttttttcccgtcatcttctctaaagcgtctgaatacctgcagttggtgttcggaatagaagtggtcgaagttgtgccgatatctcacctctacatactggtgacctgcctcgggctgagttacgacgggctgctgggagataaccaagtgatgcccaaaacgggcttgctgattatagtgctcgccatcatcgcaatcgagggggactgtgcacccgaagaaaagatttgggaggagcttagcatgttagaagtgtttgaaggaagagaggactccgtctttgctcacccccgcaaattgctcatgcaggacctggtgcaagagaattatcttgagtatcgccaagttcccgggtccgacccagcatgctatgagttcttgtggggcccacgcgccctgatcgagacctcatatgtgaaagtcctccaccataccctgaaaataggaggggagccccatatctcctatcctcctcttcacgagagggccctgagagagggggaggagtag

SEQ ID NO: 246262 - DNA, 945 bp, Artificial Sequence
  derived and/or modified sequence
atgcccctggagcagcggagccagcactgcaagcccgaggagggcctcgaagcacgcggagaggctcttggactcgtcggcgctcaagctccagcgaccgaggaacaacaaacagcctctagcagctctacccttgtggaagtaacgctaggtgaagttcctgctgctgattcacctagtccccctcatagtcctcagggggcttccagtttttcgaccactattaattacacactttggcgtcagagcgacgaagggtcctctaatcaggaggaagaggggccgcgcatgttccctgatctggagtcagaattccaggcagccatatcccgcaagatggtcgagctggtacacttcctcttgctcaaatatcgcgcacgcgaacccgtgaccaaggcggaaatgcttgaaagtgtgcttcggaactgccaagactttttcccggtgatcttctcaaaagccagcgagtacctgcagctggtgtttgggattgaggtggtggaagtcgtccccatttcccacctgtacatattggtgacatgtttggggctgtcctacgacggcctactcggcgacaaccaggtgatgccaaagactggactgttgattatcgtcctggcgattatagccatcgaaggagattgcgcaccagaggagaagatttgggaggagctcagcatgctcgaggtgttcgaaggccgagaggactctgtcttcgcacacccacgaaagttacttatgcaggatttagtgcaggagaactaccttgaataccggcaggtgccaggcagtgatccggcatgttacgagttcctctggggcccccgggcgctgatcgaaacaagttacgtgaaggtgttgcaccatactctcaaaatcgggggagagccccacatttcttacccgcccctgcacgaacgggctcttcgcgagggcgaggagtag

SEQ ID NO: 246263 - DNA, 945 bp, Artificial Sequence
  derived and/or modified sequence
atgcccctggagcagcggagccagcactgcaagcccgaggagggcctggaggcccggggggaagcactggggctggtcggcgctcaggcccccgccaccgaagaacagcagaccgcgagctctagctctaccctcgtggaagtcaccctgggcgaagtgcccgctgcggactccccatccccaccccactcaccccagggagcatccagtttcagtactacgattaattacacgttatggcgccagagtgatgagggcagctctaaccaggaggaggagggcccgcgcatgttccccgacctggagagcgaatttcaggcagccatttctagaaaaatggttgagctggttcacttcctcctcctgaaatacagggctagagagccagtcacaaaggctgaaatgctggagtcagtgctgcgcaactgccaagatttttttccagttattttctccaaggcatccgagtacctgcagctggtgttcgggatagaagtcgtcgaggtggtgcccattagccatctttacatcctggtgacgtgtctgggtctgagttacgacggactgcttggcgataatcaggttatgccaaagacgggcctgttgattatcgtactcgcaattatcgccatcgaaggggactgcgccccagaagagaagatctgggaggagctctctatgctggaagtattcgagggccgcgaagactcagtgtttgctcatcctagaaaacttctgatgcaggacctcgttcaggaaaactacctggaataccggcaggtgcccggcagcgatcccgcttgttatgaattcctgtgggggccccgggccctgatcgaaacctcttatgtgaaggtgctgcaccatactcttaagattggaggcgagccccacatcagctatcctccacttcacgagcgcgccctacgggagggagaggagtag

SEQ ID NO: 246264 - DNA, 945 bp, Artificial Sequence
  derived and/or modified sequence
atgccccttgaacagagatctcagcactgcaagcccgaggaaggattggaagcccgaggcgaagcactaggcttagtaggtgcacaggctccagccactgaggaacagcagactgctagctcatcctcgaccctggtagaagtaacactcggggaagtacctgcagccgatagcccatcccctcctcattctcctcagggcgcaagctcattcagtaccaccattaactacaccctgtggcgtcaaagtgatgaaggttcctcaaaccaagaggaggagggcccacgaatgttcccggatctggagtcagaatttcaggcggctatctcaagaaagatggtcgaactcgttcacttcttattactgaaataccgggctcgcgaaccagtgactaaagccgagatgctcgaaagtgtgctgagaaactgtcaggactttttcccagtgatcttctccaaggcgagcgagtacctgcaattggtgttcgggattgaagtagtagaggtggtgccgattagtcatctttatatattagtcacttgtcttggactgtcttatgatggcctgttgggagataaccaggtgatgcctaagaccgggctgttgatcattgtgctggccattatagccatagagggagattgcgcacccgaggagaagatatgggaagaactgagcatgctggaagtctttgaaggccgagaggattcagtgttcgcacacccacgcaagctgttgatgcaggatctcgtgcaggagaactacctggagtacaggcaagtacccggatctgatcctgcttgctacgaattcctgtggggacctagagctcttatcgaaacttcatacgtgaaagtcctgcaccatacactcaaaatcggtggagagccccatatttcctatccacctctgcacgagagggcactcagagagggcgaggagtag

SEQ ID NO: 246265 - DNA, 945 bp, Artificial Sequence
  derived and/or modified sequence
atgccgctggagcaacgaagtcagcattgcaagcccgaggaggggctagaagcccgtggtgaggctcttggacttgtcggcgctcaggcaccagccacagaagaacagcagactgcgagttccagttctactctggttgaggttactctgggtgaggtgcccgcagcggattctccatcgccgccacactctcctcaaggagcatccagcttcagcactacaatcaattacaccctgtggcggcagtccgacgaaggatctagcaaccaggaggaagaagggcctaggatgtttcctgatctggaaagcgagttccaggcagccatctcccgcaagatggtcgagctggtgcactttctgcttctgaagtatcgggcacgcgaaccggttacgaaagccgagatgctggagtccgttctccgcaactgccaggacttcttcccagtcatattttccaaagcttctgaatatctacaactggtcttcggcatcgaggtggtggaggtggtgccgattagccatctgtacattctagttacttgtttaggcctgagctacgacggactcctgggagacaaccaggtcatgccgaagacaggcttactaattatcgtgttggccatcatcgccatcgaaggtgattgcgccccagaggagaagatctgggaggaactgagtatgctggaggtcttcgaaggcagagaagacagtgtgtttgcccatccacgaaagctgctcatgcaagatctcgtccaggaaaattaccttgagtaccggcaggtgcctgggtctgatcccgcttgctacgaattcctttggggaccgagggctcttatagagaccagctacgtcaaagtgctgcaccatacccttaagatcggtggcgaaccccacattagttaccctcccctgcatgaacgagcactgcgcgagggcgaggagtag

SEQ ID NO: 246266 - DNA, 945 bp, Artificial Sequence
  derived and/or modified sequence
atgcctctcgagcagcgcagtcagcactgtaaaccggaggaaggcctggaggcccgaggcgaagctctcgggctggttggagctcaggccccagctactgaagagcagcagaccgcctcttcttcatcgactctggtcgaggtgactctgggagaagtgcctgccgctgattcaccttcaccccctcattcccctcagggagccagtagcttctccaccaccattaattacactctttggcgacagtcagatgaaggcagttccaatcaggaggaggaagggccacggatgttccctgatctggagtcagagttccaggccgctataagcaggaagatggtggaattagtccacttcctgctacttaagtaccgtgcgagggagcctgttacgaaagccgaaatgctcgagagtgtgctgcggaactgccaggatttctttccagtcatcttcagtaaagcttccgagtacttgcagctggttttcggcattgaggtagtggaggtagtcccgatctcccacctctatatacttgttacatgcttgggactgtcttatgacggactgctgggcgacaatcaagtcatgcctaagacaggattgctcatcatcgtcttggcaatcatcgccatcgaaggcgactgcgcacctgaagaaaaaatctgggaggagctcagcatgttagaggtttttgaggggcgtgaggacagcgtgttcgctcacccgagaaaactgttaatgcaggatctcgttcaggagaactacctggaataccgacaggttccaggttctgatcccgcttgttacgagttcctgtggggaccgcgagccctgatcgaaacatcctacgtcaaggttctgcatcatacgctgaaaattgggggagaaccccatatctcatatccccctctacatgaacgagccttacgggagggagaagagtag

SEQ ID NO: 246267 - DNA, 945 bp, Artificial Sequence
  derived and/or modified sequence
atgcccctggagcagaggtcacagcactgtaagccggaggaaggccttgaggcaagaggagaggccttggggctggtcggtgctcaagcacctgctacagaggagcaacagactgcttcatcttcctccactctggttgaagtgacattaggcgaggtccccgctgcagatagtcccagcccaccccattcccctcagggagcttcttcgttctctacgacgatcaattacaccctgtggagacagagcgacgagggcagcagtaatcaggaggaggaaggcccacgcatgttccccgatctcgaaagcgaatttcaagccgctataagtcgcaagatggtggaattggtacatttcttgctgctgaagtatcgtgctcgtgaacctgttacaaaagccgaaatgctcgagtctgttttgcgtaactgtcaggacttttttccagtgatattttccaaggccagtgaatatttgcagcttgtgtttggcatagaggtcgtggaggtggtaccgatcagtcacttgtacatcctggtgacttgccttgggctgagctatgatgggctgttgggtgacaaccaagtgatgccgaagactggtctgctgataatcgttctagctatcattgcgattgaaggagattgcgcccctgaggaaaagatttgggaggaactcagcatgctggaagtgttcgaggggcgagaggactcagtctttgcacatccgcgaaagttgttaatgcaagatttggtgcaagaaaactatctcgagtataggcaggtgccaggatcggaccctgcctgctacgagtttctgtgggggccacgcgcactgatagagacatcctatgtaaaggtgcttcaccacacactgaaaatcggtggtgagccccatataagttacccacccctccacgaacgtgccctgcgggagggagaggaatag

SEQ ID NO: 246268 - protein, 458 aa, Artificial Sequence
  derived and/or modified sequence
MSLRLQSSSASYGGGFGGGSCQLGGGRGVSTCSTRFVSGGSAGGYGGGVSCGFGGGAGSGFGGGYGGGLGGGYGGGLGGGFGGGFAGGFVDFGACDGGLLTGNEKITMQNLNDRLASYLEKVRALEEANADLEVKIRDWHLKQSPASPERDYSPYYKTIEELRDKILTATIENNRVILEIDNARLAADDFRLKYENELALRQSVEADINGLRRVLDELTLSKTDLEMQIESLNEELAYMKKNHEEEMKEFSNQVVGQVNVEMDATPGIDLTRVLAEMREQYEAMAERNRRDAEEWFHTKSAELNKEVSTNTAMIQTSKTEITELRRTLQGLEIELQSQLSMKAGLENTVAETECRYALQLQQIQGLISSIEAQLSELRSEMECQNQEYKMLLDIKTRLEQEIATYRSLLEGQDAKMIGFPSSAGSVSPRSTSVTTTSSASVTTTSNASGRRTSDVRRP

SEQ ID NO: 246269 - DNA, 1377 bp, Artificial Sequence
  derived and/or modified sequence
atgtcgctgcggctgcaatcctctagcgcgtcttatggcgggggatttgggggggggtcatgccagctcggaggtggccgaggagtgtcaacttgtagtactaggtttgtgtctgggggatctgcaggcggatacgggggcggagtgtcgtgtggatttggtggcggcgccggatccggctttggaggcggctacggaggaggattaggaggcggttacgggggcggcctcggtgggggctttggaggagggttcgcaggtggatttgttgacttcggcgcgtgtgatggcgggttgctgacaggaaacgaaaagataactatgcagaacctgaacgaccggctagcctcctacctcgagaaagtgcgagccctggaagaagccaacgccgacctggaagttaagattcgcgactggcacctgaaacagagccccgcatcccctgagagagactacagtccctactataaaactatcgaagaactgcgagacaaaatcctcacagccacaattgaaaataatcgcgtgatccttgagatcgataacgcacgactggctgctgatgatttcaggctgaagtacgaaaacgaactggccctgcgccagtccgtagaagccgatatcaacggactacgacgagtgctggatgagctgactctttctaagaccgacttggagatgcagattgagtcgctgaacgaggaactggcttatatgaagaagaatcacgaagaggagatgaaggaattctctaatcaggtggtaggtcaggtcaatgtggagatggatgccactcccgggatcgaccttacaagagtgctcgctgagatgcgtgaacagtatgaagcaatggccgagagaaaccggagagacgcagaggaatggtttcacacaaagagtgctgagcttaacaaggaggtttccactaatacagcgatgatacagacatccaaaacggaaatcacagagctgcggaggacgctgcagggactggaaatcgagctacagtctcaactgagcatgaaggccgggctcgaaaacaccgtggcagagacagagtgtcgatatgctctccagctgcagcagatccagggtctgataagctcaatcgaggcccagctgtctgagctgagatccgagatggaatgccagaaccaggagtacaagatgctgttggacatcaagactaggctggaacaagaaattgcaacgtataggtccctcttggagggtcaggatgccaaaatgattgggttcccctcatccgctggctccgtttccccacggagtacaagcgttaccaccacgtcctccgccagtgtaaccactacgtccaacgcatctggccgtaggacaagtgacgtgagacgaccctag

SEQ ID NO: 246270 - DNA, 1699 bp, Artificial Sequence
  derived and/or modified sequence
ggccaagcaagcttctatctgcacctgctctcaatcctgctctcaccatgagcctccgcctgcagagctcctctgccagctatggaggtggtttcgggggtggctcttgccagctgggaggaggccgtggtgtctctacctgttcaactcggtttgtgtccgggggatcagctgggggctatggaggcggcgtgagctgtggttttggtggaggggctggtagtggctttggaggtggctatggaggtggccttggaggtggctatggaggtggccttggaggtggctttggtgggggttttgctggtggctttgttgactttggtgcttgtgatggcggcctcctcactggcaatgagaagatcaccatgcagaacctcaacgaccgcctggcttcctacctggagaaggtgcgcgccctggaggaggccaacgctgacctggaggtgaagatccgtgactggcacctgaagcagagcccagctagccctgagcgggactacagcccctactacaagaccattgaagagctccgggacaagatcctgaccgccaccattgaaaacaaccgggtcatcctggagattgacaatgccaggctggctgcggacgacttcaggctcaagtatgagaatgagctggccctgcgccagagcgtggaggccgacatcaacggcctgcgccgggtgctggatgagctcactctgtctaagactgacctggagatgcagatcgagagcctgaatgaagagctagcctacatgaagaagaaccatgaagaggagatgaaggaatttagcaaccaggtggtcggccaggtcaacgtggagatggatgccaccccaggcattgacctgacccgcgtgctggcagagatgagggagcagtacgaggccatggcagagaggaaccgccgggatgctgaggaatggttccacaccaagagtgcagagctgaacaaggaggtgtctaccaacactgccatgattcagaccagcaagacagagatcacggagctcaggcgcacgctccaaggcctggagattgagctgcagtcccagctgagcatgaaagcggggctggagaacacggtggcagagacggagtgccgctatgccctgcagctgcagcagatccagggactcatcagcagcatcgaggcccagctgagcgagctccgcagtgagatggagtgccagaaccaagagtacaagatgctgctggacatcaagacacgtctggagcaggagatcgccacctaccgcagcctgctcgagggccaggacgccaagatgattggtttcccttcctcagcaggaagcgtcagcccccgtagcacctctgttaccacgacttctagtgcctctgttaccaccacctctaatgcctctggtcgccgcacttctgatgtccgtaggccttaaatctgcctggcgtcccctccctctgtcttcagcacccagaggaggagagagccggcagttccctgcaggagagaggaggggctgctggacccaaggctcagtccctctgctctcaggaccccctgtcctgactctctcctgatggtgggccctctgtgctcttctcttccggtcggatctctctcctctctgacctggatacgctttggtttctcaacttctctaccccaaagaaaagattattcaataaagtttcctgcctttctgcaaacata

SEQ ID NO: 246271 - DNA, 1377 bp, Artificial Sequence
  derived and/or modified sequence
atgagcctgcggctgcagagcagcagcgccagctatggaggcggctttggaggcggcagctgccagctgggcggcggccggggcgtgtccacctgcagcaccaggtttgtgtctgggggcagcgctgggggctatggaggcggcgtgtcctgtggctttggaggaggagctggcagcggctttggaggcggctatggaggcggcctgggcggcggctatggaggcggcctgggcggcggctttggaggcggctttgctgggggctttgtggactttggagcctgtgatggcggcctgctgactggaaatgagaagatcaccatgcagaacctgaatgaccggctggccagctacctggagaaggtgcgggccctggaggaggccaatgctgacctggaggtgaagatccgggactggcacctgaagcagagccctgccagccctgagcgggactacagcccctactacaagaccatcgaggagctgcgggacaagatcctgacagccaccatcgagaacaacagagtcatcctggagattgacaatgcccggctggccgcagatgacttccggctgaagtatgaaaatgagctggccctgcggcagagcgtggaggccgacatcaatggcctgcggcgggtgctggatgagctgaccctgagcaagacagacctggagatgcagatcgagagcctgaatgaggagctggcctacatgaagaagaaccacgaggaggagatgaaggagttcagcaaccaggtggtgggccaggtgaatgtggagatggatgccaccccaggcatcgacctgaccagggtgctggccgagatgagggagcagtatgaggccatggccgagaggaacagaagagatgctgaggagtggttccacaccaagtctgctgagctgaacaaggaggtgtccaccaacacagccatgatccagaccagcaagacagagatcacagagctgcggaggaccctgcagggcctggagattgagctgcagagccagctgtccatgaaggccggcctggagaacacagtggccgagacagaatgtagatatgccctgcagctgcagcagatccagggcctcatcagcagcattgaggcccagctgtctgagctgcggtctgagatggagtgccagaaccaggagtacaagatgctgctggacatcaagacccggctggagcaggagatcgccacctaccgcagcctgctggagggccaggatgccaagatgattggcttccccagcagcgctggctctgtgagccccaggagcacctctgtgaccaccaccagcagcgcctctgtgaccaccaccagcaatgccagcggccgccgcaccagtgatgtgcggcggccctag

SEQ ID NO: 246272 - DNA, 1377 bp, Artificial Sequence
  derived and/or modified sequence
atgagcctgcggctgcagagcagcagcgccagctacggcggcggctttggaggcggatcttgccagttggggggagggcgcggggtcagcacgtgttcaactagattcgtttccggcggtagcgccggtggatacggaggcggcgtttcgtgcgggtttggcggcggggcaggatctggattcgggggtgggtacggcggagggctgggcgggggttacggcgggggccttggagggggctttggggggggcttcgccggcggattcgtggattttggggcttgtgatggaggattactcaccggaaatgagaaaatcacaatgcaaaacttgaatgacagattggcgagttacctggagaaggtccgagcattggaagaggccaacgcagatttggaggtcaaaatcagagattggcacctgaaacaaagccccgcctctccagagcgggactactcaccatattacaagactattgaggaactcagagataaaatactgacggccacaatcgagaataaccgcgtcatcctggagattgacaatgctcggctcgcggccgacgacttcaggttgaagtacgaaaatgaactagcactgcggcagtctgtcgaggccgacataaatgggttgcggagagtgctcgacgaattgactctgagcaagacagacctagaaatgcagatagaatctctgaacgaagaattggcttacatgaaaaagaatcacgaggaggagatgaaagaattttccaaccaggttgtgggtcaagtgaacgtcgaaatggatgctacacccggcatcgacttaacgcgagttttagccgaaatgcgggagcagtatgaggcaatggccgaaagaaataggagggatgctgaggagtggttccacacaaagtcagccgaactaaacaaagaggttagtaccaatactgccatgatccagacaagtaaaaccgagatcactgagctgaggcgcaccctgcagggtttagagattgagcttcagtcccagctttccatgaaagcgggactggagaacacggtggctgagacggagtgcaggtacgctctgcagcttcagcagattcagggattaatctcctctatcgaggctcagctgtccgagcttagatccgagatggaatgccagaaccaagaatacaaaatgctacttgacataaagacacgccttgagcaagaaatcgccacatacaggtctcttctggaaggacaggacgccaagatgattgggttccccagtagcgccggttctgtctccccacgcagcacttcagtgaccactacttccagtgcctctgtcacgaccactagcaacgcctctgggagacgaacctcggatgtgagaaggccctag

SEQ ID NO: 246273 - DNA, 1377 bp, Artificial Sequence
  derived and/or modified sequence
atgtccctcaggcttcagagtagctctgcaagctacggtgggggatttggtggcggatcatgccagcttggagggggtcgtggtgtttctacatgctcaacccggttcgtgagcggcggatccgctggcggttatgggggaggcgtgtcatgtggctttggtgggggagctggctctggattcggcggaggatatggcggtggtcttggtgggggatatgggggaggactggggggagggtttgggggaggcttcgcaggaggtttcgtggatttcggtgcctgcgacgggggtcttctgacgggcaacgagaaaatcaccatgcagaatttaaatgaccgactcgcctcataccttgaaaaagtgagggccctggaggaggccaacgcggatctcgaggtaaaaatcagagattggcatctcaaacagagtcccgcttctcctgagcgtgactactccccttactataaaaccattgaggaactccgagacaagatccttaccgcaaccatcgagaataatagggtcattttggaaattgataatgcgagacttgccgcagacgactttcgtctcaaatatgaaaacgaactggctttgcgacagtctgtggaggccgatattaacggtcttcggagggttctggacgaactaactctttccaaaaccgatctcgagatgcagatagaaagtctgaatgaagaactggcatatatgaaaaagaaccacgaagaggagatgaaggagttctcaaatcaggttgtcggccaggtgaacgtggagatggatgccacacccggtatcgatctgacgcgagtcctcgccgagatgcgagagcagtatgaagcaatggccgaaaggaaccggcgagatgccgaagaatggttccatacgaaaagcgcggaactgaataaagaagtctccaccaacacggccatgatccagaccagcaagacagaaatcaccgagctgaggcgcaccctgcagggcctcgagatcgaactccagtcccaattgagtatgaaagcaggtcttgagaacacggtagctgagactgaatgcaggtacgcccttcagcttcagcagattcaagggctcatctccagcatagaagcccagctgagtgagctccgaagcgagatggaatgtcagaatcaggagtacaaaatgctcttagacattaaaaccagactggagcaggagatcgcaacttatagatcgttattagaaggtcaggacgctaagatgatcgggttccccagtagcgctgggagcgttagccctagaagcacgtctgttaccacaacatcttccgcatccgtgacaacaacaagcaatgcgtccgggagaaggacatcagacgtccgcagaccatag

SEQ ID NO: 246274 - DNA, 1377 bp, Artificial Sequence
  derived and/or modified sequence
atgagcctgagactgcagagcagcagcgccagctacggcggcggcttcggcggcggcagctgccagctgggcggcggcagaggcgtgagcacctgcagcaccagattcgtgagcggcggcagcgccggcggctacggcggcggcgtgagctgcggcttcggcggcggcgccggcagcggcttcggcggcggctacggcggcggcctgggcggcggctacggcggcggcctgggcggcggcttcggcggcggcttcgccggcggcttcgtggacttcggcgcctgcgacggcggcctgctgaccggcaacgagaagatcaccatgcagaacctgaacgacagactggccagctacctggagaaggtgagagccctggaggaggccaacgccgacctggaggtgaagatcagagactggcacctgaagcagagccccgccagccccgagagagactacagcccctactacaagaccatcgaggagctgagagacaagatcctgaccgccaccatcgagaacaacagagtgatcctggagatcgacaacgccagactggccgccgacgacttcagactgaagtacgagaacgagctggccctgagacagagcgtggaggccgacatcaacggcctgagaagagtgctggacgagctgaccctgagcaagaccgacctggagatgcagatcgagagcctgaacgaggagctggcctacatgaagaagaaccacgaggaggagatgaaggagttcagcaaccaggtggtgggccaggtgaacgtggagatggacgccacccccggcatcgacctgaccagagtgctggccgagatgagagagcagtacgaggccatggccgagagaaacagaagagacgccgaggagtggttccacaccaagagcgccgagctgaacaaggaggtgagcaccaacaccgccatgatccagaccagcaagaccgagatcaccgagctgagaagaaccctgcagggcctggagatcgagctgcagagccagctgagcatgaaggccggcctggagaacaccgtggccgagaccgagtgcagatacgccctgcagctgcagcagatccagggcctgatcagcagcatcgaggcccagctgagcgagctgagaagcgagatggagtgccagaaccaggagtacaagatgctgctggacatcaagaccagactggagcaggagatcgccacctacagaagcctgctggagggccaggacgccaagatgatcggcttccccagcagcgccggcagcgtgagccccagaagcaccagcgtgaccaccaccagcagcgccagcgtgaccaccaccagcaacgccagcggcagaagaaccagcgacgtgagaagaccctag

SEQ ID NO: 246275 - protein, 462 aa, Artificial Sequence
  derived and/or modified sequence
MAAQRRSLLQSEQQPSWTDDLPLCHLSGVGSASNRSYSADGKGTESHPPEDSWLKFRSENNCFLYGVFNGYDGNRVTNFVAQRLSAELLLGQLNAEHAEADVRRVLLQAFDVVERSFLESIDDALAEKASLQSQLPEGVPQHQLPPQYQKILERLKTLEREISGGAMAVVAVLLNNKLYVANVGTNRALLCKSTVDGLQVTQLNVDHTTENEDELFRLSQLGLDAGKIKQVGIICGQESTRRIGDYKVKYGYTDIDLLSAAKSKPIIAEPEIHGAQPLDGVTGFLVLMSEGLYKALEAAHGPGQANQEIAAMIDTEFAKQTSLDAVAQAVVDRVKRIHSDTFASGGERARFCPRHEDMTLLVRNFGYPLGEMSQPTPSPAPAAGGRVYPVSVPYSSAQSTSKTSVTLSLVMPSQGQMVNGAHSASTLDEATPTLTKDPSRPASDLTAIPQCQLNLLGSLTPG

SEQ ID NO: 246276 - DNA, 1389 bp, Artificial Sequence
  derived and/or modified sequence
atggccgcccagagaagaagcctgctgcagagcgagcagcagcccagctggaccgacgacctgcccctgtgccacctgagcggcgtgggcagcgccagcaacagaagctacagcgccgacggcaagggcaccgagagccacccccccgaggacagctggctgaagttcagaagcgagaacaactgcttcctgtacggcgtgttcaacggctacgacggcaacagagtgaccaacttcgtggcccagagactgagcgccgagctgctgctgggccagctgaacgccgagcacgccgaggccgacgtgagaagagtgctgctgcaggccttcgacgtggtggagagaagcttcctggagagcatcgacgacgccctggccgagaaggccagcctgcagagccagctgcccgagggcgtgccccagcaccagctgcccccccagtaccagaagatcctggagagactgaagaccctggagagagagatcagcggcggcgccatggccgtggtggccgtgctgctgaacaacaagctgtacgtggccaacgtgggcaccaacagagccctgctgtgcaagagcaccgtggacggcctgcaggtgacccagctgaacgtggaccacaccaccgagaacgaggacgagctgttcagactgagccagctgggcctggacgccggcaagatcaagcaggtgggcatcatctgcggccaggagagcaccagaagaatcggcgactacaaggtgaagtacggctacaccgacatcgacctgctgagcgccgccaagagcaagcccatcatcgccgagcccgagatccacggcgcccagcccctggacggcgtgaccggcttcctggtgctgatgagcgagggcctgtacaaggccctggaggccgcccacggccccggccaggccaaccaggagatcgccgccatgatcgacaccgagttcgccaagcagaccagcctggacgccgtggcccaggccgtggtggacagagtgaagagaatccacagcgacaccttcgccagcggcggcgagagagccagattctgccccagacacgaggacatgaccctgctggtgagaaacttcggctaccccctgggcgagatgagccagcccacccccagccccgcccccgccgccggcggcagagtgtaccccgtgagcgtgccctacagcagcgcccagagcaccagcaagaccagcgtgaccctgagcctggtgatgcccagccagggccagatggtgaacggcgcccacagcgccagcaccctggacgaggccacccccaccctgaccaaggaccccagcagacccgccagcgacctgaccgccatcccccagtgccagctgaacctgctgggcagcctgacccccggctag

SEQ ID NO: 246277 - DNA, 1389 bp, Artificial Sequence
  derived and/or modified sequence
atggccgcacaaaggcggtccctcttgcaaagcgagcaacaaccttcttggacagatgacctccccctgtgccatctatccggcgttggtagtgcctccaatcgctcatacagtgcagatggaaaaggcactgagagccatcctccagaggatagctggttaaagtttcgctctgagaataattgtttcctctacggcgtgttcaacgggtatgacggcaacagagtgactaacttcgtggcgcagcggctgtccgctgagcttcttttgggccaacttaatgcagagcatgccgaagcagacgtgagacgcgtgctactgcaagcattcgacgtcgtagaaagaagctttttggaaagcatagatgatgctctggccgaaaaagcctccttgcagtcccagttacccgaaggcgtccctcagcatcaactacccccccagtatcagaaaatactggaacggctgaagaccttggagagggaaatatcaggaggagctatggcagtggtggccgtgctgcttaataataaactgtatgtcgccaacgtgggtacaaaccgtgccctgctttgcaagtcaaccgttgacggtctccaggtcactcagctgaatgtggatcacacaactgagaatgaggatgagctttttagactctcacagctagggctcgatgccgggaaaattaagcaagtgggtataatttgcggccaggaatctacacgacgcattggcgactataaagtgaagtatggttacaccgatatcgacttgcttagtgccgccaaatctaagcctattatagctgaaccagaaatccacggcgcacaacctctggacggggttacggggttcctggtccttatgtctgaggggctctataaggccctggaagcagcccatggacccggccaagccaatcaggagattgccgccatgatcgataccgaattcgctaaacagactagtctggatgccgtggcacaggcagtcgtcgatagagtgaagagaatccattcagatacattcgctagtggcggtgaaagagcaagattctgcccccggcatgaggatatgacgttattggtgaggaacttcgggtatccactgggcgagatgagccagcccaccccatcgcctgccccagcggccgggggccgagtgtacccagtcagcgtgccatattcttcggctcagagcacaagcaagacatccgtcacactcagccttgttatgccttctcagggccagatggtgaacggagcacactcagcctccacattagacgaagctacacctacacttaccaaggatccatcacgaccagcctccgacttgaccgccatacctcagtgccaactgaacctccttgggtccctcacaccagggtag

SEQ ID NO: 246278 - DNA, 1389 bp, Artificial Sequence
  derived and/or modified sequence
atggccgcccagaggaggagcctgctgcagagcgagcagcagcccagctggacagatgacctgcccctgtgccacctgtctggagtgggcagcgccagcaacagaagctacagcgcagatggcaagggcacagagagccaccccccagaggacagctggctgaagttccgctctgagaacaactgcttcctgtatggagtcttcaacggctatgatggcaacagagtgaccaactttgtggcccagaggctgtctgctgagctgctgctgggccagctgaatgctgagcacgccgaggctgatgtgagaagagtgctgctgcaggcctttgatgtggtggagaggagcttcctggagagcattgatgatgccctggccgagaaggccagcctgcagagccagctgcctgagggcgtgccccagcaccagctgcccccccagtaccagaagatcctggagcggctgaagaccctggagcgggagatctctggaggagccatggctgtggtggccgtgctgctgaacaacaagctgtatgtggccaacgtgggcaccaacagagccctgctgtgcaagagcacagtggatggcctgcaggtgacccagctgaatgtggaccacaccacagaaaatgaagatgagctgttccggctgagccagctgggcctggatgctgggaagatcaagcaggtgggcatcatctgtggccaggagagcaccaggagaattggagactacaaggtgaagtatggctacacagacatcgacctgctgtctgctgccaagagcaagcccatcatcgccgagcctgagatccatggagcccagcccctggatggagtgacaggcttcctggtgctgatgtctgagggcctgtacaaggccctggaggccgcccacggccctggccaggccaaccaggagattgctgccatgattgacacagaatttgccaagcagaccagcctggatgctgtggcccaggccgtggtggacagagtgaagaggatccacagcgacacctttgccagcggcggggagcgggcccgcttctgccccaggcatgaggacatgaccctgctggtgaggaactttggctaccccctgggggagatgagccagcccacccccagccctgccccagctgctgggggccgggtgtaccctgtgtctgtgccctacagcagcgcccagagcaccagcaagacctctgtgaccctgagcctggtgatgcccagccagggccagatggtgaatggagcccacagcgccagcaccctggatgaggccacccccaccctgaccaaggaccccagcaggcctgccagtgacctgacagccatcccccagtgccagctgaacctgctgggcagcctgaccccaggatag

SEQ ID NO: 246279 - DNA, 1389 bp, Artificial Sequence
  derived and/or modified sequence
atggccgcccagcggcggagcctgctgcagagcgagcagcagccctcatggactgatgatctgccgttgtgtcatctgagcggcgtgggctcggcgagcaatcggagttactcagccgatgggaagggcaccgaatcacacccccccgaggattcttggctgaaatttcggtccgagaacaactgttttctctatggcgtcttcaatggctacgatggaaacagagtgaccaactttgtcgcccaacgactgagtgcggagctgctccttggccagttgaacgcagaacacgctgaggcggatgtgcggagagtgctgttgcaggctttcgatgtggtggaacgtagctttctcgaaagcatcgatgacgccctggcagagaaagcttctctgcagagtcagttgccagagggggtgccgcaacaccaactgcccccgcagtaccagaagatactagaaaggctgaaaactcttgagcgggaaatctcaggcggagccatggccgtcgtggcagtcttactcaataacaagttatatgtcgccaacgtgggaactaatcgagccctcttgtgtaaaagtaccgtagatggcttgcaagtgacacagctgaatgtcgaccacacaaccgaaaatgaggacgagctgtttcgtctgtctcagcttggactggacgctggtaagataaagcaagtaggtattatctgtggccaggaatccactagacgtatcggggattacaaggtgaagtacggctacactgatatagacctgcttagcgcggcaaagtctaagccaatcattgcagaaccagagatccacggggcacaacctctggacggggtgactggcttcctggtgttgatgagcgagggactctacaaggccctcgaggctgcacatggaccaggccaggctaatcaggagatagcagccatgatcgacaccgagtttgcaaagcaaacatccctcgacgccgtcgcccaagctgtggtggaccgagtaaagaggatccacagtgacacttttgcaagcggaggcgagcgcgcaaggttctgcccacgtcacgaggacatgactcttctggtaagaaattttgggtacccgcttggggagatgagccaaccgacaccttccccagctccggccgctggggggagggtctatcctgtgtcggtaccttatagtagtgcccagagcacgtcaaagacatcagtgactctctcactggtgatgccaagtcagggtcaaatggttaatggggcccacagcgcatctacattagacgaagctacacctacgcttacaaaggatccgagccgtcccgcttctgatctcacagccattcctcaatgtcagctcaacctactcgggtccctcactcccggttag

SEQ ID NO: 246280 - DNA, 1389 bp, Artificial Sequence
  derived and/or modified sequence
atggccgcacagagacggagtcttctccagtccgagcagcaaccctcctggaccgatgatctccccctgtgccacttaagcggcgtaggaagcgcgagtaacaggtcatacagcgccgatggaaagggcacagagtcccaccctccggaagacagttggctcaaattccgcagtgagaataattgcttcctgtatggtgtgtttaatggctacgacggcaatcgggttaccaatttcgtcgcacagcggctctctgcggaacttcttctgggacagctcaacgcagagcatgcagaggctgacgtgaggcgtgtcctattgcaggcctttgacgtggttgagcggtctttcctggagtccattgatgatgctctggccgagaaagctagcctccagtctcagttgccagagggagtccctcagcaccaactgcctccacagtaccagaaaatcctggaacgactgaagaccttggaaagagagatctctggaggcgcaatggccgtggtagctgtcttgctgaataacaagctgtacgtagcaaacgtggggacgaaccgagctctcttatgcaagagcaccgtagatggcctgcaagtcacacaactgaacgtggaccatacgaccgagaatgaggatgaattgttcaggctgtcccaacttggcctggatgccggaaaaattaaacaggtaggaatcatatgcggacaggagtcgactcgtcgtattggcgactacaaagtaaaatatggttacaccgatattgatcttttatccgccgctaagtctaagcctatcattgccgaacccgaaatacacggggctcagcctctagatggcgttaccgggttcctggtgctgatgtcagagggcctgtacaaagccctagaagccgcacacggcccagggcaggctaatcaagagatagccgctatgatagatacggagttcgccaaacagacgtcactcgacgctgtggcccaggccgtggtggatagagtgaagcgaattcactcagatacattcgcatctggtggtgagcgggctcgattctgcccgagacacgaggatatgactctgctggttaggaattttgggtaccctcttggggagatgtcccagcccacccctagcccagctcccgctgctgggggtagggtctatcctgtgtcagtcccctatagcagcgctcagtcgacgagtaagactagtgttaccctctcattggttatgccctcccaagggcaaatggtgaacggcgcacacagtgcgtctacactcgacgaggccacgcccaccctgacaaaggatccttctaggcccgcatccgatttaaccgccatccctcagtgccagctcaaccttctgggtagtctgacaccaggctag

SEQ ID NO: 246281 - DNA, 1660 bp, Artificial Sequence
  derived and/or modified sequence
ccgcaggggttcctccaagatggcggcgcagaggaggagcttgctgcagagtgagcagcagccaagctggacagatgacctgcctctctgccacctctctggggttggctcagcctccaaccgcagctactctgctgatggcaagggcactgagagccacccgccagaggacagctggctcaagttcaggagtgagaacaactgcttcctgtatggggtcttcaacggctatgatggcaaccgagtgaccaacttcgtggcccagcggctgtccgcagagctcctgctgggccagctgaatgccgagcacgccgaggccgatgtgcggcgtgtgctgctgcaggccttcgatgtggtggagaggagcttcctggagtccattgacgacgccttggctgagaaggcaagcctccagtcgcaattgccagagggagtccctcagcaccagctgcctcctcagtatcagaagatccttgagagactcaagacgttagagagggaaatttcgggaggggccatggccgttgtggcggtccttctcaacaacaagctctacgtcgccaatgtcggtacaaaccgtgcacttttatgcaaatcgacagtggatgggttgcaggtgacacagctgaacgtggaccacaccacagagaacgaggatgagctcttccgtctttcgcagctgggcttggatgctggaaagatcaagcaggtggggatcatctgtgggcaggagagcacccggcggatcggggattacaaggttaaatatggctacacggacattgaccttctcagcgctgccaagtccaaaccaatcatcgcagagccagaaatccatggggcacagccgctggatggggtgacgggcttcttggtgctgatgtcggaggggttgtacaaggccctagaggcagcccatgggcctgggcaggccaaccaggagattgctgcgatgattgacactgagtttgccaagcagacctccctggacgcagtggcccaggccgtcgtggaccgggtgaagcgcatccacagcgacaccttcgccagtggtggggagcgtgccaggttctgcccccggcacgaggacatgaccctgctagtgaggaactttggctacccgctgggcgaaatgagccagcccacaccgagcccagccccagctgcaggaggacgagtgtaccctgtgtctgtgccatactccagcgcccagagcaccagcaagaccagcgtgaccctctcccttgtcatgccctcccagggccagatggtcaacggggctcacagtgcttccaccctggacgaagccacccccaccctcaccaaagacccttccaggcctgcaagcgatttgacagccatccctcagtgccaactaaacctcctgggcagcctgaccccagggtaggaaggaagcgcctacaccaaggggccctctgggagctgagatcatcctggggttttgtcgcctggtctgacttgtgcactgggatcttctcgtgccaggccaggccccgccccctccccgggactgggcagaccccctccctcatgcatctgtgtccactgaggcttccctcacctagaatggcccatccttcaggacccagctcactctcatcttctttccagggacttatcccccaaggctgtcctctgt

SEQ ID NO: 246282 - protein, 385 aa, Artificial Sequence
  derived and/or modified sequence
MARENGESSSSWKKQAEDIKKIFEFKETLGTGAFSEVVLAEEKATGKLFAVKCIPKKALKGKESSIENEIAVLRKIKHENIVALEDIYESPNHLYLVMQLVSGGELFDRIVEKGFYTEKDASTLIRQVLDAVYYLHRMGIVHRDLKPENLLYYSQDEESKIMISDFGLSKMEGKGDVMSTACGTPGYVAPEVLAQKPYSKAVDCWSIGVIAYILLCGYPPFYDENDSKLFEQILKAEYEFDSPYWDDISDSAKDFIRNLMEKDPNKRYTCEQAARHPWIAGDTALNKNIHESVSAQIRKNFAKSKWRQAFNATAVVRHMRKLHLGSSLDSSNASVSSSLSLASQKDCLAPSTLCSFISSSSGVSGVGAERRPRPTTVTAVHSGSK

SEQ ID NO: 246283 - DNA, 1158 bp, Artificial Sequence
  derived and/or modified sequence
atggccagagagaacggcgagagcagcagcagctggaagaagcaggccgaggacatcaagaagatcttcgagttcaaggagaccctgggcaccggcgccttcagcgaggtggtgctggccgaggagaaggccaccggcaagctgttcgccgtgaagtgcatccccaagaaggccctgaagggcaaggagagcagcatcgagaacgagatcgccgtgctgagaaagatcaagcacgagaacatcgtggccctggaggacatctacgagagccccaaccacctgtacctggtgatgcagctggtgagcggcggcgagctgttcgacagaatcgtggagaagggcttctacaccgagaaggacgccagcaccctgatcagacaggtgctggacgccgtgtactacctgcacagaatgggcatcgtgcacagagacctgaagcccgagaacctgctgtactacagccaggacgaggagagcaagatcatgatcagcgacttcggcctgagcaagatggagggcaagggcgacgtgatgagcaccgcctgcggcacccccggctacgtggcccccgaggtgctggcccagaagccctacagcaaggccgtggactgctggagcatcggcgtgatcgcctacatcctgctgtgcggctacccccccttctacgacgagaacgacagcaagctgttcgagcagatcctgaaggccgagtacgagttcgacagcccctactgggacgacatcagcgacagcgccaaggacttcatcagaaacctgatggagaaggaccccaacaagagatacacctgcgagcaggccgccagacacccctggatcgccggcgacaccgccctgaacaagaacatccacgagagcgtgagcgcccagatcagaaagaacttcgccaagagcaagtggagacaggccttcaacgccaccgccgtggtgagacacatgagaaagctgcacctgggcagcagcctggacagcagcaacgccagcgtgagcagcagcctgagcctggccagccagaaggactgcctggcccccagcaccctgtgcagcttcatcagcagcagcagcggcgtgagcggcgtgggcgccgagagaagacccagacccaccaccgtgaccgccgtgcacagcggcagcaagtag

SEQ ID NO: 246284 - DNA, 1158 bp, Artificial Sequence
  derived and/or modified sequence
atggcaagagagaacggagagtcatcctcctcctggaaaaaacaagcagaagatataaagaaaatcttcgaatttaaagagacactgggcaccggcgcatttagtgaagtggtactggctgaggaaaaggccaccggcaagcttttcgccgtgaaatgcatccctaagaaagcactgaaagggaaggagagctctatagagaacgaaattgccgtgttgcgcaagatcaagcatgagaacatcgtcgcgttggaggatatctacgaaagcccaaatcacctgtacttagtgatgcagctagttagcggcggcgagctgttcgatcggatcgtagaaaaggggttctacaccgaaaaagacgcctcaaccctgattaggcaggtgctggacgccgtttactacctgcacagaatgggaatcgtgcatcgggatctcaaacctgagaatctgctttattatagccaggacgaagagtccaagatcatgatttctgactttgggctgtccaagatggaaggaaagggtgacgtgatgtctactgcctgcggaacaccgggatatgtcgcaccagaagtgcttgctcagaaaccctacagcaaggctgtcgattgttggagtatcggagtgattgcctatatactgctgtgtggatatccacctttttatgacgagaacgacagtaagcttttcgagcagatcctgaaggccgagtacgaattcgactccccatattgggacgatatcagtgattcagctaaagattttatccgaaatttaatggagaaggatccgaataaacgatatacttgcgaacaggccgctcgtcatccatggattgccggtgatacagcacttaataagaatatccacgagtctgtcagcgcccagatccgcaagaactttgcaaaaagcaaatggcgccaggcgtttaatgccactgccgttgtccgacacatgaggaagctacatctgggttccagccttgactctagcaacgccagcgttagctccagcctgtctctggctagtcagaaggattgcctcgcaccctctactttatgtagtttcataagctcatcatctggtgtttctggagtgggggcagagcgtcgccctagacctacaacagtgaccgccgttcatagcgggagtaagtag

SEQ ID NO: 246285 - DNA, 1158 bp, Artificial Sequence
  derived and/or modified sequence
atggcccgggagaatggagagagcagcagctcctggaagaagcaggccgaggacatcaagaagatctttgagttcaaggagaccctgggcactggagccttcagcgaggtggtgctggccgaggagaaggccaccgggaagctgtttgctgtgaagtgcatccccaagaaggccctgaagggcaaggagagcagcattgaaaatgaaattgctgtgctgaggaagatcaagcatgaaaatattgtggccctggaggacatctatgagagccccaaccacctgtacctggtgatgcagctggtgtctggaggagagctgtttgaccgcatcgtggagaagggcttctacacagagaaggatgccagcaccctcatccggcaggtgctggatgctgtgtactacctgcacaggatgggcatcgtgcaccgggacctgaagccagagaacctgctgtactacagccaggatgaggagagcaagatcatgatcagtgactttggcctgagcaagatggagggcaaaggagatgtgatgagcacagcctgtggcaccccaggctacgtggcccctgaggtgctggcccagaagccctacagcaaggctgtggactgctggagcattggagtcatcgcctacatcctgctgtgtggctacccacccttctatgatgaaaatgacagcaagctgtttgagcagatcctgaaggccgagtatgaatttgacagcccctactgggatgacatcagtgacagcgccaaggacttcatccggaacctgatggagaaggaccccaacaagcgctacacctgtgagcaggccgcccggcacccctggattgctggggacacagccctgaacaagaacatccacgagagcgtgtctgcccagatcaggaagaactttgccaagagcaagtggaggcaggccttcaatgccacagctgtggtgcgccacatgaggaagctgcacctgggcagcagcctggacagcagcaatgcctctgtgagcagcagcctgagcctggccagccagaaggactgcctggcccccagcaccctgtgcagcttcatcagcagcagcagtggagtgtctggagtgggcgctgagcggcggccccggcccaccaccgtgacagctgtgcacagcggcagcaagtag

SEQ ID NO: 246286 - DNA, 8154 bp, Artificial Sequence
  derived and/or modified sequence
ggaggaggcgcgaggtgggggggagcgcggcgggcggcagggagggagcgggagggaggcaagaaagtagcagaaagtgaggctggcaggcggcggcaaaggagccggcgcgcggcggcggcaggaagtctgtgcccgagaacagcagaaataagagccagggagggaccgcggccgcggcggcggcggcgagagcgaaagaggaaactgcagaggaggaagctgcgccgcagcccgagccgcccggcatccccgccgcctctgcgcccgcgccgcgcccccggcgccccctccccagcgcgcccccggccgctcctccgcgccgcgctcgtcggccatggcccgggagaacggcgagagcagctcctcctggaaaaagcaagctgaagacatcaagaagatcttcgagttcaaagagaccctcggaaccggggccttttccgaagtggttttagctgaagagaaggcaactggcaagctctttgctgtgaagtgtatccctaagaaggcgctgaagggcaaggaaagcagcatagagaatgagatagccgtcctgagaaagattaagcatgaaaatattgttgccctggaagacatttatgaaagcccaaatcacctgtacttggtcatgcagctggtgtccggtggagagctgtttgaccggatagtggagaaggggttttatacagagaaggatgccagcactctgatccgccaagtcttggacgccgtgtactatctccacagaatgggcatcgtccacagagacctcaagcccgaaaatctcttgtactacagtcaagatgaggagtccaaaataatgatcagtgactttggattgtcaaaaatggagggcaaaggagatgtgatgtccactgcctgtggaactccaggctatgtcgctcctgaagtcctcgcccagaaaccttacagcaaagccgttgactgctggtccatcggagtgattgcctacatcttgctctgcggctaccctcctttttatgatgaaaatgactccaagctctttgagcagatcctcaaggcggaatatgagtttgactctccctactgggatgacatctccgactctgcaaaagacttcattcggaacctgatggagaaggacccgaataaaagatacacgtgtgagcaggcagctcggcacccatggatcgctggtgacacagccctcaacaaaaacatccacgagtccgtcagcgcccagatccggaaaaactttgccaagagcaaatggagacaagcatttaatgccacggccgtcgtcagacatatgagaaaactacacctcggcagcagcctggacagttcaaatgcaagtgtttcgagcagcctcagtttggccagccaaaaagactgtctggcaccttccacgctctgtagtttcatttcttcttcgtcgggggtctcaggagttggagccgagcggagacccaggcccaccactgtgacggcagtgcactctggaagcaagtgactggccctggaggtggggcccggggtcggggctggggaaggggagccccagggtcgccagagccgcgagccactccagcgagaccccaccttgcatggtgccccttcctgcataggactggaagaccgaagtttttttatggccatattttctactgcaattctgaagtgttcatttctcacaaactgtactgactcgaggggcgctgatttcataggatctggtgctgtatatacgaatcttgcaaagctctaactgaacggaccttcttattcctctcccctaacaccatcgtttccactcttctcagtgtaggtaaccgtctatggtgtgttttttcattaatgacaaaaaaaaaaaggtttcaactggattatttaaatattggtaaatattgtgcattagggtttgtttttccttttaagaagtatgtcctttgtatctctaagttacatgacctatatcttttcctctttaatagtagttttatgttaacctttaagagatttgtttttcctcaaaggagaatttaaaggtattttttaaaattctaataagaggatcagccgggtgcaatgactcatgcctgtaatcccagcacgttgggaggccaagtcgggcggatcacaaggtcaggagatcaaggccatcctggccaacatggtgaaaccccacgtctactaaaaatacaaaaaattagccgggcgtggtggcacacacctgtagtcccggctactcgggaggctgaggcaggagaattgcttgaacccgggagacggaggttgcagtgagctgagatcgtgccactgcactccagcctgggtgacagagcaagactctgtctcaaaaaaaaaaaaaaaaattctaacaagaggatcatgaatctgtctccaaggctaagagtgcccttcacctctactccttctgtttctctccccttccccaggaggaggggcccctcagttctgcgaggctctcttctctgcgggggactttggtagagaatctgcacagagcctttgctggcaacccatccagcagaacccacacccaccagagaccctagaggcctcttgccatcagcaaccagaaataagcctgctcccccgagacgcagggctcagcttcacaggccagacttgctgtgagtgagatgcccacactgcagagatgcaggaccctcccttgcaaaaggaaccagctgccatgttgctgaaagtgggcccacacacaaccctcatttctcacgagagctaacagatgaaagctcagctatgcagtgttaaaattcatctctttctctgtggtttttaaaaaaatgcatttctaatcttacacttcacgtggcctccaacacaaagttctttctccacatttttaccctcttctcacatgaatgttttccaagggaaggaagggagggaagcagccttgggaaaggatccatttctggtggtaaggagagggggccctgccaggctaatgggacttcagccaccacagagatgaccaaagaccacctccgccaggcccagccagtgcttgcagccctcccattggtcaggggagtctaaaatcaaagatacatggtggtagggtcaccaaacgtcccatttgcccgagactgaaggatttctcaggctgtggacatttaatgccaaaaccaggaatatccggggcaaagcaggctgtgttgttcgcctttgtggagccaggcagtgtgtggcccagggaaagctgcgtttcatggaggcttccaggaggctgccctgtaaagccaggcaggtggcttcaagtgccattcctgcaagtgcccctgcttcagctctcaggcccatccaatgcctcgagcccacgggggtgtcccggcaggtctgcgtcatcacgacccagtaacgctgctggctgtgtcctcatgccctcttcctctggctggccagtcatgggaagtcctgttggttgagtcatctttgtcacttctacacctttgagtatgtacaggctgaatgttgagtgatgcccccccaccctctcaataaacacacacacacacacacacacacacacacacacacacaatgttattaggcacagcagctccatcctgctccctgagaatggcagtgcaggcacagagaagagcagttgggaagacaggcagctggtctaccctgtccccgcacacttcacaggcactccactgcttggcaggaattctgcatggcatctgccacgcatgctcacagggtgaaaaatcaagctgtcactctgcaaaatctaaaaaccctggaaaggtctataagatgacattagacccagttaagaagcaagtgtcacctgagttggccatgcaatgaatgaatattataagcagtattggagaactaggcggttgcttactaagaagtgtcttggaaacattcgagttcatacagtgcatgacaaagtaatagaaggctgcaagcgctgaaaatgcacccgaatctggtacctaggatgagtacatgaatagtgatgaatagccctttgtgctgtgtgctatatacaaccatttgcattcagaaagcagcatttgaagctgagttccattactggtgattgaagtattttcaggagcagatacatgtggtgcatgttatatgcacttagtttgaaagtatccctcacccaaaaagtgcagaacctctgaaaggtgagccgtggtgcaggtgcccccctcgctgttcgggtcagttcttggccatgcttggcctgtcacacgccgggtctcaacaacatcgtgcgaggagacagtgactggtttcagcccaagagtcaactgttgagcatgacatcaggaagcctgtactgtcctgatcccaccaggcttgggttaatttcctattgcttcagagaaagagaggcgctcttgtgcttttgagagagctctcatgttaaaaagaggttgtctttgcactgcgcttggtatgatttgttttcttataaaacaggaagagaacctagaatgtgcctttcgtgaaggtctgacaaatggggtctcagagtcctaggacccgcaccaaggtcagagtccacctgtagaggctgagcatttctacatgcacccagggtgctgggctgaggctaagggtggacgcgtagaccccatcacaggcttccttcctgagcccaagtcccccatttggtcactatcccttctcagagcaagtggattctcttttcctcacttggagtattcaatgttgaagtagtggcctggagtggcctttccctcagctgcctgtctgggcctccctggcttcccggatcttcatctcatacgtgaggcaataggaggagtttctattcattgagacaaacagtgagcgggcaccaacaggccagcagcttggcccttttcacagaggtggccttggagtctggagtctgggcagctgtctgcctctctacggctctgcttcccagcgggcacacgggtccggagcctcagaatgaagtggtgcagaggcgcagggcacacctaggagaagctcaatgaccaccaaagcccttgaggagagacggggtttgctgtgttagagaaatggcaacccccaggaccatgcacggctctggcagtgcacagtggctgattttcaccagttcctcctacccctgcctctgtcggagactagaaaacattctaccccttcaggtcttcttttaaaagaaaagagctatggcaaagcgtgccatacaaagttaaaaaaaggaagagtggctttgcgttcttgaccatggccacaattctggtcacttctagcatctgaccttgagaacggtgtagagtctctgagccaccgctggcctttgagagagtctcactctccagctagctctttgtgtagtgtccagggccccggcagtcaggatagagcgagcaaaagaagatggacagtggacagggcgcagtggctcacgcctgtaatcccagcgctttgggagagcgaggcgggcagatcacaaggtcaagagatcaagaccattctggccaacatggtgaaaccctgtttctactaaaaatacaaaaattagctgggcatggtggtgcgtgcctgtaatcccagctactcgggaggctgaggcaggagaatcgcttgaacccgggaggcagaggttgcagtgagccgagatcgtgccactgcactccagcctgggtgacagagcaagactccgtctcaaaaaagatggccatgctggccaaggctgggctcataggaaatatctgtagtaggatgaaaggaatctggcctagggagccccggactcggtttacctaccccgtactcatcccactcatctgtctaccctagtgtccatcatgccctggatgaatcgtaggtgggagggacagaagccgagaacaccaggcacacggggtggggggaatggggggagcccaggtgatcccctttggaaagtggattgatcctctcccctgtggaatgacagcttaacctgattaacccactggggcttgctattttatgagcatttttaaacagaaaggaaagatgatatcccagtgcaggtagactttatttttgaaagcatcgtggcccctcacctctccctctcccccagaaccttggccagaattgagtcttcgcgttggggaggccacgctggaaccattgctctagggctgaaggtggaagtagggccactgccgcagcttcagccagagccctcgctgcttcgcagaatttaacaagcacacgactgggattcctttggatatgagaaaggaaggcaagtgcgggcaaagggaagctcctcccgtttttcataaacagaagtaagatgtcctctttcccaggtttgcacaatcacttctggcaaattaattgaaggtccttgaattcagccagtgcacgaaacctttgcatgttcttctgaaactgtacttcttccctattctgtctacccacactctgcgaactttgccttttccttaaacacattccagaccaaacactgttcagtttgttaaaaaaaaaaaaaaaaaaaaaagatgtatatacctgtatgtgatccaccacccttttgaggggcacctggtcctcggttggggctgcaggtgtgcctgacatttgcaaaagatattccagtctttcgatgttcagaattgaaaatgtggagatagaaaagctcaaacagactcctaaaaggagggtttctttcctgaagactccaagaaaatgagtgtgcagatgagttagcttgacaacctcaactctggggagcaggcaggcggtctgaggaagataagggcccacgccccactcacctggcacctgttcggtggtcccggggcatcatggtctgcagctctgggcccccagccccactgtgaagtcagtcctgcatgctggccgaggcccggccacctcccgatgcctccagagtcagtgggaaggagtcagcccttcccagacttccccgccacctccagcaggagcagctcagtttgtggctctgggagctccgcttttgcaaacccaaaaaggctgtgcatttggaagccaaacgctcagcatgcggctgccgagtctggttttgtggacaaagcaaactgtggaatggcttctcggtgtctgtataaagggacaaacggttgcattcaccctttgtactataacaccgcttctgcattcgccatatccgttttttaacctttttgtctccggggaacttctcattcgattattatgtcttctgatgatttgccatgttattttaaaggtgattttattttcttatggacaggaaaaaagaaaatgaggaggagttggttttactcttagagataagacttcagcaggggctcagaaaccccaaactctagttaaattgcttctcggaggaaaatcttaatctagacagattcagattcccaggctctcctggaagccctgcacttcagggcacaggggccctgggacgtggttggcagccaggctgcgagagagctaaaaaggaacaagaacatcagctcggatgtttgtctctcagccctgacacctgccactctccttcccggggcacttggccctatcagagggacatgaaatgctgtccgaatggtggcagaaatgcagcgacattgcatgcagcagagtctttgcttcgaaagatggggcgccatgtttcagagaacatttatcttagtcccacgttcaggtgagaagacctcaaaggtaccctctgtccagaataaacattggaacaatctctcaattggcttttgtcactacacataatgtaatctcccttctttcagctcccccaacagtgagcatgcttcccaaaaaattacaacatcaaaaccaggaatgtccccgcatctactattaccaggcttgcaattggttcaattttcccataaaaacatgtttgtccaaaagaagggaaactgtgaatttattccatgcatgtaataaactctgcaagaagtttaacccacataggtttgcggcactgcaaaattgttcatgggtctatgtagcaaatgattctctgccttgacaatcatgtatacatatcaagatttctatcataatgataatgagattgatgacttcctgttttcctccaataaagacaattaatcaccttca

SEQ ID NO: 246287 - DNA, 1158 bp, Artificial Sequence
  derived and/or modified sequence
atggcccgggagaacggcgagagcagcagcagctggaagaagcaggccgaggatatcaaaaaaattttcgagttcaaggaaacccttggcaccggagccttcagtgaagtggtgctcgccgaagaaaaggcaactggaaagctgtttgctgtgaagtgcattccgaagaaggctctcaaaggcaaggagagttcaatcgagaatgaaatcgctgtgctcaggaaaatcaaacacgaaaacattgtggcgttggaagatatctatgagtcccctaatcacctgtacctagtcatgcagttggtgagtggaggagagctatttgataggattgtggagaagggtttctacaccgaaaaagacgcttccacactgattcggcaggtattagacgcagtctactatctgcacagaatgggaattgtacatagagatctaaagccagagaatttgctgtattattcccaagacgaagagtctaagatcatgatctcagactttggactcagtaagatggagggaaaaggcgatgtaatgagtactgcctgcgggacaccaggctacgtggcaccagaggtgttggcccagaagccatactccaaggccgtagactgctggtctattggtgttattgcctacattttgctctgcggctaccccccattttacgatgaaaacgactcaaaattgtttgagcagatcctcaaagccgagtatgagtttgactcaccctactgggatgatattagcgattctgccaaagactttatccggaatctgatggagaaggatcccaacaagaggtatacttgtgagcaagccgccagacacccatggatcgcaggcgacaccgccctgaataaaaatatacatgaatcagtttctgcacagatcaggaaaaacttcgcaaaatccaagtggcggcaagcatttaatgcaacagccgtcgttcgacacatgcgaaagctgcacctcgggagttcccttgattcaagcaatgcctctgtgagcagctctctgtcactagcaagccagaaggattgcttggcacctagcacgctctgtagttttatcagttcttcttccggcgtttctggcgtgggcgccgaaagacgacctaggccaaccaccgtgacagcagtgcatagcgggagcaagtag

SEQ ID NO: 246288 - DNA, 1158 bp, Artificial Sequence
  derived and/or modified sequence
atggcaagagaaaatggcgaatcatcaagtagctggaagaagcaggccgaagacatcaagaagatttttgagttcaaggaaacgcttgggaccggcgctttctcagaggtggtgctggccgaagaaaaagccaccggtaagctctttgctgtgaagtgtatccctaaaaaggctctgaaaggcaaggagagtagcattgaaaacgagattgcagtgcttagaaaaatcaagcacgagaacatcgtggcactggaggatatctacgaatccccaaatcacctttatctcgtaatgcaattagtgtcaggtggcgagctcttcgataggatcgtggaaaagggcttctacacggaaaaggacgccagtaccctgatacgccaggtgttggatgctgtctactacctgcataggatggggattgttcacagggatttgaagcccgaaaatcttctatactattcgcaggatgaggaaagcaaaattatgatcagcgactttggcctgtccaagatggaggggaagggagacgtgatgtccactgcgtgtgggaccccaggatacgtggcccctgaggtcttggcccagaaaccttactctaaagcggtcgattgctggagcataggcgtgattgcatacatcctcctgtgcgggtacccaccgttttatgacgaaaatgacagcaagctcttcgaacaaattctgaaggctgaatacgaatttgacagcccttattgggacgacatctctgacagtgcaaaagacttcataagaaacctgatggaaaaggatcctaacaaaagatacacttgtgaacaagctgccaggcatccttggatagcaggtgacacggcactgaacaagaacatccacgagtcggtgtctgcacagattcgtaagaacttcgcgaagtccaagtggcggcaggcattcaatgccacagccgtggtaaggcacatgcgcaaactgcacctgggcagctccctggactcctcaaatgcatctgtgagcagtagcctctccctggctagccaaaaggattgcttggcaccctccaccctatgcagctttatctccagcagcagcggtgtgtctggcgtcggcgctgaaaggcgccctagacccacgaccgtcacagccgttcacagcggatcaaaatag

SEQ ID NO: 246289 - protein, 770 aa, Artificial Sequence
  derived and/or modified sequence
MDFSKFLADDFDVKEWINAAFRAGSKEAASGKADGHAATLVMKLQLFIQEVNHAVEETSHQALQNMPKVLRDVEALKQEASFLKEQMILVKEDIKKFEQDTSQSMQVLVEIDQVKSRMQLAAESLQEADKWSTLSADIEETFKTQDIAVISAKLTGMQNSLMMLVDTPDYSEKCVHLEALKNRLEALASPQIVAAFTSQAVDQSKVFVKVFTEIDRMPQLLAYYYKCHKVQLLAAWQELCQSDLSLDRQLTGLYDALLGAWHTQIQWATQVFQKPHEVVMVLLIQTLGALMPSLPSCLSNGVERAGPEQELTRLLEFYDATAHFAKGLEMALLPHLHEHNLVKVTELVDAVYDPYKPYQLKYGDMEESNLLIQMSAVPLEHGEVIDCVQELSHSVNKLFGLASAAVDRCVRFTNGLGTCGLLSALKSLFAKYVSDFTSTLQSIRKKCKLDHIPPNSLFQEDWTAFQNSIRIIATCGELLRHCGDFEQQLANRILSTAGKYLSDSCSPRSLAGFQESILTDKKNSAKNPWQEYNYLQKDNPAEYASLMEILYTLKEKGSSNHNLLAAPRAALTRLNQQAHQLAFDSVFLRIKQQLLLISKMDSWNTAGIGETLTDELPAFSLTPLEYISNIGQYIMSLPLNLEPFVTQEDSALELALHAGKLPFPPEQGDELPELDNMADNWLGSIARATMQTYCDAILQIPELSPHSAKQLATDIDYLINVMDALGLQPSRTLQHIVTLLKTRPEDYRQVSKGLPRRLATTVATMRSVNY

SEQ ID NO: 246290 - DNA, 2313 bp, Artificial Sequence
  derived and/or modified sequence
atggacttttccaagttccttgcagacgacttcgacgtcaaagagtggatcaacgccgcattcagggccgggtccaaggaggcagccagcggcaaagctgatggccatgcagccacactggtgatgaagctacagctgtttatccaggaagtgaatcatgctgtggaggagacatcccaccaggcactccagaacatgcctaaggtgctgcgggacgtggaagccctgaagcaggaggcaagtttcctaaaggaacagatgattctggtgaaggaggatatcaaaaaatttgagcaagacaccagccaatcaatgcaggttctagtggagattgatcaggtgaagtcacgcatgcagctagccgccgaatcactacaggaggcggataagtggtcaacactatctgcagatatcgaggaaacattcaaaacgcaggatattgcagtgataagtgctaaactgaccggtatgcaaaattctctcatgatgctggttgatacacctgactactcagagaaatgtgtgcacctcgaggccctaaaaaacaggctggaggcgctagcatcccctcaaatagtcgcggcctttacttcacaggccgtggaccagtccaaggtgttcgttaaggtatttacagagatcgatcgaatgcctcaacttcttgcctattactataaatgccacaaggtgcagttgctcgccgcatggcaggagctgtgccagtcagatctgtctcttgatcggcagctgacaggcctgtatgacgcactcttgggggcttggcatactcagatccagtgggctactcaggtgttccagaaaccccacgaggttgtcatggtgctactgattcaaactctgggcgctctcatgccgagcttgcccagctgtttgtcaaatggggtggaaagagctgggccggagcaggagctaaccagactgctggagttctatgatgccacagcccattttgccaaagggctggaaatggctctgctgccccacctccacgagcataatctggttaaggttacagagctcgtagacgcggtttacgacccttataagccatatcagctgaaatatggcgatatggaagagtctaatctgctaatacagatgtcagcggtaccacttgagcacggagaagtgattgactgtgtccaggaactgagtcactcagtgaacaagctcttcggactggcaagcgctgccgtcgataggtgcgtccggtttactaatggattaggcacttgcggactgcttagcgcactcaaatcattgtttgctaagtacgtgagtgattttacttctacccttcagtcaattaggaagaagtgtaaattggatcacattcctccaaactcactgttccaggaggactggaccgccttccagaattccatcagaataatcgccacctgcggcgaactgcttagacattgtggagactttgaacagcagctcgcgaatcgcatactgagcactgccggcaagtacctgagcgactcttgcagtcctcggtctctggctggcttccaggaaagtatcctcaccgacaaaaagaattccgcaaaaaacccctggcaagaatataattacctacaaaaggacaatcctgccgaatacgcctccctgatggaaattctgtataccttgaaagaaaaaggtagcagcaatcataacctgctggccgctccgcgagcagctctcacacggctgaaccagcaagctcatcagcttgctttcgattcggtattcttgcgcatcaagcagcaattgctgctcatctccaaaatggactcatggaataccgctggaattggggagacactgacggacgagctcccagcctttagcctgacaccactggagtacatctctaatatcggccaatacatcatgagcttgcctttaaaccttgagcccttcgtcacgcaagaggactctgctctcgaactggccctgcatgctggtaaactgcccttcccacctgaacaaggtgatgaactgcccgaacttgataatatggcagataattggcttgggtccattgcgagagccacaatgcagacatactgcgatgctattctgcagattcctgagctctctccccacagcgccaagcagctggcaacggacattgactatctcatcaacgtgatggatgccctgggtcttcagccatcgagaaccctgcagcacattgttacactgctgaagacaaggcctgaggattaccgacaggtgtcaaagggactaccacgccgactagccacaactgtggcgaccatgcggtctgtcaattattag

SEQ ID NO: 246291 - DNA, 2313 bp, Artificial Sequence
  derived and/or modified sequence
atggacttcagcaagttcctggctgatgactttgatgtgaaggagtggatcaatgctgccttccgggccggcagcaaggaggccgccagcggcaaggcagatggccatgctgccaccctggtgatgaagctgcagctgttcatccaggaggtgaaccacgctgtggaggagaccagccaccaggccctgcagaacatgcccaaggtgctgagagatgtggaggccctgaagcaggaggccagcttcctgaaggagcagatgatcctggtgaaggaggacatcaagaagtttgagcaggacaccagccagagcatgcaggtgctggtggagattgaccaggtgaagagcaggatgcagctggccgctgagagcctgcaggaggccgacaagtggagcaccctgtctgctgacatcgaggagaccttcaagacccaggacattgctgtgatcagcgccaagctgaccggcatgcagaacagcctgatgatgctggtggacaccccagactacagcgagaagtgtgtgcacctggaggccctgaagaaccggctggaggccctggccagcccccagatcgtggccgccttcaccagccaggccgtggaccagagcaaggtgtttgtgaaggtgttcacagaaattgacaggatgccccagctgctggcctactactacaagtgccacaaggtgcagctgctggccgcctggcaggagctgtgccagagcgacctgagcctggaccggcagctgaccggcctgtatgatgccctgctgggcgcctggcacacccagatccagtgggccacccaggtgttccagaagccccatgaggtggtgatggtgctgctgatccagaccctgggcgccctgatgcccagcctgcccagctgcctgagcaatggagtggagagagctggccctgagcaggagctgacccggctgctggagttctatgatgccacagcccactttgccaagggcctggagatggccctgctgccccacctgcacgagcacaacctggtgaaggtgacagagctggtggatgctgtgtatgacccctacaagccctaccagctgaagtacggggacatggaggagagcaacctgctgatccagatgtctgctgtgcccctggagcacggggaggtgattgactgtgtgcaggagctgagccacagcgtgaacaagctgtttggcctggccagcgctgctgtggacagatgtgtgcgcttcaccaacggcctgggcacctgtggcctgctgagcgccctgaagagcctgtttgccaagtatgtgtctgacttcaccagcaccctgcagagcatcaggaagaagtgcaagctggaccacatcccccccaacagcctcttccaggaggactggacagccttccagaacagcatccgcatcatcgccacctgtggggagctgctgcggcactgtggggactttgagcagcagctggccaaccgcatcctgagcacagctgggaagtacctgagtgacagctgcagccccaggagcctggccggcttccaggagagcatcctgacagacaagaagaacagcgccaagaacccctggcaggagtacaactacctgcagaaggacaacccagcagaatatgccagcctgatggagatcctgtacaccctgaaggagaagggcagcagcaaccacaacctgctggccgcccccagggctgccctgacccggctgaaccagcaggcccaccagctggcctttgattctgtgttcctgcgcatcaagcagcagctgctgctgatcagcaagatggacagctggaacacagctggcatcggggagaccctgacagatgagctgcctgccttcagcctgacccccctggagtacatcagcaacatcggccagtacatcatgagcctgcccctgaacctggagccctttgtgacccaggaggacagcgccctggagctggccctgcacgccggcaagctgcccttccccccagagcagggagatgagctgcctgagctggacaacatggctgacaactggctgggcagcatcgcccgggccaccatgcagacctactgtgatgccatcctgcagatccctgagctgagcccccacagcgccaagcagctggccacagacatcgactacctgatcaacgtgatggatgccctgggcctgcagcccagcaggaccctgcagcacatcgtgaccctgctgaagaccaggcctgaggactaccggcaggtgtccaagggcctgccccggcggctggccaccaccgtggccaccatgaggtctgtgaactactag

SEQ ID NO: 246292 - DNA, 2313 bp, Artificial Sequence
  derived and/or modified sequence
atggacttcagcaagttcctggccgacgacttcgacgtgaaggagtggataaatgcggcctttcgggcggggagcaaagaggctgccagcggcaaagctgatggccatgctgcgactttagtaatgaagctgcagttattcatacaagaggtcaatcatgccgttgaggaaacttcccaccaggccttacagaatatgcccaaggtgctcagggacgtggaggcccttaagcaagaggccagcttcctaaaggagcagatgatcctggtgaaggaagatattaagaaattcgaacaggacaccagccagtccatgcaggtccttgtggagatagaccaagtgaagtcccgaatgcaattagccgcagagtcactgcaggaggccgacaaatggtcgacactttctgcagatattgaggagacgttcaaaacccaggacatagccgtcatctccgcaaagcttaccgggatgcagaattctttgatgatgctggtcgatactcccgactactccgagaaatgcgtgcatttagaagcccttaaaaacagactggaagccctggccagcccacagatcgtggccgcgttcacttctcaggcagtcgaccagtccaaagtcttcgtgaaggtgttcactgagatagaccggatgccccagctgctggcgtactattacaagtgtcataaagttcaactcctggctgcatggcaggagctctgccagagcgatttgtcccttgaccgccagctgaccggtctttacgatgcactgttgggcgcatggcacacacagatccagtgggctacacaagtgtttcagaaaccacatgaagtggtcatggtgctcctgatacaaacccttggggcactgatgcccagcctgcccagctgcctatctaacggggtagagcgtgcaggccccgagcaagagctgacacgcctgttggagttctatgacgccaccgctcacttcgccaaggggttagaaatggctctgctccctcacttacacgagcacaacctggtgaaggtaaccgaactagtcgatgcggtctacgatccatataagccgtatcaactgaagtacggcgatatggaggaatcaaatcttctaatccagatgagcgccgtgcccctggagcacggagaagtcattgattgtgtgcaagagctgtcacattccgtcaacaagttgttcggtcttgcatctgccgccgtggacaggtgcgttaggttcactaacggtctggggacgtgcggtctgttatcagccctgaagtccctgttcgctaaatatgtgtccgacttcacatccaccctacaaagcatccggaaaaagtgcaagctggaccacattcctccgaacagcctgtttcaagaggattggaccgcattccaaaattccattcgcataatcgccacttgtggggagctattaagacactgtggagacttcgagcagcagctcgcaaaccgcatcctctcaaccgccggaaaatacctgtcagatagctgcagccctcggtcactggccggatttcaggaatcaatactgactgacaaaaaaaactccgctaaaaacccttggcaggaatacaattatttgcagaaggacaacccggctgagtatgcttccctgatggaaatcttatatacacttaaggaaaagggaagttccaatcacaacttactcgccgcccctcgagcagcccttacccggctgaaccagcaagctcatcagctcgctttcgattcagttttcctgagaattaaacaacagctgcttctgatcagcaagatggactcatggaacactgctggtattggagagactctgacagatgaactccccgcgttctctctgacccctcttgagtatatctcaaacatcggacagtacattatgagtctgcctttgaacttggaaccatttgtgacccaggaggatagtgcactcgaacttgccctgcacgcgggaaagcttccttttcctcccgaacaaggcgatgagttaccggaattggataacatggcggacaactggttgggcagtatcgcccgggctactatgcagacttattgtgatgctatcttgcagatacctgaattgagcccacactccgcgaagcaactggctacggacatcgactatttgattaacgtgatggacgcgcttgggctgcagccctctaggaccctacaacacatcgtcactttgttgaagacaagaccagaagactatagacaggtgtctaagggcttaccccgtcggttagctacgaccgtggcaacaatgagatctgtcaattattag

SEQ ID NO: 246293 - DNA, 2313 bp, Artificial Sequence
  derived and/or modified sequence
atggattttagtaaatttctcgctgacgattttgatgtaaaggagtggattaacgcagcttttcgcgcaggatcaaaggaggctgcctctgggaaggccgatggccacgccgcaacgctggtgatgaaactacagttattcatccaggaagtaaatcacgctgtggaagagacgtcgcatcaggcactgcagaatatgcctaaggtattgagggatgtagaggccctaaagcaagaggcaagctttctgaaggagcagatgattctcgttaaggaagacatcaaaaagttcgaacaagatacctcacagtccatgcaagttctagtagaaatcgatcaggtaaaatcccgcatgcagctggctgccgagtcactgcaggaggccgataaatggtccaccctgagcgccgacatcgaagagactttcaagacccaggatattgcagtgatttctgctaagctgaccgggatgcagaactcactgatgatgctagtggacacgccagactacagcgaaaagtgcgtccaccttgaggccttgaagaaccgactcgaggctctcgcctctccccagatcgtagcagcttttacttctcaagccgtggaccaatccaaagtgttcgtgaaggttttcacagagatcgaccgcatgcctcagctcttagcctattactacaagtgtcataaggtgcagctcttggccgcatggcaggaactctgccagtccgatctgtctctcgatcgccagctgaccggactgtacgatgcgttgctgggtgcttggcacactcagatccaatgggccacacaagtctttcagaagccgcatgaggtcgtgatggtcctgttgatccagacgctcggcgctctcatgccttccttgccctcatgcctcagcaatggggtggaacgcgcaggccctgaacaggagcttacccgtctgttagagttttatgatgccactgcgcatttcgcaaaaggcttagagatggcacttttgcctcatcttcacgagcacaatttagtgaaggtgacagaactcgtggatgccgtctacgacccatataaaccctatcaactcaagtacggagatatggaagaaagcaacctcctcattcagatgtcagctgtccccctggagcatggcgaagtgatcgactgcgttcaagagttgtcgcactccgtaaataagttattcggactcgcctctgcagccgtcgatcgatgtgtaagatttactaatgggctgggaacatgcggcctgcttagcgcccttaagtccctgtttgctaagtacgtatcagattttaccagcaccctgcagtccatcagaaagaagtgtaagctcgaccacatacctcccaactccctgttccaggaggattggaccgcgtttcagaactctatccgcatcattgcaacctgtggcgagcttctgcgtcattgcggagactttgagcagcagctagccaaccggatcctgtccacagccggtaagtacctgagcgactcctgtagcccacgaagcctcgcgggatttcaagagagcatcctcacagacaagaagaatagcgctaaaaatccttggcaggaatacaattacctgcagaaagataaccccgctgaatacgcttccctcatggagatcctctatacgctaaaggagaaagggtccagcaaccacaacctgctggcagctcccagggccgcacttacacgcctgaatcaacaagcacatcagcttgctttcgacagtgtgttcctgcggattaagcaacaactactgctcatctcaaaaatggattcgtggaatactgctgggattggtgaaacgcttaccgacgagttgcccgctttttccttgacacctctcgagtatatcagcaacatcggtcagtacattatgtccctccctctcaatctggagccattcgtgacacaagaggatagtgcgctggagttggcactccatgctggcaagctgccatttccaccagagcagggagacgagctgcctgaactggataatatggctgataattggcttggcagcattgctcgtgctacaatgcaaacgtattgcgacgccattcttcagatccctgagctttccccacatagcgccaagcagttggcgactgatattgactacctcatcaacgtaatggatgccctaggcctgcaaccgtcaagaactttacagcatatcgttacgctgctcaagactaggcccgaggattacaggcaggtttccaagggtctgccaaggcgcttggccacaaccgtggcaactatgaggtctgtaaattactag

SEQ ID NO: 246294 - DNA, 2926 bp, Artificial Sequence
  derived and/or modified sequence
tcccagccgcaaactgagtgcgctgagcggggaagcgcaaaggggcaagttacccgtcctggcgtttctggggttcgcctcggaggctagcctcggtgctctcgcaggctcgctcgcttctgcatccccgttgccgcccggagccaactcttaagttctggacgccaggcctgaggcagttccgccatggacttctccaagttcctggcagacgacttcgacgtgaaggagtggatcaatgcggccttcagggccggctccaaggaggcggcgtccgggaaggcggatggccacgcagccaccctggtgatgaagctgcagctgttcatccaagaggtgaaccacgccgtggaggaaacaagtcaccaagctctccagaacatgcccaaagtgctccgtgatgttgaagccctaaaacaggaggcatctttcctgaaagaacagatgattcttgtcaaggaggacattaaaaaatttgaacaggacacatctcaatccatgcaggtgttggtagaaattgaccaagtgaagtccagaatgcaacttgctgccgaatctcttcaggaagcagataagtggagcacgttgagcgccgatattgaggagacatttaagactcaggacatagctgtgatttctgccaagctaacaggtatgcagaacagcttaatgatgcttgttgatacaccagactactcagaaaagtgtgtgcacttggaggcactgaagaacaggctggaggccctagccagtccacagattgtagcggcattcacctctcaggctgtagatcagtccaaagtgtttgtgaaggtgtttactgaaattgaccggatgccccagctcctggcctactactacaagtgtcacaaggtgcagcttttagcagcctggcaagagctgtgtcaaagtgacctatccctggaccggcagcttaccggactctatgatgccttgcttggtgcttggcacacacaaatccagtgggctacacaggttttccagaagccccacgaggtggtaatggtgctgctgattcagaccctgggggccctcatgccctcgctgccctcctgcctcagcaacggcgtggagagggcagggcccgagcaggagctcaccaggctgctggagttctacgacgccaccgcccacttcgccaagggcttggagatggcactgctcccccacctacatgaacacaatctggtaaaagtcacggagctggtggatgctgtgtatgatccatacaaaccctaccagctgaagtatggcgacatggaagagagcaacctcctcatccagatgagtgctgtgcctctggagcatggggaagtgattgactgtgtgcaggagctgagccactccgtgaacaagctgtttggtctggcgtctgcagccgttgacagatgcgtcagattcaccaatggcctggggacctgcggcctgttgtcagccctgaaatccctctttgccaagtatgtgtctgatttcaccagcactctccagtccatacgaaagaagtgcaaactggaccacattcctcccaactccctcttccaggaagattggacggcttttcagaactccattaggataatagccacctgtggagagcttttgcggcattgtggggacttcgagcagcagctagccaacaggattttgtccacagctgggaagtatctatctgattcctgcagcccccggagcctggctggttttcaggagagcatcttgacagacaagaagaactctgccaagaacccatggcaagaatataattacctccagaaagataaccctgctgaatatgccagtttaatggaaatactttatacccttaaggaaaaagggtcaagcaaccacaacctgctggctgcacctcgagcagcgctgactcggcttaaccagcaggcccaccagctggctttcgattccgtgttcctgcgcatcaaacaacagctgttgcttatttcgaagatggacagctggaatacggctggcatcggagaaaccctcacagatgaactgcccgcctttagtctcacccctctcgagtacatcagcaacatcgggcagtacatcatgtccctccccctgaatcttgagccatttgtgactcaggaggactctgccttagagttggcattgcacgctggaaagctgccatttcctcctgagcagggggatgaattgcccgagctggacaacatggctgacaactggctgggctcgatcgccagagccacaatgcagacctactgtgatgcgatcctacagatccctgagctgagcccacactctgccaagcagctggccactgacatcgactatctgatcaacgtgatggatgccctgggcctgcagccgtcccgcaccctccagcacatcgtgacgctactgaagaccaggcctgaggactatagacaggtcagcaaaggcctgccccgtcgcctggccaccaccgtggccaccatgcggagtgtgaattactgaccccaccacacaccggaccaccaagagagccagggctgctgtttcgcgactcaccagcacagatttgctcagaaactctgcccaagattgggcagaagttactttaaaaagacttggttcagctggtcacggtggctcacgcctgtaatcccagcactttgggaggccaagccagatggatcatgaagccaggagttcgagaccagcctgaccaacatggtgaaaccccatctctactaaaaatacaaaaattaacagcagagcgagactctgtctcaaaaaaaaaaaaaaaaaagacttggttcatttgtataatcaaaaagagttgtaaattaaagatgtattatttatcagagaagactttttagataatttttttaaaggatcagatcttgaaaatggaataaataactactgtgaaatgcaa

SEQ ID NO: 246295 - DNA, 2313 bp, Artificial Sequence
  derived and/or modified sequence
atggacttcagcaagttcctggccgacgacttcgacgtgaaggagtggatcaacgccgccttcagagccggcagcaaggaggccgccagcggcaaggccgacggccacgccgccaccctggtgatgaagctgcagctgttcatccaggaggtgaaccacgccgtggaggagaccagccaccaggccctgcagaacatgcccaaggtgctgagagacgtggaggccctgaagcaggaggccagcttcctgaaggagcagatgatcctggtgaaggaggacatcaagaagttcgagcaggacaccagccagagcatgcaggtgctggtggagatcgaccaggtgaagagcagaatgcagctggccgccgagagcctgcaggaggccgacaagtggagcaccctgagcgccgacatcgaggagaccttcaagacccaggacatcgccgtgatcagcgccaagctgaccggcatgcagaacagcctgatgatgctggtggacacccccgactacagcgagaagtgcgtgcacctggaggccctgaagaacagactggaggccctggccagcccccagatcgtggccgccttcaccagccaggccgtggaccagagcaaggtgttcgtgaaggtgttcaccgagatcgacagaatgccccagctgctggcctactactacaagtgccacaaggtgcagctgctggccgcctggcaggagctgtgccagagcgacctgagcctggacagacagctgaccggcctgtacgacgccctgctgggcgcctggcacacccagatccagtgggccacccaggtgttccagaagccccacgaggtggtgatggtgctgctgatccagaccctgggcgccctgatgcccagcctgcccagctgcctgagcaacggcgtggagagagccggccccgagcaggagctgaccagactgctggagttctacgacgccaccgcccacttcgccaagggcctggagatggccctgctgccccacctgcacgagcacaacctggtgaaggtgaccgagctggtggacgccgtgtacgacccctacaagccctaccagctgaagtacggcgacatggaggagagcaacctgctgatccagatgagcgccgtgcccctggagcacggcgaggtgatcgactgcgtgcaggagctgagccacagcgtgaacaagctgttcggcctggccagcgccgccgtggacagatgcgtgagattcaccaacggcctgggcacctgcggcctgctgagcgccctgaagagcctgttcgccaagtacgtgagcgacttcaccagcaccctgcagagcatcagaaagaagtgcaagctggaccacatcccccccaacagcctgttccaggaggactggaccgccttccagaacagcatcagaatcatcgccacctgcggcgagctgctgagacactgcggcgacttcgagcagcagctggccaacagaatcctgagcaccgccggcaagtacctgagcgacagctgcagccccagaagcctggccggcttccaggagagcatcctgaccgacaagaagaacagcgccaagaacccctggcaggagtacaactacctgcagaaggacaaccccgccgagtacgccagcctgatggagatcctgtacaccctgaaggagaagggcagcagcaaccacaacctgctggccgcccccagagccgccctgaccagactgaaccagcaggcccaccagctggccttcgacagcgtgttcctgagaatcaagcagcagctgctgctgatcagcaagatggacagctggaacaccgccggcatcggcgagaccctgaccgacgagctgcccgccttcagcctgacccccctggagtacatcagcaacatcggccagtacatcatgagcctgcccctgaacctggagcccttcgtgacccaggaggacagcgccctggagctggccctgcacgccggcaagctgcccttcccccccgagcagggcgacgagctgcccgagctggacaacatggccgacaactggctgggcagcatcgccagagccaccatgcagacctactgcgacgccatcctgcagatccccgagctgagcccccacagcgccaagcagctggccaccgacatcgactacctgatcaacgtgatggacgccctgggcctgcagcccagcagaaccctgcagcacatcgtgaccctgctgaagaccagacccgaggactacagacaggtgagcaagggcctgcccagaagactggccaccaccgtggccaccatgagaagcgtgaactactag

SEQ ID NO: 246296 - protein, 938 aa, Artificial Sequence
  derived and/or modified sequence
MTLLGSEHSLLIRSKFRSVLQLRLQQRRTQEQLANQGIIPPLKRPAEFHEQRKHLDSDKAKNSLKRKARNRCNSADLVNMHILQASTAERSIPTAQMKLKRARLADDLNEKIALRPGPLELVEKNILPVDSAVKEAIKGNQVSFSKSTDAFAFEEDSSSDGLSPDQTRSEDPQNSAGSPPDAKASDTPSTGSLGTNQDLASGSENDRNDSASQPSHQSDAGKQGLGPPSTPIAVHAAVKSKSLGDSKNRHKKPKDPKPKVKKLKYHQYIPPDQKAEKSPPPMDSAYARLLQQQQLFLQLQILSQQQQQQQHRFSYLGMHQAQLKEPNEQMVRNPNSSSTPLSNTPLSPVKNSFSGQTGVSSFKPGPLPPNLDDLKVSELRQQLRIRGLPVSGTKTALMDRLRPFQDCSGNPVPNFGDITTVTFPVTPNTLPNYQSSSSTSALSNGFYHFGSTSSSPPISPASSDLSVAGSLPDTFNDASPSFGLHPSPVHVCTEESLMSSLNGGSVPSELDGLDSEKDKMLVEKQKVINELTWKLQQEQRQVEELRMQLQKQKRNNCSEKKPLPFLAASIKQEEAVSSCPFASQVPVKRQSSSSECHPPACEAAQLQPLGNAHCVESSDQTNVLSSTFLSPQCSPQHSPLGAVKSPQHISLPPSPNNPHFLPSSSGAQGEGHRVSSPISSQVCTAQMAGLHSSDKVGPKFSIPSPTFSKSSSAISEVTQPPSYEDAVKQQMTRSQQMDELLDVLIESGEMPADAREDHSCLQKVPKIPRSSRSPTAVLTKPSASFEQASSGSQIPFDPYATDSDEHLEVLLNSQSPLGKMSDVTLLKIGSEEPHFDGIMDGFSGKAAEDLFNAHEILPGPLSPMQTQFSPSSVDSNGLQLSFTESPWETMEWLDLTPPNSTPGFSALTTSSPSIFNIDFLDVTDLNLNSSMDLHLQQW

SEQ ID NO: 246297 - DNA, 2817 bp, Artificial Sequence
  derived and/or modified sequence
atgactctcctggggtctgagcactcactgctcattcgctctaagtttcgcagcgtgttacagctccgcctgcagcagcgacgtacgcaggagcagctcgctaatcaggggatcattcctcctctcaagcgccccgccgagtttcacgaacagcgcaagcacctcgactccgacaaagctaagaattcattgaagcgaaaagcacgaaatcggtgcaactcagcagatctggtgaatatgcacattctgcaggcatctacggcagaacggtcgattccgaccgctcaaatgaaactcaaaagggctcggttggccgacgacctgaatgagaaaattgctcttagacctgggcctctagagttagtggagaagaacatattgccagttgacagcgccgttaaggaagccataaagggcaaccaggtgtccttcagcaagagcaccgatgcgttcgcattcgaagaggacagctcctcagacgggttaagcccagatcagaccagatctgaggatccccaaaacagcgcagggagtccccctgatgccaaagcttctgacactccatcaacagggagcctgggcaccaaccaagatcttgctagcggctcggagaacgatcgaaatgattccgcgtcccagccatcccatcagtcggatgctggcaaacagggcctgggacctccctctacacctatcgccgtgcacgccgccgtgaagtccaaatccttaggcgatagcaagaaccgccacaaaaagccaaaagacccaaagcccaaggtcaagaagctgaagtaccaccagtacatcccgccagaccagaaggcagaaaagtcacctcctccgatggattcagcttatgccaggctgttgcagcaacaacaactgtttctacagctccagatcctctcgcagcagcagcaacagcagcagcacaggtttagctacctcggcatgcaccaagctcagctcaaagagccaaatgagcagatggtgagaaatcccaactccagtagtacaccactcagtaacacaccgctgagtccagttaaaaactcgttctcgggtcagaccggagttagctcattcaagccgggaccccttccccctaacctcgacgaccttaaggtctcagaactgcggcagcagcttcgtatccggggactgccagtgtccggtacaaagacggccctgatggaccgcctgaggccgtttcaggattgttccggcaatcctgtccctaactttggtgacattactactgtgaccttccctgtgaccccgaacactctccccaactaccagagctctagttcgacgtcggcactgtcaaacgggttttatcatttcggatccacttcgagcagccctcccatctctcccgcttctagcgacctttccgttgccggctcactccctgacacatttaacgacgcatcacctagctttggtctacaccccagccctgtgcatgtgtgtacggaggagtctctgatgtctagtctgaacggggggagcgtcccttctgaactggatggcctggattcagaaaaggacaagatgctagtcgagaagcaaaaagttattaatgagctcacgtggaaactgcaacaagagcaacggcaagtggaagaacttcgaatgcagcttcagaagcagaaaagaaataactgctcagagaagaagcctttgcctttcctggctgcaagcatcaagcaggaggaggccgtatcttcgtgccccttcgcaagtcaggtcccagtgaagagacagagttcgagcagcgagtgccacccgcccgcatgtgaagccgctcaacttcagcctctcggcaatgcccactgcgtggagtcatctgaccagactaacgtgcttagttcaacatttctgtcaccgcagtgctccccgcaacatagcccactaggggctgtaaagtcacctcagcacatttctttgccaccaagccccaataacccacatttcctgcccagctctagcggtgcccagggggagggtcaccgcgtctcaagcccaataagctcacaggtgtgtaccgcccagatggctggacttcactcaagcgacaaagtggggcctaaattctctatcccgtcacctacgtttagcaagagctcttctgccatatccgaggtgacccaaccaccctcgtatgaggacgcagttaaacagcagatgactaggtcccagcagatggacgaactcttggatgtgctgattgaatctggggagatgcccgccgacgcccgtgaagaccacagttgtcttcagaaagtcccaaagatccctaggtccagcagatcccctaccgctgtgctgactaaaccaagcgcaagcttcgagcaggcttcttctggatcacagattcccttcgatccctatgccaccgacagtgatgaacacttggaggttttacttaactcacagtcgccccttggaaagatgagtgatgttactttgctaaaaatcggttcagaagagcctcactttgacggaattatggatgggttttcaggcaaggctgctgaggatctgtttaacgcacacgaaatattgcctggacccctaagtcccatgcaaactcagttctccccgagctctgttgattctaacgggcttcagctgtctttcactgaatctccgtgggaaactatggagtggttggatcttacacccccgaactccacgccgggcttctcagcactgaccacaagcagcccttctatctttaacatcgattttctagacgtgacggatctgaacctcaatagcagcatggacctgcatttgcagcaatggtag

SEQ ID NO: 246298 - DNA, 2817 bp, Artificial Sequence
  derived and/or modified sequence
atgaccctgctgggcagcgagcacagcctgctgatccgcagcaagttccgctctgtgctgcagctgcggctgcagcagaggaggacccaggagcagctggccaaccagggcatcatcccccccctgaagaggcctgctgagttccacgagcagaggaagcacctggacagcgacaaggccaagaacagcctgaagaggaaggccaggaaccgctgcaacagcgctgacctggtgaacatgcacatcctgcaggccagcacagctgagaggagcatccccacagcccagatgaagctgaagagggcccggctggctgatgacctgaatgagaagatcgccctgcggcccggccccctggagctggtggagaagaacatcctgcctgtggacagcgctgtgaaggaggccatcaagggcaaccaggtgtccttcagcaagagcacagatgcctttgcctttgaggaggacagcagcagtgatggcctgagcccagaccagaccaggtctgaggacccccagaacagcgctggcagccccccagatgccaaggccagtgacacccccagcacaggcagcctgggcaccaaccaggacctggccagcggctctgaaaatgacagaaatgacagcgccagccagcccagccaccagagtgatgctgggaagcagggcctgggcccccccagcacccccatcgctgtgcacgccgctgtgaagagcaagagcctgggggacagcaagaacagacacaagaagcccaaggaccccaagcccaaggtgaagaagctgaagtaccaccagtacatccccccagaccagaaggccgagaagagccccccacccatggacagcgcctatgcccggctgctgcagcagcagcagctgttcctgcagctgcagatcctgagccagcagcagcagcagcagcagcaccgcttctcctacctgggcatgcaccaggcccagctgaaggagcccaatgagcagatggtgaggaaccccaacagcagcagcacccccctgagcaacacccccctgagccctgtgaagaacagcttcagcggccagacaggagtgtcctccttcaagccaggccccctgccccccaacctggatgacctgaaggtgtctgagctgcggcagcagctgcgcatccggggcctgcctgtgtctggcaccaagacagccctgatggaccggctgcggcccttccaggactgcagcggcaaccctgtgcccaactttggagacatcaccaccgtgaccttccctgtgacccccaacaccctgcccaactaccagagcagcagcagcaccagcgccctgagcaatggcttctaccacttcggcagcaccagcagcagcccccccatcagccctgccagcagtgacctgtctgtggccggcagcctgcctgacaccttcaatgatgccagccccagctttggcctgcaccccagccctgtgcacgtgtgcacagaggagagcctgatgagcagcctgaatggaggctctgtgcccagcgagctggatggcctggacagcgagaaggacaagatgctggtggagaagcagaaggtgatcaatgagctgacctggaagctgcagcaggagcagaggcaggtggaggagctgaggatgcagctgcagaagcagaagaggaacaactgcagcgagaagaagcccctgcccttcctggccgccagcatcaagcaggaggaggccgtgagcagctgcccctttgccagccaggtgcctgtgaagaggcagagcagcagcagcgagtgccaccccccagcctgtgaggccgcccagctgcagcccctgggcaatgcccactgtgtggagagcagtgaccagaccaacgtgctgagcagcaccttcctgagcccccagtgcagcccccagcacagccccctgggcgctgtgaagagcccccagcacatcagcctgccccccagccccaacaacccccacttcctgcccagcagcagcggggcccagggcgagggccaccgggtgagcagccccatcagcagccaggtgtgcacagcccagatggccggcctgcacagcagtgacaaggtgggccccaagttcagcatccccagccccaccttcagcaagagcagcagcgccatcagcgaggtgacccagccccccagctatgaagatgctgtgaagcagcagatgaccaggagccagcagatggatgagctgctggatgtgctgattgaaagtggagagatgccagcagatgcccgggaggaccacagctgcctgcagaaggtgcccaagatccccaggagcagccgcagccccacagctgtgctgaccaagcccagcgccagctttgagcaggccagcagcggcagccagatcccctttgacccctatgccacagacagtgatgagcacctggaggtgctgctgaacagccagagccccctgggcaagatgtctgatgtgaccctgctgaagattggcagcgaggagccccactttgatggcatcatggatggcttcagcggcaaggctgctgaggacctcttcaatgcccacgagatcctgcccggccccctgagccccatgcagacccagttcagccccagctctgtggacagcaatggcctgcagctgtccttcacagagagcccctgggagaccatggagtggctggacctgaccccacccaacagcaccccaggcttcagcgccctgaccaccagcagccccagcatcttcaacatcgacttcctggatgtgacagacctgaacctgaacagctccatggacctgcacctgcagcagtggtag

SEQ ID NO: 246299 - DNA, 2817 bp, Artificial Sequence
  derived and/or modified sequence
atgacactcctggggtctgagcattccttgctgattaggagcaagttcagatcagttttacagttaagacttcaacaaagaaggacccaggaacaactggctaaccaaggcataataccaccactgaaacgtccagctgaattccatgagcaaagaaaacatttggatagtgacaaggctaaaaattccctgaagcgcaaagccagaaacaggtgcaacagtgccgacttggttaatatgcacatactccaagcttccactgcagagaggtccattccaactgctcagatgaagctgaaaagagcccgactcgccgatgatctcaatgaaaaaattgctctacgaccagggccactggagctggtggaaaaaaacattcttcctgtggattctgctgtgaaagaggccataaaaggtaaccaggtgagtttctccaaatccacggatgcttttgcctttgaagaggacagcagcagcgatgggctttctccggatcagactcgaagtgaagacccccaaaactcagcgggatccccgccagacgctaaagcctcagataccccttcgacaggttctctggggacaaaccaggatcttgcttctggctcagaaaatgacagaaatgactcagcctcacagcccagccaccagtcagatgcggggaagcaggggcttggcccccccagcacccccatagccgtgcatgctgctgtaaagtccaaatccttgggtgacagtaagaaccgccacaaaaagcccaaggaccccaagccaaaggtgaagaagcttaaatatcaccagtacattcccccagaccagaaggcagagaagtcccctccacctatggactcagcctacgctcggctgctccagcaacagcagctgttcctgcagctccaaatcctcagccagcagcagcagcagcagcaacaccgattcagctacctagggatgcaccaagctcagcttaaggaaccaaatgaacagatggtcagaaatccaaactcttcttcaacgccactgagcaatacccccttgtctcctgtcaaaaacagtttttctggacaaactggtgtctcttctttcaaaccaggcccactcccacctaacctggatgatctgaaggtctctgaattaagacaacagcttcgaattcggggcttgcctgtgtcaggcaccaaaacggctctcatggaccggcttcgacccttccaggactgctctggcaacccagtgccgaactttggggatataacgactgtcacttttcctgtcacacccaacacgctgcccaattaccagtcttcctcttctaccagtgccctgtccaacggcttctaccactttggcagcaccagctccagccccccgatctccccagcctcctctgacctgtcagtcgctgggtccctgccggacaccttcaatgatgcctccccctccttcggcctgcacccgtccccagtccacgtgtgcacggaggaaagtctcatgagcagcctgaatgggggctctgttccttctgagctggatgggctggactccgagaaggacaagatgctggtggagaagcagaaggtgatcaatgaactcacctggaaactccagcaagagcagaggcaggtggaggagctgaggatgcagcttcagaagcagaaaaggaataactgttcagagaagaagccgctgcctttcctggctgcctccatcaagcaggaagaggctgtctccagctgtccttttgcatcccaagtacctgtgaaaagacaaagcagcagctcagagtgtcacccaccggcttgtgaagctgctcaactccagcctcttggaaatgctcattgtgtggagtcctcagatcaaaccaatgtactttcttccacatttctcagcccccagtgttcccctcagcattcaccgctgggggctgtgaaaagcccacagcacatcagtttgcccccatcacccaacaaccctcactttctgccctcatcctccggggcccagggagaagggcacagggtctcctcgcccatcagcagccaggtgtgcactgcacagatggctggtttacactcttctgataaggtggggccaaagttttcaattccatccccaactttttctaagtcaagttcagcaatttcagaggtaacacagcctccatcctatgaagatgccgtaaagcagcaaatgacccggagtcagcagatggatgaactcctggacgtgcttattgaaagcggagaaatgccagcagacgctagagaggatcactcatgtcttcaaaaagtcccaaagatacccagatcttcccgaagtccaactgctgtcctcaccaagccctcggcttcctttgaacaagcctcttcaggcagccagatcccctttgatccctatgccaccgacagtgatgagcatcttgaagtcttattaaattcccagagccccctaggaaagatgagtgatgtcacccttctaaaaattgggagcgaagagcctcactttgatgggataatggatggattctctgggaaggctgcagaagacctcttcaatgcacatgagatcttgccaggccccctctctccaatgcagacacagttttcaccctcttctgtggacagcaatgggctgcagttaagcttcactgaatctccctgggaaaccatggagtggctggacctcactccgccaaattccacaccaggctttagcgccctcaccaccagcagccccagcatcttcaacatcgatttcctggatgtcactgatctcaatttgaattcttccatggaccttcacttgcagcagtggtag

SEQ ID NO: 246300 - DNA, 2817 bp, Artificial Sequence
  derived and/or modified sequence
atgaccctgctgggcagcgagcacagcctgctgatccggagcaagttcagatccgtcctgcaactgcgcctgcaacaacgcaggacccaggagcagctggctaaccaggggattatcccaccacttaaaaggccagctgagtttcacgagcagcgtaagcatctggactctgataaggcaaaaaacagcctgaaacggaaagctcgcaacaggtgcaacagtgccgacctggttaacatgcacatcctccaagcatcgactgccgaaaggtccatacccactgcccagatgaagctgaaaagagcccgactagccgacgatctgaatgagaaaatagctctcaggcctggacccttagagctggtcgaaaagaacatcctgccagtggacagtgcagtaaaagaagcaatcaagggtaatcaggttagcttcagcaagtccacggatgcttttgcatttgaagaggatagctcctctgacggtctctctccagatcagactagatccgaggatccccagaactcagcaggctcacctcctgacgcaaaggcctctgatacgccctccacaggcagccttggaaccaaccaggaccttgcatccggcagcgaaaacgaccggaatgatagcgcctctcagccatcccaccagagcgatgcagggaaacaaggactcggccccccaagcacccccatagcagttcacgccgccgtgaagtccaagtccctgggtgacagcaagaacagacacaaaaaaccaaaggaccccaaaccaaaggtgaaaaaattgaagtaccaccagtatatccctccagaccagaaggcggaaaagtccccacctcccatggattcagcatatgcccgtctgctccagcaacagcagctgttcttgcaattgcaaatccttagccagcaacaacagcagcagcagcacaggtttagttatctaggtatgcaccaagcccaactcaaggagcccaatgaacaaatggtaagaaaccctaacagctctagcactcctctatctaacacaccactgtcgccagttaaaaacagcttttctggacaaactggtgtgagctcttttaagcccggacctctccccccaaatctggacgacctcaaggtgagtgagctacggcagcaactccggattagaggtctacctgtatctggcacaaaaaccgccctgatggaccggcttcggcccttccaggactgtagtggcaaccctgtgcccaactttggggacattacgactgtcactttcccagtgacccctaacaccctgccgaactaccaatcttccagcagtacctccgccctcagtaacggattttaccactttggcagtacctcaagcagcccccctattagccccgccagttctgatctgtcagtggcaggcagcctccctgacacatttaatgacgccagcccgtccttcgggttacatccaagtccagtgcatgtctgcacagaagagtcactgatgtcctctctcaacggtgggtccgtgccatcagagctggatggtcttgattcggagaaggataaaatgctggtcgagaaacagaaggtgatcaacgagctcacctggaagttgcaacaggagcagaggcaggttgaggaactgaggatgcagctccagaaacagaagaggaacaattgtagcgagaaaaaacctctgcccttcttggcagcctctatcaaacaagaggaggctgtgagcagctgtcctttcgctagccaagtgcctgtgaagagacagtcatcaagcagcgagtgtcatccgcccgcatgcgaggctgcccagttacagccattggggaacgcacactgcgtcgaaagctcggatcaaacaaacgtcttaagtagcacttttttatcaccacagtgctcgcctcagcattctccacttggcgctgtcaaaagcccgcaacacattagcttgcccccctcaccaaacaacccacacttcttaccctcatcctcgggtgctcagggcgaaggccaccgagtatctagtccgataagcagtcaggtttgcaccgcccagatggctggcctccactcaagtgacaaggtgggtcccaagttcagcattcctagtcctacattctcaaaaagctccagtgctattagcgaggttacccaaccaccctcctacgaagatgctgtgaaacagcaaatgacccgaagccaacagatggatgagctgttagatgttctcatcgagtccggcgaaatgcctgccgacgctagggaggaccactcttgcttgcagaaagttccgaagatccctagatccagtagaagccctaccgccgttctaaccaagccgtcagccagttttgaacaggcttcctccggttcacaaatccctttcgacccttacgccacagacagcgacgagcacttagaagttctcctcaattcccaaagtcctcttggaaagatgtcggatgtgaccctgctgaagattggttccgaggaaccccactttgatgggatcatggatggtttcagcgggaaggccgcagaagatctgttcaatgcccatgaaattctgcctggacctctgtccccaatgcagactcaatttagtcccagttcagtagatagcaacggcctgcaactatcatttacagaatctccttgggagactatggagtggttggacttgacgccacctaattcaaccccgggcttttcagctctcaccaccagcagtccctccattttcaacatcgactttctggacgtgaccgatctgaacttgaacagtagcatggatctccatttgcagcagtggtag

SEQ ID NO: 246301 - DNA, 2817 bp, Artificial Sequence
  derived and/or modified sequence
atgacattactgggctccgagcattccctgttgatccgttcaaagtttcggtccgtgttgcagctcaggcttcaacagagaagaactcaagaacagttggcaaaccaggggattatccccccactgaaacgccctgccgagtttcacgagcaacgcaaacacctggatagtgataaggctaagaattcgctgaaaagaaaggccaggaatagatgtaacagtgccgacttggtcaacatgcatatactacaggcttcaaccgcggaaaggagcataccaactgcacagatgaagctgaaacgggctcgcttggctgacgatctaaacgagaagattgccctgaggccaggacctctggagctggtggagaagaatatactgccggttgacagcgcagtaaaggaggctatcaaaggaaatcaagtgtccttctccaaatccacagacgccttcgctttcgaggaggactcatctagcgatggcttgtcccccgaccagacccgatcggaggatcctcagaatagcgccggtagcccaccagacgcaaaagcatccgacacgccttcaaccggctccttagggacaaatcaggacctggcaagcgggagtgaaaacgacaggaacgactctgcttcacaaccctcccaccagagcgacgccggtaagcaaggtctcgggcctccttctactcccattgccgtccacgccgctgtaaagagtaagtctctgggcgattcgaaaaaccggcacaagaaacctaaagatccaaaaccaaaggttaagaaattaaaatatcatcagtatatccccccagaccaaaaagctgagaaatcacctccacccatggattctgcttatgccaggctgctgcaacagcagcagctcttcttgcaacttcaaattcttagccagcagcagcaacagcagcagcatagattttcctacctggggatgcatcaggcacagctgaaggagccaaacgagcagatggtgcgcaatcccaattctagtagtacacctcttagcaataccccactgagcccagtcaagaatagcttttcagggcagacaggtgtgtcaagctttaaaccagggccactgcctccaaatctggatgatctgaaggtgagtgaacttcggcagcaactcagaatccggggactgcctgtttctggaacaaagaccgcactgatggacagactgaggccgtttcaggattgcagtgggaatcctgtgccgaacttcggcgatatcacaaccgtgactttccccgttacgccaaacacgctcccgaattatcagtccagcagttccacaagcgcgctatccaatgggttttaccacttcggctccaccagttccagcccccctatcagccctgcaagcagcgacttatctgtcgcaggctccttacctgacactttcaatgatgcgagtccgtcatttggcttgcatccttcgccagtccacgtgtgtacagaagagagcctgatgagtagcctgaacggcggaagcgtgcctagtgaactggacggcttggatagcgaaaaggataagatgctggtggaaaagcagaaggtcattaatgaattaacatggaagttacagcaggagcagagacaggtcgaggagctgcgtatgcaattgcagaagcaaaagaggaataattgctccgaaaagaagcctttgccatttctcgccgcatctatcaaacaggaggaagccgtgtcctcttgccctttcgcctcacaagtgccagtgaaacgtcagtcgtccagctctgaatgccacccccctgcttgtgaagctgctcaactccagcccctaggtaatgctcattgtgtggagtcatccgatcagaccaacgtactttcatcaacgttcctgagcccacaatgcagccctcaacattctcctcttggagccgtgaaatccccacaacacatctccttaccccctagcccgaacaacccgcacttcttaccaagtagctccggggctcagggtgaaggccacagagtttcctcccccatcagtagtcaagtgtgtacggcccagatggcaggtttacacagcagcgataaagtggggcctaaattctcaatccctagcccaactttcagtaaaagttcctcagccatttccgaggtgacccagccaccttcttacgaagacgctgtcaaacaacagatgaccagaagtcagcagatggatgagctgctcgatgtcctgattgagtcaggcgagatgcccgcagacgcccgagaggaccattcatgccttcaaaaagtgcctaaaataccgaggtcatcaagaagtccaaccgccgtactgaccaaaccatctgcctccttcgaacaagcatcctctgggagccagattccgttcgacccatatgctacagatagcgacgaacacctagaggtcctgctgaacagtcaaagccccctaggcaagatgtctgatgtcaccctactgaagatcggcagcgaagagccccattttgacggtatcatggacggattcagcggtaaggccgctgaagacttgtttaacgcgcacgaaatattacctggcccactgtcaccaatgcagactcagttctccccaagctccgtagatagcaatggtctccaactttccttcacagaatctccatgggagacaatggaatggctggatttgacccctccaaatagcacgcccggattttcggcactgacaacctccagtccgtcaatattcaatattgactttctagacgtcactgatttgaacctgaactcaagcatggacttgcatctgcagcagtggtag

SEQ ID NO: 246302 - DNA, 2817 bp, Artificial Sequence
  derived and/or modified sequence
atgaccctgctgggcagcgagcacagcctgctgatcagaagcaagttcagaagcgtgctgcagctgagactgcagcagagaagaacccaggagcagctggccaaccagggcatcatcccccccctgaagagacccgccgagttccacgagcagagaaagcacctggacagcgacaaggccaagaacagcctgaagagaaaggccagaaacagatgcaacagcgccgacctggtgaacatgcacatcctgcaggccagcaccgccgagagaagcatccccaccgcccagatgaagctgaagagagccagactggccgacgacctgaacgagaagatcgccctgagacccggccccctggagctggtggagaagaacatcctgcccgtggacagcgccgtgaaggaggccatcaagggcaaccaggtgagcttcagcaagagcaccgacgccttcgccttcgaggaggacagcagcagcgacggcctgagccccgaccagaccagaagcgaggacccccagaacagcgccggcagcccccccgacgccaaggccagcgacacccccagcaccggcagcctgggcaccaaccaggacctggccagcggcagcgagaacgacagaaacgacagcgccagccagcccagccaccagagcgacgccggcaagcagggcctgggcccccccagcacccccatcgccgtgcacgccgccgtgaagagcaagagcctgggcgacagcaagaacagacacaagaagcccaaggaccccaagcccaaggtgaagaagctgaagtaccaccagtacatcccccccgaccagaaggccgagaagagccccccccccatggacagcgcctacgccagactgctgcagcagcagcagctgttcctgcagctgcagatcctgagccagcagcagcagcagcagcagcacagattcagctacctgggcatgcaccaggcccagctgaaggagcccaacgagcagatggtgagaaaccccaacagcagcagcacccccctgagcaacacccccctgagccccgtgaagaacagcttcagcggccagaccggcgtgagcagcttcaagcccggccccctgccccccaacctggacgacctgaaggtgagcgagctgagacagcagctgagaatcagaggcctgcccgtgagcggcaccaagaccgccctgatggacagactgagacccttccaggactgcagcggcaaccccgtgcccaacttcggcgacatcaccaccgtgaccttccccgtgacccccaacaccctgcccaactaccagagcagcagcagcaccagcgccctgagcaacggcttctaccacttcggcagcaccagcagcagcccccccatcagccccgccagcagcgacctgagcgtggccggcagcctgcccgacaccttcaacgacgccagccccagcttcggcctgcaccccagccccgtgcacgtgtgcaccgaggagagcctgatgagcagcctgaacggcggcagcgtgcccagcgagctggacggcctggacagcgagaaggacaagatgctggtggagaagcagaaggtgatcaacgagctgacctggaagctgcagcaggagcagagacaggtggaggagctgagaatgcagctgcagaagcagaagagaaacaactgcagcgagaagaagcccctgcccttcctggccgccagcatcaagcaggaggaggccgtgagcagctgccccttcgccagccaggtgcccgtgaagagacagagcagcagcagcgagtgccacccccccgcctgcgaggccgcccagctgcagcccctgggcaacgcccactgcgtggagagcagcgaccagaccaacgtgctgagcagcaccttcctgagcccccagtgcagcccccagcacagccccctgggcgccgtgaagagcccccagcacatcagcctgccccccagccccaacaacccccacttcctgcccagcagcagcggcgcccagggcgagggccacagagtgagcagccccatcagcagccaggtgtgcaccgcccagatggccggcctgcacagcagcgacaaggtgggccccaagttcagcatccccagccccaccttcagcaagagcagcagcgccatcagcgaggtgacccagccccccagctacgaggacgccgtgaagcagcagatgaccagaagccagcagatggacgagctgctggacgtgctgatcgagagcggcgagatgcccgccgacgccagagaggaccacagctgcctgcagaaggtgcccaagatccccagaagcagcagaagccccaccgccgtgctgaccaagcccagcgccagcttcgagcaggccagcagcggcagccagatccccttcgacccctacgccaccgacagcgacgagcacctggaggtgctgctgaacagccagagccccctgggcaagatgagcgacgtgaccctgctgaagatcggcagcgaggagccccacttcgacggcatcatggacggcttcagcggcaaggccgccgaggacctgttcaacgcccacgagatcctgcccggccccctgagccccatgcagacccagttcagccccagcagcgtggacagcaacggcctgcagctgagcttcaccgagagcccctgggagaccatggagtggctggacctgaccccccccaacagcacccccggcttcagcgccctgaccaccagcagccccagcatcttcaacatcgacttcctggacgtgaccgacctgaacctgaacagcagcatggacctgcacctgcagcagtggtag

SEQ ID NO: 246303 - protein, 811 aa, Artificial Sequence
  derived and/or modified sequence
MLLLFHSKRMPVAEAPQVAGGQGDGGDGEEAEPEGMFKACEDSKRKARGYLRLVPLFVLLALLVLASAGVLLWYFLGYKAEVMVSQVYSGSLRVLNRHFSQDLTRRESSAFRSETAKAQKMLKELITSTRLGTYYNSSSVYSFGEGPLTCFFWFILQIPEHRRLMLSPEVVQALLVEELLSTVNSSAAVPYRAEYEVDPEGLVILEASVKDIAALNSTLGCYRYSYVGQGQVLRLKGPDHLASSCLWHLQGPKDLMLKLRLEWTLAECRDRLAMYDVAGPLEKRLITSVYGCSRQEPVVEVLASGAIMAVVWKKGLHSYYDPFVLSVQPVVFQACEVNLTLDNRLDSQGVLSTPYFPSYYSPQTHCSWHLTVPSLDYGLALWFDAYALRRQKYDLPCTQGQWTIQNRRLCGLRILQPYAERIPVVATAGITINFTSQISLTGPGVRVHYGLYNQSDPCPGEFLCSVNGLCVPACDGVKDCPNGLDERNCVCRATFQCKEDSTCISLPKVCDGQPDCLNGSDEEQCQEGVPCGTFTFQCEDRSCVKKPNPQCDGRPDCRDGSDEEHCDCGLQGPSSRIVGGAVSSEGEWPWQASLQVRGRHICGGALIADRWVITAAHCFQEDSMASTVLWTVFLGKVWQNSRWPGEVSFKVSRLLLHPYHEEDSHDYDVALLQLDHPVVRSAAVRPVCLPARSHFFEPGLHCWITGWGALREGGPISNALQKVDVQLIPQDLCSEVYRYQVTPRMLCAGYRKGKKDACQGDSGGPLVCKALSGRWFLAGLVSWGLGCGRPNYFGVYTRITGVISWIQQVVT

SEQ ID NO: 246304 - protein, 802 aa, Artificial Sequence
  derived and/or modified sequence
MPVAEAPQVAGGQGDGGDGEEAEPEGMFKACEDSKRKARGYLRLVPLFVLLALLVLASAGVLLWYFLGYKAEVMVSQVYSGSLRVLNRHFSQDLTRRESSAFRSETAKAQKMLKELITSTRLGTYYNSSSVYSFGEGPLTCFFWFILQIPEHRRLMLSPEVVQALLVEELLSTVNSSAAVPYRAEYEVDPEGLVILEASVKDIAALNSTLGCYRYSYVGQGQVLRLKGPDHLASSCLWHLQGPKDLMLKLRLEWTLAECRDRLAMYDVAGPLEKRLITSVYGCSRQEPVVEVLASGAIMAVVWKKGLHSYYDPFVLSVQPVVFQACEVNLTLDNRLDSQGVLSTPYFPSYYSPQTHCSWHLTVPSLDYGLALWFDAYALRRQKYDLPCTQGQWTIQNRRLCGLRILQPYAERIPVVATAGITINFTSQISLTGPGVRVHYGLYNQSDPCPGEFLCSVNGLCVPACDGVKDCPNGLDERNCVCRATFQCKEDSTCISLPKVCDGQPDCLNGSDEEQCQEGVPCGTFTFQCEDRSCVKKPNPQCDGRPDCRDGSDEEHCDCGLQGPSSRIVGGAVSSEGEWPWQASLQVRGRHICGGALIADRWVITAAHCFQEDSMASTVLWTVFLGKVWQNSRWPGEVSFKVSRLLLHPYHEEDSHDYDVALLQLDHPVVRSAAVRPVCLPARSHFFEPGLHCWITGWGALREGGPISNALQKVDVQLIPQDLCSEVYRYQVTPRMLCAGYRKGKKDACQGDSGGPLVCKALSGRWFLAGLVSWGLGCGRPNYFGVYTRITGVISWIQQVVT

SEQ ID NO: 246305 - protein, 461 aa, Artificial Sequence
  derived and/or modified sequence
MLLLFHSKRMPVAEAPQVAGGQGDGGDGEEAEPEGMFKACEDSKRKARGYLRLVPLFVLLALLVLASAGVLLWYFLGYKAEVMVSQVYSGSLRVLNRHFSQDLTRRESSAFRSETAKAQKMLKELITSTRLGTYYNSSSVYSFGEGPLTCFFWFILQIPEHRRLMLSPEVVQALLVEELLSTVNSSAAVPYRAEYEVDPEGLVILEASVKDIAALNSTLGCYRYSYVGQGQVLRLKGPDHLASSCLWHLQGPKDLMLKLRLEWTLAECRDRLAMYDVAGPLEKRLITSVYGCSRQEPVVEVLASGAIMAVVWKKGLHSYYDPFVLSVQPVVFQACEVNLTLDNRLDSQGVLSTPYFPSYYSPQTHCSWHLTVPSLDYGLALWFDAYALRRQKYDLPCTQGQWTIQNRRYHFLSSLWLPFLPPPPSLPSSIVTPSLEAQVPNLRGAARGASRGWGWCQACCP

SEQ ID NO: 246306 - DNA, 2436 bp, Artificial Sequence
  derived and/or modified sequence
atgctgctgctgttccacagcaagagaatgcccgtggccgaggccccccaggtggccggcggccagggcgacggcggcgacggcgaggaggccgagcccgagggcatgttcaaggcctgcgaggacagcaagagaaaggccagaggctacctgagactggtgcccctgttcgtgctgctggccctgctggtgctggccagcgccggcgtgctgctgtggtacttcctgggctacaaggccgaggtgatggtgagccaggtgtacagcggcagcctgagagtgctgaacagacacttcagccaggacctgaccagaagagagagcagcgccttcagaagcgagaccgccaaggcccagaagatgctgaaggagctgatcaccagcaccagactgggcacctactacaacagcagcagcgtgtacagcttcggcgagggccccctgacctgcttcttctggttcatcctgcagatccccgagcacagaagactgatgctgagccccgaggtggtgcaggccctgctggtggaggagctgctgagcaccgtgaacagcagcgccgccgtgccctacagagccgagtacgaggtggaccccgagggcctggtgatcctggaggccagcgtgaaggacatcgccgccctgaacagcaccctgggctgctacagatacagctacgtgggccagggccaggtgctgagactgaagggccccgaccacctggccagcagctgcctgtggcacctgcagggccccaaggacctgatgctgaagctgagactggagtggaccctggccgagtgcagagacagactggccatgtacgacgtggccggccccctggagaagagactgatcaccagcgtgtacggctgcagcagacaggagcccgtggtggaggtgctggccagcggcgccatcatggccgtggtgtggaagaagggcctgcacagctactacgaccccttcgtgctgagcgtgcagcccgtggtgttccaggcctgcgaggtgaacctgaccctggacaacagactggacagccagggcgtgctgagcaccccctacttccccagctactacagcccccagacccactgcagctggcacctgaccgtgcccagcctggactacggcctggccctgtggttcgacgcctacgccctgagaagacagaagtacgacctgccctgcacccagggccagtggaccatccagaacagaagactgtgcggcctgagaatcctgcagccctacgccgagagaatccccgtggtggccaccgccggcatcaccatcaacttcaccagccagatcagcctgaccggccccggcgtgagagtgcactacggcctgtacaaccagagcgacccctgccccggcgagttcctgtgcagcgtgaacggcctgtgcgtgcccgcctgcgacggcgtgaaggactgccccaacggcctggacgagagaaactgcgtgtgcagagccaccttccagtgcaaggaggacagcacctgcatcagcctgcccaaggtgtgcgacggccagcccgactgcctgaacggcagcgacgaggagcagtgccaggagggcgtgccctgcggcaccttcaccttccagtgcgaggacagaagctgcgtgaagaagcccaacccccagtgcgacggcagacccgactgcagagacggcagcgacgaggagcactgcgactgcggcctgcagggccccagcagcagaatcgtgggcggcgccgtgagcagcgagggcgagtggccctggcaggccagcctgcaggtgagaggcagacacatctgcggcggcgccctgatcgccgacagatgggtgatcaccgccgcccactgcttccaggaggacagcatggccagcaccgtgctgtggaccgtgttcctgggcaaggtgtggcagaacagcagatggcccggcgaggtgagcttcaaggtgagcagactgctgctgcacccctaccacgaggaggacagccacgactacgacgtggccctgctgcagctggaccaccccgtggtgagaagcgccgccgtgagacccgtgtgcctgcccgccagaagccacttcttcgagcccggcctgcactgctggatcaccggctggggcgccctgagagagggcggccccatcagcaacgccctgcagaaggtggacgtgcagctgatcccccaggacctgtgcagcgaggtgtacagataccaggtgacccccagaatgctgtgcgccggctacagaaagggcaagaaggacgcctgccagggcgacagcggcggccccctggtgtgcaaggccctgagcggcagatggttcctggccggcctggtgagctggggcctgggctgcggcagacccaactacttcggcgtgtacaccagaatcaccggcgtgatcagctggatccagcaggtggtgacctag

SEQ ID NO: 246307 - DNA, 1386 bp, Artificial Sequence
  derived and/or modified sequence
atgctgctgctgttccacagcaagagaatgcccgtggccgaggccccccaggtggccggcggccagggcgacggcggcgacggcgaggaggccgagcccgagggcatgttcaaggcctgcgaggacagcaagagaaaggccagaggctacctgagactggtgcccctgttcgtgctgctggccctgctggtgctggccagcgccggcgtgctgctgtggtacttcctgggctacaaggccgaggtgatggtgagccaggtgtacagcggcagcctgagagtgctgaacagacacttcagccaggacctgaccagaagagagagcagcgccttcagaagcgagaccgccaaggcccagaagatgctgaaggagctgatcaccagcaccagactgggcacctactacaacagcagcagcgtgtacagcttcggcgagggccccctgacctgcttcttctggttcatcctgcagatccccgagcacagaagactgatgctgagccccgaggtggtgcaggccctgctggtggaggagctgctgagcaccgtgaacagcagcgccgccgtgccctacagagccgagtacgaggtggaccccgagggcctggtgatcctggaggccagcgtgaaggacatcgccgccctgaacagcaccctgggctgctacagatacagctacgtgggccagggccaggtgctgagactgaagggccccgaccacctggccagcagctgcctgtggcacctgcagggccccaaggacctgatgctgaagctgagactggagtggaccctggccgagtgcagagacagactggccatgtacgacgtggccggccccctggagaagagactgatcaccagcgtgtacggctgcagcagacaggagcccgtggtggaggtgctggccagcggcgccatcatggccgtggtgtggaagaagggcctgcacagctactacgaccccttcgtgctgagcgtgcagcccgtggtgttccaggcctgcgaggtgaacctgaccctggacaacagactggacagccagggcgtgctgagcaccccctacttccccagctactacagcccccagacccactgcagctggcacctgaccgtgcccagcctggactacggcctggccctgtggttcgacgcctacgccctgagaagacagaagtacgacctgccctgcacccagggccagtggaccatccagaacagaagataccacttcctgagcagcctgtggctgcccttcctgccccccccccccagcctgcccagcagcatcgtgacccccagcctggaggcccaggtgcccaacctgagaggcgccgccagaggcgccagcagaggctggggctggtgccaggcctgctgcccctag

SEQ ID NO: 246308 - DNA, 2436 bp, Artificial Sequence
  derived and/or modified sequence
atgctgctgctctttcattccaagaggatgcctgtcgccgaggcgccacaggtggccggtggccagggtgacggtggtgacggggaggaagccgagcccgaaggaatgtttaaggcctgcgaggattccaagaggaaagctcggggctatttacgattggtgccactctttgttctcctcgcactcttagtgttagcatcggctggggtgttgctgtggtatttcctaggttataaagcggaggtcatggtgtcacaggtatactcaggtagccttcgagttctgaaccgccactttagccaggatctgaccaggcgcgaaagttccgcgttcagaagtgaaaccgcaaaggcgcagaagatgcttaaggagctgatcacttccactcggctgggcacctactacaatagcagctcagtctattcatttggagaagggcccctgacatgctttttttggttcatactgcagattcccgagcaccggaggctcatgctgagtcctgaagtagttcaggccttgctcgtggaagaactcctgtccacagtcaacagcagcgccgccgtgccatacagggccgagtacgaggtcgatcctgaaggcctggtgatcttggaagcctccgtgaaagacatcgccgcactcaacagtactctggggtgttacaggtactcttatgtgggacaggggcaggtgctccgactgaaaggcccagatcaccttgcaagctcctgtttatggcacctacagggacctaaggatctgatgctcaagctcaggctcgaatggacacttgctgaatgtagggatagactggccatgtacgacgtcgcaggccctttggagaagcgcctgattacctcagtgtacgggtgttcgcgccaggaaccagtggtggaggtgcttgcatccggcgccattatggcagtggtttggaaaaagggcttacatagctattatgaccctttcgtgctctctgtacaaccagtggtcttccaggcttgcgaggttaacctgacactggacaaccggctggattcgcagggggtactgagcacgccttactttccaagctactactcacctcagacgcactgtagctggcacttaaccgtaccgtcattggactatggcctggccttatggttcgatgcatacgccttgcggagacagaaatacgaccttccttgcacccagggccagtggaccatccagaatcggagactttgcggcctgagaatacttcagccatacgcagagcgcatcccagtcgtcgccacagctggcattaccattaattttaccagtcagatttccctgacaggacctggagtccgcgtccactacggtttgtataaccaatccgacccgtgtccgggtgagttcctgtgttccgtgaatgggctttgcgtacctgcctgcgatggggtgaaagactgcccgaatggcctagatgagcgtaactgcgtgtgccgcgccactttccagtgtaaggaggattcaacttgcatctccctacctaaagtctgtgatggtcagccagactgcctgaacgggtctgatgaggaacagtgtcaggaaggcgtgccatgcggcacttttacattccaatgtgaggacagatcttgcgttaagaaaccaaatccccaatgcgatggacgtcctgattgccgcgacggtagcgacgaggaacattgtgactgtgggctacagggacctagctcaaggatcgtcggtggtgccgtgtctagcgaaggtgaatggccatggcaggcgtctctccaggttagaggccggcacatttgcggcggtgcactcatcgccgatcgttgggtcataacggctgcacactgcttccaagaggattccatggcctcaacagtcctgtggaccgtgttcttggggaaggtgtggcagaattcaagatggcccggtgaagttagcttcaaagtttctcgattgttactccacccttatcatgaggaggatagccacgattacgatgtggcgctcttgcagttggaccatcccgtggtccgctcagcggccgtcagacctgtgtgcctgcccgctcgaagccatttcttcgagcccggtttgcactgttggataaccgggtggggcgccctgcgggaaggaggacccattagcaatgcccttcaaaaggttgacgtgcagcttatacctcaggacttgtgttctgaggtgtatcgataccaagttactcccagaatgttatgcgctgggtacagaaaaggaaagaaagatgcctgtcagggggacagcggggggccgcttgtttgtaaagccctctcagggcggtggtttcttgctgggcttgtgtcttgggggctgggctgcgggaggccaaactatttcggcgtttacaccagaatcaccggtgtcatttcatggatacagcaggttgtgacctag

SEQ ID NO: 246309 - DNA, 1386 bp, Artificial Sequence
  derived and/or modified sequence
atgctcctgctgttccacagcaaaagaatgccggtggctgaagccccacaggtcgccggtgggcagggtgacgggggcgatggcgaggaggcagagcccgagggcatgttcaaggcgtgcgaggactccaagcgcaaagcaaggggttatctcaggctggttccactgttcgtgttactcgccctattggtgctggcatcagcaggagtgcttctctggtattttttgggttataaggccgaggtcatggtttcccaggtctatagcggcagtctgcgagtcctgaacaggcatttctcgcaggacttgacacgtcgcgagtcctccgcctttagaagcgagacagctaaagctcagaaaatgctgaaggaattgatcacttcgaccagactcggcacttattataattcgagctccgtgtactcgttcggtgaaggccctcttacttgttttttttggttcatattacagatcccagagcatcgacggctgatgctatcacctgaagtggtgcaagccctgttagtggaagagttgctatctacagttaattcctcggcagccgtaccgtaccgcgctgaatatgaggttgatcccgaaggcctggtgattttagaggcttcagtcaaagacatagctgccctaaactccactctaggctgttatagatacagctacgtaggtcaagggcaagtgctaagactcaaaggtcctgaccacctggctagctcgtgcctctggcacttgcagggtccaaaggatctgatgttgaagctgagactggagtggaccttagccgagtgcagggacagattagcgatgtacgatgtggctgggcccctcgagaagagattaatcacatcagtctacggatgcagcaggcaggagccagtggtggaagtccttgcatcaggggcgattatggcagtggtgtggaaaaaggggttgcattcgtattacgatccttttgtcctgtcagtgcaacctgtggtgtttcaggcttgcgaagttaatctgactcttgacaatcgtttagattcacagggagtactcagcaccccgtattttccttcatattactctccacagactcattgctcctggcatcttaccgtgccttcccttgactacggcctcgctctgtggttcgacgcgtacgctttgaggaggcagaagtacgacctgccctgtactcaggggcagtggactattcagaatcgccggtaccactttcttagcagtctttggttacccttccttcccccaccgccttcgcttccctcaagcatcgtgactccgtcactcgaggcacaggttccaaatctccggggggctgctcgtggcgcctctagaggctggggttggtgtcaggcttgctgcccatag

SEQ ID NO: 246310 - DNA, 2436 bp, Artificial Sequence
  derived and/or modified sequence
atgctgctgctcttccacagcaagaggatgcctgtggccgaggccccccaggtggccggcggccagggagatggaggagatggagaggaggccgagcctgagggcatgttcaaggcctgtgaggacagcaagaggaaggcccggggctacctgcggctggtgcccctgtttgtgctgctggccctgctggtgctggccagcgctggggtgctgctgtggtacttcctgggctacaaggccgaggtgatggtgtcccaggtgtacagcggcagcctgcgggtgctgaacagacacttcagccaggacctgacccggcgggagagcagcgccttccgctcagaaacagccaaggcccagaagatgctgaaggagctgatcaccagcacccggctgggcacctactacaacagcagctctgtgtacagctttggagagggccccctgacctgcttcttctggttcatcctgcagatccctgagcaccggcggctgatgctgagccctgaggtggtgcaggccctgctggtggaggagctgctgagcacagtgaacagcagcgctgctgtgccctacagagcagaatatgaggtggaccctgagggcctggtgatcctggaggcctctgtgaaggacattgctgccctgaacagcaccctgggctgctaccgctacagctatgtgggccagggccaggtgctgcggctgaagggccctgaccacctggccagcagctgcctgtggcacctgcagggccccaaggacctgatgctgaagctgcggctggagtggaccctggctgaatgtcgggaccggctggccatgtatgatgtggccggccccctggagaagaggctcatcacctctgtgtatggctgcagccggcaggagcctgtggtggaggtgctggccagcggggccatcatggctgtggtgtggaagaagggcctgcacagctactatgacccctttgtgctgtctgtgcagcctgtggtgttccaggcctgtgaggtgaacctgaccctggacaaccggctggacagccagggcgtgctgagcaccccctacttccccagctactacagcccccagacccactgctcctggcacctgactgtgcccagcctggactatggcctggccctgtggtttgatgcctatgccctgcggcggcagaagtatgacctgccctgcacccagggccagtggaccatccagaacagaaggctgtgtggcctgcgcatcctgcagccctatgcagagcgcatccctgtggtggccacagctggcatcaccatcaacttcaccagccagatcagcctgactggacctggggtgcgggtgcactacggcctgtacaaccagagcgacccctgccctggagagttcctgtgcagcgtgaatggcctgtgtgtgcctgcctgtgatggagtgaaggactgccccaacggcctggatgaaagaaactgtgtgtgccgggccaccttccagtgcaaggaggacagcacctgcatcagcctgcccaaggtgtgtgatggccagcctgactgcctgaatggaagtgatgaggagcagtgccaggagggcgtgccctgtggcaccttcaccttccagtgtgaagatagaagctgtgtgaagaagcccaacccccagtgtgatggccgcccagactgcagagatggcagtgatgaggagcactgtgactgtggcctgcagggccccagcagcagaattgtgggcggcgctgtgagcagcgagggggagtggccctggcaggccagcctgcaggtgcggggccgccacatctgtggcggggccctgattgctgaccgctgggtgatcacagctgcccactgcttccaggaggacagcatggccagcacagtgctgtggacagtgttcctgggcaaggtgtggcagaacagccgctggccaggagaggtgtccttcaaggtgtcccggctgctgctgcacccctaccacgaggaggacagccatgactatgatgtggccctgctgcagctggaccaccctgtggtgcgctctgctgctgtgcggcctgtgtgcctgcctgcccggagccacttctttgagcccggcctgcactgctggatcaccggctggggcgccctgcgggagggcggccccatcagcaatgccctgcagaaggtggatgtgcagctgatcccccaggacctgtgcagcgaggtgtaccgctaccaggtgacccccaggatgctgtgtgccggctacaggaagggcaagaaggatgcctgccagggcgacagcggcggccccctggtgtgcaaggccctgagcggccgctggttcctggccggcctggtgtcctggggcctgggctgcggccggcccaactactttggagtgtacacccgcatcaccggggtcatctcctggatccagcaggtggtgacctag

SEQ ID NO: 246311 - DNA, 1386 bp, Artificial Sequence
  derived and/or modified sequence
atgctgctgctcttccacagcaagaggatgcctgtggccgaggccccccaggtggccggcggccagggagatggaggagatggagaggaggccgagcctgagggcatgttcaaggcctgtgaggacagcaagaggaaggcccggggctacctgcggctggtgcccctgtttgtgctgctggccctgctggtgctggccagcgctggggtgctgctgtggtacttcctgggctacaaggccgaggtgatggtgtcccaggtgtacagcggcagcctgcgggtgctgaacagacacttcagccaggacctgacccggcgggagagcagcgccttccgctcagaaacagccaaggcccagaagatgctgaaggagctgatcaccagcacccggctgggcacctactacaacagcagctctgtgtacagctttggagagggccccctgacctgcttcttctggttcatcctgcagatccctgagcaccggcggctgatgctgagccctgaggtggtgcaggccctgctggtggaggagctgctgagcacagtgaacagcagcgctgctgtgccctacagagcagaatatgaggtggaccctgagggcctggtgatcctggaggcctctgtgaaggacattgctgccctgaacagcaccctgggctgctaccgctacagctatgtgggccagggccaggtgctgcggctgaagggccctgaccacctggccagcagctgcctgtggcacctgcagggccccaaggacctgatgctgaagctgcggctggagtggaccctggctgaatgtcgggaccggctggccatgtatgatgtggccggccccctggagaagaggctcatcacctctgtgtatggctgcagccggcaggagcctgtggtggaggtgctggccagcggggccatcatggctgtggtgtggaagaagggcctgcacagctactatgacccctttgtgctgtctgtgcagcctgtggtgttccaggcctgtgaggtgaacctgaccctggacaaccggctggacagccagggcgtgctgagcaccccctacttccccagctactacagcccccagacccactgctcctggcacctgactgtgcccagcctggactatggcctggccctgtggtttgatgcctatgccctgcggcggcagaagtatgacctgccctgcacccagggccagtggaccatccagaacagacgctaccacttcctgagcagcctgtggctgcccttcctgcccccaccacccagcctgcccagcagcatcgtgacccccagcctggaggcccaggtgcccaacctgcggggagctgcccggggggccagccggggctggggctggtgccaggcctgctgcccctag

SEQ ID NO: 246312 - DNA, 2436 bp, Artificial Sequence
  derived and/or modified sequence
atgctgctgctgttccacagcaagcggatgcccgtggccgaggccccccaggtggccggggggcagggcgatggcggagacggcgaggaggcagagcccgaggggatgttcaaggcttgtgaggacagcaagcgaaaggctcgcggttatctgagattagtgcccttatttgtgttgttagcattactagtcttggcgagcgccggtgtgctcttgtggtattttctcggctacaaggccgaggttatggtatcccaggtgtactccggttcattacgcgtgctgaacagacacttctcacaggatctgactagacgggaaagttccgccttccgctcggagaccgccaaggcccagaagatgctaaaagaactcatcaccagtacaaggctggggacatactataacagctcctccgtatattctttcggggaaggcccgctcacatgcttcttttggttcatcctacagattccggagcaccgacgcctgatgctttcacccgaggtggtgcaagcactgctagttgaggaacttctctccaccgttaattcttccgcagcggtcccctacagggccgaatacgaagtcgacccggaagggctagtcatcctggaagcctcggtaaaagacattgcagcgctcaactccaccctgggttgctatcgatatagctacgttggccagggccaagtgctgcggcttaagggccccgaccatctggctagttcttgtctttggcacttgcagggccccaaggacttaatgctcaagctgcggctcgaatggacccttgcggaatgtagggataggcttgccatgtacgacgtagccgggcctctcgaaaaaaggcttatcacatccgtgtacggctgtagccgacaagagcccgtagtcgaagtgctggcaagcggcgccatcatggctgtggtgtggaaaaagggcttgcacagctattatgatcctttcgtgctcagcgtgcaacccgttgtgtttcaggcctgtgaggtgaatttgacgctggataatagattggatagtcaaggagtcctgagtacaccttatttccccagctattattctcctcaaacccactgctcttggcatcttactgtcccaagtctggattacggactagccctctggtttgacgcttatgctctgcggcgccaaaaatacgacctcccgtgcacacagggccagtggaccattcagaaccgcaggctctgtgggctccgaatcctccagccttacgccgaacggatccctgttgtggccaccgctggcatcacgataaacttcacctctcagatcagcttaaccggtcccggagtgcgcgtgcactatgggctgtacaaccagagcgacccttgccccggcgagttcctgtgctcagtgaatggattatgtgttccggcatgcgacggagtcaaagactgtcctaatgggctcgacgagcggaactgcgtgtgccgtgcgacctttcaatgcaaagaagattctacgtgcatttctcttcctaaggtgtgcgatgggcagccagactgcctgaacggctcggatgaagagcagtgtcaggaaggggtgccctgtgggacgtttacttttcagtgcgaagataggagttgtgtgaagaagcccaatccccagtgcgatggccgaccggattgtcgcgatggaagcgacgaggagcactgcgactgcggcctgcagggaccttcaagccggatcgttggaggagccgttagctccgagggcgagtggccatggcaggcaagtctgcaggtgcgaggccgccatatttgcggaggcgccctgatcgctgatcgatgggtcattacggccgcgcattgctttcaggaagacagcatggccagcacggttctgtggactgtgttcctcggcaaggtctggcagaattcccgctggccaggcgaagtctcatttaaggtttctagattactactgcatccgtaccatgaagaggatagccatgattacgacgttgccctccttcagctggatcatccggtcgtcagatcagcggccgtgcgacccgtgtgcctgccagctagatcacacttctttgagcccggattgcattgctggataactggctggggcgcactgagagaaggaggtccaataagcaacgcccttcagaaagttgacgttcagctgattccacaggatctgtgcagtgaggtttataggtaccaggttacacccaggatgttgtgcgccggctacagaaagggcaagaaagacgcgtgccagggggatagtggtggtccacttgtgtgcaaggccctctccgggaggtggttccttgccggcctcgtttcctgggggctgggttgcggcaggcccaactattttggtgtctatacacgcatcaccggcgtgataagttggattcagcaggttgtcacctag

SEQ ID NO: 246313 - DNA, 1386 bp, Artificial Sequence
  derived and/or modified sequence
atgctgctgctgttccacagcaagcggatgcccgtggccgaggccccacaggttgccggcggacagggagacgggggcgatggcgaggaggctgagcccgaaggaatgtttaaggcgtgtgaagattctaagcgaaaagctcgtggatacctgcgtctagtgcccctctttgtgctgcttgcactgctagttctcgcaagcgccggagtgctactttggtacttcctggggtacaaagctgaagttatggtctctcaggtatactctggatctttgcgcgtgctcaaccggcatttttcccaagacctcactagacgtgagtcgtcagcctttcgatctgagactgccaaggctcaaaaaatgttaaaggaactcataactagcactcggctaggaacctattataatagttcttccgtttacagcttcggggaggggcctctgacttgctttttctggttcatactccaaataccagaacaccgcaggctaatgttatcgccagaggtagtgcaggccctgctggtagaggaactcctctccaccgttaactcctccgcagcagtgccgtatagggctgaatatgaagtcgacccagagggcttagttattctcgaagcgtctgtcaaagatatcgccgcactgaactccacactgggctgctacagatacagttacgtgggccagggacaagtgctgaggctgaagggtccagaccacttggcaagctcttgtctctggcacctgcagggccctaaagacctcatgctgaaactgcgcttggagtggactctggccgagtgtcgcgaccggctagcaatgtacgatgtggcaggacctctggagaagcgactgatcacttctgtgtatggatgtagtaggcaggagcccgtggtcgaggtattagcctctggcgctatcatggcggtggtttggaaaaaaggactgcattcttattatgatcctttcgtgcttagcgtgcagccagtcgtgttccaggcttgcgaagtgaatttgaccctcgacaaccgtctggactcacagggcgttctttccactccctacttcccgtcctattattcaccccagactcactgctcatggcacctcaccgttccgtccctagactacggtctagcattatggtttgacgcctatgcacttagaaggcagaaatatgacttgccttgtacccaagggcagtggaccattcagaatcgccggtaccactttctgtctagcctctggcttcccttcttgccccctccaccctcgctaccttccagcatcgtgactccatcactggaagctcaggtcccgaatcttcggggtgcagccaggggtgcaagtaggggatggggatggtgtcaagcgtgctgcccttag

SEQ ID NO: 246314 - DNA, 2436 bp, Artificial Sequence
  derived and/or modified sequence
atgctgctactcttccacagtaaacgcatgcctgttgctgaggcgcctcaggtggctggcggtcaaggagatggaggagacggagaggaagccgaacctgaaggcatgtttaaggcctgcgaggattctaagaggaaggctcggggatacctccgtttagtgccattattcgtcctgctggctctcctcgtgttggcctcagctggagttctgctgtggtacttcctcggatataaggcggaggtgatggtaagccaggtgtatagcgggagcctacgcgtcctaaataggcacttctcccaggacttgacccggagggagagctccgccttccgttctgaaaccgccaaggcgcagaaaatgcttaaggagctgattaccagcacccggcttggcacgtactacaatagctcttcggtgtacagtttcggtgagggccctcttacatgttttttctggtttattctccaaattcctgagcaccgacgcctgatgttgtcccctgaggtggttcaagccctgctcgtcgaggagctgttgtcaaccgttaattctagcgccgcagtgccatatcgtgccgagtatgaggtggatcccgaaggcctcgtgatcctagaggcatctgttaaagatattgccgcactgaacagcaccctggggtgctataggtactcttacgtcggccaaggtcaggtcctcaggttaaaggggccagaccatctcgcaagttcatgtctctggcatctccagggacctaaggacctgatgttgaagctacgcttggagtggacgttggctgaatgccgagatcgtctggcaatgtacgacgtagcgggacccttggaaaaaagattgatcacatctgtgtatggctgcagtcgccaggaacccgtggtggaggtcctcgcatctggggcaattatggccgtggtgtggaaaaaggggctgcacagctattacgacccctttgtactgagtgtgcaacctgtggtctttcaggcctgcgaggtgaatctgactttggacaaccggctggactctcaaggcgtgttgagcacaccatattttcccagttattatagcccgcagacgcactgttcttggcacttaactgtgccctctctggattacggcctggccctctggttcgacgcatacgctctcaggaggcagaagtacgacctcccctgtactcagggccaatggacaattcagaatcggaggctctgtggccttagaattctacagccatatgcggaacggatcccagtggtggctactgctgggattactatcaatttcacgtctcaaatctctctgacggggccaggtgtgcgagtgcattacgggctgtacaaccagtcagacccttgccccggtgagtttctgtgttcagtgaatggtctgtgtgtgcccgcttgtgacggcgttaaggactgccccaacgggctcgatgagcggaattgcgtctgtagagccacattccagtgcaaagaagatagtacatgcattagtctgccaaaagtctgtgatggtcagccggattgtttaaatggctccgacgaagagcagtgccaggagggggtgccttgtggaacatttacattccagtgtgaggataggtcatgcgtgaaaaaaccaaatccccaatgcgatgggagaccagactgccgggacgggtctgacgaggaacactgcgactgcggattgcagggaccttcaagcagaatcgtcggcggagcagtaagttccgagggcgagtggccttggcaagccagcctccaggtaagaggccgtcacatctgtggcggagccctgattgccgaccggtgggttatcaccgcagctcattgttttcaggaagatagcatggcatctactgttctctggaccgtctttctcggcaaagtttggcagaacagtagatggccaggggaggtttcctttaaggtctccagattgcttctgcatccgtaccacgaggaagacagtcatgattacgacgttgccttattgcaactggaccaccctgtggttaggtctgccgcagtgcgccctgtgtgcctcccggcaaggtctcacttcttcgagccagggctccactgctggattaccggctggggagcgctgcgggagggcggacctataagcaatgccctgcaaaaggtcgatgtgcagctgatcccccaggatctgtgtagcgaggtttatcgttatcaggtaaccccaagaatgctgtgcgcaggctaccgaaaaggtaagaaggatgcctgccagggggatagcggcggacctctggtgtgcaaggccctctctggtaggtggtttctggctggacttgtaagttggggcctgggatgcggcagaccaaactattttggggtatatactagaattacaggtgtgatctcttggatccagcaggtagtgacgtag

SEQ ID NO: 246315 - DNA, 1386 bp, Artificial Sequence
  derived and/or modified sequence
atgcttttgttattccactcaaaaaggatgccggtcgctgaagcgccacaggtggcgggtgggcagggcgatggcggtgatggggaggaagctgagccggaaggcatgtttaaagcctgcgaggatagcaaacgaaaggcaaggggttacctaagactagttccactgtttgtgctgctggccttactcgtgttggcctcagccggtgttctgctgtggtattttctgggctacaaagctgaggtcatggtgagccaggtctattccggttccttacgcgtgctgaatagacacttctctcaagacctgactcggagagaatcgtccgccttcagatcagagactgccaaagcacaaaagatgctaaaggagctcataacatcaacacgtctggggacatattacaactccagtagtgtttattccttcggagagggcccactgacttgcttcttttggtttattctacagatccctgaacacaggcggttaatgttatcaccggaggtggtgcaagctttgctggtggaggaactgctgtccaccgtcaacagtagcgcagcagtcccctatagagctgagtatgaagtcgacccagagggccttgtcattctcgaggcctccgtcaaggatattgccgctctgaacagcacactgggttgttatagatattcatacgtcggccagggacaggttctgagactcaagggtccagatcatcttgccagcagctgtctgtggcacctacagggcccaaaggacctgatgttgaagctccgcctcgaatggacactcgctgagtgcagggatagactggccatgtacgacgtcgccggaccgctggagaaacgtctcattaccagcgtgtacgggtgctctcgacaagagcccgtggtggaggtgttggctagcggcgcaatcatggccgtggtgtggaaaaaagggcttcacagttactatgacccattcgtcctgtccgtacagccggttgtttttcaagcttgtgaggttaacctaactcttgacaaccgcctggattcccagggtgttcttagcacgccatacttcccttcctactattcacctcagacgcattgcagctggcatttgacagttccaagcctggactacggacttgcactgtggtttgacgcctacgccctgcggagacaaaaatacgatcttccatgtacccagggccagtggactatccaaaataggaggtatcactttctgtccagtctctggttacctttcttgccgccacctccctctcttccctcttctatcgtaacaccttctctagaggctcaagtcccaaatctgcggggagctgctcgcggtgctagtcgtgggtggggctggtgtcaggcttgttgtccgtag

SEQ ID NO: 246316 - DNA, 3194 bp, Artificial Sequence
  derived and/or modified sequence
gttcttgagccagacccagtccagctctggtgcctgccctctggtgcgagctgacctgagatgcacttccctcctctgtgagctgtctcggcacccacttgcagtcactgccgcctgatgttgttactcttccactccaaaaggatgcccgtggccgaggccccccaggtggctggcgggcagggggacggaggtgatggcgaggaagcggagccggaggggatgttcaaggcctgtgaggactccaagagaaaagcccggggctacctccgcctggtgcccctgtttgtgctgctggccctgctcgtgctggcttcggcgggggtgctactctggtatttcctagggtacaaggcggaggtgatggtcagccaggtgtactcaggcagtctgcgtgtactcaatcgccacttctcccaggatcttacccgccgggaatctagtgccttccgcagtgaaaccgccaaagcccagaagatgctcaaggagctcatcaccagcacccgcctgggaacttactacaactccagctccgtctattcctttggggagggacccctcacctgcttcttctggttcattctccaaatccccgagcaccgccggctgatgctgagccccgaggtggtgcaggcactgctggtggaggagctgctgtccacagtcaacagctcggctgccgtcccctacagggccgagtacgaagtggaccccgagggcctagtgatcctggaagccagtgtgaaagacatagctgcattgaattccacgctgggttgttaccgctacagctacgtgggccagggccaggtcctccggctgaaggggcctgaccacctggcctccagctgcctgtggcacctgcagggccccaaggacctcatgctcaaactccggctggagtggacgctggcagagtgccgggaccgactggccatgtatgacgtggccgggcccctggagaagaggctcatcacctcggtgtacggctgcagccgccaggagcccgtggtggaggttctggcgtcgggggccatcatggcggtcgtctggaagaagggcctgcacagctactacgaccccttcgtgctctccgtgcagccggtggtcttccaggcctgtgaagtgaacctgacgctggacaacaggctcgactcccagggcgtcctcagcaccccgtacttccccagctactactcgccccaaacccactgctcctggcacctcacggtgccctctctggactacggcttggccctctggtttgatgcctatgcactgaggaggcagaagtatgatttgccgtgcacccagggccagtggacgatccagaacaggaggctgtgtggcttgcgcatcctgcagccctacgccgagaggatccccgtggtggccacggccgggatcaccatcaacttcacctcccagatctccctcaccgggcccggtgtgcgggtgcactatggcttgtacaaccagtcggacccctgccctggagagttcctctgttctgtgaatggactctgtgtccctgcctgtgatggggtcaaggactgccccaacggcctggatgagagaaactgcgtttgcagagccacattccagtgcaaagaggacagcacatgcatctcactgcccaaggtctgtgatgggcagcctgattgtctcaacggcagcgacgaagagcagtgccaggaaggggtgccatgtgggacattcaccttccagtgtgaggaccggagctgcgtgaagaagcccaacccgcagtgtgatgggcggcccgactgcagggacggctcggatgaggagcactgtgactgtggcctccagggcccctccagccgcattgttggtggagctgtgtcctccgagggtgagtggccatggcaggccagcctccaggttcggggtcgacacatctgtgggggggccctcatcgctgaccgctgggtgataacagctgcccactgcttccaggaggacagcatggcctccacggtgctgtggaccgtgttcctgggcaaggtgtggcagaactcgcgctggcctggagaggtgtccttcaaggtgagccgcctgctcctgcacccgtaccacgaagaggacagccatgactacgacgtggcgctgctgcagctcgaccacccggtggtgcgctcggccgccgtgcgccccgtctgcctgcccgcgcgctcccacttcttcgagcccggcctgcactgctggattacgggctggggcgccttgcgcgagggcggccccatcagcaacgctctgcagaaagtggatgtgcagttgatcccacaggacctgtgcagcgaggtctatcgctaccaggtgacgccacgcatgctgtgtgccggctaccgcaagggcaagaaggatgcctgtcagggtgactcaggtggtccgctggtgtgcaaggcactcagtggccgctggttcctggcggggctggtcagctggggcctgggctgtggccggcctaactacttcggcgtctacacccgcatcacaggtgtgatcagctggatccagcaagtggtgacctgaggaactgcccccctgcaaagcagggcccacctcctggactcagagagcccagggcaactgccaagcagggggacaagtattctggcggggggtgggggagagagcaggccctgtggtggcaggaggtggcatcttgtctcgtccctgatgtctgctccagtgatggcaggaggatggagaagtgccagcagctgggggtcaagacgtcccctgaggacccaggcccacacccagcccttctgcctcccaattctctctcctccgtccccttcctccactgctgcctaatgcaaggcagtggctcagcagcaagaatgctggttctacatcccgaggagtgtctgaggtgcgccccactctgtacagaggctgtttgggcagccttgcctccagagagcagattccagcttcggaagcccctggtctaacttgggatctgggaatggaaggtgctcccatcggaggggaccctcagagccctggagactgccaggtgggcctgctgccactgtaagccaaaaggtggggaagtcctgactccagggtccttgccccacccctgcctgccacctgggccctcacagcccagaccctcactgggaggtgagctcagctgccctttggaataaagctgcctgatc

SEQ ID NO: 246317 - DNA, 526 bp, Artificial Sequence
  derived and/or modified sequence
aaaaggcagggaagtcctgcttccgtgccccaccggtgctcagcagaggctcccttgcaaatgcgaggctgtttccaactttggtctgtttccctggcaggatgcccgtggccgaggccccccaggtggctggcgggcagggggacggaggtgatggcgaggaagcggagccggaggggatgttcaaggcctgtgaggactccaagagaaaagcccggggctacctccgcctggtgcccctgtttgtgctgctggccctgctcgtgctggcttcggcgggggtgctactctggtatttcctagggtacaaggcggaggtgatggtcagccaggtgtactcaggcagtctgcgtgtactcaatcgccacttctcccaggatcttacccgccgggaatctagtgccttccgcagtgaaaccgccaaagcccagaagatgctcaaggagctcatcaccagcacccgcctgggaacttactacaactccagctccgtctattcctttggggagggacccctcacctgctt

SEQ ID NO: 246318 - DNA, 1695 bp, Artificial Sequence
  derived and/or modified sequence
gttcttgagccagacccagtccagctctggtgcctgccctctggtgcgagctgacctgagatgcacttccctcctctgtgagctgtctcggcacccacttgcagtcactgccgcctgatgttgttactcttccactccaaaaggatgcccgtggccgaggccccccaggtggctggcgggcagggggacggaggtgatggcgaggaagcggagccggaggggatgttcaaggcctgtgaggactccaagagaaaagcccggggctacctccgcctggtgcccctgtttgtgctgctggccctgctcgtgctggcttcggcgggggtgctactctggtatttcctagggtacaaggcggaggtgatggtcagccaggtgtactcaggcagtctgcgtgtactcaatcgccacttctcccaggatcttacccgccgggaatctagtgccttccgcagtgaaaccgccaaagcccagaagatgctcaaggagctcatcaccagcacccgcctgggaacttactacaactccagctccgtctattcctttggggagggacccctcacctgcttcttctggttcattctccaaatccccgagcaccgccggctgatgctgagccccgaggtggtgcaggcactgctggtggaggagctgctgtccacagtcaacagctcggctgccgtcccctacagggccgagtacgaagtggaccccgagggcctagtgatcctggaagccagtgtgaaagacatagctgcattgaattccacgctgggttgttaccgctacagctacgtgggccagggccaggtcctccggctgaaggggcctgaccacctggcctccagctgcctgtggcacctgcagggccccaaggacctcatgctcaaactccggctggagtggacgctggcagagtgccgggaccgactggccatgtatgacgtggccgggcccctggagaagaggctcatcacctcggtgtacggctgcagccgccaggagcccgtggtggaggttctggcgtcgggggccatcatggcggtcgtctggaagaagggcctgcacagctactacgaccccttcgtgctctccgtgcagccggtggtcttccaggcctgtgaagtgaacctgacgctggacaacaggctcgactcccagggcgtcctcagcaccccgtacttccccagctactactcgccccaaacccactgctcctggcacctcacggtgccctctctggactacggcttggccctctggtttgatgcctatgcactgaggaggcagaagtatgatttgccgtgcacccagggccagtggacgatccagaacaggaggtaccacttcctctcctccctctggcttcctttcctccctccccctccctctcttccctcctcaatagtgaccccctcattggaagcccaagtccccaatctcagaggggcagcaaggggagcgagcagaggctggggctggtgtcaggcctgttgcccttgaccttgtcctcgtcccagcctccgccctggccccggcttcccctctggctaccccagaggtctcagacacgtttggtcatcagacaccttggatgtttattctaattacagcaaaattgtctcatcttcttgggtgctgtaaccccctctggcaccctcaatccttcaataaaatgtttccagagccaaagga

SEQ ID NO: 246319 - protein, 4069 aa, Artificial Sequence
  derived and/or modified sequence
MASRDSNHAGESFLGSDGDEEATRELETEEESEGEEDETAAESEEEPDSRLSDQDEEGKIKQEYIISDPSFSMVTVQREDSGITWETNSSRSSTPWASEESQTSGVCSREGSTVNSPPGNVSFIVDEVKKVRKRTHKSKHGSPSLRRKGNRKRNSFESQDVPTNKKGSPLTSASQVLTTEKEKSYTGIYDKARKKKTTSNTPPITGAIYKEHKPLVLRPVYIGTVQYKIKMFNSVKEELIPLQFYGTLPKGYVIKEIHYRKGKDASISLEPDLDNSGSNTVSKTRKLVAQSIEDKVKEVFPPWRGALSKGSESLTLMFSHEDQKKIYADSPLNATSALEHTVPSYSSSGRAEQGIQLRHSQSVPQQPEDEAKPHEVEPPSVTPDTPATMFLRTTKEECELASPGTAASENDSSVSPSFANEVKKEDVYSAHHSISLEAASPGLAASTQDGLDPDQEQPDLTSIERAEPVSAKLTPTHPSVKGEKEENMLEPSISLSEPLMLEEPEKEEIETSLPIAITPEPEDSNLVEEEIVELDYPESPLVSEKPFPPHMSPEVEHKEEELILPLLAASSPEHVALSEEEREEIASVSTGSAFVSEYSVPQDLNHELQEQEGEPVPPSNVEAIAEHAVLSEEENEEFEAYSPAAAPTSESSLSPSTTEKTSENQSPLFSTVTPEYMVLSGDEASESGCYTPDSTSASEYSVPSLATKESLKKTIDRKSPLILKGVSEYMIPSEEKEDTGSFTPAVAPASEPSLSPSTTEKTSECQSPLPSTATSEHVVPSEGEDLGSERFTPDSKLISKYAAPLNATQESQKKIINEASQFKPKGISEHTVLSVDGKEVIGPSSPDLVVASEHSFPPHTTEMTSECQAPPLSATPSEYVVLSDEEAVELERYTPSSTSASEFSVPPYATPEAQEEEIVHRSLNLKGASSPMNLSEEDQEDIGPFSPDSAFVSEFSFPPYATQEAEKREFECDSPICLTSPSEHTILSDEDTEEAELFSPDSASQVSIPPFRISETEKNELEPDSLLTAVSASGYSCFSEADEEDIGSTAATPVSEQFSSSQKQKAETFPLMSPLEDLSLPPSTDKSEKAEIKPEIPTTSTSVSEYLILAQKQKTQAYLEPESEDLIPSHLTSEVEKGEREASSSVAAIPAALPAQSSIVKEETKPASPHSVLPDSVPAIKKEQEPTAALTLKAADEQMALSKVRKEEIVPDSQEATAHVSQDQKMEPQPPNVPESEMKYSVLPDMVDEPKKGVKPKLVLNVTSELEQRKLSKNEPEVIKPYSPLKETSLSGPEALSAVKMEMKHDSKITTTPIVLHSASSGVEKQVEHGPPALAFSALSEEIKKEIEPSSSTTTASVTKLDSNLTRAVKEEIPTDSSLITPVDRPVLTKVGKGELGSGLPPLVTSADEHSVLAEEDKVAIKGASPIETSSKHLAWSEAEKEIKFDSLPSVSSIAEHSVLSEVEAKEVKAGLPVIKTSSSQHSDKSEEARVEDKQDLLFSTVCDSERLVSSQKKSLMSTSEVLEPEHELPLSLWGEIKKKETELPSSQNVSPASKHIIPKGKDEETASSSPELENLASGLAPTLLLLSDDKNKPAVEVSSTAQGDFPSEKQDVALAELSLEPEKKDKPHQPLELPNAGSEFSSDLGRQSGSIGTKQAKSPITETEDSVLEKGPAELRSREGKEENRELCASSTMPAISELSSLLREESQNEEIKPFSPKIISLESKEPPASVAEGGNPEEFQPFTFSLKGLSEEVSHPADFKKGGNQEIGPLPPTGNLKAQVMGDILDKLSEETGHPNSSQVLQSITEPSKIAPSDLLVEQKKTEKALHSDQTVKLPDVSTSSEDKQDLGIKQFSLMRENLPLEQSKSFMTTKPADVKETKMEEFFISPKDENWMLGKPENVASQHEQRIAGSVQLDSSSSNELRPGQLKAAVSSKDHTCEVRKQVLPHSAEESHLSSQEAVSALDTSSGNTETLSSKSYSSEEVKLAEEPKSLVLAGNVERNIAEGKEIHSLMESESLLLEKANTELSWPSKEDSQEKIKLPPERFFQKPVSGLSVEQVKSETISSSVKTAHFPAEGVEPALGNEKEAHRSTPPFPEEKPLEESKMVQSKVIDDADEGKKPSPEVKIPTQRKPISSIHAREPQSPESPEVTQNPPTQPKVAKPDLPEEKGKKGISSFKSWMSSLFFGSSTPDNKVAEQEDLETQPSPSVEKAVTVIDPEGTIPTNFNVAEKPADHSLSEVKLKTADEPRGTLVKSGDGQNVKEKSMILSNVEDLQQPKFISEVSREDYGKKEISGDSEEMNINSVVTSADGENLEIQSYSLIGEKLVMEEAKTIVPPHVTDSKRVQKPAIAPPSKWNISIFKEEPRSDQKQKSLLSFDVVDKVPQQPKSASSNFASKNITKESEKPESIILPVEESKGSLIDFSEDRLKKEMQNPTSLKISEEETKLRSVSPTEKKDNLENRSYTLAEKKVLAEKQNSVAPLELRDSNEIGKTQITLGSRSTELKESKADAMPQHFYQNEDYNERPKIIVGSEKEKGEEKENQVYVLSEGKKQQEHQPYSVNVAESMSRESDISLGHSLGETQSFSLVKATSVTEKSEAMLAEAHPEIREAKAVGTQPHPLEESKVLVEKTKTFLPVALSCRDEIENHSLSQEGNLVLEKSSRDMPDHSEEKEQFRESELSKGGSVDITKETVKQGFQEKAVGTQPRPLEESKVLVEKTKTFLPVVLSCHDEIENHSLSQEGNLVLEKSSRDMPDHSEEKEQFKESELWKGGSVDITKESMKEGFPSKESERTLARPFDETKSSETPPYLLSPVKPQTLASGASPEINAVKKKEMPRSELTPERHTVHTIQTSKDDTSDVPKQSVLVSKHHLEAAEDTRVKEPLSSAKSNYAQFISNTSASNADKMVSNKEMPKEPEDTYAKGEDFTVTSKPAGLSEDQKTAFSIISEGCEILNIHAPAFISSIDQEESEQMQDKLEYLEEKASFKTIPLPDDSETVACHKTLKSRLEDEKVTPLKENKQKETHKTKEEISTDSETDLSFIQPTIPSEEDYFEKYTLIDYNISPDPEKQKAPQKLNVEEKLSKEVTEETISFPVSSVESALEHEYDLVKLDESFYGPEKGHNILSHPETQSQNSADRNVSKDTKRDVDSKSPGMPLFEAEEGVLSRTQIFPTTIKVIDPEFLEEPPALAFLYKDLYEEAVGEKKKEEETASEGDSVNSEASFPSRNSDTDDGTGIYFEKYILKDDILHDTSLTQKDQGQGLEEKRVGKDDSYQPIAAEGEIWGKFGTICREKSLEEQKGVYGEGESVDHVETVGNVAMQKKAPITEDVRVATQKISYAVPFEDTHHVLERADEAGSHGNEVGNASPEVNLNVPVQVSFPEEEFASGATHVQETSLEEPKILVPPEPSEERLRNSPVQDEYEFTESLHNEVVPQDILSEELSSESTPEDVLSQGKESFEHISENEFASEAEQSTPAEQKELGSERKEEDQLSSEVVTEKAQKELKKSQIDTYCYTCKCPISATDKVFGTHKDHEVSTLDTAISAVKVQLAEFLENLQEKSLRIEAFVSEIESFFNTIEENCSKNEKRLEEQNEEMMKKVLAQYDEKAQSFEEVKKKKMEFLHEQMVHFLQSMDTAKDTLETIVREAEELDEAVFLTSFEEINERLLSAMESTASLEKMPAAFSLFEHYDDSSARSDQMLKQVAVPQPPRLEPQEPNSATSTTIAVYWSMNKEDVIDSFQVYCMEEPQDDQEVNELVEEYRLTVKESYCIFEDLEPDRCYQVWVMAVNFTGCSLPSERAIFRTAPSTPVIRAEDCTVCWNTATIRWRPTTPEATETYTLEYCRQHSPEGEGLRSFSGIKGLQLKVNLQPNDNYFFYVRAINAFGTSEQSEAALISTRGTRFLLLRETAHPALHISSSGTVISFGERRRLTEIPSVLGEELPSCGQHYWETTVTDCPAYRLGICSSSAVQAGALGQGETSWYMHCSEPQRYTFFYSGIVSDVHVTERPARVGILLDYNNQRLIFINAESEQLLFIIRHRFNEGVHPAFALEKPGKCTLHLGIEPPDSVRHK

SEQ ID NO: 246320 - DNA, 12210 bp, Artificial Sequence
  derived and/or modified sequence
atggccagccgcgatagcaaccacgccggtgagtcgttcctggggtctgatggggatgaagaggccacaagagaactggagactgaggaagagagcgagggggaggaagatgagacggcagcggagtctgaggaggagccagattccagactttcagatcaggacgaagagggcaagattaaacaggagtatatcatttcagacccatctttcagcatggtgaccgtccagcgggaagattcggggatcacctgggaaactaactctagccgttcatccactccctgggcctcggaggaaagtcagacaagcggcgtgtgctccagggaaggcagcaccgtgaatagtccgcccggcaatgtatctttcatcgtcgacgaggtgaaaaaagtcagaaaaaggacccataagagtaagcatggttctccatctttgcggcgaaaaggaaacaggaagaggaactccttcgaaagccaggatgtgcctacgaacaagaaaggtagtccgctgacctccgcgtctcaggtgttgacaacggagaaagagaaaagctacaccggtatctacgataaggccaggaaaaagaaaaccaccagtaacacccctccaatcacgggagctatttacaaggagcacaaacctctagtcctacgacccgtgtacattggaactgttcaatataagatcaagatgttcaactcggtaaaggaagaactaatccctttgcagttctatggaaccttgcctaagggctatgtgatcaaagagatacactatcgtaaaggcaaggacgccagcatctccctggagccagacctggacaactccggctcaaacaccgttagcaagacccgtaaactagttgcccagtcaatcgaagataaggtgaaggaggtgtttcctccctggcgaggagccttatctaaaggatccgaatcactgacattgatgttttcacatgaagatcagaaaaagatttacgcagactcccccctaaacgccacctcagcgctcgagcacacagtgccgtcctatagcagtagcggccgagctgagcagggcatacaactgcggcatagtcagtcagtcccacagcaacctgaggacgaagccaagcctcacgaggtggagcctcctagcgtaactccagacacccctgctaccatgttccttcggaccactaaggaagaatgtgagctcgcctctcctggcactgctgccagcgaaaatgacagttcagtctcaccgtcgtttgctaatgaggtgaaaaaagaggacgtatactccgctcatcactccataagcctcgaggccgcttcccctggtctggcagcttctacccaagatggacttgaccctgaccaggaacagcctgaccttacctcaatcgaaagagccgagccggtgtccgccaagctgactccgacacatcctagcgtcaagggtgaaaaggaggagaacatgcttgagccaagcataagcctctctgagccactgatgttggaggagccagaaaaagaggagattgagacatcccttcctatcgctattactcctgagccggaggatagtaatttggtcgaggaagaaatagtggaactggactaccctgagagccctcttgtttcggaaaagccatttccaccgcacatgagccctgaagtcgaacacaaagaggaagaactcattctgcccctgctggctgcatcttcccctgaacacgtggctctttccgaggaagaaagagaggagatcgccagcgtaagcacagggtccgccttcgttagcgagtactccgtccctcaagacctgaatcatgagttgcaggagcaagaaggagagccagttccaccgagcaacgtggaggctatcgccgagcatgcagtgctgtctgaggaggagaatgaggagttcgaggcctatagtcccgcagccgctcccacatcggagagttctctgagtccttccacaaccgagaagacctctgagaaccagagcccactctttagtaccgtgacccctgagtacatggtcctgtctggcgatgaagcctccgaaagtggttgttataccccagattctactagcgcgtctgagtactctgtgccctccctcgccacaaaggagtccctgaagaaaaccatcgaccggaagagcccactgatcttgaagggggtgtctgagtacatgatcccatctgaggaaaaggaagacaccggcagctttacccctgctgtggcccccgctagtgaaccatctctgtctccatctacgacagagaagacgtccgagtgtcagtcacctttgcccagcacagcaacctccgagcatgtggtgccaagtgagggcgaggatcttggcagcgaaaggttcacccccgacagcaagttgataagcaagtacgctgctccacttaacgccactcaggagagtcagaagaagatcatcaatgaggcctctcagtttaagcccaagggcatcagcgagcatacagtgctcagcgtggatggtaaggaagtgatcggcccttcttcgcccgaccttgtggtcgcctctgagcacagttttcctccacatactacagaaatgacaagcgagtgtcaggctcctcctctgtctgccacaccttcggagtatgtggttcttagcgacgaggaagccgttgaattagagcgctacactccgagctcaacgagtgccagcgagttctccgtccctccatacgccactcctgaggcccaggaggaggaaatcgtgcatcggtccttgaacttgaagggagcctcttcaccaatgaatctgtccgaggaagaccaagaggatattggccctttttcccccgactccgcctttgtgtcagagttcagcttccccccttatgctacccaagaggcggagaaaagagagttcgagtgcgactctccgatctgtctgacctccccttccgagcatactattctgtctgacgaggacaccgaggaagccgagctgttttctcctgacagtgctagccaggtgtccatccctccctttagaattagcgaaaccgagaagaatgaactagaaccagacagtcttctgactgccgttagcgcatccggatatagctgcttctccgaggccgatgaagaggatattggctccacagccgcgacacccgtaagcgaacaattcagttctagtcagaaacagaaagccgagacgttccctctgatgtcacccctagaagacctttctctgccccccagcactgacaagagtgagaaagcagaaatcaagcctgaaattccaacaacaagcacgagtgtgtccgagtatttgatacttgctcagaaacagaagacacaggcttatctcgagccagaatccgaagacctaattccctcccatctgacatcagaagtggaaaaaggcgagcgcgaggcttcttcctccgtggccgctattccggcggcactgcctgctcaaagttctatcgtaaaggaagagacaaagccagcttctccacactccgttctgcctgatagtgttcccgcaatcaaaaaggaacaggagccaaccgccgctctgaccctcaaggcggctgacgaacagatggccttgtctaaagtcagaaaggaagaaattgtgccagactcccaagaggcaacggcccatgtgtcccaggaccaaaagatggagcctcaaccccccaacgtgcctgagagcgagatgaaatactccgttctacccgatatggtggacgaacctaagaagggcgtgaaaccaaagctggtgctgaacgtgacttccgaactagaacagcggaagttgtccaagaacgagcctgaggtgatcaagccatatagtcccctgaaagaaacttccctcagcggtccagaggcactttccgccgtgaaaatggaaatgaagcatgacagcaaaatcactactacacccatcgttctgcattcggcttcatccggggtggaaaagcaggtggagcatggcccgccagcgctggccttttcagccctgtccgaagagattaaaaaggaaatagagccgagctctagcacgacgaccgcttctgtcaccaagttagacagtaaccttactcgggcggtaaaagaggagattcctacagattcaagcctcatcacaccagttgaccgccccgtcctgaccaaggttggcaaaggcgagctgggctccggtctcccccccctggtgacctctgccgacgaacattcagtacttgctgaggaagataaagtggcgattaagggggcttctcccatcgaaacatccagtaaacatttggcgtggtccgaagccgaaaaagagatcaaattcgatagcctgccctcagtcagctcaatcgccgaacactctgtgttgtctgaagtggaggcgaaagaagtgaaagctggtcttcctgtgattaagacctcctctagccaacactctgataaatccgaggaagccagggtagaggacaaacaagatctcctgttttccaccgtctgtgacagcgagcgcttagtttcttcacagaaaaagtccctgatgagcacctcagaagtgcttgagcccgagcacgaactgccgctaagcttatggggcgaaattaaaaagaaagagacagagctgccatcgtctcagaatgtgtctccagcttcaaagcatatcattcccaaggggaaggatgaggaaacggcctcgtcatctccagagctggaaaatctggccagcggcctggctcccaccctattattactgtctgacgacaagaacaagcccgctgtggaagtgagctccacagcccagggagattttccaagcgagaagcaggatgtggctcttgccgaactttcccttgagcccgaaaagaaagacaagccccaccaaccccttgagctccccaacgccggcagcgaattttcgagcgacttgggtcgtcagtcaggatccattggtactaagcaggctaagtcacccatcacggagaccgaggactcagttctggagaaggggcctgccgagctccgctctcgcgaaggtaaggaggagaaccgcgagctgtgcgcttcgtctactatgccagccataagcgagttgagtagcctgctccgagaggaatctcagaatgaagaaattaagccatttagtcctaagatcatcagtctcgaaagtaaagagccccctgccagtgtcgctgagggaggaaatccggaggaattccaaccctttaccttttcgctgaagggcctgtctgaggaggtctcccatcccgccgattttaagaagggagggaatcaggaaatcggtcctctgcccccaacaggcaatttgaaggcccaggtcatgggcgacattctcgacaaactttccgaagagacgggccatcctaactcctcacaggtcttgcagtcaataaccgaaccgtccaaaattgctccttcagacctgctggtggagcagaaaaagacagagaaagcacttcatagtgaccagacggtgaagctccctgatgtgagcacgagctccgaggataaacaggacttggggataaagcaattttccctgatgcgagagaatctgccccttgagcaatcaaaatcttttatgacaaccaagcccgccgacgtgaaagagacaaaaatggaggagttctttatatctcccaaagacgaaaactggatgcttgggaaacccgagaatgttgcctctcaacatgaacaaagaatcgctggcagcgtacagttagacagttcctcaagcaacgaactgagaccaggtcagctaaaggctgctgtgtcttctaaggaccatacctgcgaggtaaggaagcaggtgctcccacatagtgccgaggaaagtcacctgagcagccaggaggccgtcagcgcgctagatacatcctccgggaatactgaaacactgtcctcaaaaagctattcatccgaggaggtgaagctcgccgaggaacctaaatcactggtgctcgctgggaatgtggagcgcaatatagcggagggaaaggagatccactctcttatggagagcgaaagtcttctcctcgaaaaagcaaataccgagttgtcgtggccctcaaaagaagatagccaggagaaaataaaattgccacccgaacgattcttccagaagcctgtcagcggcctctccgtagaacaggtaaagagtgagacaatctccagtagtgtgaagacggcccacttcccagccgaaggagtagagccagctttgggcaatgaaaaggaagcccatcgcagcaccccgccattccctgaggagaaacccctggaggagtccaagatggtgcagtccaaggtaatcgatgacgcagacgaagggaaaaaaccttctcctgaagtgaagattcctacgcaacgaaaacccatcagctctatacacgctcgggagcctcagagtccggaatcgcctgaggtgactcagaaccctcccactcaacccaaagtagctaagcccgatctgccggaggagaagggcaagaagggcatcagcagctttaagagctggatgtctagcctcttctttggctctagtactccagataataaggttgctgagcaggaggatctcgagacccagcctagtcccagcgtggagaaagctgtcactgtcatcgaccccgagggaaccattcctacaaatttcaacgtagcagaaaaaccagcagaccactcactgagcgaggtgaaactgaaaactgccgacgagcctagggggaccctggtaaaatcaggagatggacagaacgttaaagagaagtcgatgattcttagtaatgtagaggatttgcagcaacctaagtttatttctgaggtctcccgagaggattacgggaaaaaagagatatccggcgactctgaagagatgaacattaatagtgtggtgacttcagccgacggcgaaaacttagagatccagtcatactctctgatcggagaaaaactggtgatggaggaggccaaaacaattgtgcccccacatgtgaccgattccaaacgggtgcagaaacctgctatcgctcccccgtccaaatggaacatctcaatttttaaggaagaaccccgcagcgaccagaagcagaaatctctcctgagcttcgacgttgtcgataaggtgccacagcagccgaagtccgcttcctctaattttgcgtcaaaaaacatcactaaagagtctgaaaagccagagtcgatcatccttcccgttgaggaatctaagggatcactgatcgattttagcgaagatcggctgaaaaaggagatgcagaaccccacaagcctgaaaatttccgaggaggagaccaaattgcgttctgtttcacctacagagaagaaggataatcttgaaaaccggtcttatacactcgccgagaaaaaggttcttgctgagaaacagaattctgtcgctccgctggagctccgcgacagcaatgagatcggaaagacacagataaccctcgggtccaggtcaacagagctgaaagaaagtaaggcagacgccatgccacagcacttttaccaaaacgaggattacaatgagcgccccaagatcatcgtcggttcggagaaagagaagggcgaagagaaagaaaaccaggtgtacgtccttagcgaaggaaagaagcaacaagaacaccagccgtactccgtcaatgtggctgagtccatgagtcgggagagcgacattagtctgggccattccctgggtgagacgcagagtttctcactagtcaaagccacctctgttaccgagaaaagtgaagcaatgttagccgaggcacatccggagatccgcgaggctaaggccgtgggcacgcagcctcatcccctggaggagtccaaagtgctagtagaaaagaccaaaaccttcttgcccgttgctctgagctgccgggatgagattgagaatcactctctatctcaggagggtaacctggtgctggagaagagctctagggatatgcccgatcatagcgaggagaaggagcaatttagggagagtgaactcagcaaagggggatccgtggatataaccaaagaaactgtcaagcaaggctttcaagaaaaagctgttggtacgcagcctagacctctcgaggaaagcaaagtactcgtcgaaaaaaccaaaacttttctgcccgtggtgctctcttgtcacgacgaaatcgaaaaccacagcttaagccaggaaggaaacctggtattggagaaatcttccagggacatgccagatcactccgaggaaaaagagcagttcaaagaaagcgagctgtggaaggggggaagcgttgatataaccaaggagtcaatgaaggaagggttcccaagcaaagagtcagaacgaaccctcgcgcggcccttcgacgaaaccaaatcctccgagacaccaccctatctgctgtctccagtgaaacctcaaaccctggcctccggggccagtcccgagattaacgctgttaagaaaaaagaaatgccccgttcagagctgaccccggagcggcatacggtacacactatccagacaagtaaagatgatactagcgacgttcccaaacagtcggtcttagtttctaaacatcatttagaagccgcagaggatacacgtgtcaaagagccgttgtcttccgccaagagcaattatgctcagtttattagtaacaccagcgccagcaacgcggataagatggtgtcaaacaaggagatgcccaaagaacctgaggatacttacgctaagggtgaggatttcacagtgactagcaagcccgcaggattgagcgaggaccaaaagactgccttctcaataatctctgagggttgtgaaatacttaatatccatgcacccgcatttatttcctccatcgaccaggaagaaagtgagcagatgcaggacaaactcgagtacttggaagaaaaagcatctttcaagactattcccttgccagatgacagcgagacagtcgcttgccataaaaccctaaagagtcgcctggaggacgagaaagtcacaccgcttaaagaaaacaaacaaaaggagactcacaagacaaaggaagaaattagtacagattcagagactgacctgtcgttcatccagcccactatccccagtgaagaggactattttgagaaatacactctaatcgattacaatataagccctgaccccgaaaaacaaaaagcaccccagaaactgaatgtggaggagaaattgagcaaggaggtgacggaagaaacaattagctttcccgttagctcggtggagagcgcactggagcacgaatatgatctagtgaagctggatgagtcgttctacgggccggaaaagggccacaatatcctgagtcacccagagacacagtctcaaaactctgcggaccgcaacgtatctaaggatacaaagagagacgtggactctaagagccctggtatgcctctattcgaggcggaggagggcgtcctctcccggactcagatatttccaaccactattaaagtgatcgatcccgagtttttggaggaaccccccgccttggcgtttctgtataaagatttgtatgaggaggcagtgggcgagaaaaaaaaggaggaggagaccgctagcgaaggtgatagcgttaatagcgaggcaagctttccttcaagaaactccgacactgatgatggcactgggatttatttcgagaagtatatactcaaggatgatatactccacgacacatctctgacacagaaagaccagggacagggcttggaggagaaacgagtcgggaaagatgactcatatcagccaattgcggcagaaggcgagatctgggggaaatttgggaccatatgcagagaaaagtccttagaagagcaaaaaggagtatatggtgagggggagtccgtcgatcacgtcgagacggtcggcaacgtggccatgcaaaagaaagccccaataacagaggacgtccgggtcgccacccaaaaaatcagctatgccgtgccctttgaggatacacatcatgtccttgagagagctgatgaggccggctcccacggaaacgaagttggcaatgcaagccctgaagtgaacctgaacgtgcccgttcaggtaagtttccccgaagaagagttcgccagcggcgccacgcatgtgcaggaaacttccttggaagagcccaagatcctggtgccaccagagcccagcgaggagcggctaaggaacagtccagtccaggacgagtatgaatttactgagagtctgcacaacgaagtggtgccgcaggacatcctgtcagaggagttatcgtcagagtcgacccctgaagacgttctgtcccagggtaaagagtcttttgaacatataagcgagaacgagttcgcaagtgaagctgaacagtccacaccagccgagcagaaagagttgggttctgaacggaaagaagaagatcagcttagctctgaagttgttacggagaaggcccagaaagagctcaaaaagagtcagatcgatacctattgctatacatgcaagtgcccaatcagcgccacagacaaagtgtttggaactcacaaggatcacgaggtgtccactctggacacggctatctcggcggtcaaagtgcagctcgcggagttcctggagaatctccaggagaaatctctcaggattgaggccttcgtgtctgaaatcgaaagtttcttcaatacaattgaggaaaattgctctaaaaatgagaaaaggctcgaagagcagaatgaggaaatgatgaagaaggtgctggcccagtacgacgagaaagcccaatcattcgaggaggtgaaaaagaagaaaatggaattcctccatgagcagatggtgcattttctgcagtcaatggatacagcaaaagacaccctggagactattgtgcgcgaagcggaggagctcgacgaggctgtgtttctgacatcctttgaggagattaacgagagacttctgagcgcaatggaaagcacggcatcattggaaaagatgccggcagcctttagcctgtttgaacattatgatgatagtagtgcacggtcagaccaaatgctgaaacaagttgccgtccctcagccccctagattagaacctcaggaacctaatagcgcaacatctaccaccattgctgtgtactggtccatgaataaggaggacgtcatcgactcctttcaggtgtactgtatggaggaaccccaggatgaccaggaggtgaatgagctggtagaagagtaccggctgacggtgaaggaatcctattgcatctttgaagatcttgagccagacagatgctaccaagtctgggttatggcggtcaactttaccggttgctcattaccgagcgagcgagctatttttaggaccgcgccgagcacacccgtgatccgggcggaagactgtaccgtgtgctggaataccgccaccattagatggagaccaaccacacctgaggctacagagacttatacactggaatactgtaggcagcactctcccgaaggcgaaggcctcagatcatttagtgggatcaaagggctgcaactgaaggtgaacctccagccaaatgacaactacttcttttacgtgcgtgctatcaacgcttttggaacatcggagcaatccgaggccgctctgattagcactcgcggcacgagatttctactcttgagggagaccgcccatcccgcacttcatatcagctcaagtggcacggtcatcagttttggggagcgcaggagattgaccgaaatccctagtgttctaggcgaggagcttccctcgtgcgggcagcactattgggagacaactgttactgactgtccagcgtatcgcctggggatttgcagttcctctgctgtgcaagcaggagcactggggcaaggtgaaacgtcatggtatatgcactgctctgagccacagcgctacacattcttctattccggtattgtttccgatgttcatgttacggaacgaccagctcgcgttggtatcctgctagactataacaatcaacgtctgatattcatcaacgccgagagcgagcaactgctgttcattattcgccataggttcaatgagggcgtgcaccctgccttcgccctggagaaaccggggaagtgtacactccatctaggaatcgaaccaccggacagcgtaagacataagtag

SEQ ID NO: 246321 - DNA, 12210 bp, Artificial Sequence
  derived and/or modified sequence
atggccagccgggacagcaaccacgccggggagagcttcctgggcagtgatggagatgaggaggccacccgggagctggagacagaggaggagagcgagggggaggaggatgaaacagctgctgagagcgaggaggagccagacagccggctgagtgaccaggatgaggagggcaagatcaagcaggagtacatcatcagtgaccccagcttctccatggtgacagtgcagagagaagattctggcatcacctgggagaccaacagcagccgcagcagcaccccctgggccagcgaggagagccagaccagcggcgtgtgcagccgggagggcagcacagtgaacagccccccaggaaatgtgtccttcatcgtggatgaggtgaagaaggtgaggaagaggacccacaagagcaagcacggcagccccagcctgcggaggaagggcaacaggaagagaaattcctttgagagccaggatgtgcccaccaacaagaagggcagccccctgaccagcgccagccaggtgctgaccacagagaaggagaagagctacacaggcatctatgacaaggccaggaagaagaagaccaccagcaacaccccacccatcactggagccatctacaaggagcacaagcccctggtgctgcggcctgtgtacatcggcaccgtgcagtacaagatcaagatgttcaacagcgtgaaggaggagctgatccccctgcagttctacggcaccctgcccaagggctacgtgatcaaggagatccactacaggaagggcaaggatgccagcatcagcctggagccagacctggacaacagcggcagcaacacagtgtccaagaccaggaagctggtggcccagagcattgaggacaaggtgaaggaggtgtttcctccctggaggggggccctgagcaaaggaagtgagagcctgaccctgatgttcagccatgaggaccagaagaagatctatgctgacagccccctgaatgccaccagcgccctggagcacacagtgcccagctacagcagcagcggccgggcagagcagggcatccagctgcggcacagccagagcgtgccccagcagccagaagatgaggccaagccccatgaggtggagccccccagcgtgaccccagacaccccagccaccatgttcctgcggaccaccaaggaggagtgtgagctggccagccctggaacagctgcctctgaaaatgacagctctgtgagccccagctttgccaatgaggtgaagaaggaggatgtgtacagcgcccaccacagcatcagcctggaggccgccagccctggcctggccgccagcacccaggacggcctggaccctgaccaggagcagcctgacctgaccagcattgagcgggcagagcctgtgtctgccaagctgacccccacccaccccagcgtgaagggggagaaggaggagaacatgctggagcccagcatcagcctgtctgagcccctgatgctggaggagcctgagaaggaggagattgagaccagcctgcccatcgccatcaccccagagcctgaggacagcaacctggtggaggaggagatcgtggagctggactacccagagagccccctggtgtctgagaagcccttccccccccacatgagccctgaggtggagcacaaggaggaggagctgatcctgcccctgctggccgccagcagccctgagcacgtggccctgtctgaggaggagcgggaggagatcgcctctgtgtccacaggcagcgcctttgtgtctgagtacagcgtgccccaggacctgaaccacgagctgcaggagcaggagggggagcctgtgccccccagcaatgtggaggccatcgccgagcacgctgtgctgtctgaggaggagaatgaggagtttgaggcctacagccctgctgctgcccccaccagcgagagcagcctgagccccagcaccacagagaagaccagcgagaaccagagccccctcttcagcacagtgaccccagagtacatggtgctgtctggagatgaggccagcgagagcggctgctacaccccagacagcaccagcgccagcgagtacagcgtgcccagcctggccaccaaggagagcctgaagaagaccatcgacaggaagagccccctcatcctgaagggcgtgtctgagtacatgatccccagcgaggagaaggaggacaccggcagcttcaccccagctgtggccccagccagcgagcccagcctgagccccagcaccacagagaagaccagcgagtgccagagccccctgcccagcacagccaccagcgagcacgtggtgcccagcgagggggaggacctgggcagcgagcgcttcaccccagacagcaagctgatcagcaaatatgctgcccccctgaatgccacccaggagagccagaagaagatcatcaatgaggccagccagttcaagcccaagggcatcagcgagcacacagtgctgtctgtggatggcaaggaggtgattggccccagcagcccagacctggtggtggccagcgagcacagcttccccccccacaccacagagatgaccagcgagtgccaggccccacccctgagcgccaccccatctgaatatgtggtgctgagtgatgaggaggccgtggagctggagcgctacacccccagcagcaccagcgccagcgagttctctgtgcccccctatgccaccccagaggcccaggaggaggagatcgtgcacaggagcctgaacctgaagggggccagcagccccatgaacctgtctgaggaggaccaggaggacatcggccccttctccccagattctgcctttgtgtctgagttctccttccccccctatgccacccaggaggccgagaagcgggagtttgaatgtgacagccccatctgcctgaccagccccagcgagcacaccatcctgagtgatgaggacacagaggaggccgagctgttctccccagacagcgccagccaggtgtccatcccccccttccgcatcagcgagacagagaagaatgagctggagccagacagcctgctgacagctgtgtctgccagcggctacagctgcttcagcgaggctgatgaggaggacatcggcagcacagctgccacccctgtgtctgagcagttcagcagcagccagaagcagaaggccgagaccttccccctgatgagccccctggaggacctgagcctgccccccagcacagacaagtctgagaaggccgagatcaagccagagatccccaccaccagcacctctgtgtctgagtacctgatcctggcccagaagcagaagacccaggcctacctggagcctgagagcgaggacctgatccccagccacctgaccagcgaggtggagaagggggagcgggaggccagcagctctgtggccgccatcccagctgccctgcctgcccagagcagcatcgtgaaggaggagaccaagccagccagcccccacagcgtgctgcctgacagcgtgcctgccatcaagaaggagcaggagcccacagctgccctgaccctgaaggctgctgatgagcagatggccctgagcaaggtgaggaaggaggagatcgtgcctgacagccaggaggccacagcccacgtgtcccaggaccagaagatggagccccagccccccaacgtgcctgagagcgagatgaagtacagcgtgctgcctgacatggtggatgagcccaagaagggcgtgaagcccaagctggtgctgaatgtgaccagcgagctggagcagaggaagctgagcaagaatgaacctgaggtgatcaagccctacagccccctgaaggagaccagcctgagcggccctgaggccctgtctgctgtgaagatggagatgaagcatgacagcaagatcaccaccacccccatcgtgctgcacagcgccagcagtggagtggagaagcaggtggagcacggccccccagccctggccttcagcgccctgtctgaggagatcaagaaggagattgagcccagcagcagcaccaccacagcctctgtgaccaagctggacagcaacctgaccagggctgtgaaggaggagatccccacagacagcagcctcatcacccctgtggacaggcctgtgctgaccaaggtgggcaaaggagagctgggcagcggcctgccccccctggtgaccagcgcagatgagcacagcgtgctggccgaggaggacaaggtggccatcaagggggccagccccatcgagaccagcagcaagcacctggcctggagcgaggccgagaaggagatcaagtttgacagcctgcccagcgtgagcagcattgctgagcacagcgtgctgtctgaggtggaggccaaggaggtgaaggccggcctgcctgtgatcaagaccagcagcagccagcacagcgacaagtctgaggaggcccgggtggaggacaagcaggacctgctcttcagcacagtgtgtgacagcgagcggctggtgagcagccagaagaagagcctgatgagcaccagcgaggtgctggagcctgagcacgagctgcccctgagcctgtggggcgagatcaagaagaaggagacagagctgcccagcagccagaatgtgtccccagccagcaagcacatcatccccaagggcaaggatgaggagacagccagcagcagccctgagctggagaacctggccagcggcctggcccccaccctgctgctgctgagtgatgacaagaacaagccagctgtggaggtgagcagcacagcccagggcgacttccccagcgagaagcaggatgtggccctggccgagctgagcctggagcctgagaagaaggacaagccccaccagcccctggagctgcccaatgccggcagcgagttcagcagtgacctgggccggcagagcggcagcatcggcaccaagcaggccaagagccccatcacagaaacagaagattctgtgctggagaagggccctgctgagctgcggagccgggagggcaaggaggagaaccgggagctgtgtgccagcagcaccatgcctgccatcagcgagctgagcagcctgctgcgggaggagagccagaatgaggagatcaagcccttcagccccaagatcatcagcctggagagcaaggagcccccagcctctgtggccgagggcggcaaccctgaggagttccagcccttcaccttcagcctgaagggcctgtctgaggaggtgagccaccctgctgacttcaagaagggcggcaaccaggagatcggccccctgcccccaactggaaacctgaaggcccaggtgatgggagacatcctggacaagctgtctgaggagaccggccaccccaacagcagccaggtgctgcagagcatcacagagcccagcaagatcgcccccagcgacctgctggtggagcagaagaagacagagaaggccctgcacagcgaccagacagtgaagctgcctgatgtgtccaccagcagcgaggacaagcaggacctgggcatcaagcagttcagcctgatgagggagaacctgcccctggagcagagcaagagcttcatgaccaccaagccagcagatgtgaaggagaccaagatggaggagttcttcatcagccccaaggatgagaactggatgctgggcaagccagaaaatgtggccagccagcacgagcagagaattgctggctctgtgcagctggacagcagcagcagcaatgagctgcggcccggccagctgaaggctgctgtgagcagcaaggaccacacctgtgaggtgaggaagcaggtgctgccccacagcgctgaggagagccacctgagcagccaggaggccgtgtctgccctggacaccagcagcggcaacacagagaccctgagcagcaagagctacagcagcgaggaggtgaagctggccgaggagcccaagagcctggtgctggccggaaatgtggagaggaacattgctgagggcaaggagatccacagcctgatggagagcgagagcctgctgctggagaaggccaacacagagctgtcctggcccagcaaggaggacagccaggagaagatcaagctgcccccagagcgcttcttccagaagcctgtgtctggcctgtctgtggagcaggtgaagtctgagaccatcagcagctctgtgaagacagcccacttccctgctgagggcgtggagcccgccctgggcaatgagaaggaggcccacaggagcaccccacccttccctgaggagaagcccctggaggagagcaagatggtgcagagcaaggtgattgatgatgctgatgagggcaagaagcccagccctgaggtgaagatccccacccagaggaagcccatcagcagcatccacgcccgggagccccagagccctgagagccctgaggtgacccagaacccccccacccagcccaaggtggccaagccagacctgcctgaggagaagggcaagaagggcatcagcagcttcaagtcctggatgagcagcctcttcttcggcagcagcaccccagacaacaaggtggccgagcaggaggacctggagacccagcccagccccagcgtggagaaggctgtgacagtgattgatcctgagggcaccatccccaccaacttcaacgtggccgagaagccagctgaccacagcctgtctgaggtgaagctgaagacagcagatgagccccggggcaccctggtgaagtctggagatggccagaatgtgaaggagaagtccatgatcctgagcaatgtggaggacctgcagcagcccaagttcatcagcgaggtgtccagagaagattatggcaagaaggagatcagcggggacagcgaggagatgaacatcaacagcgtggtgaccagcgcagatggagagaacctggagatccagagctacagcctgattggagagaagctggtgatggaggaggccaagaccatcgtgccccctcatgtgacagacagcaagagggtgcagaagccagccatcgccccacccagcaagtggaacatcagcatcttcaaggaggagcccaggagtgaccagaagcagaagagcctgctgagctttgatgtggtggacaaggtgccccagcagcccaagagcgccagcagcaactttgccagcaagaacatcaccaaggagagcgagaagccagagagcatcatcctgcctgtggaggagagcaagggcagcctgattgacttcagcgaggaccggctgaagaaggagatgcagaaccccaccagcctgaagatcagcgaggaggagaccaagctgcggtctgtgagccccacagagaagaaggacaacctggagaacagaagctacaccctggccgagaagaaggtgctggccgagaagcagaacagcgtggcccccctggagctgcgggacagcaatgaaattggcaagacccagatcaccctgggcagccgcagcacagagctgaaggagagcaaggcagatgccatgccccagcacttctaccagaatgaagactacaatgaaagacccaagatcatcgtgggcagcgagaaggagaagggggaggagaaggagaaccaggtgtatgtgctgtctgagggcaagaagcagcaggagcaccagccctacagcgtgaatgtggccgagagcatgagccgggagagtgacatcagcctgggccacagcctgggggagacccagagcttcagcctggtgaaggccacctctgtgacagagaagtctgaggccatgctggccgaggcccaccctgagatccgggaggccaaggctgtgggcacccagccccaccccctggaggagagcaaggtgctggtggagaagaccaagaccttcctgcctgtggccctgagctgcagagatgaaattgagaaccacagcctgagccaggagggcaacctggtgctggagaagagcagccgggacatgccagaccacagcgaggagaaggagcagttccgggagagcgagctgagcaaaggaggctctgtggacatcaccaaggagaccgtgaagcagggcttccaggagaaggctgtgggcacccagccccggcccctggaggagagcaaggtgctggtggagaagaccaagaccttcctgcctgtggtgctgagctgccatgatgaaattgagaaccacagcctgagccaggagggcaacctggtgctggagaagagcagccgggacatgccagaccacagcgaggagaaggagcagttcaaggagagcgagctgtggaagggcggctctgtggacatcaccaaggagagcatgaaggagggcttccccagcaaggagagcgagaggaccctggcccggccctttgatgagaccaagagcagcgagaccccaccctacctgctgagccctgtgaagccccagaccctggccagcggggccagccctgagatcaatgctgtgaagaagaaggagatgcccaggtctgagctgaccccagagcggcacacagtgcacaccatccagaccagcaaggatgacaccagtgatgtgcccaagcagagcgtgctggtgtccaagcaccacctggaggccgctgaggacaccagggtgaaggagcccctgagcagcgccaagagcaactatgcccagttcatcagcaacaccagcgccagcaatgctgacaagatggtgagcaacaaggagatgcccaaggagcctgaggacacctacgccaagggggaggacttcaccgtgaccagcaagccagctggcctgtctgaggaccagaagacagccttcagcatcatcagcgagggctgtgagatcctgaacatccacgccccagccttcatcagcagcattgaccaggaggagagcgagcagatgcaggacaagctggagtacctggaggagaaggccagcttcaagaccatccccctgcctgatgattctgaaacagtggcctgccacaagaccctgaagagccggctggaggatgagaaggtgacccccctgaaggagaacaagcagaaggagacccacaagaccaaggaggagatcagcacagattctgaaacagacctgtccttcatccagcccaccatccccagcgaggaggactactttgagaagtacaccctgattgactacaacatcagcccagaccctgagaagcagaaggccccccagaagctgaatgtggaggagaagctgagcaaggaggtgacagaggagaccatctccttccctgtgtcctctgtggagagcgccctggagcacgagtatgacctggtgaagctggatgagagcttctacggccctgagaagggccacaacatcctgagccaccctgagacccagagccagaacagcgctgacagaaatgtgtccaaggacaccaagagagatgtggacagcaagagccctggcatgcccctgtttgaggccgaggagggcgtgctgagcaggacccagatcttccccaccaccatcaaggtgattgatcctgagttcctggaggagcccccagccctggccttcctgtacaaggacctgtatgaggaggccgtgggggagaagaagaaggaggaggagacagccagcgagggggacagcgtgaacagcgaggccagcttccccagcaggaacagcgacacagatgatggcaccggcatctactttgagaagtacatcctgaaggatgacatcctgcatgacaccagcctgacccagaaggaccagggccagggcctggaggagaagagggtgggcaaggatgacagctaccagcccatcgctgctgagggggagatctggggcaagtttggcaccatctgccgggagaagagcctggaggagcagaagggcgtgtatggagagggggagagcgtggaccacgtggagaccgtgggcaatgtggccatgcagaagaaggcccccatcacagaagatgtgcgggtggccacccagaagatctcctatgctgtgccctttgaggacacccaccacgtgctggagcgggcagatgaagctggcagccacggcaatgaggtgggcaatgccagccctgaggtgaacctgaatgtgcctgtgcaggtgtccttccctgaggaggagtttgccagcggggccacccacgtgcaggagaccagcctggaggagcccaagatcctggtgcccccagagcccagcgaggagcggctgaggaacagccctgtgcaggatgaatatgagttcacagagagcctgcacaatgaggtggtgccccaggacatcctgtctgaggagctgagcagcgagagcaccccagaagatgtgctgagccagggcaaggagagctttgagcacatcagtgaaaatgaatttgccagcgaggccgagcagagcaccccagctgagcagaaggagctgggcagcgagaggaaggaggaggaccagctgagcagcgaggtggtgacagagaaggcccagaaggagctgaagaagagccagattgacacctactgctacacctgcaagtgccccatcagcgccacagacaaggtgtttggcacccacaaggaccacgaggtgtccaccctggacacagccatctctgctgtgaaggtgcagctggccgagttcctggagaacctgcaggagaagagcctgagaattgaggcctttgtgtctgaaattgagagcttcttcaacaccatcgaggagaactgcagcaagaatgagaagaggctggaggagcagaatgaggagatgatgaagaaggtgctggcccagtatgatgagaaggcccagagctttgaggaggtgaagaagaagaagatggagttcctgcacgagcagatggtgcacttcctgcagagcatggacacagccaaggacaccctggagaccatcgtgcgggaggccgaggagctggatgaggccgtgttcctgaccagctttgaggagatcaatgaaaggctgctgagcgccatggagagcacagccagcctggagaagatgcctgctgccttcagcctgtttgagcactatgatgacagcagcgcccggagtgaccagatgctgaagcaggtggccgtgccccagcccccccggctggagccccaggagcccaacagcgccaccagcaccaccatcgctgtgtactggagcatgaacaaggaggatgtgattgacagcttccaggtgtactgcatggaggagccccaggatgaccaggaggtgaatgagctggtggaggagtaccgcctgactgtgaaggagagctactgcatctttgaggacctggagccagaccgctgctaccaggtgtgggtgatggctgtgaacttcaccggctgcagcctgcccagcgagcgggccatcttcagaacagcccccagcacccctgtgatccgggcagaggactgcaccgtgtgctggaacacagccaccatccgctggaggcccaccaccccagaggccacagagacctacaccctggagtactgccggcagcacagccctgagggggagggcctgcgctccttcagcggcatcaagggcctgcagctgaaggtgaacctgcagcccaatgacaactacttcttctacgtgcgggccatcaatgccttcggcaccagcgagcagagcgaggccgccctgatcagcacccggggcacccgcttcctgctgctgcgggagacagcccacccagccctgcacatcagcagcagcggcaccgtcatcagctttggagagcggcggcggctgacagagatccccagcgtgctgggggaggagctgcccagctgtggccagcactactgggagaccaccgtgacagactgcccagcctaccgcctgggcatctgcagcagcagcgctgtgcaggccggggccctgggccagggcgagacctcctggtacatgcactgcagcgagccccagcgctacaccttcttctacagcggcatcgtgtctgatgtgcacgtgacagagaggcctgcccgggtgggcatcctgctggactacaacaaccagaggctcatcttcatcaatgctgagagcgagcagctgctcttcatcatccgccaccgcttcaatgaaggagtgcacccagcctttgccctggagaagccaggcaagtgcaccctgcacctgggcatcgagcccccagattctgtgcgccacaagtag

SEQ ID NO: 246322 - DNA, 12210 bp, Artificial Sequence
  derived and/or modified sequence
atggccagccgggacagcaaccacgccggcgagagcttcctgggctctgacggtgacgaagaggcaactcgggaacttgagactgaggaagaatccgaaggcgaggaagacgaaactgccgccgagtctgaggaagagcctgatagtaggctgagcgaccaggacgaggaagggaaaatcaagcaggagtacatcattagtgaccctagtttctccatggtgaccgtgcagcgcgaagatagtgggatcacatgggagacaaacagctccaggtcctctacaccttgggcctccgaagaatcacagacatccggggtctgctcccgcgaaggatctacggtaaactccccccctggtaatgtttcatttattgtggatgaagtcaaaaaagtgcgcaaacgaacgcataagtccaaacacggttcaccaagtttgaggcgaaaaggaaaccgaaagcgaaattcattcgaatctcaagatgtgcctacaaacaagaaaggatccccccttaccagcgcctctcaggtgctgaccactgaaaaggaaaaatcctatacggggatttacgataaagcgagaaagaagaaaacaacttcaaatacacctccgataacaggagccatttacaaagagcataagccactggtcttgcgtcctgtttatatcggcacagtgcagtacaagatcaagatgttcaattcagtgaaggaggaactgattcccctccagttttacggaacattgcctaaaggatatgtgattaaggagattcattatagaaaagggaaggacgcatcaatcagcctggaacccgacctggataatagcggctccaacaccgtatcaaaaacgcgcaagctggtcgcacagtctattgaggataaagtcaaggaggtgtttccaccctggcggggggccctctccaagggaagcgagagcttgacattaatgttttctcatgaagaccagaaaaaaatctatgccgactctccactgaatgcaacctccgcactggagcatacggtgccttcctattcatcctcaggaagggccgaacaggggattcaattgcggcacagccaatctgtgccacagcagccggaagacgaagcgaaaccacacgaagtggaacctccttccgttacgccagataccccagctactatgttcctgcggaccacaaaggaagaatgtgagctggcaagtcccgggaccgccgcatcggagaacgattcttccgtgtctccgagctttgccaacgaggttaagaaagaggatgtctactcagcccatcacagcatctctcttgaggctgccagccctggtttggcagcctccacacaggatggcctggaccctgaccaggagcagcctgatctgacctctatagaaagagccgagcccgtgtctgccaaattaacacccacacaccctagcgtcaagggcgagaaagaggagaatatgctcgagccaagcatttctctttcagaacctctgatgctggaggaacctgaaaaggaggagattgagacaagccttcccattgcaattactcctgagccagaggacagcaatctggtggaagaggagatagtcgaactggattatcccgagtcaccactggtgtcagagaagccctttcccccccacatgagtcctgaggtcgagcacaaggaagaggaattaatccttcccctcttagccgcatcctcgccagagcacgtggccctgagtgaggaagagagagaggagatcgcctcagtgtccaccggctctgccttcgtgagcgagtacagcgtgcctcaggatctgaatcacgagctccaggagcaggagggcgaacccgtcccaccttcaaacgtggaagcgatcgccgaacatgccgtcctttctgaggaggagaacgaggaatttgaggcttactcgcctgccgcagcacctacctctgagtccagcttatcaccctccaccacagagaagacctctgaaaaccagagtcccctcttcagcacagtgacacctgaatatatggtgctttccggagacgaggcaagtgagagcggatgctacactcctgattctacctcagcctctgaatatagcgtgccatcacttgcaactaaagagagtctgaaaaagaccattgataggaaaagtcccttgattctcaagggcgtgtccgaatatatgatcccctcggaagagaaggaggataccggctcattcacaccagcagtagcgcccgccagcgagccatctctgtctccgagcacaaccgagaaaactagtgagtgccagtccccacttccctcgacagcaaccagcgagcacgtggtgccgtcagagggcgaagacctcggctccgaacggtttactccagatagtaagttgatcagtaaatacgccgctcctttgaacgcaacacaagagtcccagaaaaaaattattaatgaggcctcacaatttaaaccaaagggaatttcagagcataccgtcctctctgtggatgggaaggaggttatcggaccctcctctcccgatctggtcgtagcatccgaacactcctttcctccccatactacagagatgacgagcgagtgccaagcccccccgttgagtgctacccccagcgaatatgtggtactgtcagatgaagaggccgtggagcttgaacggtataccccctcctctacctccgcttcagaatttagcgtcccaccctatgccaccccagaagcacaagaggaagagatcgtacaccgctctttgaacttgaagggagcatcgtcccctatgaatctgtccgaggaagatcaagaggacatcggcccattcagcccagacagcgcttttgttagcgagttctcatttcccccttatgccacccaggaagctgagaagcgggagttcgaatgtgattcccccatttgtctgacttccccctccgaacataccatccttagtgatgaggacacggaagaagccgaactgtttagccccgacagcgcaagccaggtgtctattccaccatttcggatttccgagacagaaaaaaatgaactggaaccagacagcttacttacggcagtaagcgcgtctggatattcatgcttctccgaggccgatgaagaggacattggcagcaccgcggcgacgccagtttctgagcagttttcctccagtcagaaacagaaagccgagaccttcccactgatgtccccactggaagaccttagtttacctccaagcacagacaagagcgaaaaagctgagatcaagcccgagattccaactaccagcacctcagttagcgagtaccttattctggcacagaaacaaaaaacccaggcatatctcgagccggagagtgaagacctcattccaagtcaccttacaagcgaggtggagaaaggcgaacgggaggcctcctcctccgtcgcagcgataccagcggcactgcctgcgcagtccagcatagtcaaagaggaaacaaaaccagcttccccacattcagtgctcccagattctgttccagcaatcaaaaaggaacaggagccaaccgccgcccttactcttaaagcggcagatgaacagatggcactgagcaaagtccggaaggaagaaatcgttccggatagtcaggaagcaactgcacacgttagccaggatcagaaaatggagccacagccacccaacgtacctgagagcgaaatgaagtattctgttctgcctgacatggtcgacgagccaaagaagggcgtcaagcctaagctggtgttgaacgttacttctgaactggaacaacgcaaactgtctaaaaatgaaccggaggtgatcaagccctactcaccattaaaggagacctctctcagcggtcctgaagcgctatcagccgtcaagatggaaatgaaacatgactccaagataactactactcctattgtgctacatagtgcttcaagcggcgtagaaaagcaggtagagcacggccctcccgcactggcgtttagtgcattatcagaggagattaaaaaggagattgagcccagctcatcaacaacaactgcctctgtgactaagctcgactctaatctcaccagggccgtgaaagaagaaattccaacagattcgtctctgataactcctgtggatcggcccgttctaaccaaggtgggcaaaggggagctggggtccgggctgccgccattggtgacatctgcagacgagcattcagtgctggccgaagaggacaaggtggctattaagggcgcctcgcccattgagacatctagcaaacatctcgcctggagcgaagctgagaaggagataaaattcgactccttgccatccgtaagcagcatcgccgagcattccgtgttgtcagaagtggaggcaaaggaagtgaaggcagggctgcccgtcattaagacaagctctagtcagcatagtgacaagtccgaggaggcgcgagttgaggataagcaagacctgctcttttccacggtgtgtgactctgagaggttggtgtcatcccagaaaaagagcctgatgtcaacaagcgaggtgctcgaacccgagcacgaactcccactgtccctgtggggagaaattaaaaagaaagaaaccgagcttccgtcctctcagaatgtgtcgcccgcttctaagcacattattccaaagggtaaagatgaggagactgcctcctcctctcccgaactcgagaatttagcctctggtttagctcccactttactgcttctatcagatgataaaaacaaacccgccgtggaagtgagctctacagcccagggagacttcccaagcgagaagcaggatgtcgcactggcagagctcagcctggaaccagagaaaaaagacaagcctcatcagccacttgagctgcccaatgccggttccgaattttcgtccgatttggggaggcagtccggcagcatcggtactaaacaggcgaaaagccccatcaccgaaactgaagatagcgtgctggaaaagggtcctgccgagttaagatctcgcgaagggaaggaggagaatagggaactgtgcgcctcttcaaccatgccagccatcagtgaacttagcagtctgctgcgggaggaatcccagaatgaggagataaagcctttcagccccaagatcatcagccttgagagcaaggagccaccggcatctgtagcagagggagggaatccggaagaattccaaccctttacattttccctcaagggtttatcagaggaggtgagccatcctgcggactttaagaagggcggaaaccaggaaatcggccctctgccacccactggcaacctcaaagcacaggtcatgggcgacatcctggataaattgtcggaggagaccgggcacccaaactcttcccaagtacttcaatccattactgaaccaagtaaaatcgcaccttctgatctgcttgtggaacagaagaaaaccgagaaggctctgcatagtgatcagaccgtgaaacttcctgatgtgagtacttccagcgaagataagcaagatctaggcattaagcagttctctctgatgcgagaaaatctgcctcttgagcaatccaagagcttcatgactactaaaccagccgatgttaaggaaaccaaaatggaggagttcttcatcagtccaaaggacgaaaactggatgctcggtaaaccagagaatgtggcctcacagcatgagcaaaggattgcagggtccgtccagctggactctagcagttccaatgaattgaggccggggcagctgaaagcggcggtgtcttctaaggaccatacttgcgaagtgagaaagcaggtgctgcctcactccgccgaggaaagccatctgagtagccaagaagctgtgagtgccctcgacaccagcagcggtaatactgagactctgagctcaaagagttactcatcagaagaagtaaaactcgcagaagagccgaaaagcttagtgctggctggcaatgtcgagaggaacatagccgagggaaaggaaattcattcactcatggaatcggaatccctgctactagagaaggcgaacacagaactgagttggcctagtaaggaggactcacaggagaaaattaagctgcctcctgagcgcttcttccagaagcctgtcagtggtctgtcagttgagcaggttaagagcgaaacaatctcatcctctgtcaagacagcccactttccagcggaaggcgtggaaccagcacttgggaacgagaaggaggctcatcggtcaacacccccctttccggaggaaaagcctttagaggaatctaagatggtgcagagcaaggtcattgacgacgcagacgaaggcaagaaaccttcccctgaagtcaaaatccccacccagaggaagccaatcagttccatacatgcacgagagcctcagtctcctgaatctcccgaagtgactcagaatccccccacccaaccaaaggtcgctaaaccagatttaccagaagaaaagggcaaaaagggaatatccagctttaaaagctggatgtcgtcactgtttttcggcagctccacccccgacaacaaggtggccgagcaagaagacctcgagacacagcctagtcctagcgtggaaaaagcagtcacagtaattgaccccgagggaaccatacccacaaactttaatgttgccgaaaagcccgctgatcattccctgtccgaggtcaagctaaagaccgccgacgagcctaggggaactctagtgaaatctggcgacgggcagaacgtaaaagagaagtctatgatcctgtcaaatgtggaggaccttcagcagcccaagttcatctcagaggtctcaagggaggattacgggaaaaaggagatttcgggggacagcgaagagatgaacataaattctgtcgtgacaagtgccgatggcgaaaacctggagattcagagttattccctgatcggcgagaaactggttatggaggaagcaaagaccattgtgccgccccacgtgaccgacagcaaacgggtgcagaagcccgcaatagctcccccctctaaatggaacatcagcatctttaaggaagagcctcgtagcgaccagaaacagaagtcattactctccttcgacgtggtggacaaggttcctcagcagccaaagtcagcctcatccaatttcgcctccaagaacattactaaagaaagtgaaaaacccgaatccattattcttccagtggaggaaagcaagggcagcctcattgatttttcagaggaccgtctcaagaaggagatgcaaaatcccacatcgctgaaaatctcagaggaggaaaccaagcttagatcagtctctccaacggaaaaaaaggataacctggagaatcgatcctacaccttggcggaaaaaaaggtcttggctgagaaacagaactccgtggcacctctggagctgcgagatagcaacgaaattggaaaaacccagataacgctcggctctcgcagcaccgagctgaaagaatcgaaagccgatgccatgccccagcacttttaccagaacgaggactacaacgagaggcccaaaatcatagtgggatcggagaaagagaaaggcgaggagaaggagaatcaggtgtacgttttgagcgagggaaagaaacagcaggagcaccagccttattcagttaatgtggccgaatctatgtcaagggagtccgacatctccctgggtcattcgttaggcgagacacagagctttagccttgttaaagccacctctgtgacagaaaagagtgaggccatgctcgccgaagctcatccagaaatcagggaggcaaaggcagtaggcacacagcctcaccccctcgaagagtccaaagtgctggtcgaaaaaaccaagacctttctccccgtggcactgagctgtcgggatgaaatcgaaaaccactcactgtctcaggagggtaatttagtgcttgagaaatcctccagggatatgcccgatcacagcgaggaaaaggaacagttccgcgagtccgagttaagcaagggcggttccgttgacatcactaaggagactgtaaaacaaggctttcaagagaaggctgtgggcacgcagcctagaccactagaggagtcaaaggtgctggtggaaaagaccaaaacattcctccccgtcgtgttaagttgccatgatgaaatagaaaaccacagtctgtctcaagagggcaatttggttctggagaagagcagcagggatatgcccgatcacagtgaggagaaggagcagtttaaggagtccgagttatggaaaggcggttccgtggacataactaaggaatccatgaaggagggcttccccagcaaggagtctgaacgaactctggcccggccattcgacgagacaaagagttctgaaactccgccttatttgctgtcccccgttaaacctcagactctggcttctggggcatccccagagattaatgccgtgaagaagaaagagatgccaaggtccgagctgacaccagagcgccacaccgttcacactattcagactagcaaggacgatacttcagatgtgccaaaacagtccgtcctcgttagcaagcaccatctggaggctgctgaagatactcgagtgaaagagcccttaagttccgcgaagtccaactacgcccagttcatatctaacaccagcgcatctaatgcagataaaatggtatcaaataaggagatgcctaaagagccagaggatacctacgccaagggtgaggactttaccgtcacatccaagcctgctggtctcagtgaggaccagaagaccgcgttcagcatcatatccgaggggtgtgaaatccttaacatccatgcaccagcctttatttctagcatcgaccaagaggagtctgaacagatgcaagataagctggagtatttagaggaaaaagcttcgttcaagaccatccccctgcccgatgattccgaaactgttgcgtgccacaagaccttaaaaagcaggctggaggatgagaaggtgacccctcttaaagagaataagcagaaagagacgcataagacaaaggaggagatctctacagactcagaaaccgacttgagctttattcagcccacaattccatccgaagaggattacttcgaaaagtataccctcatcgactacaacatcagccccgatccagagaaacaaaaggcaccccagaagctgaatgtggaggagaaactctctaaggaggtgactgaagagaccatttccttccctgtgtcaagtgtcgaatccgccctcgagcatgagtacgacttagtgaagctggacgagtctttttacggtccggagaaggggcataatatcctgtcccacccagaaactcagtctcagaattcggctgaccggaacgtgtcaaaagacaccaaacgggacgtggattccaaatctcctggcatgcccctttttgaagcagaagagggtgtgctaagtagaacccagatctttcctacaacaatcaaggtaatcgaccccgaatttcttgaggagccaccagctctggctttcctttataaagacctgtatgaagaagcagtgggcgagaagaagaaggaggaggaaacggcctccgagggcgactcagtgaactccgaggcttccttcccaagccgcaattctgatacagacgacggaactggaatttatttcgagaaatacatcttaaaagacgatattcttcacgacacttcactgacgcaaaaagaccagggccaggggctggaagaaaagagagtcggtaaagatgatagttaccagcctatagctgcagaaggtgaaatctggggcaaatttggtacgatttgccgggaaaaatcccttgaggaacagaagggggtttatggtgaaggtgaatcagtggatcacgtcgaaactgtgggcaacgtggccatgcagaaaaaggcaccgatcacggaggatgtgcgggtggctactcagaaaatttcttatgctgtgccatttgaagatacgcatcacgtgttagagcgggccgacgaagccggctcacatgggaacgaagtgggaaatgcatctccagaggtgaatctgaacgttcccgtccaggtcagctttcctgaagaggagtttgcttcaggggcaacgcatgtacaagagaccagcctggaggagccaaagatcttagtaccaccggagccctctgaagagagactgagaaattcacccgtgcaagacgagtacgaatttaccgagtctctccataacgaagtcgtaccacaagatatcctgtccgaagagctttcatccgaaagcactccagaggatgttctaagccagggcaaggaatcttttgagcatattagtgaaaatgagttcgcaagtgaagctgagcagtccaccccagcagaacagaaggaactgggctcagagagaaaagaggaggatcaattgtcttctgaggtggtaactgaaaaggcccagaaggaactcaagaagtctcagatcgacacatattgctatacttgtaagtgccctatctcagcgaccgataaggtgttcggaactcacaaagaccacgaggtctccaccctggataccgccatttctgccgtgaaagtacagctcgctgagttccttgaaaatctccaggagaaatcactgcgaatcgaggccttcgtgtcagagattgagagcttcttcaatacaatcgaagaaaactgtagtaagaacgagaaaaggctggaagagcagaacgaggagatgatgaagaaagtgctggcccagtacgatgaaaaagctcagtcctttgaggaagttaagaagaagaagatggagtttttgcatgaacagatggtgcattttctgcagtctatggacaccgccaaggacacactggaaactattgtgagggaggcagaggagctggatgaagccgttttcttgacatcatttgaagagatcaatgaacgcttactgtccgcaatggagagtaccgcctctcttgaaaaaatgcctgctgcattctctctgtttgaacattacgatgactctagtgctagatcagaccagatgttgaaacaagttgcagttccccagccccctcgactggagcctcaggaaccaaactccgcaacaagcactaccatcgccgtttactggagcatgaataaagaggatgtgattgacagtttccaggtctactgcatggaggagccgcaggatgaccaggaggtgaacgagctggtggaagagtacagactcaccgtgaaggagtcttactgcattttcgaagacctggagcccgatagatgttaccaggtgtgggtgatggctgtgaactttactggctgttcactgccatcagagcgtgccatctttagaacagcacccagcacccctgtgatccgagccgaggactgcaccgtatgctggaatactgcaaccatacggtggaggcccaccacacctgaggcaacagagacctataccttagaatattgcagacaacacagcccggagggcgaaggtttaagatccttttctggcatcaaaggtcttcagctgaaagttaacctacagcccaacgataactacttcttctacgtgcgcgccattaacgcattcggcacgagtgagcagtctgaggcagctcttatttccacgcgtggcacaagatttctgctgctgagagagaccgcgcatcctgccctgcatatatcatccagtggcacagtgattagcttcggcgagcggcgtaggctcaccgagatacccagcgttttgggtgaggagctcccttcttgtggtcagcactattgggagaccactgtgacggattgtcccgcctatcggctgggtatttgctcgtctagtgccgtgcaggccggcgccctggggcagggtgagacaagctggtacatgcactgctcagagccccagaggtatactttcttctatagtggtatcgtgtccgacgtgcacgtcaccgaacgacccgcacgggttggcattctcttggattataacaaccaacgcctcatcttcatcaacgcggagagcgagcaactgcttttcatcatccggcacaggttcaatgagggggtccatcctgctttcgctctggaaaagccaggcaaatgcacgttgcatctcggcatcgagccacctgatagcgtgcggcacaagtag

SEQ ID NO: 246323 - DNA, 12210 bp, Artificial Sequence
  derived and/or modified sequence
atggccagtcgggacagcaatcacgcaggcgagtcatttttggggtcagatggtgatgaggaagcaacccgagagcttgaaacggaagaggagtcggaaggggaagaggatgagactgcggctgagtctgaggaggaacccgacagtagactgtctgatcaggatgaggagggaaaaattaaacaagaatacatcattagtgacccctccttctccatggtcacagtacagcgagaggattctggaataacctgggaaacgaatagcagcagaagctctaccccatgggccagcgaggaatcccagacttcaggcgtttgcagcagagagggatcaacggtcaattctcctcctggaaacgtgtcatttattgtagacgaggtcaaaaaggtccgcaagcgaactcataagagcaagcacgggtcccctagcctacggcgtaagggtaatcgcaagcgtaatagtttcgagagccaggacgtgcccaccaacaagaaggggtctcccctgacctccgcatcccaggttttaacgaccgagaaagagaagagttacacgggcatctacgacaaagcacgcaaaaaaaagacaacgagcaatactccccctatcacaggcgctatatacaaagagcataaacccctggttctgcggccagtgtatatcggcaccgtccaatacaaaataaaaatgttcaatagtgtgaaagaagaactcattcccttgcagttctatggcacactccctaaaggttacgtcatcaaagagattcactaccggaagggaaaagacgcctccatctccctcgaacccgatctcgataactcagggagcaatactgtgtccaaaacgcgcaaactagttgctcagagcattgaagataaggtgaaagaagtgttccccccttggagaggcgctctgtcgaagggtagcgagagcctaacacttatgttcagccacgaggatcagaagaaaatctacgccgattcccccctcaatgctacgtccgccctagagcataccgtgccaagctatagttcctcaggcagggccgagcagggaattcagcttcgacactctcagtccgttccccagcagcctgaggacgaggccaaaccccatgaggtagaacctccttcagtcacccccgacaccccagccacaatgtttttgaggacaaccaaggaggagtgcgaactggcctctcccggaacggcagcgtcagaaaacgactcctcggtgtctcccagctttgcaaatgaggttaagaaagaggatgtctactccgcgcatcactcaatatccctcgaagccgcaagtccgggtctggctgcctctacgcaggatggcctggatccagaccaagagcagccagacttgacttcaatcgaaagggctgaacccgtatctgccaagctgacccctacacacccaagtgtgaaaggcgagaaagaggagaatatgctggaaccaagcatctcactgtccgaacccctgatgctggaggaaccggaaaaagaggagattgaaaccagtctacctatcgcgataacaccagaacccgaggactcaaacctagttgaagaggaaattgtagagttggactatcccgaatcccccctagtgtctgaaaaacccttcccccctcatatgtccccagaagtggaacacaaggaggaggagcttattcttcccttactcgccgcttcctcacccgagcatgtggccctgagtgaggaggaacgcgaggagattgcttcagtgtccacgggctcggcttttgtctccgagtattccgttcctcaggatcttaaccacgagttacaggagcaagaaggagaacccgtacccccatccaatgtggaggctattgccgaacacgccgtgctgtccgaggaggagaatgaggagtttgaagcatactcccctgcagccgcaccaacctctgagtcctcactgtccccttcaacaactgaaaaaacttcagaaaaccagtcgcctctgtttagtacagtaacccctgagtacatggtcctttctggggacgaggccagcgagagcggctgttacacaccagactccacctcagctagcgaatacagcgtccctagtctggccactaaggagtctctaaaaaaaaccattgaccgaaagagtcctctgattctgaaaggggtatcagaatacatgatccctagtgaagaaaaggaggatactggaagctttacaccagccgttgctccggcatccgaaccaagcctctcaccctctacaaccgaaaagacctcagaatgccagtcaccgctaccttcgaccgcgacctctgaacacgttgtgccaagtgaaggcgaggatctggggagcgagaggttcaccccagattcaaagctgatatctaagtatgccgcaccactgaatgccacccaggaatcccagaagaaaatcatcaatgaggcatcacaattcaaacccaagggcatttctgaacacacggtgctatcggtggatggcaaggaggttattggcccttcatctcccgatctcgttgtagcctccgagcattccttcccccctcacacaacggagatgactagcgaatgtcaggccccaccactttccgcaaccccctccgagtacgttgttctatctgatgaggaagctgtcgaactggaaaggtatacgccatcaagcacgtcagccagtgaattttccgtacctccatatgccacacctgaagctcaggaggaggagatcgtgcaccgttctctcaacctgaaaggagccagttctccaatgaacctttccgaggaggaccaggaggacataggccctttttccccagatagtgcctttgtatcggagttttcattccccccatacgccacacaggaggcagagaagagagagttcgaatgcgactcacctatttgtctcacctccccttccgagcatacaatcctttccgatgaagacacagaggaagccgagctcttctctcccgactccgccagtcaggtatctatccctccgttccggatctccgaaaccgagaaaaatgagctggaacccgattctctcctaaccgctgtcagtgcatccggatattcctgcttctctgaagccgacgaagaagacattggatccactgctgccacaccggtgtctgagcagtttagtagctctcagaaacaaaaggccgaaacgttccctttgatgtctcctctcgaggatctatctcttccacccagcacagataaatcggaaaaagctgagattaaacctgagatcccgaccacgagtaccagcgtcagcgagtacctcatcctggctcaaaaacagaaaacccaggcttacctagagcccgagtcggaggaccttattccgtcccacctgacctccgaggtggaaaaaggggagcgggaagccagttcatcagtcgctgctattccagctgcccttcccgctcagtccagtatcgtgaaagaggagacaaagccagctagccctcacagcgtgctacccgacagcgtgccagctatcaaaaaggagcaggagccaaccgctgcgctcaccctgaaggccgctgacgagcaaatggcactgagcaaagtgagaaaggaagagatcgtacctgatagccaggaggctactgcccacgtgagccaagaccagaagatggagccccagcctcccaacgtgcccgaatccgagatgaaatacagtgtgttaccagatatggttgatgaacctaaaaagggagtgaaaccgaaacttgtgctgaacgtgacttctgagcttgagcaacgaaagctgagtaaaaatgaaccagaggtgatcaagccatatagcccactcaaggaaactagcctgagcggccctgaagccctaagcgcggttaagatggagatgaagcatgactcaaagatcaccacaaccccaattgtcctacattctgcctcctccggcgtggaaaaacaggtggaacacggaccccctgcactagctttctcggccctttcggaggagatcaagaaggagatcgaaccatctagttctaccacaacagcgtctgtaactaaactagacagcaatctcacaagagcggtgaaggaggaaatacctactgacagctcgctgataacacctgttgatcgccctgtattgaccaaagtcggcaagggggagctgggctccggattacctcctctcgtgactagcgccgacgaacacagcgtgctcgctgaggaggacaaggtggccatcaaaggtgcttccccaattgaaactagctctaagcacttggcatggtccgaagccgagaaggagattaaattcgacagcttaccgagcgtttccagtattgctgagcattccgtgcttagtgaggtcgaggccaaggaggttaaggctggattaccagtgatcaagaccagtagctctcagcatagtgataagtcagaggaggctcgcgtcgaggacaagcaggacctcctcttctctacagtatgtgacagtgagcgcctggtctcctcccagaaaaagtcccttatgtcaacctcggaagtgctcgaaccagagcacgagctgccactttctctgtggggcgagattaaaaagaaagagaccgaactgcccagttcacagaacgtgtcgcctgcctccaaacacattattcccaaagggaaggacgaggaaacagcttcatcatcccccgagctcgagaaccttgcctctggtcttgcgcctacactattgttgttgtctgatgataagaacaaaccagctgtcgaggtgagcagcactgcccagggcgacttcccctctgaaaagcaggatgtagcattggcagaactcagtctggagcccgaaaaaaaggacaagccacaccagcccttggagctgcctaacgcaggcagtgaattcagctcagacttggggagacagagcggctctattggaactaagcaagccaaatctccaatcaccgaaacagaggacagcgtcctagaaaaggggccagctgaattacggtcccgcgaaggcaaggaggagaacagagagttgtgcgccagctccaccatgcccgcaatctccgagttgagctccctgcttcgggaagagagtcagaacgaagaaattaagccttttagcccgaagattattagcctggaatcaaaggaacctccagcttcagtggccgaagggggaaaccctgaagaattccaaccattcaccttcagtctgaaggggctgtccgaagaagtgtcccatcccgctgatttcaagaaagggggtaatcaagagatcggaccgttgcctcccactggaaacctgaaagctcaggtgatgggtgacatcctcgacaaactctcagaggaaactgggcatccgaatagttctcaggtactgcagtcaattaccgaaccgtcaaaaatagccccatccgatctcctggtcgagcagaaaaagactgagaaggccctacactcagaccaaactgtgaaactaccagatgtgagtaccagttccgaggacaagcaagacctgggcatcaagcagttttctctcatgcgagaaaatttgcctctcgagcagtccaaatcctttatgacgacgaagcctgccgatgtgaaagagacaaaaatggaggaatttttcatctcccccaaagacgaaaattggatgctggggaaacctgagaacgtggcctctcagcatgaacagcgcatcgctggatcagtgcagctcgatagcagttctagcaatgagctaaggccagggcagctgaaagcggctgtgtcatccaaggaccacacctgcgaggtgcggaagcaagtcctccctcactccgccgaggaatcccatctttcatcgcaagaggccgtcagcgcgctcgacacatcgtctggaaacacagaaacgctcagctccaagagttattctagtgaggaggtgaaactggctgaggaacctaaatcgctggtccttgccggaaatgttgagaggaacatcgccgaaggcaaggagatccatagcctgatggagagcgaatccctgctgctggagaaggctaatactgagttgtcatggccttcaaaagaagattcccaggaaaagattaaactgccccctgaacgatttttccagaagcccgtctctggcttgagcgttgagcaggtaaagtccgagactatctcctcttctgtgaagaccgctcattttcccgcagagggagtggaacctgccctgggcaatgaaaaagaagcccaccggtccacccccccattcccagaggagaaacctttagaggaatccaaaatggtgcaatcaaaggttatagatgatgcagacgagggcaagaaacccagtccagaggtaaagattcccacacagagaaaacccataagttccatccatgctcgggagcctcagagtcccgagtcgcctgaggttacacagaacccacccactcaacctaaggtggccaagcctgatctgccagaagagaaagggaaaaaaggtatcagtagcttcaaatcatggatgagttccttattcttcggtagttctactccagacaataaggtggctgagcaggaggatctggagactcaacctagtcctagtgtggagaaggctgtgacagtaatcgacccagagggaacaatccctactaatttcaacgtagcagagaagcccgcagatcattccttgagcgaggtgaaactcaagactgcagacgagccaagaggcaccctggttaaatccggggacggccagaatgtcaaagaaaaatcaatgatactgagcaatgtggaggatcttcaacagccaaagtttatatcagaagtttcccgtgaggactatgggaaaaaagagatcagtggcgactccgaggagatgaacattaactctgtggtcacatcagctgacggcgagaaccttgaaatacagtcctacagcttgatcggtgagaaattggtcatggaagaagcaaaaacaatcgtaccccctcacgtgacagattctaagcgggtgcagaagccggcaatcgcacctcctagtaaatggaacatctccatatttaaggaagaacctagatcagaccagaaacaaaagagcctactgagcttcgatgtggtagacaaagttccgcagcagcctaagagcgcctcctctaattttgctagcaaaaacattactaaagagtccgaaaaacccgaaagcataattctgccagtcgaggagtccaaagggagtctcatcgatttcagtgaagacaggctgaagaaggagatgcagaaccctaccagcctgaagatcagtgaagaggagacaaaactgaggtctgtgtctcccaccgagaagaaggataacctggagaacagatcatataccctggcagaaaagaaggtgctggcagagaagcagaattccgtggctcctctggagctgagggacagtaatgagataggcaagacacagatcacactaggatcccgttcgaccgaactcaaggaatcaaaagccgatgctatgccccagcacttctatcagaacgaggactacaatgaacgtcccaaaatcatcgtcggatccgagaaggaaaaaggcgaagaaaaggagaaccaggtctacgtcctcagcgaggggaagaagcagcaggagcatcagccatactccgttaacgttgctgagagtatgagcagggagtcagacatcagtctaggtcattctctcggcgaaacccaatctttctcgcttgtcaaggcgactagcgttactgaaaaaagtgaggccatgcttgctgaggcccaccccgagattcgcgaagccaaggcagttgggacccaaccccatcccttagaggaaagcaaagtcttggttgagaagactaaaacatttctccccgtggccctcagctgcagagatgagattgagaaccattccctctcacaggaagggaatcttgttctcgagaagtcttccagggacatgccggaccactcagaggagaaggagcagtttagagaaagtgagcttagcaagggaggatcggtcgacattaccaaggagaccgttaaacagggcttccaggaaaaagccgtgggcacgcagccccgtcctctggaagaaagcaaagtgctggtggagaagacaaaaacctttcttcctgtggtcctgtcatgtcacgacgagattgagaatcattctctgtcccaggagggcaacctggtgctggagaaatcgagccgagatatgccagaccattcagaggaaaaggagcagttcaaagaatctgaattgtggaaagggggatctgtggatatcaccaaggagtcaatgaaggaggggttcccttcgaaggagtccgagagaacactggctcgcccattcgacgagacgaagagttcggaaacgcctccttacctgttgagccctgtgaaaccacagacacttgcatcaggtgcgagccctgaaatcaatgcggtgaaaaaaaaagagatgccgaggagtgagctcacgccagagaggcatacagtgcacaccatccagacatcaaaagatgatacgagcgacgtccccaagcaaagcgtgctggtgtccaaacaccacctagaagcggcagaagacacacgcgtgaaggagcccctttctagcgccaaatccaattacgcacagttcatttcaaacacgtctgccagcaatgccgacaagatggtgtcgaataaggagatgcctaaggagccagaggacacttacgccaaaggcgaggactttacagtgacgtccaagccagctgggctgtccgaagaccagaaaaccgccttctccataatcagcgaggggtgcgagatcctgaatattcatgctccagccttcatcagcagcatcgatcaggaagagagcgagcagatgcaggacaagttggagtacctggaggagaaagcgtcctttaaaacaatacccctccccgacgattccgagaccgtcgcctgtcataaaacattgaagtcccggctggaggatgaaaaggtgacccctctgaaggaaaataagcagaaagagactcacaaaactaaagaagaaatttcaactgatagcgagaccgatttgtcctttatccagccaacaattcccagtgaagaggattactttgaaaagtataccttgattgactacaatattagcccagacccagagaagcaaaaggcaccgcaaaaactcaacgtagaagagaagctttcaaaagaagtgacagaggaaaccattagctttcctgtgagctcagttgagagtgccctggaacacgagtacgaccttgtaaagctagacgagtcgttttacggtcccgagaagggccacaacattttatcacacccggaaacacagtcacagaatagtgcagatcggaatgtgagtaaggatacaaaacgcgatgttgattctaagagcccagggatgcccctcttcgaggccgaagaaggagtcctgagcagaacgcagatctttccaaccacgatcaaagtgatagacccggagttccttgaagaaccgccagccctggcctttctctacaaggacttatacgaggaagccgtgggcgagaagaagaaagaggaagaaacagcgtctgaaggtgactccgtgaattcggaagcgagttttccaagcagaaattccgataccgacgatggtacgggtatatacttcgagaaatacatcctcaaagacgatatcctgcatgacacgagtctcactcagaaagatcaggggcagggccttgaggaaaaacgtgtcggaaaggacgatagctatcagcctatcgctgcagaaggcgaaatttggggaaaatttggcaccatctgtcgggagaaatccttagaggagcaaaaaggagtgtacggagagggtgaaagtgtggaccacgtcgaaaccgtcggaaacgtcgccatgcagaaaaaggcacccatcaccgaagacgtcagggtcgcaactcagaagattagctacgcggttccgttcgaggatacacatcacgtgctggagcgcgctgacgaagccggaagccatggcaacgaggtgggaaacgccagccccgaggttaacttgaatgtgccagtgcaggtctcattccccgaggaggagtttgcatccggcgctacccatgttcaggagaccagtctggaagaacctaaaatcctcgtgcctcctgagcccagtgaagaaagactgagaaactcaccagtgcaggatgagtatgaattcacagaaagccttcacaatgaggtggtgccccaggatattctgagcgaggagttgagttctgaatctaccccggaagatgttctgtcacaaggtaaggaatccttcgagcacatcagtgaaaatgaatttgctagcgaagcagagcagtccacaccagccgaacaaaaagaactaggcagtgaacgtaaggaggaggatcagctgagctctgaggtggtaaccgaaaaggcacaaaaggagcttaaaaagtcacagattgacacttattgctacacatgtaagtgtccgatttccgctacagataaagtctttggaacacataaggaccacgaggtctcaactctggacaccgccatttcagccgtgaaggtgcagttggccgagttcctggagaatctccaggagaagtccctgagaatcgaggctttcgtttctgagatagagagctttttcaacaccattgaagagaactgttccaaaaatgaaaaaagacttgaagaacaaaacgaggaaatgatgaaaaaggtgctcgcacaatatgacgaaaaagctcagtcgtttgaggaagttaaaaaaaaaaaaatggaattcttacatgaacaaatggtccatttcttacaaagtatggacactgctaaggacacactcgagaccattgttcgggaggcagaggagcttgacgaggctgtgttcctgacatctttcgaagagattaacgagcgcctgctaagtgctatggagagtaccgcctcattagagaaaatgcctgctgctttcagtctctttgaacattatgacgacagtagcgctcgatctgaccaaatgttaaaacaagtggcagtgccccagcctccacggctagagccccaagaaccaaactctgccacctctaccaccatcgctgtgtattggagtatgaacaaagaggacgtcattgatagttttcaggtttactgtatggaggaacctcaagatgaccaggaggtgaacgagctagtggaggagtaccgacttactgtgaaagagtcctactgcatttttgaagatctcgagcctgaccggtgttaccaagtttgggtcatggctgtgaattttaccggatgttcattgccttcagagagagctatcttcaggaccgctcctagcacaccagtcatccgagcggaagactgcactgtatgctggaacaccgccaccattcgctggcgcccaacaacccccgaagcgaccgagacgtacactctcgaatactgccggcagcatagcccggaaggtgagggtctgagatcatttagtggaattaaggggctacaattgaaggtgaacctgcagcctaatgataattatttcttctatgtcagggctattaatgcattcggcaccagcgaacagtccgaggcagctttgatctcgacgcgcggtactcgttttctgttgttgcgtgagactgctcacccagccctccatatcagctcatccggcaccgtcatctcgtttggcgagcgcaggcggcttactgaaatccccagcgttttgggtgaggagctgcccagctgcgggcagcactattgggagactactgtcacagactgccctgcataccgcctcgggatctgctctagtagcgcggtgcaagctggcgctctgggccagggggagacttcttggtacatgcactgtagtgaaccacagcggtatacctttttctactccggcattgtgtcagacgtccatgtgaccgaacgacccgctagggtgggcatcctgctagattataacaatcagcgactcattttcattaacgcagagagtgagcagttactctttatcatccgacaccgatttaatgagggtgtgcacccagcattcgccctggagaagcccggaaaatgtaccttacacctcgggatcgagcctcccgatagcgttcgacacaaatag

SEQ ID NO: 246324 - DNA, 12847 bp, Artificial Sequence
  derived and/or modified sequence
ctccggccccggcccaggcccgggagaggcgatggcgagccgcgatagcaaccacgctggcgagagctttctcggctccgacggggacgaggaggcgacccgggagctggagaccgaggaggagtcggagggcgaggaggacgagacggcggcggagtcggaggaggagccggactccaggttatcagaccaggatgaagagggaaagatcaagcaggagtatatcatatctgacccctccttttccatggtgacagtccaaagggaagatagtgggataacctgggaaaccaattcaagtagatcttctactccttgggcttcagaagaaagtcagacttctggtgtgtgtagtcgggaagggtcaactgtgaattctcctcctggaaatgtttcctttattgtggatgaagtgaaaaaggttcggaaaaggactcataagtcaaagcatggttcaccatcattacgccggaaaggcaacagaaaaagaaattcttttgaatcccaagatgttccaacaaacaaaaaaggcagtcctttaacttcagcaagccaggtactaaccacggagaaagagaagtcatatactggcatttatgataaagcaagaaaaaagaagaccacttcaaatacacctccgattactggggcaatatacaaagaacacaagccattagtgttaagaccagtctacataggaacagtacaatataaaattaagatgtttaattcggttaaagaagaattaattcctctacaattttatggaacattgccaaagggttatgtaattaaagaaatacattataggaaagggaaagatgcatccattagtctagagccagatttggacaatagtggttctaatacagtgtccaaaacacgcaaattagtagcccaaagcatagaggataaagtaaaagaggtttttccaccctggagaggcgcactctccaaaggatcagagtccctaaccttaatgttcagtcatgaagatcaaaagaaaatttatgctgattctcccctaaatgccacatctgcattggagcacacagttccctcttattcaagtagtggcagagcagaacaaggaatacagctcaggcattcacagtcagtgccacaacagccagaagatgaagcaaaaccacatgaagtggaacctccatctgtgacacccgacacacctgcaactatgttcctgagaacaacaaaggaagaatgtgagcttgcttcaccaggaactgcagcttcagagaatgactcttcagtctcaccatcatttgctaatgaggtaaagaaggaagatgtgtattctgctcaccattccatttctctggaggcagcgtcaccaggtctggcagcatctacccaggatggtttggacccagaccaagaacagccggacctgacttcaatagaaagggcagaaccagtctccgcaaaactgacccctacccatcccagtgtcaaaggagagaaggaggaaaacatgcttgagccatccatttctctttctgaacctctaatgttagaagaaccagagaaagaagaaatagaaacttccctacccatagctattacccctgaacctgaagattctaatttagtagaagaagagatcgtagaacttgattacccagaaagcccattggtttccgagaagcccttcccaccacatatgtcccctgaagtggagcacaaagaagaagagcttattctaccattattggcagcatcatctcctgaacatgttgctttgtctgaggaagaaagagaggaaattgcatctgtttctactggttctgcttttgtatcagagtattcagtaccacaggatttgaaccatgaattacaggagcaagaaggtgagccagttcccccatccaatgtagaagctatagctgaacatgcagttttgtcagaagaagagaatgaggaatttgaggcttattccccagctgcagcccctacatctgagagctctctctcaccatccacaactgagaagacttcagagaaccagtctccactgttttcaacagttacaccagaatacatggtcctatcaggagacgaggcctcagaaagtgggtgttacacaccagactccacatctgcttctgaatattcagttccatcactggcaacaaaagagtcactgaagaaaacaattgaccgtaagtccccgttaatattgaaaggtgtttctgagtacatgattccatcagaagagaaggaagacactggatcgtttactccagctgtggcccctgcttctgagccctctctctcaccatccacaaccgaaaagacttctgaatgccagtcaccactgccttctactgccacatcagaacacgtggtcccatcagaaggagaggacctaggaagtgaacgtttcacaccggattcaaagttgatctccaaatatgcagccccactcaatgcaacacaggaatctcaaaagaaaataatcaatgaggcatcccaattcaaaccaaaaggtatttctgagcacacagttctgtcagtagacggcaaggaggtcattggaccatcttccccagatttggttgttgcatctgaacactctttcccaccacacacaaccgagatgacttctgaatgccaggccccaccactttcagccaccccatctgaatatgttgttctatcagacgaagaggcagtcgagttggaacgatacacaccctcttctacatctgcttctgaattttcagtaccaccatatgcaacaccggaggcacaggaggaagaaattgtccatagatctctaaatctaaaaggtgcatcctcacccatgaatttatcagaagaagatcaagaagacattggacctttttctccagattctgcatttgtgtcagaattctcatttccaccgtatgcaacccaggaagcagagaaaagagaatttgagtgcgattctccaatatgtttaacatcaccatctgagcacactattttgtcagatgaagacactgaagaagcggaactgttctctccagactcagcatcacaagtttcaatccctccctttagaatctcagaaacagagaaaaatgaacttgagcctgattcactattaactgcagtgtctgcttcaggttattcctgcttttcagaagcagatgaggaagacattggatccacagctgctacacctgtatctgagcagttcagttcatcacagaagcaaaaagctgaaactttccctttgatgtctccgcttgaagacttaagtctgccgccttcaacagataaatcagagaaagcagaaattaagccagagattccaacaacctcaacatctgtatctgaatatctcattttggcacagaagcagaaaactcaagcatatttagagcctgagtctgaagacttgattccttcacatttaaccagtgaagtggagaagggagaaagggaggcaagttcatcagtagctgcaatacctgctgctttacctgcacaatcatctatagtaaaggaagaaaccaaacctgcatctccacattcagttttacctgattcagtccctgcaatcaagaaagaacaggaacccacagcagcactcactctaaaagctgcagatgaacagatggctttgtcaaaagtcagaaaggaagaaattgtgcctgattctcaagaagctacagcacatgtatcacaggatcaaaaaatggagcctcagcctccaaatgttccagagtctgagatgaaatattcagttttgcctgacatggtagatgagccaaagaagggtgtcaagcccaaattagttctaaatgtgacttctgaactagaacagagaaagttgtccaagaatgagcctgaagtaataaaaccatattcacctctaaaggaaacatctttatctggacctgaggctttatcagcagtgaaaatggagatgaaacatgattccaaaataacaactacacctatagtgcttcattcagcttcctcaggagtggaaaagcaagttgaacatggtccacctgcactagcattttcagctttgtcagaagaaattaaaaaagaaattgaacccagttcctcaacaactacagcatctgtaactaagcttgattcaaacttaaccagagcagtaaaagaagaaatcccaacagattcatctcttatcactcctgtagatcgtccagtcttaacaaaagtaggaaagggtgaattaggaagtggtttgccaccactggtaacatctgcagatgaacattcagttcttgcagaagaagacaaggtggcaattaaaggtgcttctcccattgaaacttcatccaaacatttagcttggtcagaagcagagaaggaaattaaatttgattcacttccaagtgtctcctctatagcagagcattctgttttgtcagaagtagaagccaaagaagttaaagctgggttgccagtaatcaaaacatcatcttctcagcattcagataaatctgaggaagcaagggtagaagacaaacaagatcttttattttctacagtctgtgactctgaacgtttggtttcatcacagaagaagagcttgatgtctacctcagaggtgttagagcctgaacatgagcttccactcagcctatggggtgagataaagaagaaagaaactgaacttccttcatcacaaaatgtgtcacctgcatccaaacatataatcccaaaaggcaaagatgaggaaacagcaagttcatctcctgagttggaaaatttagcatcaggtttagccccaacattactgctcctcagtgatgataagaacaaaccggcagtggaggtatcttctacagctcagggagacttcccatcagaaaaacaagatgttgctttggcagagctgtctttggaacctgagaagaaagacaagccacaccaaccgttggaattaccaaatgctgggtcagaattttctagtgatttaggtagacaaagtggatccataggtacaaaacaagcaaagtctcccataactgaaacagaggattctgttttagaaaaaggcccagctgagcttaggagcagagaaggaaaagaagaaaatagagagctttgtgcatcttctacgatgcctgcaatttcagagctttcatcattgcttagggaggaatctcagaatgaagaaattaaacctttctctcccaagatcatcagcctagagtcgaaagaaccacctgcctctgtagctgaaggaggcaacccagaagaatttcagccatttactttttctttaaaaggattatcagaggaggttagccatccagccgactttaaaaagggaggaaatcaagaaataggcccattaccaccaactggaaatttgaaggcacaagtcatgggagatattttagataagctaagtgaagaaacaggccacccaaattcatcccaggtactccagagtataacagaaccatcaaagattgctccttctgacctccttgtagaacaaaaaaagacagaaaaagcacttcattcagatcaaactgttaaattacctgatgtaagcacctcttctgaagataaacaagatctgggtattaagcagttttcacttatgagagagaatttgcctttggaacaatcaaaatcatttatgacaaccaagcctgcggatgtcaaagaaacaaaaatggaagaattctttatttctccaaaggatgaaaactggatgttgggaaagccagaaaatgtggctagtcaacacgaacagagaatagcaggatctgtgcagctggattcctctagcagcaatgagctgaggccagggcagctcaaggctgctgtgtccagtaaggaccatacatgtgaagtgagaaagcaggtcctgccgcattctgctgaagaatctcatttgtcatcacaagaagcagtatctgctcttgatacttccagtggtaatacagagaccttatcaagtaaaagttactcttctgaagaagtaaagctggctgaagaaccaaagtctttagtcctagctggaaatgtagagagaaacatagcagaggggaaggagattcattctttgatggagagtgaaagtttgctattggagaaagcaaacacagagctttcctggccttccaaagaagatagccaggaaaaaattaaactacctcctgaaagattcttccagaaaccagtgtctggcctatcagtggaacaggtgaagtcagaaacaatctcctcttctgtcaaaacagcccatttcccggcagaaggtgtggaacctgcattgggcaatgaaaaagaagcacacaggagcacacctccttttcctgaagagaagccattggaagaatcaaaaatggttcagtcaaaggttattgatgatgctgatgagggaaagaaaccatcacctgaagtaaaaatacccacacaaagaaaacccatctcctcaatccatgcaagagagcctcaatccccagagtcacctgaggtgacacaaaatccacctacacaaccaaaggtggctaagccggaccttcctgaggaaaagggaaagaaaggaatttcatctttcaaatcgtggatgtccagcttgttttttggatcgagcactccagataacaaagttgctgaacaagaagacttagaaacacagccaagtccatccgtagaaaaagcagtgactgtgatagatcctgaaggtacaattcccaccaattttaatgtagctgagaaaccagctgatcattcattatcagaggtaaaacttaaaactgctgatgaacccagaggtactttagtaaaatctggtgacggtcaaaacgttaaagaaaaatccatgattttatcaaatgtagaagatttacaacagccaaaattcatttctgaggtgtctagggaagattatggaaaaaaagaaatctcaggcgattcagaggaaatgaacataaactcagtagttacttctgctgatggtgagaaccttgaaattcaatcttattcactaatcggtgagaaattggttatggaagaagccaaaactattgttcctcctcatgttactgatagtaaaagagtccagaagccagcaatcgctcctccatctaaatggaatatttctatttttaaggaagagccaagaagtgatcaaaaacaaaaatcactcctttcatttgatgtagtagataaggtgccacaacagccaaaatcagcttcctccaactttgcaagtaaaaatatcacaaaggaatcagagaaaccagagtcaattattttgccagtagaagaatcaaaaggcagtttaattgatttcagtgaagacagactcaagaaagaaatgcaaaatcctacttccttgaaaatttctgaagaggaaacaaaactcaggtctgttagtccaactgagaagaaagataatttggaaaacagatcatataccttggcagaaaagaaggtgctggcagaaaaacaaaactctgtggccccattagagcttagagatagtaatgaaatagggaagacacaaattacacttggatctagatctactgaactgaaagaatcaaaagccgatgctatgccacagcacttctatcaaaatgaagactacaatgaaagacccaaaatcattgttggttctgaaaaggagaaaggtgaagaaaaagaaaatcaggtatatgtgctttcagaaggaaagaagcagcaggaacatcagccttattctgtgaatgtagccgagtctatgagtagagaatcagatatctctttaggtcattctttgggtgaaactcaatcattttcattagttaaagctacatcagttactgaaaaatcagaagccatgctcgcagaggctcacccagaaatcagagaagcaaaggcagtaggaacccaaccacatcctttagaagaaagtaaagttttggtggagaaaaccaagactttcctgccggtggctctttcttgtcgtgatgaaatagagaaccactctttatctcaggaaggaaatctagtattagaaaagtcaagcagagatatgccagatcacagtgaagaaaaagaacagttcagagagtcagagctatcgaaaggcggttcagtagatatcacaaaagaaactgtgaaacaaggatttcaagaaaaggcagtaggaacccaaccacgtcctttagaagaaagtaaagttttggtggagaaaactaagactttcctgccagtggttctttcttgtcatgatgaaatagagaaccactctttgtctcaggaaggaaatctagtgttagaaaagtcaagcagagatatgccagatcacagtgaagaaaaagaacagttcaaagagtcagagctatggaaaggtggttcagtagatatcacaaaagaaagtatgaaagaaggatttccatctaaagaatccgaaaggactttagctcgtccttttgatgaaactaagagctcagaaacaccgccatatttgctgtcacctgtaaaaccacaaactcttgcttcaggagcttctccagaaattaacgcagtgaagaaaaaagaaatgccacgatcagaattgactccagaaaggcatacagttcatactattcagacatctaaagatgacacatccgatgtgcctaaacaatctgttcttgtttcaaagcaccacttggaggctgcggaagatacccgtgtaaaggaaccactgtcttcagcaaaaagcaactatgctcaatttatatctaatacatcagcaagcaatgctgataaaatggtttctaataaagaaatgcccaaggaacctgaagacacatatgcaaaaggtgaagactttacagtgactagtaagccagccggactttcagaagatcagaagactgcctttagtatcatttctgaaggctgtgagatattgaatattcatgctccggcctttatttcttcaatcgatcaggaagaaagtgaacaaatgcaagataaattagaatatttggaagagaaagcctcatttaaaaccataccactccctgatgatagtgaaacagttgcttgtcataaaacattaaagagcaggttagaagatgaaaaagttaccccattgaaagaaaataaacaaaaggaaactcataagacaaaagaagagatatccacagattcagaaactgatttatcatttattcagcccacaattcccagtgaagaggattattttgaaaaatatactttgattgattataacatctccccagacccagaaaaacagaaagctccacagaaattaaatgttgaagagaaactctcaaaggaagttacagaagaaactatctctttcccagtaagttcagtggaaagtgcactagaacatgaatatgacttggtgaaattagatgaaagtttttatggaccagaaaagggccacaacatattatctcatccagagacccaaagccaaaactcagctgacaggaatgtttcaaaggacacaaagagagatgtggactcaaagtcaccggggatgcctttatttgaagcagaggaaggagttctatcacgaacccagatatttcctaccactattaaagtcattgatccagaatttctggaggagccacctgcacttgcatttttatataaggatctgtatgaagaagcagttggagagaaaaagaaggaagaggagacagcttctgaaggtgacagtgtgaattctgaggcatcatttcccagcagaaattctgacactgatgatggaacaggaatatattttgagaagtacatactcaaagatgacattctccatgacacatctctaactcaaaaggaccagggccaaggtctggaagaaaaacgagttggtaaggatgattcataccaaccgatagctgcagaaggggaaatttggggaaagtttggaactatttgcagggagaagagtctggaagaacagaaaggtgtttatggggaaggagaatcagtagaccatgtggagaccgttggtaacgtagcgatgcagaagaaagctcccatcacagaggacgtcagagtggctacccagaaaataagttatgcggttccatttgaagacacccatcatgttctggagcgtgcagatgaagcaggcagtcacggtaatgaagtcggaaatgcaagtccagaggtcaatctgaatgtcccagtacaagtgtccttcccggaggaagaatttgcatctggtgcaactcatgttcaagaaacatcactagaagaacctaaaatcctggtcccacctgagccaagtgaagagaggctccgtaatagccctgttcaggatgagtatgaatttacagaatccctgcataatgaagtggttcctcaagacatattatcagaagaactgtcttcagaatccacacctgaagatgtcttatctcaaggaaaggaatcctttgagcacatcagtgaaaatgaatttgcgagtgaggcagaacaaagtacacctgctgaacaaaaagagttgggcagcgagaggaaagaagaagaccaattatcatctgaggtagtaactgaaaaggcacaaaaagagctgaaaaagtcccagattgacacatactgttacacctgcaaatgtccaatttctgccactgacaaggtgtttggcacccacaaagaccatgaagtttcaacgcttgacacagctataagtgctgtaaaggttcaattagcagaatttctagaaaatttacaagaaaagtccttgaggattgaagcctttgttagtgagatagaatccttttttaataccattgaggaaaactgtagtaaaaatgagaaaaggctagaagaacagaatgaggaaatgatgaagaaggttttagcacagtatgatgagaaagcccagagctttgaggaagtgaagaagaagaagatggagttcctgcatgagcagatggtccactttctgcagagcatggacactgccaaagacaccctggagaccatcgtgagagaagcagaggagcttgatgaggccgtcttcctgacttcgtttgaggaaatcaatgaaaggttgctttctgcaatggagagcactgcttctttagagaaaatgcctgctgcgttttcccttttcgaacattatgatgacagctcggcaagaagtgaccagatgttaaaacaagtggctgttccacagcctcctagattagaacctcaggaaccaaattctgccaccagcacaacaattgcagtttactggagcatgaacaaggaagatgtcattgattcatttcaggtttactgcatggaggagccacaagatgatcaagaagtaaatgagttggtagaagaatacagactgacagtgaaagaaagctactgcatttttgaagatctggaacctgaccgatgctatcaagtgtgggtgatggctgtgaacttcactggatgtagcctgcccagtgaaagggccatctttaggacagcaccctccacccctgtgatccgcgctgaggactgtactgtgtgttggaacacagccactatccgatggcggcccaccaccccagaggccacggagacctacactctggagtactgcagacagcactctcctgagggagagggcctcagatctttctctggaatcaaaggactccagctgaaagttaacctccaacccaatgataactactttttctatgtgagggccatcaatgcatttgggacaagtgaacagagtgaagctgctctcatctccaccagaggaaccagatttctcttgttgagagaaacagctcatcctgctctacacatttcctcaagtgggacagtgatcagctttggtgagaggagacggctgacggaaatcccgtcagtgctgggtgaggagctgccttcctgtggccagcattactgggaaaccacagtcacagactgcccagcatatcgactcggcatctgctccagctcggctgtgcaggcaggtgccctaggacaaggggagacctcatggtacatgcactgctctgagccacagagatacacatttttctacagtggtattgtgagtgatgttcatgtgactgagcgtccagccagagtgggcatcctgctggactacaacaaccagagacttatcttcatcaacgcagagagcgagcagttgctcttcatcatcaggcacaggtttaatgagggtgtccaccctgcctttgccctggagaaacctggaaaatgtactttgcacctggggatagagcccccggattctgtaaggcacaagtgatccttggctttcagaatttgcaagaacagcgatttgaattttgggggggtctgctgttcattcctttaggtgctatacattattcaaaaagtctcccgcgcatttgcactaatgatggctgcatgcatagcaatcagcatgtgagcaaaatcgacaagaaaaccttgactttacagagcagtgtgtgagtaaacagaatgaaaacaacaacctccactctttagtttatataagtttgagttctttcctaaattaaaagatctacacttgagttgggaaccgaaagagaaaaatggacttccatctgttttactggtaaaggaaatcctctgatggacaggtcagagtgaaggaaggttgtgctggtaagacatctctgacgaagagccatggatgctttccacaaaatgtcacctcgctgcactaaaggatgatgaatcctaatcattaaaggaattgtttcagctgatttaaatttataatgaactcttttgtaataatgtatactgtagaacatgagtctctcctccctaaaattttaaatgtagaaatgtgctatatattagaaatttccattttgttaaataaatggttagagtctataaa

SEQ ID NO: 246325 - DNA, 12210 bp, Artificial Sequence
  derived and/or modified sequence
atggccagcagagacagcaaccacgccggcgagagcttcctgggcagcgacggcgacgaggaggccaccagagagctggagaccgaggaggagagcgagggcgaggaggacgagaccgccgccgagagcgaggaggagcccgacagcagactgagcgaccaggacgaggagggcaagatcaagcaggagtacatcatcagcgaccccagcttcagcatggtgaccgtgcagagagaggacagcggcatcacctgggagaccaacagcagcagaagcagcaccccctgggccagcgaggagagccagaccagcggcgtgtgcagcagagagggcagcaccgtgaacagcccccccggcaacgtgagcttcatcgtggacgaggtgaagaaggtgagaaagagaacccacaagagcaagcacggcagccccagcctgagaagaaagggcaacagaaagagaaacagcttcgagagccaggacgtgcccaccaacaagaagggcagccccctgaccagcgccagccaggtgctgaccaccgagaaggagaagagctacaccggcatctacgacaaggccagaaagaagaagaccaccagcaacaccccccccatcaccggcgccatctacaaggagcacaagcccctggtgctgagacccgtgtacatcggcaccgtgcagtacaagatcaagatgttcaacagcgtgaaggaggagctgatccccctgcagttctacggcaccctgcccaagggctacgtgatcaaggagatccactacagaaagggcaaggacgccagcatcagcctggagcccgacctggacaacagcggcagcaacaccgtgagcaagaccagaaagctggtggcccagagcatcgaggacaaggtgaaggaggtgttccccccctggagaggcgccctgagcaagggcagcgagagcctgaccctgatgttcagccacgaggaccagaagaagatctacgccgacagccccctgaacgccaccagcgccctggagcacaccgtgcccagctacagcagcagcggcagagccgagcagggcatccagctgagacacagccagagcgtgccccagcagcccgaggacgaggccaagccccacgaggtggagccccccagcgtgacccccgacacccccgccaccatgttcctgagaaccaccaaggaggagtgcgagctggccagccccggcaccgccgccagcgagaacgacagcagcgtgagccccagcttcgccaacgaggtgaagaaggaggacgtgtacagcgcccaccacagcatcagcctggaggccgccagccccggcctggccgccagcacccaggacggcctggaccccgaccaggagcagcccgacctgaccagcatcgagagagccgagcccgtgagcgccaagctgacccccacccaccccagcgtgaagggcgagaaggaggagaacatgctggagcccagcatcagcctgagcgagcccctgatgctggaggagcccgagaaggaggagatcgagaccagcctgcccatcgccatcacccccgagcccgaggacagcaacctggtggaggaggagatcgtggagctggactaccccgagagccccctggtgagcgagaagcccttccccccccacatgagccccgaggtggagcacaaggaggaggagctgatcctgcccctgctggccgccagcagccccgagcacgtggccctgagcgaggaggagagagaggagatcgccagcgtgagcaccggcagcgccttcgtgagcgagtacagcgtgccccaggacctgaaccacgagctgcaggagcaggagggcgagcccgtgccccccagcaacgtggaggccatcgccgagcacgccgtgctgagcgaggaggagaacgaggagttcgaggcctacagccccgccgccgcccccaccagcgagagcagcctgagccccagcaccaccgagaagaccagcgagaaccagagccccctgttcagcaccgtgacccccgagtacatggtgctgagcggcgacgaggccagcgagagcggctgctacacccccgacagcaccagcgccagcgagtacagcgtgcccagcctggccaccaaggagagcctgaagaagaccatcgacagaaagagccccctgatcctgaagggcgtgagcgagtacatgatccccagcgaggagaaggaggacaccggcagcttcacccccgccgtggcccccgccagcgagcccagcctgagccccagcaccaccgagaagaccagcgagtgccagagccccctgcccagcaccgccaccagcgagcacgtggtgcccagcgagggcgaggacctgggcagcgagagattcacccccgacagcaagctgatcagcaagtacgccgcccccctgaacgccacccaggagagccagaagaagatcatcaacgaggccagccagttcaagcccaagggcatcagcgagcacaccgtgctgagcgtggacggcaaggaggtgatcggccccagcagccccgacctggtggtggccagcgagcacagcttccccccccacaccaccgagatgaccagcgagtgccaggccccccccctgagcgccacccccagcgagtacgtggtgctgagcgacgaggaggccgtggagctggagagatacacccccagcagcaccagcgccagcgagttcagcgtgcccccctacgccacccccgaggcccaggaggaggagatcgtgcacagaagcctgaacctgaagggcgccagcagccccatgaacctgagcgaggaggaccaggaggacatcggccccttcagccccgacagcgccttcgtgagcgagttcagcttccccccctacgccacccaggaggccgagaagagagagttcgagtgcgacagccccatctgcctgaccagccccagcgagcacaccatcctgagcgacgaggacaccgaggaggccgagctgttcagccccgacagcgccagccaggtgagcatcccccccttcagaatcagcgagaccgagaagaacgagctggagcccgacagcctgctgaccgccgtgagcgccagcggctacagctgcttcagcgaggccgacgaggaggacatcggcagcaccgccgccacccccgtgagcgagcagttcagcagcagccagaagcagaaggccgagaccttccccctgatgagccccctggaggacctgagcctgccccccagcaccgacaagagcgagaaggccgagatcaagcccgagatccccaccaccagcaccagcgtgagcgagtacctgatcctggcccagaagcagaagacccaggcctacctggagcccgagagcgaggacctgatccccagccacctgaccagcgaggtggagaagggcgagagagaggccagcagcagcgtggccgccatccccgccgccctgcccgcccagagcagcatcgtgaaggaggagaccaagcccgccagcccccacagcgtgctgcccgacagcgtgcccgccatcaagaaggagcaggagcccaccgccgccctgaccctgaaggccgccgacgagcagatggccctgagcaaggtgagaaaggaggagatcgtgcccgacagccaggaggccaccgcccacgtgagccaggaccagaagatggagccccagccccccaacgtgcccgagagcgagatgaagtacagcgtgctgcccgacatggtggacgagcccaagaagggcgtgaagcccaagctggtgctgaacgtgaccagcgagctggagcagagaaagctgagcaagaacgagcccgaggtgatcaagccctacagccccctgaaggagaccagcctgagcggccccgaggccctgagcgccgtgaagatggagatgaagcacgacagcaagatcaccaccacccccatcgtgctgcacagcgccagcagcggcgtggagaagcaggtggagcacggcccccccgccctggccttcagcgccctgagcgaggagatcaagaaggagatcgagcccagcagcagcaccaccaccgccagcgtgaccaagctggacagcaacctgaccagagccgtgaaggaggagatccccaccgacagcagcctgatcacccccgtggacagacccgtgctgaccaaggtgggcaagggcgagctgggcagcggcctgccccccctggtgaccagcgccgacgagcacagcgtgctggccgaggaggacaaggtggccatcaagggcgccagccccatcgagaccagcagcaagcacctggcctggagcgaggccgagaaggagatcaagttcgacagcctgcccagcgtgagcagcatcgccgagcacagcgtgctgagcgaggtggaggccaaggaggtgaaggccggcctgcccgtgatcaagaccagcagcagccagcacagcgacaagagcgaggaggccagagtggaggacaagcaggacctgctgttcagcaccgtgtgcgacagcgagagactggtgagcagccagaagaagagcctgatgagcaccagcgaggtgctggagcccgagcacgagctgcccctgagcctgtggggcgagatcaagaagaaggagaccgagctgcccagcagccagaacgtgagccccgccagcaagcacatcatccccaagggcaaggacgaggagaccgccagcagcagccccgagctggagaacctggccagcggcctggcccccaccctgctgctgctgagcgacgacaagaacaagcccgccgtggaggtgagcagcaccgcccagggcgacttccccagcgagaagcaggacgtggccctggccgagctgagcctggagcccgagaagaaggacaagccccaccagcccctggagctgcccaacgccggcagcgagttcagcagcgacctgggcagacagagcggcagcatcggcaccaagcaggccaagagccccatcaccgagaccgaggacagcgtgctggagaagggccccgccgagctgagaagcagagagggcaaggaggagaacagagagctgtgcgccagcagcaccatgcccgccatcagcgagctgagcagcctgctgagagaggagagccagaacgaggagatcaagcccttcagccccaagatcatcagcctggagagcaaggagccccccgccagcgtggccgagggcggcaaccccgaggagttccagcccttcaccttcagcctgaagggcctgagcgaggaggtgagccaccccgccgacttcaagaagggcggcaaccaggagatcggccccctgccccccaccggcaacctgaaggcccaggtgatgggcgacatcctggacaagctgagcgaggagaccggccaccccaacagcagccaggtgctgcagagcatcaccgagcccagcaagatcgcccccagcgacctgctggtggagcagaagaagaccgagaaggccctgcacagcgaccagaccgtgaagctgcccgacgtgagcaccagcagcgaggacaagcaggacctgggcatcaagcagttcagcctgatgagagagaacctgcccctggagcagagcaagagcttcatgaccaccaagcccgccgacgtgaaggagaccaagatggaggagttcttcatcagccccaaggacgagaactggatgctgggcaagcccgagaacgtggccagccagcacgagcagagaatcgccggcagcgtgcagctggacagcagcagcagcaacgagctgagacccggccagctgaaggccgccgtgagcagcaaggaccacacctgcgaggtgagaaagcaggtgctgccccacagcgccgaggagagccacctgagcagccaggaggccgtgagcgccctggacaccagcagcggcaacaccgagaccctgagcagcaagagctacagcagcgaggaggtgaagctggccgaggagcccaagagcctggtgctggccggcaacgtggagagaaacatcgccgagggcaaggagatccacagcctgatggagagcgagagcctgctgctggagaaggccaacaccgagctgagctggcccagcaaggaggacagccaggagaagatcaagctgccccccgagagattcttccagaagcccgtgagcggcctgagcgtggagcaggtgaagagcgagaccatcagcagcagcgtgaagaccgcccacttccccgccgagggcgtggagcccgccctgggcaacgagaaggaggcccacagaagcaccccccccttccccgaggagaagcccctggaggagagcaagatggtgcagagcaaggtgatcgacgacgccgacgagggcaagaagcccagccccgaggtgaagatccccacccagagaaagcccatcagcagcatccacgccagagagccccagagccccgagagccccgaggtgacccagaacccccccacccagcccaaggtggccaagcccgacctgcccgaggagaagggcaagaagggcatcagcagcttcaagagctggatgagcagcctgttcttcggcagcagcacccccgacaacaaggtggccgagcaggaggacctggagacccagcccagccccagcgtggagaaggccgtgaccgtgatcgaccccgagggcaccatccccaccaacttcaacgtggccgagaagcccgccgaccacagcctgagcgaggtgaagctgaagaccgccgacgagcccagaggcaccctggtgaagagcggcgacggccagaacgtgaaggagaagagcatgatcctgagcaacgtggaggacctgcagcagcccaagttcatcagcgaggtgagcagagaggactacggcaagaaggagatcagcggcgacagcgaggagatgaacatcaacagcgtggtgaccagcgccgacggcgagaacctggagatccagagctacagcctgatcggcgagaagctggtgatggaggaggccaagaccatcgtgcccccccacgtgaccgacagcaagagagtgcagaagcccgccatcgccccccccagcaagtggaacatcagcatcttcaaggaggagcccagaagcgaccagaagcagaagagcctgctgagcttcgacgtggtggacaaggtgccccagcagcccaagagcgccagcagcaacttcgccagcaagaacatcaccaaggagagcgagaagcccgagagcatcatcctgcccgtggaggagagcaagggcagcctgatcgacttcagcgaggacagactgaagaaggagatgcagaaccccaccagcctgaagatcagcgaggaggagaccaagctgagaagcgtgagccccaccgagaagaaggacaacctggagaacagaagctacaccctggccgagaagaaggtgctggccgagaagcagaacagcgtggcccccctggagctgagagacagcaacgagatcggcaagacccagatcaccctgggcagcagaagcaccgagctgaaggagagcaaggccgacgccatgccccagcacttctaccagaacgaggactacaacgagagacccaagatcatcgtgggcagcgagaaggagaagggcgaggagaaggagaaccaggtgtacgtgctgagcgagggcaagaagcagcaggagcaccagccctacagcgtgaacgtggccgagagcatgagcagagagagcgacatcagcctgggccacagcctgggcgagacccagagcttcagcctggtgaaggccaccagcgtgaccgagaagagcgaggccatgctggccgaggcccaccccgagatcagagaggccaaggccgtgggcacccagccccaccccctggaggagagcaaggtgctggtggagaagaccaagaccttcctgcccgtggccctgagctgcagagacgagatcgagaaccacagcctgagccaggagggcaacctggtgctggagaagagcagcagagacatgcccgaccacagcgaggagaaggagcagttcagagagagcgagctgagcaagggcggcagcgtggacatcaccaaggagaccgtgaagcagggcttccaggagaaggccgtgggcacccagcccagacccctggaggagagcaaggtgctggtggagaagaccaagaccttcctgcccgtggtgctgagctgccacgacgagatcgagaaccacagcctgagccaggagggcaacctggtgctggagaagagcagcagagacatgcccgaccacagcgaggagaaggagcagttcaaggagagcgagctgtggaagggcggcagcgtggacatcaccaaggagagcatgaaggagggcttccccagcaaggagagcgagagaaccctggccagacccttcgacgagaccaagagcagcgagacccccccctacctgctgagccccgtgaagccccagaccctggccagcggcgccagccccgagatcaacgccgtgaagaagaaggagatgcccagaagcgagctgacccccgagagacacaccgtgcacaccatccagaccagcaaggacgacaccagcgacgtgcccaagcagagcgtgctggtgagcaagcaccacctggaggccgccgaggacaccagagtgaaggagcccctgagcagcgccaagagcaactacgcccagttcatcagcaacaccagcgccagcaacgccgacaagatggtgagcaacaaggagatgcccaaggagcccgaggacacctacgccaagggcgaggacttcaccgtgaccagcaagcccgccggcctgagcgaggaccagaagaccgccttcagcatcatcagcgagggctgcgagatcctgaacatccacgcccccgccttcatcagcagcatcgaccaggaggagagcgagcagatgcaggacaagctggagtacctggaggagaaggccagcttcaagaccatccccctgcccgacgacagcgagaccgtggcctgccacaagaccctgaagagcagactggaggacgagaaggtgacccccctgaaggagaacaagcagaaggagacccacaagaccaaggaggagatcagcaccgacagcgagaccgacctgagcttcatccagcccaccatccccagcgaggaggactacttcgagaagtacaccctgatcgactacaacatcagccccgaccccgagaagcagaaggccccccagaagctgaacgtggaggagaagctgagcaaggaggtgaccgaggagaccatcagcttccccgtgagcagcgtggagagcgccctggagcacgagtacgacctggtgaagctggacgagagcttctacggccccgagaagggccacaacatcctgagccaccccgagacccagagccagaacagcgccgacagaaacgtgagcaaggacaccaagagagacgtggacagcaagagccccggcatgcccctgttcgaggccgaggagggcgtgctgagcagaacccagatcttccccaccaccatcaaggtgatcgaccccgagttcctggaggagccccccgccctggccttcctgtacaaggacctgtacgaggaggccgtgggcgagaagaagaaggaggaggagaccgccagcgagggcgacagcgtgaacagcgaggccagcttccccagcagaaacagcgacaccgacgacggcaccggcatctacttcgagaagtacatcctgaaggacgacatcctgcacgacaccagcctgacccagaaggaccagggccagggcctggaggagaagagagtgggcaaggacgacagctaccagcccatcgccgccgagggcgagatctggggcaagttcggcaccatctgcagagagaagagcctggaggagcagaagggcgtgtacggcgagggcgagagcgtggaccacgtggagaccgtgggcaacgtggccatgcagaagaaggcccccatcaccgaggacgtgagagtggccacccagaagatcagctacgccgtgcccttcgaggacacccaccacgtgctggagagagccgacgaggccggcagccacggcaacgaggtgggcaacgccagccccgaggtgaacctgaacgtgcccgtgcaggtgagcttccccgaggaggagttcgccagcggcgccacccacgtgcaggagaccagcctggaggagcccaagatcctggtgccccccgagcccagcgaggagagactgagaaacagccccgtgcaggacgagtacgagttcaccgagagcctgcacaacgaggtggtgccccaggacatcctgagcgaggagctgagcagcgagagcacccccgaggacgtgctgagccagggcaaggagagcttcgagcacatcagcgagaacgagttcgccagcgaggccgagcagagcacccccgccgagcagaaggagctgggcagcgagagaaaggaggaggaccagctgagcagcgaggtggtgaccgagaaggcccagaaggagctgaagaagagccagatcgacacctactgctacacctgcaagtgccccatcagcgccaccgacaaggtgttcggcacccacaaggaccacgaggtgagcaccctggacaccgccatcagcgccgtgaaggtgcagctggccgagttcctggagaacctgcaggagaagagcctgagaatcgaggccttcgtgagcgagatcgagagcttcttcaacaccatcgaggagaactgcagcaagaacgagaagagactggaggagcagaacgaggagatgatgaagaaggtgctggcccagtacgacgagaaggcccagagcttcgaggaggtgaagaagaagaagatggagttcctgcacgagcagatggtgcacttcctgcagagcatggacaccgccaaggacaccctggagaccatcgtgagagaggccgaggagctggacgaggccgtgttcctgaccagcttcgaggagatcaacgagagactgctgagcgccatggagagcaccgccagcctggagaagatgcccgccgccttcagcctgttcgagcactacgacgacagcagcgccagaagcgaccagatgctgaagcaggtggccgtgccccagccccccagactggagccccaggagcccaacagcgccaccagcaccaccatcgccgtgtactggagcatgaacaaggaggacgtgatcgacagcttccaggtgtactgcatggaggagccccaggacgaccaggaggtgaacgagctggtggaggagtacagactgaccgtgaaggagagctactgcatcttcgaggacctggagcccgacagatgctaccaggtgtgggtgatggccgtgaacttcaccggctgcagcctgcccagcgagagagccatcttcagaaccgcccccagcacccccgtgatcagagccgaggactgcaccgtgtgctggaacaccgccaccatcagatggagacccaccacccccgaggccaccgagacctacaccctggagtactgcagacagcacagccccgagggcgagggcctgagaagcttcagcggcatcaagggcctgcagctgaaggtgaacctgcagcccaacgacaactacttcttctacgtgagagccatcaacgccttcggcaccagcgagcagagcgaggccgccctgatcagcaccagaggcaccagattcctgctgctgagagagaccgcccaccccgccctgcacatcagcagcagcggcaccgtgatcagcttcggcgagagaagaagactgaccgagatccccagcgtgctgggcgaggagctgcccagctgcggccagcactactgggagaccaccgtgaccgactgccccgcctacagactgggcatctgcagcagcagcgccgtgcaggccggcgccctgggccagggcgagaccagctggtacatgcactgcagcgagccccagagatacaccttcttctacagcggcatcgtgagcgacgtgcacgtgaccgagagacccgccagagtgggcatcctgctggactacaacaaccagagactgatcttcatcaacgccgagagcgagcagctgctgttcatcatcagacacagattcaacgagggcgtgcaccccgccttcgccctggagaagcccggcaagtgcaccctgcacctgggcatcgagccccccgacagcgtgagacacaagtag

SEQ ID NO: 246326 - protein, 346 aa, Artificial Sequence
  derived and/or modified sequence
MLFKQQAWLRQKLLVLGSLAVGSLLYLVARVGSLDRLQPICPIEGRLGGARTQAEFPLRALQFKRGLLHEFRKGNASKEQVRLHDLVQQLPKAIIIGVRKGGTRALLEMLNLHPAVVKASQEIHFFDNDENYGKGIEWYRKKMPFSYPQQITIEKSPAYFITEEVPERIYKMNSSIKLLIIVREPTTRAISDYTQVLEGKERKNKTYYKFEKLAIDPNTCEVNTKYKAVRTSIYTKHLERWLKYFPIEQFHVVDGDRLITEPLPELQLVEKFLNLPPRISQYNLYFNATRGFYCLRFNIIFNKCLAGSKGRIHPEVDPSVITKLRKFFHPFNQKFYQITGRTLNWP

SEQ ID NO: 246327 - DNA, 1041 bp, Artificial Sequence
  derived and/or modified sequence
atgctgttcaaacagcaggcctggttgcggcagaaactgctcgtgttggggtctctggcagtgggatctctcctgtatttggtggccagggtcgggagtttggatagactgcaacccatttgtcccatcgaagggaggttaggaggcgcccgaacgcaggctgaattccccctaagagctttgcagtttaagaggggactgctgcacgagttccgtaagggcaatgcttcaaaggagcaggttaggctgcacgatctggttcagcaactgcctaaagctattattatcggggttaggaagggcgggacaagggccttgctcgagatgctaaatttgcaccctgctgtcgtcaaggcctcacaagagatccacttctttgataacgacgagaattatggcaaggggatcgagtggtacaggaaaaagatgcccttctcctatccccaacagatcacaattgaaaagtctcccgcttacttcatcacagaggaagtacctgagagaatatacaagatgaacagcagtattaaattactcatcattgtgcgggagcctacaacacgcgccatcagtgactatacacaggtgctggagggaaaggaaaggaaaaataagacttattacaagtttgagaagctagcgatcgacccaaacacttgcgaagtgaacaccaaatataaggcagtgagaacttcaatctacactaaacatcttgagcgttggctcaaatattttccaattgagcagttccatgtggtggatggagaccgcctgatcacagaacccctgcccgagctacagctcgtagaaaaatttctgaacctgcccccaaggatatcccagtacaatctttactttaacgctacaagggggttttattgcctgcgatttaacataattttcaataaatgcctcgctggctccaaaggacgtatccacccggaggtggaccccagcgtgatcactaaactgagaaaattttttcatccattcaaccaaaagttttaccagattacagggagaactttaaactggccctag

SEQ ID NO: 246328 - DNA, 1041 bp, Artificial Sequence
  derived and/or modified sequence
atgctgtttaaacagcaggcctggttgcgccagaaactcctggtgctaggttcactggcggtcggtagcttgctttaccttgtcgcacgggttgggagcctagaccgactgcagcctatatgccccattgagggccgattagggggggccaggacccaggcagagtttccactgcgtgcgctgcagttcaaacgtggactgctgcatgagtttaggaaaggaaatgcttcaaaagaacaagtccggctgcatgacttagtgcagcagctgccaaaagccataatcatcggagtcagaaagggcgggacgcgagctctgctcgagatgctgaacctgcaccctgctgttgtaaaggcctcccaggagatccactttttcgataatgatgagaactacggcaagggaatcgagtggtaccgcaagaaaatgccttttagctacccacagcaaatcacaatagagaagtcgcccgcatacttcattacggaagaggtccctgaacgcatttacaagatgaattcttccattaagttattaattatcgtacgcgagccgactacgcgtgcaatttcagattacacacaggtactcgagggcaaggagagaaaaaacaagacctattataagtttgagaaactggctatcgaccctaatacctgcgaggtgaacacaaagtacaaagccgtgcggacctcaatctacacaaagcatttggagcgctggctgaagtattttcctatcgagcagttccatgtcgtcgatggggatcgcttaattaccgagcctctgcctgagctgcagttggtcgagaaatttctgaatcttccccctcgaattagtcagtacaatctttattttaatgccacacgcggcttctattgtttgcggttcaatataatattcaataaatgcctggccggttcaaaagggcgcattcacccagaagtggatccctccgtcatcactaagttgcggaagttcttccatccttttaatcaaaaattctaccagatcacgggtcgcactctgaattggccctag

SEQ ID NO: 246329 - DNA, 3901 bp, Artificial Sequence
  derived and/or modified sequence
gggagggtgtggactggcagccactctgcagctggtcgccagggacccggtccctcctgcgcgcccaagtgatggaggggaagagattcgcttagacacacacacgcgcacacagctgggcacgtctccgggaggcagctgccggctcgggcgctctgggggccgggcggcggccgtgacagcgccagccgcggggagcggggcgcccgcacagcttggcaccggaggctcgaggacgcaggaagggaagatcccagtcacactgagtgttgctcttttgggcggattgggagggagcgggctgcccgaggagctgtcaccgaggacgcccgaagtctcgccctctgcgcgcagggtccggggctgcgccggtgccctcgtggggcaaggaggatgcgcacctccccccgcagagcggctgcggtctccggcactgcgcggactccggctcctgcggccgcccgtgccgtgcccgcgccacgggagcgcgccctgccgcacctggttccagcctctcggggaagtgcaggaaacgcgccctaaactccactacttctcgcccgcctgcccccccgcccggctccccgcctcagacctcgccgccgccgccgccgccgccgccgcctgcgtgtggggcccgctcgcgtcttactcacacgcgccacgcacagccctgttggtttgctctcattcacgccgactcgctctccgccgagcctagcccgggcatccgaaactactggaccaactgccgtccggaccgcagcagcggccgggtgacccccacgcgacccgccgccgacccccgcgccctgaggctcccgcccgcgccgccaccgccggggaccacgagataatcagatactcactgtcttcagcattggtgtcttctattctcaacggcatttctggtggccaccccaggagtctccctgacctgttttaaaacccttggaaattaaggagagaatccactacatatattcctttgaaagtttccaccatatatgttcaaaaattgctgaatgagcacaaggatttgaaggtgctaaagcaagggataaaccaaaaggacagccagtaggtgaggagaggccatggaatacccgccaacaagataatcatcgctggaataatagggacctgtctgaatgtaggctgcagcagtcctgaaggttgatggagggccatgctattcaaacagcaggcgtggctgagacagaagctcctggtgctgggaagccttgccgttgggagtctcctgtatctagtcgccagagttgggagcttggataggctacaacccatttgccccattgaaggtcgactgggtggagcccgcactcaggctgaattcccacttcgcgccctgcagtttaagcgtggcctgctgcacgagttccggaagggcaacgcttccaaggagcaggttcgcctccatgacctggtccagcagctccccaaggccattatcattggggtgaggaaaggaggcacaagggccctgcttgaaatgctgaacctacatccggcagtagtcaaagcctctcaagaaatccacttttttgataatgatgagaattatggtaagggcattgagtggtataggaaaaagatgcctttttcctaccctcagcaaatcacaattgaaaagagcccagcatattttatcacagaggaggttccagaaaggatttacaaaatgaactcatccatcaagttgttgatcattgtcagggagccaaccacaagagctatttctgattatactcaggtgctagaggggaaggagaggaagaacaaaacttattacaagtttgagaagctggccatagaccctaatacatgcgaagtgaacacaaaatacaaagcagtaagaaccagcatctacaccaaacatctggaaaggtggttgaaatactttccaattgagcaatttcatgtcgtcgatggagatcgcctcatcacggaacctctgccagaacttcagctcgtggagaagttcctaaatctgcctccaaggataagtcaatacaatttatacttcaatgctaccagagggttttactgcttgcggtttaatattatctttaataagtgcctggcgggcagcaaggggcgcattcatccagaggtggacccctctgtcattactaaattgcgcaaattctttcatccttttaatcaaaaattttaccagatcactgggaggacattgaactggccctaaaataatatgtcatacaacactatgtgttgtgcctggagacacacaatgtctcctgtagattaaaatatgcacttttcctaggcagagctatccaagtcatttttccatgtatatttgtacatacgcagtgtgtgaccaaatataagatcagttctttttctactgaaaatttacgaaaaaaaaaaaattgctgtctgcatagtcgcatcttttaagctatttacaaaagagaagaggtggtggtattgggggaaagtgacttcagctattctcaaagagttagtcttcctttgattcagaatttgtcacccgccattttcatagatttaagccaaaagataaatgtgtgaaaatgtaccaatggctgcgaagcttcaggaagtagaggatccagtgatgcattttttttttcctaagggaaagctggctctttaattcagatgctgaattggtgccatgaaaacagaaaatgctattttcttattatttaaaagaacgtcttatctcataaaattgacattgttccaaagttcttgtggtgattttgcactattgttttctcgtatggaccatggtgtcacttgtagcatgtcaatcacacattggaaagtcaagtccttttacttccatgttgtatgtcaacagagagaaatgtcatgtacataatgtatattgttgtaaatactggtttcacactaagtaattctattttgtaaactgaatatggctatttaatttattgtgaaaattaaatttattgtggtatttaaaaatggaatggattaaaattactctatgtgcaattttttttttttttactcattttgttttacgtgccccctgctggcttccaaaatggaagctgtttacgtgcatatgagagcacttggaaagatgtgcttccctgctggatttctgtaccccagtgaaaatgtatttatgaagtgaggttgagtatattaaaaaagaaaaacctcaaccatctggaaatcaagtataatagccacctcaaagaaccctagtgctgctctgctacaactttgtaacaattaatttactcgcagttgctgctgctcaggaagagagacaaggaatattttaacagaatcaaggcatagaagaatcaccattttatttgaacctctaatcagagtcagaccagtagagaaattaaataagattagaaaactctgtactgaaagctgctgatgcttcaaaaatgaaaacaagatctcacaactctccctgttagttgaaaatatatcaatttgctctgaaaggattcagctgcctagtgttgccattactaacataaacatatggctcatatttccatccagagaaattaatgctaaattggtgcctcgctaacatcagatacactgtattatgcttaaatatattcagtaaaatgtggaaaggggtattaacaacgacaacaaaaagatggattttttttttctcacaatcacagttgctaatccagtgggagatgtttgagagagttttgttcaacatcacagtgagagtgcctagggaaatcagaaaattacaatggattcccctttgattgtaataagtgttgattttctccatgagttgtttatcctgtctagtgatttgatggtgaacttttctaaataaatagccctttcccctccggtgtcggta

SEQ ID NO: 246330 - DNA, 2744 bp, Artificial Sequence
  derived and/or modified sequence
gctgcagcagtcctgaaggttgatggagggccatgctattcaaacagcaggcgtggctgagacagaagctcctggtgctgggaagccttgccgttgggagtctcctgtatctagtcgccagagttgggagcttggataggctacaacccatttgccccattgaaggtcgactgggtggagcccgcactcaggctgaattcccacttcgcgccctgcagtttaagcgtggcctgctgcacgagttccggaagggcaacgcttccaaggagcaggttcgcctccatgacctggtccagcagctccccaaggccattatcattggggtgaggaaaggaggcacaagggccctgcttgaaatgctgaacctacatccggcagtagtcaaagcctctcaagaaatccacttttttgataatgatgagaattatggtaagggcattgagtggtataggaaaaagatgcctttttcctaccctcagcaaatcacaattgaaaagagcccagcatattttatcacagaggaggttccagaaaggatttacaaaatgaactcatccatcaagttgttgatcattgtcagggagccaaccacaagagctatttctgattatactcaggtgctagaggggaaggagaggaagaacaaaacttattacaagtttgagaagctggccatagaccctaatacatgcgaagtgaacacaaaatacaaagcagtaagaaccagcatctacaccaaacatctggaaaggtggttgaaatactttccaattgagcaatttcatgtcgtcgatggagatcgcctcatcacggaacctctgccagaacttcagctcgtggagaagttcctaaatctgcctccaaggataagtcaatacaatttatacttcaatgctaccagagggttttactgcttgcggtttaatattatctttaataagtgcctggcgggcagcaaggggcgcattcatccagaggtggacccctctgtcattactaaattgcgcaaattctttcatccttttaatcaaaaattttaccagatcactgggaggacattgaactggccctaaaataatatgtcatacaacactatgtgttgtgcctggagacacacaatgtctcctgtagattaaaatatgcacttttcctaggcagagctatccaagtcatttttccatgtatatttgtacatacgcagtgtgtgaccaaatataagatcagttctttttctactgaaaatttacgaaaaaaaaaaaattgctgtctgcatagtcgcatcttttaagctatttacaaaagagaagaggtggtggtattgggggaaagtgacttcagctattctcaaagagttagtcttcctttgattcagaatttgtcacccgccattttcatagatttaagccaaaagataaatgtgtgaaaatgtaccaatggctgcgaagcttcaggaagtagaggatccagtgatgcattttttttttcctaagggaaagctggctctttaattcagatgctgaattggtgccatgaaaacagaaaatgctattttcttattatttaaaagaacgtcttatctcataaaattgacattgttccaaagttcttgtggtgattttgcactattgttttctcgtatggaccatggtgtcacttgtagcatgtcaatcacacattggaaagtcaagtccttttacttccatgttgtatgtcaacagagagaaatgtcatgtacataatgtatattgttgtaaatactggtttcacactaagtaattctattttgtaaactgaatatggctatttaatttattgtgaaaattaaatttattgtggtatttaaaaatggaatggattaaaattactctatgtgcaattttttttttttttactcattttgttttacgtgccccctgctggcttccaaaatggaagctgtttacgtgcatatgagagcacttggaaagatgtgcttccctgctggatttctgtaccccagtgaaaatgtatttatgaagtgaggttgagtatattaaaaaagaaaaacctcaaccatctggaaatcaagtataatagccacctcaaagaaccctagtgctgctctgctacaactttgtaacaattaatttactcgcagttgctgctgctcaggaagagagacaaggaatattttaacagaatcaaggcatagaagaatcaccattttatttgaacctctaatcagagtcagaccagtagagaaattaaataagattagaaaactctgtactgaaagctgctgatgcttcaaaaatgaaaacaagatctcacaactctccctgttagttgaaaatatatcaatttgctctgaaaggattcagctgcctagtgttgccattactaacataaacatatggctcatatttccatccagagaaattaatgctaaattggtgcctcgctaacatcagatacactgtattatgcttaaatatattcagtaaaatgtggaaaggggtattaacaacgacaacaaaaagatggattttttttttctcacaatcacagttgctaatccagtgggagatgtttgagagagttttgttcaacatcacagtgagagtgcctagggaaatcagaaaattacaatggattcccctttgattgtaataagtgttgattttctccatgagttgtttatcctgtctagtgatttgatggtgaacttttctaaataaatagccctttcccctccggtgtcggta

SEQ ID NO: 246331 - DNA, 1041 bp, Artificial Sequence
  derived and/or modified sequence
atgctgttcaagcagcaggcctggctgcggcagaagctgctggtgctgggcagcctggccgtgggcagcctgctgtacctggtggcccgggtgggcagcctggaccggctgcagcccatctgccccatcgagggccgcctgggcggggcccggacccaggccgagttccccctgcgggccctgcagttcaagaggggcctgctgcacgagttcagaaaaggaaatgccagcaaggagcaggtgcggctgcatgacctggtgcagcagctgcccaaggccatcatcatcggcgtgaggaagggcggcacccgggccctgctggagatgctgaacctgcaccctgctgtggtgaaggccagccaggagatccacttctttgacaatgatgagaactacggcaagggcatcgagtggtacaggaagaagatgcccttctcctacccccagcagatcaccatcgagaagagccctgcctacttcatcacagaggaggtgcctgagcgcatctacaagatgaacagcagcatcaagctgctgatcatcgtgcgggagcccaccacccgggccatcagtgactacacccaggtgctggagggcaaggagaggaagaacaagacctactacaagtttgagaagctggccatcgaccccaacacctgtgaggtgaacaccaagtacaaggctgtgaggaccagcatctacaccaagcacctggagcgctggctgaagtacttccccatcgagcagttccacgtggtggatggagacaggctcatcacagagcccctgcctgagctgcagctggtggagaagttcctgaacctgcccccacgcatcagccagtacaacctgtacttcaatgccacccggggcttctactgcctgcgcttcaacatcatcttcaacaagtgcctggccggcagcaagggccgcatccaccctgaggtggaccccagcgtcatcaccaagctgaggaagttcttccaccccttcaaccagaagttctaccagatcactggaagaaccctgaactggccctag

SEQ ID NO: 246332 - DNA, 1041 bp, Artificial Sequence
  derived and/or modified sequence
atgctgttcaagcagcaggcctggctgcggcagaagctgctggtgctgggatccttagccgttggctcactgctgtacctggtggcccgagtgggttcccttgatcggctacagcccatctgtccaatcgaaggaaggctgggcggtgcacgaacgcaggccgaattccccctccgggctttgcagttcaagcgtggactcctgcatgagttcaggaagggaaatgcatcaaaggagcaggtaaggctccacgacctggtgcagcaacttccaaaggcaatcatcataggagtgcgcaagggcggaacccgagctctcctcgagatgctgaacctccaccctgcagtcgttaaggcctcgcaggagatacacttttttgacaacgatgagaactacggtaaaggcatcgagtggtaccgaaagaagatgccttttagttaccctcagcagattacaattgaaaaaagcccagcttattttatcacggaagaggtgccagagcgaatttataaaatgaattccagcatcaagctgctgatcattgtgagagagcctacgacgcgagctataagtgactatacccaggtgctcgagggtaaagagaggaagaataagacctactacaagtttgagaaactggccattgatccaaacacctgcgaggtgaacaccaaatataaagccgttcgtactagtatttatactaaacacctggaacgctggctgaaatattttcctatcgaacagttccatgtcgtcgacggagaccggctcatcacagagccccttccggagctgcagctggtcgaaaaattcttgaacctaccccccagaatctcccagtataatctgtacttcaacgctacaagagggttttattgcctaagatttaatatcattttcaacaaatgcctggcagggagtaaaggtagaatccatccggaggtggacccgtccgttatcactaagctgcggaaattcttccaccccttcaatcagaaattttatcaaattacggggcgaaccctgaactggccgtag

SEQ ID NO: 246333 - DNA, 1041 bp, Artificial Sequence
  derived and/or modified sequence
atgctgttcaagcagcaggcctggctgcggcagaagctgctggtgttgggcagtttagcagtcggcagtctgctctaccttgtggcacgagtgggatccttagaccgcttacagcccatctgcccaattgagggccgattgggtggcgcccgcacacaggcagaattccccctgcgggccctccagtttaagagaggactgttgcatgagttcaggaaggggaacgcgtcaaaggaacaagtgcggttacatgacctggtccagcagctccccaaagcaattataattggcgttcggaaggggggaactcgcgccctgttagagatgctaaatctacatcccgctgtggtcaaagcatctcaggagattcatttttttgataatgatgaaaattatggcaaaggaatcgagtggtaccgcaagaagatgcctttttcctaccctcagcaaataaccattgagaagagccccgcatacttcattactgaagaagttcccgaacgcatatacaagatgaatagctctatcaagctcctcattatcgtgagggagcccacgacgcgggccatctcagactatacacaggtcctagaagggaaagagcggaaaaacaaaacctactacaagtttgagaaacttgccatcgacccaaacacatgtgaagtaaatacgaagtacaaggccgtgagaacaagtatctacacaaagcacttagaaaggtggcttaaatattttcccatcgagcagttccatgtcgttgacggagataggctgataacagagcccctgccagaactgcagctggtggaaaagttcctgaacctgccccctaggattagccaatacaacctgtactttaacgcaactagggggttctactgtcttcggtttaatattattttcaacaagtgcctggcaggtagcaaggggcgtattcatccggaagtggatcccagcgtaattaccaagctacggaaattctttcacccctttaatcagaagttctatcagattaccgggcgtacattgaactggccttag

SEQ ID NO: 246334 - DNA, 1041 bp, Artificial Sequence
  derived and/or modified sequence
atgcttttcaaacagcaagcttggctgaggcaaaagctccttgtgttgggaagtcttgcagtggggagtctcctatatctcgtggccagggtgggaagcctcgataggcttcaacccatttgcccgatcgaaggcaggctgggcggagctaggacccaggccgagttcccccttcgggctctgcagttcaaaagaggtcttcttcacgaatttcgaaaaggcaatgcatctaaagaacaggtccgcctccacgatctggtgcagcagctcccaaaggccattataatcggcgtgaggaaaggaggaacacgggcactattggaaatgctgaatcttcacccagctgtcgtcaaagcttctcaagaaatccacttcttcgataacgacgaaaactatggaaagggtatcgagtggtatcgtaagaaaatgccatttagctacccccagcagatcacaatagagaagagcccagcctacttcatcactgaagaagtgcctgagcgtatctacaagatgaacagtagtataaaacttctgattatagtgagagaacctaccacgcgggcaatcagcgactatactcaggtgttagagggaaaagagcgtaaaaacaagacctattataaattcgagaaactggcaatcgacccaaatacctgtgaagtgaacaccaaatacaaagctgtccgcacttccatttataccaaacacctggagaggtggctaaaatacttccccatcgaacagtttcatgtagttgatggggaccgtctgattaccgagccgttgcctgaacttcaattggtcgaaaaatttctcaatcttccccctcgcattagtcaatataatctttattttaacgccacccgcggtttttattgtctccgctttaacatcatcttcaataagtgcctcgccggaagcaagggaaggatccacccagaggtcgacccaagtgtcataaccaaactccggaagttttttcatcctttcaaccaaaaattctaccagataacaggtcgcacactgaattggccttag

SEQ ID NO: 246335 - DNA, 1041 bp, Artificial Sequence
  derived and/or modified sequence
atgcttttcaagcagcaggcgtggctgcgacagaagttgctcgtgcttggaagcctggctgtggggtctttgctttacctggttgccagggttggctccctcgatagactgcagccaatctgccccattgagggccgactgggaggagccaggacccaggccgaatttcctctgagagcccttcagtttaagcggggactgctccacgaatttcgcaagggaaacgccagcaaggagcaggtacgcctgcacgatctggtccaacaactcccaaaggcaattataataggagtccgaaaaggcggtactcgagctcttctggaaatgttaaatctgcatccggcagtggtaaaagccagtcaggaaatccacttcttcgataacgatgagaactatgggaagggaatcgaatggtatcggaagaaaatgcccttctcttaccctcagcaaataacgatcgaaaaatctcctgcttactttattaccgaagaggtgccggaacgcatctacaaaatgaatagttcaatcaaactccttataattgtacgtgagcccactacaagggccatctccgattacacacaggttctcgagggcaaggagagaaaaaataagacttactataagttcgaaaagctggctatcgatccgaatacatgcgaggtgaacactaaatacaaggccgtgcgcactagtatttacaccaagcacctagagcgctggctgaaatactttcctattgaacagttccacgttgttgacggagacaggctgatcaccgaacctctgcctgagctgcaactcgtagagaagttcttaaacttgcctccgcgtatctcccagtacaatctttactttaacgccactcgtggattttactgtctccggttcaacatcatttttaacaagtgcctggctggatccaagggcagaatccatcctgaggtggatccatccgtgatcacaaagttaagaaagttttttcatccttttaaccagaagttttatcagatcactggcagaaccctcaattggccttag

SEQ ID NO: 246336 - DNA, 1041 bp, Artificial Sequence
  derived and/or modified sequence
atgctgttcaagcagcaggcctggctgagacagaagctgctggtgctgggcagcctggccgtgggcagcctgctgtacctggtggccagagtgggcagcctggacagactgcagcccatctgccccatcgagggcagactgggcggcgccagaacccaggccgagttccccctgagagccctgcagttcaagagaggcctgctgcacgagttcagaaagggcaacgccagcaaggagcaggtgagactgcacgacctggtgcagcagctgcccaaggccatcatcatcggcgtgagaaagggcggcaccagagccctgctggagatgctgaacctgcaccccgccgtggtgaaggccagccaggagatccacttcttcgacaacgacgagaactacggcaagggcatcgagtggtacagaaagaagatgcccttcagctacccccagcagatcaccatcgagaagagccccgcctacttcatcaccgaggaggtgcccgagagaatctacaagatgaacagcagcatcaagctgctgatcatcgtgagagagcccaccaccagagccatcagcgactacacccaggtgctggagggcaaggagagaaagaacaagacctactacaagttcgagaagctggccatcgaccccaacacctgcgaggtgaacaccaagtacaaggccgtgagaaccagcatctacaccaagcacctggagagatggctgaagtacttccccatcgagcagttccacgtggtggacggcgacagactgatcaccgagcccctgcccgagctgcagctggtggagaagttcctgaacctgccccccagaatcagccagtacaacctgtacttcaacgccaccagaggcttctactgcctgagattcaacatcatcttcaacaagtgcctggccggcagcaagggcagaatccaccccgaggtggaccccagcgtgatcaccaagctgagaaagttcttccaccccttcaaccagaagttctaccagatcaccggcagaaccctgaactggccctag

SEQ ID NO: 246337 - protein, 524 aa, Artificial Sequence
  derived and/or modified sequence
MSQGSPGDWAPLDPTPGPPASPNPFVHELHLSRLQRVKFCLLGALLAPIRVLLAFIVLFLLWPFAWLQVAGLSEEQLQEPITGWRKTVCHNGVLGLSRLLFFLLGFLRIRVRGQRASRLQAPVLVAAPHSTFFDPIVLLPCDLPKVVSRAENLSVPVIGALLRFNQAILVSRHDPASRRRVVEEVRRRATSGGKWPQVLFFPEGTCSNKKALLKFKPGAFIAGVPVQPVLIRYPNSLDTTSWAWRGPGVLKVLWLTASQPCSIVDVEFLPVYHPSPEESRDPTLYANNVQRVMAQALGIPATECEFVGSLPVIVVGRLKVALEPQLWELGKVLRKAGLSAGYVDAGAEPGRSRMISQEEFARQLQLSDPQTVAGAFGYFQQDTKGLVDFRDVALALAALDGGRSLEELTRLAFELFAEEQAEGPNRLLYKDGFSTILHLLLGSPHPAATALHAELCQAGSSQGLSLCQFQNFSLHDPLYGKLFSTYLRPPHTSRGTSQTPNASSPGNPTALANGTVQAPKQKGD

SEQ ID NO: 246338 - DNA, 1575 bp, Artificial Sequence
  derived and/or modified sequence
atgtcccagggcagtccaggtgattgggccccactggacccgacacccggaccacctgcatctcccaatccttttgttcacgagctccatctttccagactgcagagggtgaaattttgcctccttggcgcactccttgccccaatccgggtgcttctagcgttcatcgtcctctttctgctgtggccttttgcctggttgcaagtggccggcctctcagaggagcaactgcaggagcccatcactggatggagaaaaacagtgtgtcacaacggcgtgctggggctatctaggctgctgttctttttgttaggcttcctcagaattagggtaagaggacaacgggcttcccggcttcaggcccctgtactggtcgccgcaccccactccacattcttcgatccaattgtcctgctcccctgtgatctccccaaagtggtcagcagagccgagaacctttcggtcccagtgatcggggcattgctgaggtttaatcaggcaattctggtgagccggcacgaccctgcgtcgcggcggcgcgtggtggaggaggtccgtcggagggctacctcaggcggcaaatggcctcaggttctcttctttcccgagggaacatgctctaataaaaaggctcttctgaaatttaagcccggagcctttattgcaggagtgccagtgcaaccagttcttattcggtatcccaattccctcgacaccacatcctgggcttggaggggccccggagtgctcaaggtcctttggcttacagctagtcaaccatgttcaatagtggatgtggagtttctcccagtttatcacccaagccccgaggaatcacgggatccgaccttgtatgccaataacgtgcagagggtcatggctcaggccttgggcataccggcgacagaatgcgagttcgtcggtagcctgcctgtgatcgtggtggggagactcaaagttgctctggaacctcagttatgggagctgggcaaggttcttcgcaaggccggactctctgctggctacgtggatgccggggcggaaccaggcagatcacggatgatttcgcaagaggagttcgcacggcaactgcaactgagcgatccccagacagtagccggggccttcgggtactttcagcaggacaccaaggggctcgtggactttcgagatgtagctcttgcactcgccgctctagatggggggcgctcactcgaggagctgacacgcctcgccttcgaactatttgcagaggaacaggcagaagggccaaaccggctcctctacaaagacggtttttccactatcctccacctcctattaggatcacctcacccagcagccactgccctacatgccgaactgtgccaggccggaagcagccagggcctctcactttgtcagtttcagaattttagcctgcacgatcctctttacggcaaactttttagtacatatttgaggccccctcacacctctagggggacaagtcagacacctaatgccagcagcccaggaaatccaactgccctggcgaacggtaccgttcaggctcccaaacagaaaggcgactag

SEQ ID NO: 246339 - DNA, 1575 bp, Artificial Sequence
  derived and/or modified sequence
atgagccagggcagccctggggactgggcccccctggaccccaccccaggccccccagccagccccaacccctttgtgcatgagctgcacctgagccggctgcagagggtgaagttctgcctgctgggcgccctgctggcccccatccgggtgctgctggccttcatcgtgctcttcctgctgtggccctttgcctggctgcaggtggccggcctgtctgaggagcagctgcaggagcccatcaccggctggaggaagacagtgtgccacaatggagtgctgggcctgagccggctgctcttcttcctgctgggcttcctgcgcatccgggtgcggggccagagggccagccggctgcaggcccctgtgctggtggccgccccccacagcaccttctttgaccccatcgtgctgctgccctgtgacctgcccaaggtggtgtccagagctgagaacctgtctgtgcctgtgattggagccctgctgcgcttcaaccaggccatcctggtgtccagacatgaccctgccagcagaagaagagtggtggaggaggtgagaagaagagccaccagcggcggcaagtggccccaggtgctcttcttccctgagggcacctgcagcaacaagaaggccctgctgaagttcaagccaggggccttcatcgccggcgtgcctgtgcagcctgtgctgatccgctaccccaacagcctggacaccacctcctgggcctggaggggccctggggtgctgaaggtgctgtggctgacagccagccagccctgcagcatcgtggatgtggagttcctgcctgtgtaccaccccagccctgaggagagccgggaccccaccctgtatgccaacaacgtgcagagggtgatggcccaggccctgggcatcccagccacagaatgtgaatttgtgggcagcctgcctgtgattgtggtgggccgcctgaaggtggccctggagccccagctgtgggagctgggcaaggtgctgaggaaggccggcctgtctgctggctacgtggatgctggagctgagcccggccgcagcaggatgatcagccaggaggagtttgcccggcagctgcagctgagtgacccccagacagtggccggggccttcggctacttccagcaggacaccaagggcctggtggacttcagagatgtggccctggccctggccgccctggatggcggccgcagcctggaggagctgacccggctggcctttgagctgtttgctgaggagcaggccgagggccccaaccggctgctgtacaaggatggcttcagcaccatcctgcacctgctgctgggcagcccccaccctgctgccacagccctgcatgctgagctgtgccaggccggcagcagccagggcctgagcctgtgccagttccagaacttcagcctgcatgaccccctgtatggcaagctgttcagcacctacctgcggcccccccacaccagccggggcaccagccagaccccaaatgccagcagccctggcaaccccacagccctggccaatggaacagtgcaggcccccaagcagaagggggactag

SEQ ID NO: 246340 - DNA, 1971 bp, Artificial Sequence
  derived and/or modified sequence
ggcgccctgacaacgcgggcgggctgggctgcgccgcctgctccccgcccctcggccgcctgcaccgggcggggcccgggccagagcgccgccgccgccgctgctgcagcagcagctgctctgcagagtggtggccggggccagggccggggtgccctccctcccaccttctcccgccatgagccagggaagtccgggggactgggcccccctagatcccacccccggacccccagcatcccccaaccccttcgtgcatgagttacatctctctcgcctccagagggttaagttctgcctcctgggggcattgctggcccccatccgagtgcttctggcctttatcgtcctctttctcctctggccctttgcctggcttcaagtggccggtcttagtgaggagcagcttcaggagccaattacaggatggaggaagactgtgtgccacaacggggtgctaggcctgagccgcctgctgtttttcctgctgggcttcctccggattcgcgttcgtggccagcgagcctctcgccttcaagcccctgtccttgttgctgccccacactccactttctttgaccccattgttctgctgccctgtgacctgcccaaagttgtgtcccgagctgagaacctttccgttcctgtcattggagcccttcttcgattcaaccaagccatcctggtatcccggcatgacccggcttctcgacgcagagtggtggaggaggtccgaaggcgggccacctcaggaggcaagtggccgcaggtgctattctttcctgagggcacctgttccaacaagaaggctttgcttaagttcaaaccaggagccttcatcgcaggggtgcctgtgcagcctgtcctcatccgctaccccaacagtctggacaccaccagctgggcatggaggggtcctggagtactcaaagtcctctggctcacagcctctcagccctgcagcattgtggatgtggagttccttcctgtgtatcaccccagccctgaggagagcagggaccccaccctctatgccaacaatgttcagagggtcatggcacaggctctgggcattccagccaccgaatgtgagtttgtagggagcttacctgtgattgtggtgggccggctgaaggtggcgttggaaccacagctctgggaactgggaaaagtgcttcggaaggctgggctgtccgctggctatgtggacgctggggcagagccaggccggagtcgaatgatcagccaggaagagtttgccaggcagctacagctctctgatcctcagacggtggctggtgcctttggctacttccagcaggataccaagggtttggtggacttccgagatgtggcccttgcactagcagctctggatgggggcaggagcctggaagagctaactcgtctggcctttgagctctttgctgaagagcaagcagagggtcccaaccgcctgctgtacaaagacggcttcagcaccatcctgcacctgctgctgggttcaccccaccctgctgccacagctttgcatgctgagctgtgccaggcaggatccagccaaggcctctccctctgtcagttccagaacttctccctccatgacccactctatgggaaactcttcagcacctacctgcgccccccacacacctctcgaggcacctcccagacaccaaatgcctcatccccaggcaaccccactgctctggccaatgggactgtgcaagcacccaagcagaagggagactgagtgcctcagcctctcaccccctcctcctcagggcagcgctaggggcctcccctatgcctcagccccatctctgctcctgtttgaattttgttattgttgtttggttgttgtttttttaagttgattttaattttttgtttggttgatttttttgtaaaaaactattttatatataaatataaatctatatctatatctattaaaaaaaatgaagtcca

SEQ ID NO: 246341 - DNA, 1575 bp, Artificial Sequence
  derived and/or modified sequence
atgagccagggcagccccggcgactgggcccccctggaccccacccctggacctccagccagtccaaaccctttcgtgcatgagctccatttatcacgcctgcaacgtgtaaagttctgtcttttgggggccctgctggcacccatacgagtgttgctggcttttattgtcctgttcctgttatggccattcgcctggctgcaggtggccggcctttcagaggagcaattgcaagaaccaattacagggtggcgtaagacggtgtgccacaatggggtcctgggtctctcccgtcttctcttctttctgcttggctttctgcggattagggtcaggggccagcgcgcaagcaggctgcaagctccagtcctggtggctgctcctcacagcacttttttcgatcccattgtgctcctaccttgtgacttgccaaaggtcgtatccagggcagaaaacctgtctgtgccagtgatcggcgctcttctgcggtttaatcaagcaatcctggtctcaaggcacgaccccgcaagccgcaggcgggtggttgaggaggttcgcagacgcgcgacgagtggcggcaaatggccgcaagtgctcttcttccctgagggcacctgtagtaacaaaaaagctctcctgaagtttaagcccggagcgtttatcgctggtgtcccagtgcagccggtcctgatcaggtatcctaatagcctggataccacaagctgggcatggcggggccccggcgttctcaaggttctctggttaaccgcttctcaaccttgtagtattgtcgacgtggagttcctccctgtgtaccatcccagccccgaggagagtcgggatccaacactgtatgccaacaacgtacagagagttatggcgcaggccctggggattcctgccacagagtgcgaattcgtgggctccttgcccgtcattgtcgtggggcggctgaaggtcgctctcgagcctcagctgtgggaactgggaaaggtcctgcgaaaggcggggctgagtgctgggtacgtcgacgccggagctgagcctggaaggtccaggatgatttcccaagaagagtttgccagacaactgcaactgagcgatccacagacagtagcgggagcctttgggtacttccagcaggataccaagggccttgtggactttcgggacgttgcccttgcactggcggcattggatggaggacgtagcttggaagaactgaccaggctggcattcgagctcttcgcagaggaacaggctgagggccccaaccgtcttctttacaaagacgggttttcaaccattttgcacctcttgctagggagcccacaccctgccgctacagcactacatgccgagctctgtcaggcgggatcttctcaggggctgtccctatgtcagttccaaaacttttcactacatgacccactctatggcaagctcttcagcacttacctgcgcccgcctcataccagccgagggacatcacagactcccaacgcatcctctcctgggaatcccacggcactagccaacggcaccgtgcaggcccctaagcagaagggtgactag

SEQ ID NO: 246342 - DNA, 1575 bp, Artificial Sequence
  derived and/or modified sequence
atgagccaggggagccccggagactgggcgccactggaccctacacccggacctccagcatccccgaatccattcgtacacgagctgcatctgtcacgacttcagagagtaaagttctgcctcctgggggcacttctcgcaccgataagagtcctcctcgccttcatcgtactttttttgctctggccgttcgcatggctgcaggtggcaggcttgagcgaagagcagcttcaagagcccatcacagggtggagaaagactgtctgccacaacggggtgctcggtctgtcaagactgctgtttttcttgctggggtttttgaggattagggtacggggacaacgagcatcccggttgcaggcccctgtgctcgtggccgctccccattcaaccttcttcgaccccatagtgctgttaccctgcgacttacctaaggttgtaagccgggctgaaaacctcagcgtacccgtcattggcgcactcttacgatttaaccaagcaattctggtgtcacggcacgatcccgctagccgacgtcgggttgtggaggaggtcagacggagagcaacctcgggcggaaagtggccacaggtcctcttctttcccgaaggtacatgttcaaacaaaaaggctctcctgaaattcaagcccggagctttcattgccggtgtgcctgtgcagcccgtgctgattcgttaccccaactcgctggacacaacctcctgggcgtggcgaggcccaggcgtcctgaaggtactttggctgactgcgtctcaaccatgctctattgtggacgtagaatttttgcctgtctaccacccctcaccagaagagtcccgggatccaacgctgtacgctaacaatgtccagagggttatggcccaggctctgggtatcccagccaccgagtgtgagttcgtgggtagcctcccagtgatcgtcgtaggaagattgaaggttgctttggagccccagctgtgggaactggggaaggttttgaggaaagcgggattgtcagcgggatatgttgacgcaggcgctgaaccaggtcggtctagaatgatctctcaggaggagttcgcaagacaactgcagctgagcgatccgcagactgttgcaggcgcttttgggtatttccagcaagataccaagggcttagttgatttccgggatgttgccctagcactcgccgctcttgatggaggaaggagtctcgaagaattgacgcggttagccttcgaattatttgctgaagaacaggctgaaggaccaaaccgacttctgtataaggatggcttctcaacaatactacacttgttgcttggctccccgcatcctgcagcaactgctcttcatgctgagctctgtcaagccggatcctcacagggactgtcactgtgccagtttcaaaatttcagcctccacgaccctctgtatggcaagctgttcagcacttaccttaggcctccacacacgtccaggggtacttcacaaacccctaacgcttcatcaccaggtaatcccacggccttggccaacgggacggtgcaggcacctaagcagaaaggagactag

SEQ ID NO: 246343 - DNA, 1575 bp, Artificial Sequence
  derived and/or modified sequence
atgagccagggcagccccggcgactgggcccccctggaccccacccccggcccccccgccagccccaaccccttcgtgcacgagctgcacctgagcagactgcagagagtgaagttctgcctgctgggcgccctgctggcccccatcagagtgctgctggccttcatcgtgctgttcctgctgtggcccttcgcctggctgcaggtggccggcctgagcgaggagcagctgcaggagcccatcaccggctggagaaagaccgtgtgccacaacggcgtgctgggcctgagcagactgctgttcttcctgctgggcttcctgagaatcagagtgagaggccagagagccagcagactgcaggcccccgtgctggtggccgccccccacagcaccttcttcgaccccatcgtgctgctgccctgcgacctgcccaaggtggtgagcagagccgagaacctgagcgtgcccgtgatcggcgccctgctgagattcaaccaggccatcctggtgagcagacacgaccccgccagcagaagaagagtggtggaggaggtgagaagaagagccaccagcggcggcaagtggccccaggtgctgttcttccccgagggcacctgcagcaacaagaaggccctgctgaagttcaagcccggcgccttcatcgccggcgtgcccgtgcagcccgtgctgatcagataccccaacagcctggacaccaccagctgggcctggagaggccccggcgtgctgaaggtgctgtggctgaccgccagccagccctgcagcatcgtggacgtggagttcctgcccgtgtaccaccccagccccgaggagagcagagaccccaccctgtacgccaacaacgtgcagagagtgatggcccaggccctgggcatccccgccaccgagtgcgagttcgtgggcagcctgcccgtgatcgtggtgggcagactgaaggtggccctggagccccagctgtgggagctgggcaaggtgctgagaaaggccggcctgagcgccggctacgtggacgccggcgccgagcccggcagaagcagaatgatcagccaggaggagttcgccagacagctgcagctgagcgacccccagaccgtggccggcgccttcggctacttccagcaggacaccaagggcctggtggacttcagagacgtggccctggccctggccgccctggacggcggcagaagcctggaggagctgaccagactggccttcgagctgttcgccgaggagcaggccgagggccccaacagactgctgtacaaggacggcttcagcaccatcctgcacctgctgctgggcagcccccaccccgccgccaccgccctgcacgccgagctgtgccaggccggcagcagccagggcctgagcctgtgccagttccagaacttcagcctgcacgaccccctgtacggcaagctgttcagcacctacctgagacccccccacaccagcagaggcaccagccagacccccaacgccagcagccccggcaaccccaccgccctggccaacggcaccgtgcaggcccccaagcagaagggcgactag

SEQ ID NO: 246344 - protein, 316 aa, Artificial Sequence
  derived and/or modified sequence
MGQDYYSVLGITRNSEDAQIKQAYRRLALKHHPLKSNEPSSAEIFRQIAEAYDVLSDPMKRGIYDKFGEEGLKGGIPLEFGSQTPWTTGYVFHGKPEKVFHEFFGGNNPFSEFFDAEGSEVDLNFGGLQGRGVKKQDPQVERDLYLSLEDLFFGCTKKIKISRRVLNEDGYSSTIKDKILTIDVKPGWRQGTRITFEKEGDQGPNIIPADIIFIVKEKLHPRFRRENDNLFFVNPIPLGKALTCCTVEVRTLDDRLLNIPINDIIHPKYFKKVPGEGMPLPEDPTKKGDLFIFFDIQFPTRLTPQKKQMLRQALLT

SEQ ID NO: 246345 - DNA, 951 bp, Artificial Sequence
  derived and/or modified sequence
atgggccaggactactacagcgtgctgggcatcaccagaaacagcgaggacgcccagatcaagcaggcctacagaagactggccctgaagcaccaccccctgaagagcaacgagcccagcagcgccgagatcttcagacagatcgccgaggcctacgacgtgctgagcgaccccatgaagagaggcatctacgacaagttcggcgaggagggcctgaagggcggcatccccctggagttcggcagccagaccccctggaccaccggctacgtgttccacggcaagcccgagaaggtgttccacgagttcttcggcggcaacaaccccttcagcgagttcttcgacgccgagggcagcgaggtggacctgaacttcggcggcctgcagggcagaggcgtgaagaagcaggacccccaggtggagagagacctgtacctgagcctggaggacctgttcttcggctgcaccaagaagatcaagatcagcagaagagtgctgaacgaggacggctacagcagcaccatcaaggacaagatcctgaccatcgacgtgaagcccggctggagacagggcaccagaatcaccttcgagaaggagggcgaccagggccccaacatcatccccgccgacatcatcttcatcgtgaaggagaagctgcaccccagattcagaagagagaacgacaacctgttcttcgtgaaccccatccccctgggcaaggccctgacctgctgcaccgtggaggtgagaaccctggacgacagactgctgaacatccccatcaacgacatcatccaccccaagtacttcaagaaggtgcccggcgagggcatgcccctgcccgaggaccccaccaagaagggcgacctgttcatcttcttcgacatccagttccccaccagactgaccccccagaagaagcagatgctgagacaggccctgctgacctag

SEQ ID NO: 246346 - DNA, 951 bp, Artificial Sequence
  derived and/or modified sequence
atgggacaggattactattctgtgttgggcatcacccgcaacagcgaggacgcgcagatcaaacaggcatacaggaggctggcgttaaagcaccaccctcttaaaagcaacgaaccttcctccgccgaaatcttcagacagattgcagaggcatatgatgtcctctcagacccaatgaagcgcgggatctatgataaattcggagaagaaggtctaaagggcggtatcccactggaattcggctctcaaactccctggacaactggttatgtattccatgggaagcccgagaaagtgtttcatgaatttttcgggggcaataatccctttagcgagttttttgacgccgagggaagcgaggtagatcttaactttggagggcttcaaggccgtggagtgaaaaagcaagatccacaggtggaaagagatctgtacctgagcctcgaggacctcttttttgggtgcacaaagaaaatcaaaatcagccgacgcgtcctcaacgaggatggatattccagcaccatcaaggacaagattctgacaatcgatgtgaagccaggctggagacagggaacccgcattacttttgagaaagagggtgaccagggtcctaacatcattcccgccgacataatctttatcgtcaaggaaaaactgcacccccgttttcggagggagaacgacaacctgttcttcgtgaaccctattccgctgggtaaagcgctgacttgttgcacagtagaggtgcggaccctggatgatcggttacttaacatcccgatcaacgacattatccatcccaaatatttcaaaaaggtgccaggcgaggggatgcctctacctgaggatcccacaaaaaagggcgacctgtttatcttcttcgatatacagttcccaacacgtcttactccccagaagaagcaaatgctgcgtcaggcgctcctgacgtag

SEQ ID NO: 246347 - DNA, 1875 bp, Artificial Sequence
  derived and/or modified sequence
taatgtaagatgttaataataggggaatgtgaatgcagtggctcacacctgtaatcccagcactttgggaggccaagccgagcccaagagttcaagaccagtctgggcaacatggtgaaaccccatctctacaaaacatacaaaaattagccaggcatggtagtgcacgcctgtgtctcagctacttggaaggctgaggtggaagaatcccttgagcctgggaggttgagactgcagtgaggtgtgatcctgccactgcccaccagcctgggtgacagagtgaagaccctgtctcaaaaacatgataatgataataataataataaaataggagaatgtggatgtgaggtatatgggaactctctgtactgtcttctcaacttttctaaactctaaaactgttctaaaataaatgtatttttaaaaaattagccaaatgcatttcttctaaaacctttttattaaaactaattactgctctctttaaaaacaaaaacaaaataaaacagagccctgtgagtcttcaatttccgagttgagtgacctttcacagggtcgcagaatcagccccagctctcccccagtcctttcactgactcctctctgtggcagagctgaaatttgtttagggaagtgggactacaactcccagagtgcacctgtgcggttgtcaggagcaaccaaggaagccaactaacagccttgctagagtctgaggactatccagggcctgactgccagctagccagccatgggccaggattattactctgtgctcgggatcactcgcaattcagaggatgcccagatcaagcaggcgtaccgcagactcgcccttaagcaccacccgttgaagtcaaatgagccgtcttcagcagagattttcaggcaaatagcagaggcctacgacgtgctgagtgaccccatgaagagaggcatctacgacaagtttggagaagagggcctgaagggtgggattcctttggagtttggatcccagaccccatggacaactggttacgtcttccatggcaaacctgaaaaggtgttccacgagttctttggtggaaacaaccccttcagtgagttttttgatgcagaaggaagtgaggtagatttgaactttggggggctccagggccgaggggtcaagaagcaggacccccaagtcgaacgggatctctacctgtccctggaggacttattctttggctgcaccaaaaaaattaagatctccagaagggtgctgaacgaggatgggtactcctccaccatcaaggacaagatcctgaccattgatgtgaagcccggttggaggcagggcacacgcatcacctttgagaaggaaggggaccagggccccaacatcatcccagcagacatcattttcatcgtaaaggagaagctacaccctcgcttccgcagggagaatgacaacctcttcttcgtgaaccccatccctcttggcaaggctctcacctgctgcactgtggaggtgaggaccctagatgaccgtctgctcaacatccccatcaatgacatcatccaccccaaatacttcaagaaggtgccaggggaggggatgccattgccggaggaccccactaagaaaggggatctcttcatcttcttcgacatccagttccccacccgcctcacaccccagaagaagcagatgctgcgccaggcattgctgacatgactgtggtgggctggagcaggggtgagaggaggctagccgggcctcaccccacccctacccgccacagcctcagggtgtgcaggggagcctgctgcacagatatgatacaagggtgggatggcgcagggcttaaactgacataataaagatctatttcctgtcctccagctaca

SEQ ID NO: 246348 - DNA, 951 bp, Artificial Sequence
  derived and/or modified sequence
atgggccaggactactacagcgtgctgggcatcaccagaaattctgaagatgcccagatcaagcaggcctacagaaggctggccctgaagcaccaccccctgaagagcaatgagcccagcagcgctgagatcttccggcagattgctgaggcctatgatgtgctgagtgaccccatgaagaggggcatctatgacaagtttggagaggagggcctgaagggcggcatccccctggagtttggcagccagaccccctggaccaccggctacgtgttccacggcaagccagagaaggtgttccacgagttcttcggcggcaacaaccccttcagcgagttctttgatgctgagggcagcgaggtggacctgaactttggaggcctgcagggccggggcgtgaagaagcaggacccccaggtggagcgggacctgtacctgagcctggaggacctcttcttcggctgcaccaagaagatcaagatcagcagaagagtgctgaatgaagatggctacagcagcaccatcaaggacaagatcctgaccattgatgtgaagccaggctggaggcagggcacccgcatcacctttgagaaggagggggaccagggccccaacatcatcccagctgacatcatcttcatcgtgaaggagaagctgcacccccgcttccggcgggagaatgacaacctcttctttgtgaaccccatccccctgggcaaggccctgacctgctgcaccgtggaggtgaggaccctggatgaccggctgctgaacatccccatcaatgacatcatccaccccaagtacttcaagaaggtgcctggagagggcatgcccctgcctgaggaccccaccaagaagggggacctcttcatcttctttgacatccagttccccacccggctgaccccccagaagaagcagatgctgcggcaggccctgctgacctag

SEQ ID NO: 246349 - DNA, 951 bp, Artificial Sequence
  derived and/or modified sequence
atgggccaggactactacagcgtgctgggcatcacccggaacagcgaggacgcacagattaagcaagcctaccgccgcctcgcccttaaacaccatcctctgaagagcaacgagcctagcagtgcagaaatcttcagacagattgctgaggcttatgacgtgctcagtgatcccatgaagagaggaatttacgataagtttggagaggagggcctcaagggaggaattcccctggaattcggatctcagacgccatggaccaccggttatgtgtttcacggaaagcccgagaaagtatttcatgaattttttggaggcaacaatccattctccgagttttttgatgccgaaggtagcgaggtcgatttaaattttggagggctgcaagggaggggggtaaagaagcaagacccacaagtcgaaagagatctatatctatcacttgaagacctctttttcggttgcaccaagaagatcaaaatctcaaggcgtgtgctgaatgaggacggctacagctcaacaatcaaagataagatcctaactattgatgtgaagccaggttggcgccagggcacgcgcatcacattcgaaaaagagggagatcagggtcccaatattatccctgcagatatcattttcattgtaaaggaaaaactacacccccgcttcagacgcgagaatgacaatttattttttgtgaacccgatccctttgggtaaggccctgacttgttgtactgtggaagtgcgcactctcgatgataggttactgaatattcccatcaacgacattatacatcccaagtactttaagaaagtgcccggcgaaggaatgccccttcccgaggacccaaccaagaagggggacctcttcatcttctttgacattcagtttcccacacgcctaacgcctcagaaaaaacagatgctccggcaagccctgttaacgtag

SEQ ID NO: 246350 - DNA, 951 bp, Artificial Sequence
  derived and/or modified sequence
atgggccaggattactactcagttctcggtattacgagaaatagcgaagacgcgcagattaaacaggcttacaggcgcctcgccctaaagcatcatcctctaaaatcaaacgagccatccagtgccgaaatatttcgccagatcgcagaggcttacgatgtactcagcgatccgatgaagcgaggcatctatgataaattcggggaggagggactgaagggaggcatcccactagagtttggcagccaaaccccatggacaactgggtatgtgtttcatggcaagcccgaaaaggttttccatgaattcttcggagggaataaccctttctcagagttcttcgacgccgaggggtcggaggtggacttgaactttgggggactgcaggggagaggtgtgaagaagcaagatccccaggtcgaacgggacctgtacctgagcctggaagacctgttctttgggtgtaccaagaagatcaaaatatctcgtagggttctgaacgaggacggttattcgagcaccatcaaggataagatcctaacgatcgatgtgaagcctggctggcgacaaggtaccagaatcacttttgagaaagaaggcgatcaaggcccaaacatcattcccgctgacattatatttatagttaaagagaagttacatcccagattcagaagagaaaacgataacctgtttttcgtgaatcctatcccacttggaaaggctcttacatgctgtacagtcgaagttagaacgctggacgatcgcttgctgaatatcccaatcaatgacatcatccatccgaagtacttcaagaaggtgcccggtgaggggatgccattgcccgaggacccaactaaaaagggcgatctctttatctttttcgatattcaattccccacgaggctcacgcctcagaagaaacagatgttgcgccaggccctgctcacatag

SEQ ID NO: 246351 - protein, 473 aa, Artificial Sequence
  derived and/or modified sequence
MRKLLTNLPAAAVLSAQVYSAVLQGLWEENVCGTPGRTRVCTALLYGQVCPFQDSTDGLRTITSILFNWPPENTSVYYQPPQRSSFRIKLAFRNLSWPGLGLEDHQEIVLGQLVLPEPNEAKPDDPAPRPGQHALTMPALEPAPPLLADLGPALEPESPAALGPPGYLHSAPGPAPAPGEGPPPGTVLEPQSAPESSCPCRGSVKNQPSEELPDMTTFPPRLLAEQLTLMDAELFKKVVLHECLGCIWGQGHLKGNEHMAPTVRATIAHFNRLTNCITTSCLGDHSMRARDRARVVEHWIKVARECLSLNNFSSVHVIVSALCSNPIGQLHKTWAGVSSKSMKELKELCKKDTAVKRDLLIKAGSFKVATQERNPQRVQMRLRRQKKGVVPFLGDFLTELQRLDSAIPDDLDGNTNKRSKEVRVLQEMQLLQVAAMNYRLRPLEKFVTYFTRMEQLSDKESYKLSCQLEPENP

SEQ ID NO: 246352 - protein, 580 aa, Artificial Sequence
  derived and/or modified sequence
MRKLLTNLPAAAVLSAQVYSAVLQGLWEENVCGTPGRTRVCTALLYGQVCPFQDSTDGLRTITSILFNWPPENTSVYYQPPQRSSFRIKLAFRNLSWPGLGLEDHQEIVLGQLVLPEPNEAKPDDPAPRPGQHALTMPALEPAPPLLADLGPALEPESPAALGPPGYLHSAPGPAPAPGEGPPPGTVLEPQSAPESSCPCRGSVKNQPSEELPDMTTFPPRLLAEQLTLMDAELFKKVVLHECLGCIWGQGHLKGNEHMAPTVRATIAHFNRLTNCITTSCLGDHSMRARDRARVVEHWIKVARECLSLNNFSSVHVIVSALCSNPIGQLHKTWAGVSSKSMKELKELCKKDTAVKRDLLIKAGSFKVATQERNPQRVQMRLRRQKKGVVPFLGDFLTELQRLDSAIPDDLDGNTNKRSKEVRVLQEMQLLQVAAMNYRLRPLEKFVTYFTRMEQLSDKERWGFTMMSRIVSNSWPQAIHPPQPPKVLTLQLQAVLPAGARKPVGWQHPAVAGNPPGCWPEHRLCTIPHPDRRHQGTTSRRLAAQLHLALDPHHQLLLLARIRPWDFCESGGRPFYVYFL

SEQ ID NO: 246353 - DNA, 1422 bp, Artificial Sequence
  derived and/or modified sequence
atgcggaaattgttaaccaacctacccgcagccgctgtcctcagcgcccaggtatactccgccgtactacaggggctgtgggaagagaacgtgtgcggcactccagggcggacaagagtctgtactgccctgctgtacggccaggtttgcccgtttcaggacagcactgacgggctccgaactatcactagtatcctatttaattggccaccagaaaatacgtctgtctactaccaaccacctcagcggtctagcttccggattaaactagcgttccggaatctcagttggcctggtttgggtctcgaagaccaccaggagattgtgctgggtcaattagttcttccagaaccaaacgaggctaaacctgacgatccggccccgcggccaggtcagcacgccctgaccatgcccgctctggagcctgccccgccgctgttagccgatctggggcctgcactggaacccgagtctccagccgccttaggcccccctggatacctgcattcggcccctgggcccgcccccgcccccggggagggccctccgcctgggactgtgctagaacctcagagcgctccagagtcatcatgtccttgccggggcagcgtgaagaaccagccatccgaggagctcccggatatgaccacttttccccccaggttgctggctgaacaactaacactgatggacgctgagctgtttaaaaaggtggtgctgcacgagtgccttgggtgcatctggggccagggacacttaaaaggaaatgaacacatggcgccaacagtccgggccactatcgctcatttcaaccggttgacgaactgtattaccacctcctgcctgggagatcactccatgagagctcgggaccgggccagagtcgtcgagcattggatcaaagtggctagagagtgcctcagtctgaacaactttagcagcgtgcatgtgatcgtctccgccctttgtagcaacccaattgggcaactgcataagacctgggctggcgtttctagtaaatctatgaaagagctgaaagagttatgcaagaaggataccgccgtcaagagggacctattgattaaggctggcagttttaaggtcgccactcaggagcgaaacccacagcgggttcaaatgaggctccgtcgacagaaaaaaggcgtcgtaccattcctgggcgacttcttaactgagttgcaacgcctagattccgccatccccgacgatctggacgggaacacaaacaagagatccaaagaagttagggtgttgcaagagatgcagctgcttcaggtggccgcaatgaattaccgcctccggccccttgagaaatttgttacctacttcacccggatggagcagctcagcgacaaagaaagctataaactgagctgccagctggaaccggagaatccttag

SEQ ID NO: 246354 - DNA, 1743 bp, Artificial Sequence
  derived and/or modified sequence
atgcgcaagctgctgaccaatttgcccgccgccgccgtgcttagcgctcaagtctattccgctgtcctgcaagggctctgggaggagaatgtgtgcggcacgcctgggcgaacccgggtgtgcaccgcgttgttatatggccaagtatgcccctttcaggactccacggatggactcagaaccataaccagcatcctgttcaattggcccccagagaacacttcagtctattatcagccaccccagcgctcgagtttcagaatcaaactggccttccgcaacctatcctggcctgggctaggactcgaggatcatcaggagatcgtactaggacagctcgttttgcccgaaccgaatgaggccaaacctgacgatcccgcaccaagaccaggtcaacacgccctgacaatgcctgcacttgagcccgcccctcccctgctggcagacctgggacccgctctggagccagaaagtcctgccgctttgggccctcccggctatctccactctgctcccggtcccgcgcccgcccccggcgagggtccaccgccagggactgtactggagccccagagcgcgcccgagagcagttgtccctgccgtggctccgttaaaaaccaaccttcagaagaacttccagacatgacaacatttcccccgaggctgctggcagaacagttaactctgatggatgcagagttgttcaagaaagttgtccttcatgaatgcttgggctgtatctggggccaggggcacctaaaaggaaacgaacacatggcgccgacagtgagagccactattgcacactttaaccggctgacgaactgcattacaacgtcatgtctcggtgatcacagcatgcgcgccagggacagagccagagtggtcgagcattggatcaaggtcgcgagggaatgtctctctctgaataactttagctcagtccacgttattgtatcagccttgtgttcaaatcccataggccagttgcacaaaacctgggcaggtgtttcctcaaagtcaatgaaagaacttaaggaactgtgtaaaaaagacacggctgtgaagcgcgatctgctgatcaaggcgggcagcttcaaagtggcgactcaggagcgcaacccacagcgggttcagatgagactccgaagacagaagaagggcgttgtaccattcctgggcgatttcttaacagaactgcagcgattggatagtgccatccccgatgacctcgacggaaacacaaacaaacgttccaaggaagtacgggtactccaggaaatgcaacttttgcaggtggccgccatgaactatcgcttacgaccactggagaagttcgtcacctactttacaaggatggagcagttatcggacaaggagcgctggggattcacaatgatgtcaaggatcgtctctaatagttggccccaggccatccacccaccacagccccccaaagtcctcacactacagttgcaggccgtcttgcctgcaggggcccgcaagcctgtcggctggcagcacccagccgttgccggtaatccacccgggtgctggcccgaacataggctctgcacgatcccccaccctgatagaaggcatcagggaacaacctctaggcgcttagctgcccagctccacttggcgctggatccacaccaccagctcctgctattggcccggattagaccttgggatttctgcgaaagtggtggacggcccttttatgtctacttcctgtag

SEQ ID NO: 246355 - DNA, 1422 bp, Artificial Sequence
  derived and/or modified sequence
atgaggaagctgctgaccaacctgcctgctgctgctgtgctgagcgcccaggtgtacagcgctgtgctgcagggcctgtgggaggagaatgtgtgtggcaccccaggccgcaccagggtgtgcacagccctgctgtatggccaggtgtgccccttccaggacagcacagatggcctgcggaccatcaccagcatcctcttcaactggcccccagagaacacctctgtgtactaccagcccccccagaggagcagcttccgcatcaagctggccttcaggaacctgtcctggccaggcctgggcctggaggaccaccaggagatcgtgctgggccagctggtgctgcctgagcccaatgaggccaagccagatgatcctgccccccggcccggccagcacgccctgaccatgcctgccctggagcccgccccacccctgctggccgacctgggccctgccctggagcctgagagccctgctgccctgggccccccaggctacctgcacagcgcccctggccctgccccagcccctggagagggccccccacctggcaccgtgctggagccccagagcgcccctgagagcagctgcccctgccggggctctgtgaagaaccagcccagcgaggagctgcctgacatgaccaccttccccccccggctgctggccgagcagctgaccctgatggatgctgagctgttcaagaaggtggtgctgcacgagtgcctgggctgcatctggggccagggccacctgaagggaaatgagcacatggcccccaccgtgcgggccaccatcgcccacttcaaccggctgaccaactgcatcaccaccagctgcctgggggaccacagcatgagggcccgggaccgggcccgggtggtggagcactggatcaaggtggccagagaatgtctgagcctgaacaacttcagctctgtgcacgtgattgtgtctgccctgtgcagcaaccccatcggccagctgcacaagacctgggccggcgtgagcagcaagtccatgaaggagctgaaggagctgtgcaagaaggacacagctgtgaagagggacctgctgatcaaggccggcagcttcaaggtggccacccaggagaggaacccccagagggtgcagatgaggctgcggcggcagaagaagggcgtggtgcccttcctgggggacttcctgacagagctgcagaggctggacagcgccatcccagatgacctggatggcaacaccaacaagaggagcaaggaggtgcgggtgctgcaggagatgcagctgctgcaggtggccgccatgaactaccgcctgcggcccctggagaagtttgtgacctacttcaccaggatggagcagctgagtgacaaggagagctacaagctgagctgccagctggagcctgagaacccctag

SEQ ID NO: 246356 - DNA, 1743 bp, Artificial Sequence
  derived and/or modified sequence
atgaggaagctgctgaccaacctgcctgctgctgctgtgctgagcgcccaggtgtacagcgctgtgctgcagggcctgtgggaggagaatgtgtgtggcaccccaggccgcaccagggtgtgcacagccctgctgtatggccaggtgtgccccttccaggacagcacagatggcctgcggaccatcaccagcatcctcttcaactggcccccagagaacacctctgtgtactaccagcccccccagaggagcagcttccgcatcaagctggccttcaggaacctgtcctggccaggcctgggcctggaggaccaccaggagatcgtgctgggccagctggtgctgcctgagcccaatgaggccaagccagatgatcctgccccccggcccggccagcacgccctgaccatgcctgccctggagcccgccccacccctgctggccgacctgggccctgccctggagcctgagagccctgctgccctgggccccccaggctacctgcacagcgcccctggccctgccccagcccctggagagggccccccacctggcaccgtgctggagccccagagcgcccctgagagcagctgcccctgccggggctctgtgaagaaccagcccagcgaggagctgcctgacatgaccaccttccccccccggctgctggccgagcagctgaccctgatggatgctgagctgttcaagaaggtggtgctgcacgagtgcctgggctgcatctggggccagggccacctgaagggaaatgagcacatggcccccaccgtgcgggccaccatcgcccacttcaaccggctgaccaactgcatcaccaccagctgcctgggggaccacagcatgagggcccgggaccgggcccgggtggtggagcactggatcaaggtggccagagaatgtctgagcctgaacaacttcagctctgtgcacgtgattgtgtctgccctgtgcagcaaccccatcggccagctgcacaagacctgggccggcgtgagcagcaagtccatgaaggagctgaaggagctgtgcaagaaggacacagctgtgaagagggacctgctgatcaaggccggcagcttcaaggtggccacccaggagaggaacccccagagggtgcagatgaggctgcggcggcagaagaagggcgtggtgcccttcctgggggacttcctgacagagctgcagaggctggacagcgccatcccagatgacctggatggcaacaccaacaagaggagcaaggaggtgcgggtgctgcaggagatgcagctgctgcaggtggccgccatgaactaccgcctgcggcccctggagaagtttgtgacctacttcaccaggatggagcagctgagtgacaaggagcgctggggcttcaccatgatgagccgcatcgtgagcaacagctggccccaggccatccaccccccccagccccccaaggtgctgaccctgcagctgcaggccgtgctgcctgctggggccaggaagcctgtgggctggcagcaccctgctgtggccggcaaccccccaggctgctggccagagcaccggctgtgcaccatcccccacccagaccggcggcaccagggcaccaccagccggcggctggccgcccagctgcacctggccctggacccccaccaccagctgctgctgctggcccgcatccggccctgggacttctgtgagagcggcggccggcccttctacgtgtacttcctgtag

SEQ ID NO: 246357 - DNA, 1422 bp, Artificial Sequence
  derived and/or modified sequence
atgcggaagctgctgaccaacctgcccgccgccgccgtgctgagcgcacaagtatacagcgccgttcttcaggggctctgggaggagaatgtgtgcggaacacctggacgcacccgcgtctgtacagctctactatacggacaggtttgcccatttcaggatagcacggatggccttcggaccatcactagcatcctctttaattggccccctgaaaatacttcagtctactaccaaccaccccaaaggagctcattccggattaagttggcatttcgcaacctgtcctggcctgggttaggcctggaagaccaccaagaaatagtgcttggccagttagtgcttcccgagcccaacgaggctaagcccgatgatcccgctccacgccccggccagcacgctctgaccatgcccgccctagaaccagcgccccccctgctggccgacctgggacctgcactcgaacctgaatctcccgccgctctgggaccacccggctacctgcactccgctccaggacccgcccctgctcctggggagggtcctccgccaggcactgtcctggagcctcagtccgctcctgaatcgtcatgtccatgtagaggtagcgtgaagaatcagcccagtgaagaactcccagatatgactaccttccctccaagactgctggccgagcaactcacattgatggacgctgagctcttcaaaaaggtagtcctccatgaatgcttggggtgtatttggggacaaggccatcttaaaggcaacgagcatatggcccccaccgttcgcgccacgattgcccacttcaaccggctgactaactgtataaccacatcatgtctgggagaccactctatgcgagcacgcgatcgtgccagggtcgtagagcactggatcaaagtggcacgcgagtgcttgtcattaaataacttcagctccgtgcacgttattgtgagtgcactctgttctaaccccatcggccagctgcacaaaacttgggcaggcgtatcctcaaaaagtatgaaggaactgaaagagctgtgcaaaaaggacacagccgtcaaacgagatttactcatcaaagcgggcagcttcaaagttgccactcaggaaaggaatccccagcgagttcagatgagattgagacgtcagaagaaaggtgtcgtgccctttctgggtgattttctgacagaactccagaggctcgactccgctattcctgatgaccttgacggaaataccaataaaagatcaaaagaagtgcgagtgctgcaggagatgcagctgctccaagtcgccgccatgaattacagactgaggcccctggagaagttcgtcacgtatttcacccgcatggagcagctgtcagacaaagaaagctacaagctcagttgtcagcttgagcccgagaacccgtag

SEQ ID NO: 246358 - DNA, 1743 bp, Artificial Sequence
  derived and/or modified sequence
atgcggaagctgctgaccaacctgcccgccgccgccgtgctgagcgcccaggtgtactcggcagttctgcagggcttgtgggaagagaatgtatgtggtactcccggacgcactcgagtctgcacagcactgctgtacggacaggtatgtccgttccaggatagcactgacggcctcaggacgattacgagcatcctcttcaattggcccccagagaatacctctgtgtattaccaaccaccccagcgaagtagcttcaggatcaagcttgcctttagaaatctgagctggcctggactggggttagaagaccatcaggagattgtgctggggcaactggtcctgccggaaccgaacgaagcaaaacccgacgaccccgccccaagaccgggccaacatgcgcttactatgcccgccttggagcccgcaccacctcttctcgctgacctcggacctgcgctggaacctgagtcacctgccgcccttggccctcccgggtatctccattctgcgccagggccggccccagcgcccggcgaaggacctccacctggcaccgtcctcgagccccaatcggcccctgagagttcgtgcccttgcagaggttcagttaagaaccagccatcggaggaactccctgatatgacaactttccccccccgcctgcttgcggagcagctgacgctgatggatgcagaacttttcaaaaaggtagtgctacacgagtgtttaggatgcatttggggccagggccatcttaaggggaacgaacatatggcgcctaccgtgcgagcgactattgcacactttaatcgtctgaccaattgcattaccacctcatgccttggagaccattccatgcgagctcgagatcgggccagggtggtcgaacactggattaaagtagcgagggagtgcctctctttaaataattttagctcagtacatgtcatagttagcgcactatgctccaatccaattgggcagctgcacaagacatgggccggggtttcttccaagagtatgaaagaattgaaagagctctgtaagaaagacaccgcagtgaaaagggatctcctcataaaggcaggtagctttaaggttgccacccaggaacggaatccccaacgcgttcagatgagactgcgaaggcagaagaagggcgtagtcccattcttgggggatttcctgacagaattgcagcggctagattcagccattccggatgatctggacggaaatactaataagcggtcgaaagaggttagggtcctgcaggagatgcagctgcttcaggtggctgctatgaactatagattacggcctctggaaaagttcgttacttattttacacggatggagcaactgtccgacaaagagcgttggggattcacaatgatgtcccgcatcgtctccaactcttggccccaggccattcatcctccgcaacctcctaaagtcctgactctgcagctgcaggctgtgctgcctgccggcgcccggaagcccgtgggttggcagcatcccgcagtagccggcaatcctcctggctgttggcccgaacatagactgtgtaccatccctcaccccgaccggagacaccagggaactaccagccggcgactcgctgcccaactccatctcgccctagatccccaccaccagctgttgctgctggcccgcatccgcccttgggatttttgcgagagtgggggacgccccttctatgtgtactttctgtag

SEQ ID NO: 246359 - DNA, 1422 bp, Artificial Sequence
  derived and/or modified sequence
atgcgaaagctgcttacaaacctcccggctgccgctgttttgtctgcccaggtatactctgcagtgcttcagggcctatgggaggagaatgtttgcgggacacccggtcggacccgcgtatgtaccgccttgctatatgggcaggtttgcccattccaggattctactgatgggctgcggactattacctcaattctgttcaactggccccctgagaacacgtcagtgtattaccagcctcctcagcgcagctccttccgcattaagttggccttcagaaatctttcttggcctgggctggggctggaggaccaccaggagatagtgctaggccagttagtactcccagaaccgaatgaagctaagcccgacgatcccgctccaaggccagggcagcacgccctcaccatgcctgctctcgagcccgctccacctttgctagccgatctgggcccagccctcgagcccgagagtcccgcagctctgggcccacccggatatctgcatagcgcccctgggcctgcacccgcacccggagagggtcctccacccggtaccgtgttggagccacagagcgctccagagagcagttgtccgtgcaggggctccgtgaagaatcagccatccgaggaacttcccgacatgaccactttcccaccgaggctgctggccgagcagcttacactgatggacgccgagctgttcaaaaaagttgtgcttcacgagtgtttggggtgtatctggggccagggccatctgaaaggcaacgagcatatggctcccaccgtccgtgcgacaattgcccattttaatagattgaccaattgcatcaccacctcgtgcctgggtgatcattccatgcgtgccagagaccgggctagggtggttgagcactggataaaggtggcgagagaatgcttgtccttgaacaacttttcttctgtccatgtcattgtcagcgctctgtgttcgaacccaatcggccagctgcataaaacgtgggccggagtctctagtaaaagcatgaaagaactaaaagagctttgcaaaaaagacaccgcagtgaagagagaccttttgattaaggctggatcttttaaagtcgccacacaggaaaggaatccacagcgcgttcagatgcgcctgaggcgtcaaaaaaagggtgttgtgcctttcctgggtgattttctcacagaattacagagactcgacagcgccataccagatgatctcgacgggaatacaaataagcgctctaaggaggttcgcgtccttcaggagatgcagctccttcaggtggcagctatgaattacaggcttcgaccattggagaaatttgttacgtatttcacccggatggagcagctgtcagataaggagtcttacaagctgtcttgtcagctcgaacctgaaaacccttag

SEQ ID NO: 246360 - DNA, 1743 bp, Artificial Sequence
  derived and/or modified sequence
atgcgcaaactgcttactaacctcccggctgccgcagttctgtcagctcaagtgtattctgccgtcctgcaaggtctgtgggaagagaacgtttgtgggactcccggtagaacaagagtttgtaccgccctgctatacggacaagtgtgtccctttcaggattcaacagacggactccgcacgattaccagcatattatttaattggcctcctgaaaacacctcggtctattaccagccgccacagcgctcctccttccgaattaaacttgctttccgaaacctttcctggccaggcctgggactggaggatcaccaggagatcgtcctcggacagttggtactgcccgaaccaaatgaagctaagcccgacgaccctgcacccaggcctggccaacacgcactgacaatgcctgctcttgagccagctccccctctgctcgctgaccttggccctgcgctagagccagaaagtcccgcagctctcggcccacctgggtatctccatagcgctccaggtcctgccccagctccaggggaaggccctccaccagggacagttctggaaccgcaaagcgcccctgagagctcatgcccctgccgtggatctgtgaagaaccagccttcagaggaactccctgatatgactacttttccgcctagactactagcggaacaattgaccttgatggacgctgagctcttcaaaaaggtggttttacatgagtgtctcgggtgcatctggggacaagggcacctcaagggtaacgaacacatggcccctaccgttagggccacaatagcccacttcaataggcttacgaactgtattaccacctcatgcttgggcgatcacagcatgcgagcaagagacagggcgagggtggtggaacattggatcaaggtggcccgtgagtgtctcagcctgaataatttctcctcggtgcatgtgatcgtctccgccctgtgtagcaatccaattggtcagctgcataaaacctgggccggtgtttcttcaaagtccatgaaagagctcaaggagctgtgtaaaaaggacactgctgttaaacgcgacctgcttatcaaggccggaagttttaaagtggctacacaggagcgaaatccacagagagttcaaatgcggctgagacggcagaagaagggtgttgtcccgtttttgggagatttcctcacagaattgcaacggctcgacagtgccattcccgatgatcttgacgggaacactaacaaaaggagcaaggaagtcagggtcctccaggagatgcagttgctccaggtggctgcaatgaactatcgcctccggccacttgagaaatttgttacgtacttcaccagaatggagcaattaagcgataaagaacgctgggggttcaccatgatgtcccgtatagtttccaactcatggccacaggccattcatccccctcagccgccaaaagtacttactctgcagctccaggcagtgctgccagccggtgcaaggaaacccgtgggatggcagcatcccgctgtcgccggaaacccaccgggttgctggcctgaacaccgactgtgcactatccctcacccagatcgtcggcatcagggcactacttccagacgactggcggctcaattacatctggctctcgacccccatcaccaattactgcttttggcacgaatacggccttgggatttttgtgaatctgggggacgcccattctacgtgtatttcctatag

SEQ ID NO: 246361 - DNA, 2885 bp, Artificial Sequence
  derived and/or modified sequence
taaacccatctcctcctatgccacctgcctgggcccctcctgggactttatcactgtgccacactttttggaactactggttagaaggtgagtgtccatccccctccaagacacagaggtgcctctgtcccctactggctctgtcttgaagatgcacctctcggagcctcggttggctcctctggaacagggagtagtgagaagacgaacctcacagggttcttgtagggactcaatgatctaagacacagcaaacaaaggggtccctagagcctaaaactctggaaaatctgctgggggtgctgtgattcatgtttgttacttttctcttccccctcacttgaagcagctctcagcattctgcctcaatggcctgtatcactcactgtttggaaaaacacatagaaaccaagtctgcgatggcactggtaaaggatgtctgagattccttctggctggtctttctccttgacacagacagaagaggggtcccttggtgctgaaaaaggagccacaggcccactcagacatctggagaggctcactggggttctccaaaggttggggttcactcattcaacacatacattcaaaacacctcatttgtgcatcgctcttcttggggcttggcataatttcataaacaaagcagatgacaatcccccggccttgattctactcagagtcaggcactcacagtagacagaataaacaagtcatatctacagaatgttacaggtgagaccctcatggcctcctctacgtatggtggcatcctcccagattctgactagaatgacgcagcccagcaacaaatataaactgggtggatttagggttctgaagggccttttcacccacaaaacatgggggaaaatatgtggactctggctggggagagactaaaggagctctggggctcatacttcttataattcccacgagaaggctgacatctggggacttcccccacaagaggcaaatagtgagttctgtaaatggagacttaggtcccctgcaaagcagaggggaggctggggtcacagctggccactgagagacccatccccctcagcaccgtggcttcccagctctccctgtcctcctccccccgacatctgccccttccctcctaaccccaggaccaggggacccagatctggagctttgatgaggaagctgctcacaaatctgcctgcagctgcagtcttgagtgcccaggtgtacagtgctgtgctccagggcctttgggaagagaatgtctgtgggacgccagggcgcacgagggtctgtacagccctgctgtatggccaggtctgccccttccaggacagcactgatggcttacgcaccatcacctccattttgttcaactggccccccgaaaacacttcagtttactatcagcccccgcaacggtcatctttccggataaagctggccttcaggaacctctcctggcctggactgggcttggaggaccatcaggaaattgtcctaggccagttggtgcttccggagcccaacgaggccaagccagatgatcctgctccacgtcctgggcaacacgcattaacaatgccggccctggagccagcaccaccactgctggcggacctggggcctgctctggagccagagtcacctgcagccctgggtccaccaggatatctacattcagcaccagggccagcaccagcaccaggggaagggccccctccagggacagtgctggagccacagtcagccccagagtcctcctgtccctgtcgtgggtctgtaaagaaccaacccagtgaggagctgcctgacatgacgaccttccctcccaggctgctggcagagcagctgaccctcatggatgcggagctgttcaagaaggtggtgctccacgaatgcttgggctgcatctggggccaaggacatctgaaggggaatgagcacatggcacccacagttcgtgccaccatcgcacacttcaacaggctcaccaactgcatcaccacctcctgcctcggggaccacagcatgagggcccgggacagggccagggtggtggagcactggatcaaggtggccagggagtgcctaagcctcaacaacttctcctcggtgcacgtcatcgtctctgctctgtgcagcaacccaataggtcagctacacaagacgtgggcaggagtgtccagcaaaagcatgaaagagctaaaagaactctgcaaaaaagacactgcagtgaagagggacctactgatcaaggcggggagctttaaggtggccacccaggagaggaacccccagagagtccagatgaggctgcggaggcagaagaagggtgtggtccccttcctgggggattttctgactgagttacagaggctggattcggccatcccggacgacctggatggcaacaccaacaagaggagcaaggaggtccgagttctgcaggaaatgcagctgctccaagtggctgccatgaattacaggcttcggcctcttgagaaatttgtcacctatttcacaagaatggagcagctcagtgacaaagagagctacaagctgtcctgccagctggagcccgaaaacccgtaggctggcaacatcctgcagtggctgggaacccaccgggatgctggccagaacaccggctctgcaccatccctcacccagaccgtagacaccagggaaccacatctaggaggctggcagctcagctgcatcttgccctggatcctcatcaccaactgctcctgctggccaggatcaggccatgggacttttgtgagtcaggcgggagaccattttatgtttattttctttagtgtataagtaagggttttttcttaactttcgttaaaataaaattttaaaaaactattcaaaat

SEQ ID NO: 246362 - DNA, 2959 bp, Artificial Sequence
  derived and/or modified sequence
taaacccatctcctcctatgccacctgcctgggcccctcctgggactttatcactgtgccacactttttggaactactggttagaaggtgagtgtccatccccctccaagacacagaggtgcctctgtcccctactggctctgtcttgaagatgcacctctcggagcctcggttggctcctctggaacagggagtagtgagaagacgaacctcacagggttcttgtagggactcaatgatctaagacacagcaaacaaaggggtccctagagcctaaaactctggaaaatctgctgggggtgctgtgattcatgtttgttacttttctcttccccctcacttgaagcagctctcagcattctgcctcaatggcctgtatcactcactgtttggaaaaacacatagaaaccaagtctgcgatggcactggtaaaggatgtctgagattccttctggctggtctttctccttgacacagacagaagaggggtcccttggtgctgaaaaaggagccacaggcccactcagacatctggagaggctcactggggttctccaaaggttggggttcactcattcaacacatacattcaaaacacctcatttgtgcatcgctcttcttggggcttggcataatttcataaacaaagcagatgacaatcccccggccttgattctactcagagtcaggcactcacagtagacagaataaacaagtcatatctacagaatgttacaggtgagaccctcatggcctcctctacgtatggtggcatcctcccagattctgactagaatgacgcagcccagcaacaaatataaactgggtggatttagggttctgaagggccttttcacccacaaaacatgggggaaaatatgtggactctggctggggagagactaaaggagctctggggctcatacttcttataattcccacgagaaggctgacatctggggacttcccccacaagaggcaaatagtgagttctgtaaatggagacttaggtcccctgcaaagcagaggggaggctggggtcacagctggccactgagagacccatccccctcagcaccgtggcttcccagctctccctgtcctcctccccccgacatctgccccttccctcctaaccccaggaccaggggacccagatctggagctttgatgaggaagctgctcacaaatctgcctgcagctgcagtcttgagtgcccaggtgtacagtgctgtgctccagggcctttgggaagagaatgtctgtgggacgccagggcgcacgagggtctgtacagccctgctgtatggccaggtctgccccttccaggacagcactgatggcttacgcaccatcacctccattttgttcaactggccccccgaaaacacttcagtttactatcagcccccgcaacggtcatctttccggataaagctggccttcaggaacctctcctggcctggactgggcttggaggaccatcaggaaattgtcctaggccagttggtgcttccggagcccaacgaggccaagccagatgatcctgctccacgtcctgggcaacacgcattaacaatgccggccctggagccagcaccaccactgctggcggacctggggcctgctctggagccagagtcacctgcagccctgggtccaccaggatatctacattcagcaccagggccagcaccagcaccaggggaagggccccctccagggacagtgctggagccacagtcagccccagagtcctcctgtccctgtcgtgggtctgtaaagaaccaacccagtgaggagctgcctgacatgacgaccttccctcccaggctgctggcagagcagctgaccctcatggatgcggagctgttcaagaaggtggtgctccacgaatgcttgggctgcatctggggccaaggacatctgaaggggaatgagcacatggcacccacagttcgtgccaccatcgcacacttcaacaggctcaccaactgcatcaccacctcctgcctcggggaccacagcatgagggcccgggacagggccagggtggtggagcactggatcaaggtggccagggagtgcctaagcctcaacaacttctcctcggtgcacgtcatcgtctctgctctgtgcagcaacccaataggtcagctacacaagacgtgggcaggagtgtccagcaaaagcatgaaagagctaaaagaactctgcaaaaaagacactgcagtgaagagggacctactgatcaaggcggggagctttaaggtggccacccaggagaggaacccccagagagtccagatgaggctgcggaggcagaagaagggtgtggtccccttcctgggggattttctgactgagttacagaggctggattcggccatcccggacgacctggatggcaacaccaacaagaggagcaaggaggtccgagttctgcaggaaatgcagctgctccaagtggctgccatgaattacaggcttcggcctcttgagaaatttgtcacctatttcacaagaatggagcagctcagtgacaaagagagatggggtttcacgatgatgtccaggatcgtctcaaactcctggcctcaagcaatccacccacctcagcctcccaaagtactgacgttacagctacaagctgtcctgccagctggagcccgaaaacccgtaggctggcaacatcctgcagtggctgggaacccaccgggatgctggccagaacaccggctctgcaccatccctcacccagaccgtagacaccagggaaccacatctaggaggctggcagctcagctgcatcttgccctggatcctcatcaccaactgctcctgctggccaggatcaggccatgggacttttgtgagtcaggcgggagaccattttatgtttattttctttagtgtataagtaagggttttttcttaactttcgttaaaataaaatttt

SEQ ID NO: 246363 - DNA, 1422 bp, Artificial Sequence
  derived and/or modified sequence
atgagaaagctgctgaccaacctgcccgccgccgccgtgctgagcgcccaggtgtacagcgccgtgctgcagggcctgtgggaggagaacgtgtgcggcacccccggcagaaccagagtgtgcaccgccctgctgtacggccaggtgtgccccttccaggacagcaccgacggcctgagaaccatcaccagcatcctgttcaactggccccccgagaacaccagcgtgtactaccagcccccccagagaagcagcttcagaatcaagctggccttcagaaacctgagctggcccggcctgggcctggaggaccaccaggagatcgtgctgggccagctggtgctgcccgagcccaacgaggccaagcccgacgaccccgcccccagacccggccagcacgccctgaccatgcccgccctggagcccgccccccccctgctggccgacctgggccccgccctggagcccgagagccccgccgccctgggcccccccggctacctgcacagcgcccccggccccgcccccgcccccggcgagggccccccccccggcaccgtgctggagccccagagcgcccccgagagcagctgcccctgcagaggcagcgtgaagaaccagcccagcgaggagctgcccgacatgaccaccttcccccccagactgctggccgagcagctgaccctgatggacgccgagctgttcaagaaggtggtgctgcacgagtgcctgggctgcatctggggccagggccacctgaagggcaacgagcacatggcccccaccgtgagagccaccatcgcccacttcaacagactgaccaactgcatcaccaccagctgcctgggcgaccacagcatgagagccagagacagagccagagtggtggagcactggatcaaggtggccagagagtgcctgagcctgaacaacttcagcagcgtgcacgtgatcgtgagcgccctgtgcagcaaccccatcggccagctgcacaagacctgggccggcgtgagcagcaagagcatgaaggagctgaaggagctgtgcaagaaggacaccgccgtgaagagagacctgctgatcaaggccggcagcttcaaggtggccacccaggagagaaacccccagagagtgcagatgagactgagaagacagaagaagggcgtggtgcccttcctgggcgacttcctgaccgagctgcagagactggacagcgccatccccgacgacctggacggcaacaccaacaagagaagcaaggaggtgagagtgctgcaggagatgcagctgctgcaggtggccgccatgaactacagactgagacccctggagaagttcgtgacctacttcaccagaatggagcagctgagcgacaaggagagctacaagctgagctgccagctggagcccgagaacccctag

SEQ ID NO: 246364 - DNA, 1743 bp, Artificial Sequence
  derived and/or modified sequence
atgagaaagctgctgaccaacctgcccgccgccgccgtgctgagcgcccaggtgtacagcgccgtgctgcagggcctgtgggaggagaacgtgtgcggcacccccggcagaaccagagtgtgcaccgccctgctgtacggccaggtgtgccccttccaggacagcaccgacggcctgagaaccatcaccagcatcctgttcaactggccccccgagaacaccagcgtgtactaccagcccccccagagaagcagcttcagaatcaagctggccttcagaaacctgagctggcccggcctgggcctggaggaccaccaggagatcgtgctgggccagctggtgctgcccgagcccaacgaggccaagcccgacgaccccgcccccagacccggccagcacgccctgaccatgcccgccctggagcccgccccccccctgctggccgacctgggccccgccctggagcccgagagccccgccgccctgggcccccccggctacctgcacagcgcccccggccccgcccccgcccccggcgagggccccccccccggcaccgtgctggagccccagagcgcccccgagagcagctgcccctgcagaggcagcgtgaagaaccagcccagcgaggagctgcccgacatgaccaccttcccccccagactgctggccgagcagctgaccctgatggacgccgagctgttcaagaaggtggtgctgcacgagtgcctgggctgcatctggggccagggccacctgaagggcaacgagcacatggcccccaccgtgagagccaccatcgcccacttcaacagactgaccaactgcatcaccaccagctgcctgggcgaccacagcatgagagccagagacagagccagagtggtggagcactggatcaaggtggccagagagtgcctgagcctgaacaacttcagcagcgtgcacgtgatcgtgagcgccctgtgcagcaaccccatcggccagctgcacaagacctgggccggcgtgagcagcaagagcatgaaggagctgaaggagctgtgcaagaaggacaccgccgtgaagagagacctgctgatcaaggccggcagcttcaaggtggccacccaggagagaaacccccagagagtgcagatgagactgagaagacagaagaagggcgtggtgcccttcctgggcgacttcctgaccgagctgcagagactggacagcgccatccccgacgacctggacggcaacaccaacaagagaagcaaggaggtgagagtgctgcaggagatgcagctgctgcaggtggccgccatgaactacagactgagacccctggagaagttcgtgacctacttcaccagaatggagcagctgagcgacaaggagagatggggcttcaccatgatgagcagaatcgtgagcaacagctggccccaggccatccaccccccccagccccccaaggtgctgaccctgcagctgcaggccgtgctgcccgccggcgccagaaagcccgtgggctggcagcaccccgccgtggccggcaacccccccggctgctggcccgagcacagactgtgcaccatcccccaccccgacagaagacaccagggcaccaccagcagaagactggccgcccagctgcacctggccctggacccccaccaccagctgctgctgctggccagaatcagaccctgggacttctgcgagagcggcggcagacccttctacgtgtacttcctgtag

SEQ ID NO: 246365 - protein, 597 aa, Artificial Sequence
  derived and/or modified sequence
MRVFLLCAYILLLMVSQLRAVSFPEDDEPLNTVDYHYSRQYPVFRGRPSGNESQHRLDFQLMLKIRDTLYIAGRDQVYTVNLNEMPKTEVIPNKKLTWRSRQQDRENCAMKGKHKDECHNFIKVFVPRNDEMVFVCGTNAFNPMCRYYRLSTLEYDGEEISGLARCPFDARQTNVALFADGKLYSATVADFLASDAVIYRSMGDGSALRTIKYDSKWIKEPHFLHAIEYGNYVYFFFREIAVEHNNLGKAVYSRVARICKNDMGGSQRVLEKHWTSFLKARLNCSVPGDSFFYFDVLQSITDIIQINGIPTVVGVFTTQLNSIPGSAVCAFSMDDIEKVFKGRFKEQKTPDSVWTAVPEDKVPKPRPGCCAKHGLAEAYKTSIDFPDETLSFIKSHPLMDSAVPPIADEPWFTKTRVRYRLTAISVDHSAGPYQNYTVIFVGSEAGMVLKVLAKTSPFSLNDSVLLEEIEAYNHAKCSAENEEDKKVISLQLDKDHHALYVAFSSCIIRIPLSRCERYGSCKKSCIASRDPYCGWLSQGSCGRVTPGMLAEGYEQDTEFGNTAHLGDCHDMEVSSSSVTTMVYDGKSSLESPTRWST

SEQ ID NO: 246366 - DNA, 1794 bp, Artificial Sequence
  derived and/or modified sequence
atgagagtgttcctgctgtgcgcctacatcctgctgctgatggtgagccagctgagagccgtgagcttccccgaggacgacgagcccctgaacaccgtggactaccactacagcagacagtaccccgtgttcagaggcagacccagcggcaacgagagccagcacagactggacttccagctgatgctgaagatcagagacaccctgtacatcgccggcagagaccaggtgtacaccgtgaacctgaacgagatgcccaagaccgaggtgatccccaacaagaagctgacctggagaagcagacagcaggacagagagaactgcgccatgaagggcaagcacaaggacgagtgccacaacttcatcaaggtgttcgtgcccagaaacgacgagatggtgttcgtgtgcggcaccaacgccttcaaccccatgtgcagatactacagactgagcaccctggagtacgacggcgaggagatcagcggcctggccagatgccccttcgacgccagacagaccaacgtggccctgttcgccgacggcaagctgtacagcgccaccgtggccgacttcctggccagcgacgccgtgatctacagaagcatgggcgacggcagcgccctgagaaccatcaagtacgacagcaagtggatcaaggagccccacttcctgcacgccatcgagtacggcaactacgtgtacttcttcttcagagagatcgccgtggagcacaacaacctgggcaaggccgtgtacagcagagtggccagaatctgcaagaacgacatgggcggcagccagagagtgctggagaagcactggaccagcttcctgaaggccagactgaactgcagcgtgcccggcgacagcttcttctacttcgacgtgctgcagagcatcaccgacatcatccagatcaacggcatccccaccgtggtgggcgtgttcaccacccagctgaacagcatccccggcagcgccgtgtgcgccttcagcatggacgacatcgagaaggtgttcaagggcagattcaaggagcagaagacccccgacagcgtgtggaccgccgtgcccgaggacaaggtgcccaagcccagacccggctgctgcgccaagcacggcctggccgaggcctacaagaccagcatcgacttccccgacgagaccctgagcttcatcaagagccaccccctgatggacagcgccgtgccccccatcgccgacgagccctggttcaccaagaccagagtgagatacagactgaccgccatcagcgtggaccacagcgccggcccctaccagaactacaccgtgatcttcgtgggcagcgaggccggcatggtgctgaaggtgctggccaagaccagccccttcagcctgaacgacagcgtgctgctggaggagatcgaggcctacaaccacgccaagtgcagcgccgagaacgaggaggacaagaaggtgatcagcctgcagctggacaaggaccaccacgccctgtacgtggccttcagcagctgcatcatcagaatccccctgagcagatgcgagagatacggcagctgcaagaagagctgcatcgccagcagagacccctactgcggctggctgagccagggcagctgcggcagagtgacccccggcatgctggccgagggctacgagcaggacaccgagttcggcaacaccgcccacctgggcgactgccacgacatggaggtgagcagcagcagcgtgaccaccatggtgtacgacggcaagagcagcctggagagccccaccagatggagcacctag

SEQ ID NO: 246367 - DNA, 1794 bp, Artificial Sequence
  derived and/or modified sequence
atgcgggtctttcttttgtgcgcctatattttgctactgatggtgagccaactgagggctgtaagctttccggaagatgacgagcctttgaacaccgtagactaccattattccagacaatatccagtcttccggggccggccaagcggaaacgagtcgcagcatagactggacttccaattgatgctgaagatacgggacacactctacatagccggcagggatcaggtgtatactgttaaccttaacgaaatgcccaagacggaggtgattcctaataagaagctaacctggagatcgcggcagcaggatcgcgaaaactgcgccatgaagggcaagcacaaagacgaatgtcacaacttcattaaggtgttcgtgccgagaaatgacgaaatggtcttcgtttgtggcacaaacgctttcaaccccatgtgcagatactatcggttgagtaccctggagtatgacggagaggaaatctctgggcttgccaggtgtcccttcgacgctagacaaactaacgtagcacttttcgctgacggcaaactctattccgccactgtggctgacttcctggcttcagatgcagtgatctatcgatctatgggcgacggatcagccctccgaactatcaaatatgactccaaatggattaaggaaccacactttcttcatgccatcgaatatggcaattacgtgtatttttttttccgggagattgccgtagagcacaacaacctgggcaaagcagtttactctcgggtggcacggatctgtaagaacgacatgggcggcagtcaacgcgtgcttgagaagcactggacttctttcctgaaagcccggctaaattgttcagtccctggcgattcgtttttttattttgatgtcctgcagtccattactgacatcatccagattaatgggattcccacagttgtcggagtatttaccacgcagttgaactccattccaggatccgcagtctgcgcctttagcatggatgacatcgaaaaagtgttcaaagggaggtttaaagagcagaaaaccccagactcagtttggacagcagtgccggaggacaaagttcccaaaccccggccaggctgctgcgccaaacatggactggccgaggcctacaaaacttccatcgattttccagacgagaccttatctttcatcaagtcccacccactaatggactcggctgtgccacccatcgccgatgaaccgtggttcaccaagacccgagtgagatacaggctcaccgcaattagcgtggaccatagcgcgggcccgtatcagaattataccgtaatttttgtgggcagcgaggcaggaatggtgctgaaagtactggcaaaaacctcgcctttctctctaaatgacagcgtcctattagaggagattgaagcatacaaccacgcaaaatgttcagccgagaatgaagaggacaaaaaggttatctctcttcagctcgacaaagaccaccatgcactctacgtggctttctctagttgcataattcggatacccctgtcaaggtgcgaacgctacggtagttgcaagaaatcttgcattgcctcccgcgatccttactgtggatggcttagccagggaagttgcggacgcgtgacacctggaatgctggctgagggctacgaacaagataccgaattcggtaataccgctcatcttggggactgtcatgatatggaagtgtcctcctcttccgtgaccactatggtttacgatggtaaaagctctttagaatcacccacccggtggtcgacttag

SEQ ID NO: 246368 - DNA, 1794 bp, Artificial Sequence
  derived and/or modified sequence
atgcgtgtctttctactctgtgcgtacattttactcttaatggtgagccaacttagggctgtcagctttcccgaagacgatgagcctctaaataccgtagactatcactattcccgccagtaccctgtctttcgcggccggcctagtgggaatgagtctcagcacagactggactttcaactcatgctaaaaatccgggatacactgtacatcgccggcagggaccaagtgtacaccgtgaacttgaacgaaatgccgaagacagaagtcatacctaacaagaaactgacctggcgaagccggcaacaagaccgtgagaattgcgcaatgaagggaaagcataaggacgaatgtcacaatttcattaaggtcttcgtcccccggaatgacgagatggtgttcgtctgcgggacgaacgcatttaatccgatgtgccggtattataggctatctacactggagtatgatggcgaggagatttctggtctggcccggtgtccctttgacgctagacaaacaaacgtggccctctttgccgacggaaagttgtattcagccactgtggctgacttccttgcgagcgacgctgtcatttaccgatccatgggcgacggatctgcactgcgcacgattaagtacgactcaaagtggatcaaagaaccgcacttcctgcatgccatagagtacggaaattatgtttattttttctttagggaaatcgccgtggagcacaacaatctggggaaggccgtctactccagagttgcccgaatctgcaaaaacgatatgggaggatctcagcgggttctcgaaaaacactggaccagctttctgaaggcccggctgaattgtagcgtgcccggcgactccttcttttatttcgatgtgttacagagcattaccgatatcatccagatcaacggaattcccaccgttgtcggggtgttcacaacacagctgaattctattccgggatccgccgtttgcgctttttcgatggacgatatagagaaggtgtttaaaggccggtttaaagagcagaagacgcctgacagcgtttggacggctgtgcctgaagacaaggtgcccaaaccgcgtcccgggtgttgtgcaaaacacggcctggcagaagcctataaaacctccatagatttccccgatgaaacgcttagcttcatcaagtcccaccctctgatggatagtgctgtcccccctattgcagatgagccttggttcaccaagactagagtacgctatcggttaaccgctatctctgttgatcattccgctggaccctatcagaattatacagtaatttttgtaggatctgaggcaggtatggtgctcaaggtgcttgcaaagacgagtcccttctctttgaatgattccgtattgctggaggaaattgaggcatacaatcacgccaagtgtagtgctgagaacgaggaagacaagaaggtgatctccctgcagctggataaagaccatcacgccctttacgttgctttttcatcctgcataatccggataccccttagccgctgcgagcggtatgggtcctgcaaaaaatcgtgcattgccagccgtgacccgtattgcgggtggttgagccaaggctcatgtggtagggtaacgcctggcatgctggcagagggctacgagcaagacacagaatttggtaacacagcacatctgggggattgccacgatatggaagtatcttcttcatccgtaaccacgatggtctacgatggaaagtcgtcccttgaatctcctacccgctggtcaacctag

SEQ ID NO: 246369 - DNA, 1794 bp, Artificial Sequence
  derived and/or modified sequence
atgagggtcttcctgctgtgtgcctacatcctgctgctgatggtgtcccagctgcgggctgtgtccttcccagaagatgatgagcccctgaacacagtggactaccactacagccggcagtaccctgtgttccggggccggcccagcggaaatgaaagccagcaccggctggacttccagctgatgctgaagatccgggacaccctgtacatcgccggccgggaccaggtgtacacagtgaacctgaatgagatgcccaagacagaggtgatccccaacaagaagctgacctggaggagccggcagcaggaccgggagaactgtgccatgaagggcaagcacaaggatgagtgccacaacttcatcaaggtgtttgtgcccagaaatgatgagatggtgtttgtgtgtggcaccaatgccttcaaccccatgtgccgctactaccgcctgagcaccctggagtatgatggagaggagatcagcggcctggcccgctgcccctttgatgcccggcagaccaacgtggccctgtttgctgatggcaagctgtacagcgccaccgtggccgacttcctggccagtgatgctgtgatctaccgctccatgggagatggcagcgccctgcggaccatcaagtatgacagcaagtggatcaaggagccccacttcctgcacgccattgaatatggcaactacgtgtacttcttcttccgggagattgctgtggagcacaacaacctgggcaaggctgtgtacagccgggtggcccgcatctgcaagaatgacatgggcggcagccagagggtgctggagaagcactggaccagcttcctgaaggcccggctgaactgcagcgtgcctggggacagcttcttctactttgatgtgctgcagagcatcacagacatcatccagatcaatggcatccccaccgtggtgggcgtcttcaccacccagctgaacagcatccctggcagcgctgtgtgtgccttctccatggatgacatcgagaaggtgttcaagggccgcttcaaggagcagaagaccccagacagcgtgtggacagctgtgcctgaggacaaggtgcccaagcccaggcctggctgctgtgccaagcacggcctggccgaggcctacaagaccagcattgacttcccagatgagaccctgtccttcatcaagagccaccccctgatggattctgctgtgccccccatcgcagatgagccctggttcaccaagaccagggtgcgctaccgcctgacagccatctctgtggaccacagcgctggcccctaccagaactacaccgtcatctttgtgggcagcgaggccggcatggtgctgaaggtgctggccaagaccagccccttcagcctgaatgattctgtgctgctggaggagattgaggcctacaaccacgccaagtgcagcgcagaaaatgaggaggacaagaaggtgatcagcctgcagctggacaaggaccaccacgccctgtatgtggccttcagcagctgcatcatccgcatccccctgagccgctgtgaaagatatggcagctgcaagaagagctgcatcgccagccgggacccctactgcggctggctgagccagggcagctgtggccgggtgaccccaggcatgctggccgagggctatgagcaggacacagaatttggaaacacagcccacctgggggactgccacgacatggaggtgagcagcagctctgtgaccaccatggtgtatgatggcaagagcagcctggagagccccacccgctggagcacctag

SEQ ID NO: 246370 - DNA, 1794 bp, Artificial Sequence
  derived and/or modified sequence
atgcgggtgttcctgctgtgcgcctacatcctgctgctgatggtgtctcagctacgcgcggttagttttcctgaggacgacgagcctctgaatacggtggattatcattactcgagacagtaccctgtcttcaggggccgacccagtggcaatgaaagccagcaccgcctcgatttccagctgatgctgaagatcagggacaccctttacattgctgggcgcgatcaagtgtatactgtcaacctcaatgagatgcccaagactgaagtaattccgaacaaaaagttgacatggcgttctcgccaacaggacagggagaactgtgccatgaaggggaagcataaagatgagtgccacaactttatcaaggtctttgtcccaaggaatgatgaaatggtgttcgtgtgtggaacaaatgccttcaaccctatgtgccgatattacaggctgagcacattagaatatgatggggaggagatatcaggccttgcccgctgccccttcgatgctcgacagacaaatgtggcattgtttgctgacggaaagctgtacagcgccacggtggctgacttcctggctagcgacgctgtaatttatcgaagcatgggagatggctcggccctcagaaccatcaagtacgattcgaaatggattaaggagccacactttctgcacgcgatcgaatacggaaattatgtttacttcttctttagagagattgccgtggagcacaataacttaggaaaggcagtgtacagccgggtcgcaagaatttgcaagaacgacatgggaggatcccagcgggtgttggaaaagcattggaccagctttctcaaggcccggctgaactgcagtgtgcccggtgactcatttttttacttcgacgtgctgcagtcaatcacggacattattcaaatcaacggcattccaactgtggtgggcgtgttcaccacccagctgaactcaatccccggaagtgctgtgtgtgctttcagcatggatgatattgaaaaggttttcaaggggcggtttaaggaacagaagactcccgattccgtgtggacagccgtccccgaagacaaagtccccaagccccgtcctgggtgttgtgcaaaacacggcctggcggaagcttacaagacaagcatagacttcccggacgagaccctgtcattcatcaaatcacatcctctgatggattctgcggtgcctccaattgccgacgaaccttggtttacaaaaactcgagtgcgctacagattaactgctatcagcgtcgatcatagcgcggggccttatcagaactacactgttatcttcgtaggctcagaagcgggaatggtgttaaaggtcctagctaagactagtcctttcagcctcaacgactcagtacttctcgaagaaatcgaggcttacaaccatgcaaagtgctcggctgagaacgaagaagataagaaggtgatctccctccaattggacaaggatcatcatgcactatatgtggcctttagctcgtgtatcattaggatcccactgagtagatgtgagcgctatggcagttgcaagaaatcctgcattgcatcgcgcgatccttattgcggctggctctcgcagggcagctgtggccgtgtcacaccagggatgctcgcagagggctatgaacaggatactgagtttggaaacaccgctcacctgggcgattgccatgatatggaggtttctagctcttctgtgacaaccatggtttatgacggcaagtctagccttgagtctccaaccagatggtccacttag

SEQ ID NO: 246371 - DNA, 1794 bp, Artificial Sequence
  derived and/or modified sequence
atgcgggtgttcctgctgtgcgcctacatcctgctgctgatggtgtcccagctgcgcgcggtgtcatttccggaagatgacgaaccactgaataccgtggattatcattactctcgtcaatatcccgtcttccgcgggagacccagcggaaacgagtctcaacaccggttagactttcagttaatgcttaaaatccgcgatactctgtatatcgccggccgtgaccaggtgtacactgtgaatctgaatgaaatgccaaaaaccgaagtaattcctaacaaaaagctgacatggcggagccggcaacaggaccgggagaattgcgcaatgaagggcaaacacaaagacgagtgccacaattttatcaaggtgtttgtgcctcggaacgacgaaatggtgtttgtctgtggaaccaacgcctttaatcccatgtgtcgatattaccgattaagcaccctggaatacgacggcgaggagatttctggcctcgctcgctgcccctttgatgcaagacaaaccaatgtggcgctcttcgccgatggtaaactttactctgccacggtggcagactttcttgcgtctgacgcggtaatctaccgctcaatgggagatggaagtgccttgaggactattaaatacgacagtaaatggatcaaggagcctcatttcctgcacgcaatcgagtacggtaattacgtgtacttcttttttcgagaaatagccgtggagcacaataacctaggcaaagctgtctactcacgcgtggctcgcatctgcaaaaatgatatggggggtagtcagcgtgtgcttgagaaacattggacgtcattcttaaaggctcgtctgaattgttcggtgccgggagactccttcttctatttcgacgtattacagagtatcacagacatcattcagattaacggtatccctaccgtcgtgggagtgtttacaacccaactgaatagcattcccggtagcgctgtttgcgccttttctatggatgatattgagaaagtgttcaaaggtaggttcaaggaacagaagacgcccgatagtgtttggacggcggtcccagaggataaggttccgaagccccggccaggctgctgtgcaaagcacggtttagccgaagcgtacaaaacatccatcgacttcccagacgagactctctcttttattaaaagccaccccctgatggatagtgctgtccctcctattgccgatgagccatggttcacaaaaactcgggttagatacaggctgactgctatttcagtggaccatagcgcgggaccttaccagaattatactgtgatctttgtggggagtgaagcgggaatggtgctaaaggtacttgcaaagacctccccattcagcttgaatgattccgtactgctggaggagatcgaagcctacaaccatgcaaagtgtagcgcggaaaacgaagaggataaaaaggtgatttcacttcagctggacaaggaccatcatgcgttgtatgtggcgttttctagttgtatcatacggattccactctcgcgttgcgagcggtacggatcctgcaagaagtcatgcatagccagccgcgatccctactgtgggtggctgtcccaaggctcatgcggccgtgttactccagggatgctcgcagagggttatgagcaggacacagaatttgggaacacggcgcacttaggcgattgccacgatatggaggtcagtagttcttctgtgacaaccatggtttacgacgggaaatccagcttggagtctccaacaaggtggtccacatag

SEQ ID NO: 246372 - DNA, 1794 bp, Artificial Sequence
  derived and/or modified sequence
atgcgggttttcttgctgtgcgcctacatactcctcctgatggtcagtcagctgagagcagtctctttcccagaagacgatgagccactgaatacggtggactaccactacagccgtcaataccccgtcttccgcggaagaccatctggtaatgagtctcagcacagactggacttccagttaatgctcaaaatccgtgacacactgtatattgcaggcagggatcaggtgtacactgtcaacctgaacgagatgcctaaaactgaggtgattccaaacaagaaattaacctggcgatccaggcagcaggacagggaaaattgcgctatgaaggggaagcataaagatgaatgccacaatttcataaaagttttcgtacccagaaatgacgagatggtattcgtgtgtggcaccaacgcctttaacccgatgtgtaggtattaccgcctgtctacattggagtacgatggcgaagaaatttccggattagcacggtgcccatttgatgcaagacagactaatgtggcattattcgccgatggaaagctctattccgcaactgtggccgacttcctggcgtccgatgcggtgatctacaggagcatgggagatgggtcagcattaaggaccattaaatacgacagtaagtggatcaaggagcctcacttcttacacgcaatcgagtacgggaattacgtttatttcttctttcgtgaaatcgccgttgagcataataatctgggtaaagcagtgtactctcgcgtcgcacgaatctgcaaaaacgatatgggcggatcacaacgagtgcttgagaaacattggacctcttttcttaaggcacgtctgaactgctccgttccaggcgacagttttttctacttcgatgttctgcaaagcatcaccgatattatacagatcaatggcatcccgacagtggttggcgtatttacgactcagttgaacagcattcctggcagtgcagtttgtgccttctccatggatgacattgagaaggtgttcaaaggtaggttcaaggagcagaaaacacctgactctgtctggactgctgtgcccgaggataaggtgccaaaacctcggccagggtgctgtgcaaagcatggcttggccgaagcctacaagactagcattgactttcccgacgagaccctgagcttcatcaagtcccatcccttaatggactcagcagtccctcctatagccgacgagccatggttcactaagacacgagtgcgttatcgtctcacagctatcagcgtagaccattcagcaggcccttatcagaattacactgtcattttcgtgggctctgaggcaggaatggttctcaaggtacttgcgaaaacttcacccttctcactgaacgattcggtgctgctggaggaaatcgaagcatacaaccatgcgaagtgctccgccgagaacgaagaagataagaaggtgatttccctgcaactcgacaaagaccatcatgccctctacgtggctttcagttcatgcattattcggatccccctttctaggtgcgaacgctacgggagttgcaaaaaatcgtgtatagcctctagggacccttattgcgggtggctgtctcaaggaagttgcggtcgtgttacccctgggatgcttgctgagggttacgagcaagacaccgaatttggaaacactgcgcatcttggtgattgtcatgatatggaagtttcctcatccagcgtcaccacaatggtttacgatggaaaatcttctctggagtcgccaacaaggtggagtacatag

SEQ ID NO: 246373 - DNA, 1794 bp, Artificial Sequence
  derived and/or modified sequence
atgagggtctttctgctatgtgcatacattctcctgctgatggtgtcgcaactgagagctgtgagcttccctgaagacgacgaacctctgaacaccgtcgattatcattatagtaggcaatacccagtgttccggggacggccttccggcaatgagagccagcatcgattggacttccagctgatgctgaaaattcgcgacacactgtatatagcgggaagggaccaggtgtataccgttaacctgaacgaaatgcccaaaacggaggttattccaaataaaaaactaacatggcgaagcagacagcaagaccgggaaaactgtgctatgaaaggaaaacataaggatgagtgccacaatttcataaaagtatttgtccccaggaatgacgaaatggtgtttgtatgtgggaccaatgcctttaatcctatgtgccggtactatcgcttatctactctggagtacgatggagaggaaatctctgggctggcacggtgccccttcgatgcgagacagacgaacgtagccctcttcgctgacggcaagctgtacagtgcaaccgtggctgactttctggcctctgatgcagttatttaccgatcaatgggagatgggtcagctctcagaactataaaatatgacagcaaatggatcaaagagccacatttcctccacgctatcgaatacggaaattatgtctatttctttttcagggaaattgccgttgagcacaacaaccttggcaaagcagtgtattctcgcgtggctaggatatgtaaaaacgacatgggcggatcgcagagggtgctcgagaagcactggacctcctttctcaaggccaggcttaactgcagcgtcccaggagattccttcttttacttcgacgtactccagagcattaccgacataattcagatcaatggtattccgactgtcgtgggagtctttaccacccagctcaacagcatccctggatccgccgtttgcgccttttccatggatgatatagagaaagtctttaaaggccgatttaaggagcagaaaacacctgacagcgtgtggaccgcagtgcctgaggacaaggttcctaaaccaaggcctggatgctgtgcaaaacatggattggcagaggcctacaaaacaagtatcgattttccagatgagaccttgtctttcataaagtcccacccactcatggactccgctgtgccccctatcgccgatgaaccctggtttaccaagacacgggtcagatataggcttaccgctattagtgttgaccactctgccggtccctatcagaactacacagtcatattcgtgggctccgaggctgggatggtcctgaaagtactggcgaaaaccagcccctttagccttaacgatagcgtgctccttgaagagatcgaggcttacaatcacgcaaagtgtagtgcggaaaacgaggaggataagaaggttatttctctgcagctggacaaagaccaccacgcactttatgtggccttttccagctgcatcattaggatcccgttgagtcgatgtgagcgatatgggtcatgcaaaaagtcatgtatcgccagtagggacccatactgtggttggctgagccaaggttcatgtgggagggtgaccccaggcatgctggccgagggctacgagcaagatacggaattcgggaatacagctcacctgggggactgtcacgatatggaagtttcgtcctctagtgtgaccaccatggtctatgacgggaaatcaagtctggagagtcctactagatggtccacttag

SEQ ID NO: 246374 - DNA, 5906 bp, Artificial Sequence
  derived and/or modified sequence
gcggccgcttcccaccgtccctctccccttactggcagagcgcgctgcgggcggactcccgggcccggagcagcccaccggccaccccaccgcccacccggctcccggtgtctcctcccggccgctctacccagcaactttccgtgctttgttccccgactggaaatgctttacggaagcgtcttggacagggtctccgccaggcgacaagagctcggtgctgagatgtgttacgttctcatctccccatcaattatggatggaaacaaataaggaagagtcaattttgctgagccccttctccggcaacgagaggcgttctgcagccgggagggagccgccgctcgcgccggcagccgctggcaggggcatggtgaggaggaaggtagctcagtggcatttctgagcaggggccaccctgacttcaccttggcccaccatgagggtcttcctgctttgtgcctacatactgctgctgatggtttcccagttgagggcagtcagctttcctgaagatgatgaaccccttaatactgtcgactatcactattcaaggcaatatccggtttttagaggacgcccttcaggcaatgaatcgcagcacaggctggactttcagctgatgttgaaaattcgagacacactttatattgctggcagggatcaagtttatacagtaaacttaaatgaaatgcccaaaacagaagtaatacccaacaagaaactgacatggcgatcaagacaacaggatcgagaaaactgtgctatgaaaggcaagcataaagatgaatgccacaactttatcaaagtatttgttccaagaaacgatgagatggtttttgtttgtggtaccaatgcattcaatcccatgtgtagatactacaggttgagtaccttagaatatgatggggaagaaattagtggcctggcaagatgcccatttgatgccagacaaaccaatgttgccctctttgctgatgggaagctgtattctgccacagtggctgacttcttggccagcgatgccgttatttatcgaagcatgggtgatggatctgcccttcgcacaataaaatatgattccaaatggataaaagagccacactttcttcatgccatagaatatggaaactatgtctatttcttctttcgagaaatcgctgtcgaacataataatttaggcaaggctgtgtattcccgcgtggcccgcatatgtaaaaacgacatgggtggttcccagcgggtcctggagaaacactggacttcatttctaaaggctcggctgaactgttctgtccctggagattcgtttttctactttgatgttctgcagtctattacagacataatacaaatcaatggcatccccactgtggtcggggtgtttaccacgcagctcaatagcatccctggttctgctgtctgtgcatttagcatggatgacattgaaaaagtattcaaaggacggtttaaggaacagaaaactccagattctgtttggacagcagttcccgaagacaaagtgccaaagccaaggcctggctgttgtgcaaaacacggccttgccgaagcttataaaacctccatcgatttcccggatgaaactctgtcattcatcaaatctcatcccctgatggactctgccgttccacccattgccgatgagccctggttcacaaagactcgggtcaggtacagactgacggccatctcagtggaccattcagccggaccctaccagaactacacagtcatctttgttggctctgaagctggcatggtacttaaagttctggcaaagaccagtcctttctctttgaacgacagcgtattactggaagagattgaagcctacaaccatgcaaagtgcagtgctgagaatgaggaagacaaaaaggtcatctcattacagttggataaagatcaccacgctttatatgtggcgttctctagctgcattatccgcatccccctcagtcgctgtgagcgttatggatcatgtaaaaagtcttgtattgcatctcgtgacccgtattgtggctggttaagccagggatcctgtggtagagtgaccccagggatgcttgctgaaggatatgaacaagacacagaattcggcaacacagctcatctaggggactgccatgacatggaggtatcttcatcttctgttaccacaatggtgtacgatgggaagtccagtctggagagtccaaccagatggtccacatgaatgtcctcatcacctgtgtctttgctgcttttgttttgggggcattcattgcaggtgtggcagtatactgctatcgagacatgtttgttcggaaaaacagaaagatccataaagatgcagagtccgcccagtcatgcacagactccagtggaagttttgccaaactgaatggtctctttgacagccctgtcaaggaataccaacagaatattgattctcctaaactgtatagtaacctgctaaccagtcggaaagagctaccacccaatggagatactaaatccatggtaatggaccatcgagggcaacctccagagttggctgctcttcctactcctgagtctacacccgtgcttcaccagaagaccctgcaggccatgaagagccactcagaaaaggcccatggccatggagcttcaaggaaagaaacccctcagttttttccgtctagtccgccacctcattccccattaagtcatgggcatatccccagtgccattgttcttccaaatgctacccatgactacaacacgtctttctcaaactccaatgctcacaaagctgaaaagaagcttcaaaacattgatcaccctctcacaaagtcatccagtaagagagatcaccggcgttctgttgattccagaaataccctcaatgatctcctgaagcatctgaatgacccaaatagtaaccccaaagccatcatgggagacatccagatggcacaccagaacttaatgctggatcccatgggatcgatgtctgaggtcccacctaaagtccctaaccgggaggcatcgctatactcccctccttcaactctccccagaaatagcccaaccaagcgagtggatgtccccaccactcctggagtcccaatgacttctctggaaagacaaagaggttatcacaaaaattcctcccagaggcactctatatctgctatgcctaaaaacttaaactcaccaaatggtgttttgttatccagacagcctagtatgaaccgtggaggatatatgcccacccccactggggcgaaggtggactatattcagggaacaccagtgagtgttcatctgcagccttccctctccagacagagcagctacaccagtaatggcactcttcctaggacgggactaaagaggacgccgtccttaaaacctgacgtgccaccaaagccttcctttgttcctcaaaccccatctgtcagaccactgaacaaatacacatactaggcctcaagtgtgctattcccatgtggctttatcctgtccgtgttgttgagaggatgatgttgtaagggtaccttaaaacaagagactcgcttgtattttaagagaaccaagtggccaaagaaactctttctaactttggcaacatcagaacttgccacatgtagctactgcagcaaggcttctgtgtacttgcctgaaaacaaaggaaggtgctggtcattccatttcttttgtttgaagctaaagagatgtgtagctcacaggggctaccttaccagtataaagagctgataacagtactcagaagaatctgtgaacaaatacttgaaaatgggttcaatgtagactgccattatgtgtggtcttcccattaaatgtgaacattttaatatgtatgcattcaccttgcctcttgcacaaatgtcaaaaaaaagatggtaatatctcaaagaaatgaacttgtagattaccaagcagtttgctaaaaattcaatctttgacccaagctgtagcatttttttttcatgtgtggcatctttttcatgccaccaacaaacttgttgtgtgtgtgcgtgtgtgtgtgtgtgtgtgtgtgtgtgtgtgtgttctgtacccactaggatttgtttaggtgcccattgcatctttttgtgctatggagttgtttacattaagcatgaccgaacgagagacaatactatttcccacaggagtccattgggttcagctttgaaagaggaatagaatcgaggctcctttgaccatcaaaatgatgaactttacttatgtggtacccaatgccagaatgtaagagttgcaagtgattttgtgctgctattcattaaaacttgtattccagtcttgccagcttaaggagatcaagatattaagaggtatccttgatttattttccagtattcagtagtaaaattttcctgtccactgtgaatcaaagcctgagtcactctatttaaccttggacacactaataaggttttattttgattgtgttcgtttccccccccccaatagtaaaatttctcctcctttaactcctcctaccccccaaggtaagaaacaaaaaacaaacaaacaaacaaaaatagaagacaaaagaaagacatatgaaaggaattgtaattggcttaacagaaacagtctgtaaaaacctaacagtggtgcaatcatgttgtctgtgttgtgttatgtgagaattttctcctaagtcatgcaggtaatgacaatatactgtaaataccacatgtgagtttacctgaatctgtgcattttgtgccttattcatgagaatgatagaagtactaaaatctgtcaagtgttttcagtatagcacattatttactgagtgccagttgtaaatgtttttcaaccagcacctaaaaagactcttttcaaaaaatcacagaaacaacctaggacaattatttgttacataatccgacctcatagcagcattacattctttgccgtgataaacattccactcctgctttcctaaggatgaaacagtgataatgtgaactcaaatgaggtttcctgggtaatgtgacacctgcagaaactatagagcgtcatttatacgtagtttggcagaaaccacttacggctgatgatgcgcaaccctgctgactgtttcagttaatatgctgcacaccacacacttgtttagtgaaccaaatctagaaagtaccaaggcagaggtatgctcctgctgtaatcaggcaaatgagttcaactggatttcttttgacaatactgttggtacctattacttgggggaggacatgttgcagaagaccagatcatttttatacagaatgtgaaatactgatacagttattcttttttttaaagaacattgttttataaagaacgtgatttccagtgatctctggaagcgctaaagctaaaatttctgttcttgaaacacttcagctttgcaactaaaatattacagattaataataaattaaaccaaccaatgataaacactactcagtccaccaacaacaaacgtgtttgaattcaccttaccaatattaatcccagcgtgtgtaaaacagaacagtaactctatgtgaccccagataacattttgtaacattgtgcttccttgtagtttgtaatgtgagttcaatcagtatttatgttgaaatttctaacattaaatctagtctctatcctgttaatttaatttttaaatgctttatccatttgtgcaaaggtaaacgcagattgtatcttttttaatggtacggcataaaaagtaaccctcaagtgaagtgtctctatactgttttatagagtactttaacatgaatagataccttgtaaacttgtattgtggatgtgtaaataatatgtactttgggtttttaacaccgcatgtaaagtcaaaataaaatatacaaatcatt

SEQ ID NO: 246375 - DNA, 4419 bp, Artificial Sequence
  derived and/or modified sequence
atcgaattacaccatttgccgtgcatcggtttgttttgctcctgctctgtcccgctgctgctgctgctgctgcaaggggtggtggcgagtttcaggattctatcaaggaagccaagacctaaggagacagagggatatctatttttacaatatttttctttattttctttcttccttgcgcgtggcaagcttttttttttctttttcttttttcttaccagcctccccccaatgaggtagctcagtggcatttctgagcaggggccaccctgacttcaccttggcccaccatgagggtcttcctgctttgtgcctacatactgctgctgatggtttcccagttgagggcagtcagctttcctgaagatgatgaaccccttaatactgtcgactatcactattcaaggcaatatccggtttttagaggacgcccttcaggcaatgaatcgcagcacaggctggactttcagctgatgttgaaaattcgagacacactttatattgctggcagggatcaagtttatacagtaaacttaaatgaaatgcccaaaacagaagtaatacccaacaagaaactgacatggcgatcaagacaacaggatcgagaaaactgtgctatgaaaggcaagcataaagatgaatgccacaactttatcaaagtatttgttccaagaaacgatgagatggtttttgtttgtggtaccaatgcattcaatcccatgtgtagatactacaggttgagtaccttagaatatgatggggaagaaattagtggcctggcaagatgcccatttgatgccagacaaaccaatgttgccctctttgctgatgggaagctgtattctgccacagtggctgacttcttggccagcgatgccgttatttatcgaagcatgggtgatggatctgcccttcgcacaataaaatatgattccaaatggataaaagagccacactttcttcatgccatagaatatggaaactatgtctatttcttctttcgagaaatcgctgtcgaacataataatttaggcaaggctgtgtattcccgcgtggcccgcatatgtaaaaacgacatgggtggttcccagcgggtcctggagaaacactggacttcatttctaaaggctcggctgaactgttctgtccctggagattcgtttttctactttgatgttctgcagtctattacagacataatacaaatcaatggcatccccactgtggtcggggtgtttaccacgcagctcaatagcatccctggttctgctgtctgtgcatttagcatggatgacattgaaaaagtattcaaaggacggtttaaggaacagaaaactccagattctgtttggacagcagttcccgaagacaaagtgccaaagccaaggcctggctgttgtgcaaaacacggccttgccgaagcttataaaacctccatcgatttcccggatgaaactctgtcattcatcaaatctcatcccctgatggactctgccgttccacccattgccgatgagccctggttcacaaagactcgggtcaggtacagactgacggccatctcagtggaccattcagccggaccctaccagaactacacagtcatctttgttggctctgaagctggcatggtacttaaagttctggcaaagaccagtcctttctctttgaacgacagcgtattactggaagagattgaagcctacaaccatgcaaagtgcagtgctgagaatgaggaagacaaaaaggtcatctcattacagttggataaagatcaccacgctttatatgtggcgttctctagctgcattatccgcatccccctcagtcgctgtgagcgttatggatcatgtaaaaagtcttgtattgcatctcgtgacccgtattgtggctggttaagccagggatcctgtggtagagtgaccccagggatgcttgctgaaggatatgaacaagacacagaattcggcaacacagctcatctaggggactgccatgacatggaggtatcttcatcttctgttaccacaatggtgtacgatgggaagtccagtctggagagtccaaccagatggtccacatgaatgtcctcatcacctgtgtctttgctgcttttgttttgggggcattcattgcaggtgtggcagtatactgctatcgagacatgtttgttcggaaaaacagaaagatccataaagatgcagagtccgcccagtcatgcacagactccagtggaagttttgccaaactgaatggtctctttgacagccctgtcaaggaataccaacagaatattgattctcctaaactgtatagtaacctgctaaccagtcggaaagagctaccacccaatggagatactaaatccatggtaatggaccatcgagggcaacctccagagttggctgctcttcctactcctgagtctacacccgtgcttcaccagaagaccctgcaggccatgaagagccactcagaaaaggcccatggccatggagcttcaaggaaagaaacccctcagttttttccgtctagtccgccacctcattccccattaagtcatgggcatatccccagtgccattgttcttccaaatgctacccatgactacaacacgtctttctcaaactccaatgctcacaaagctgaaaagaagcttcaaaacattgatcaccctctcacaaagtcatccagtaagagagatcaccggcgttctgttgattccagaaataccctcaatgatctcctgaagcatctgaatgacccaaatagtaaccccaaagccatcatgggagacatccagatggcacaccagaacttaatgctggatcccatgggatcgatgtctgaggtcccacctaaagtccctaaccgggaggcatcgctatactcccctccttcaactctccccagaaatagcccaaccaagcgagtggatgtccccaccactcctggagtcccaatgacttctctggaaagacaaagaggttatcacaaaaattcctcccagaggcactctatatctgctatgcctaaaaacttaaactcaccaaatggtgttttgttatccagacagcctagtatgaaccgtggaggatatatgcccacccccactggggcgaaggtggactatattcagggaacaccagtgagtgttcatctgcagccttccctctccagacagagcagctacaccagtaatggcactcttcctaggacgggactaaagaggacgccgtccttaaaacctgacgtgccaccaaagccttcctttgttcctcaaaccccatctgtcagaccactgaacaaatacacatactaggcctcaagtgtgctattcccatgtggctttatcctgtccgtgttgttgagaggatgatgttgtaagggtaccttaaaacaagagactcgcttgtattttaagagaaccaagtggccaaagaaactctttctaactttggcaacatcagaacttgccacatgtagctactgcagcaaggcttctgtgtacttgcctgaaaacaaaggaaggtgctggtcattccatttcttttgtttgaagctaaagagatgtgtagctcacaggggctaccttaccagtataaagagctgataacagtactcagaagaatctgtgaacaaatacttgaaaatgggttcaatgtagactgccattatgtgtggtcttcccattaaatgtgaacattttaatatgtatgcattcaccttgcctcttgcacaaatgtcaaaaaaaagatggtaatatctcaaagaaatgaacttgtagattaccaagcagtttgctaaaaattcaatctttgacccaagctgtagcatttttttttcatgtgtggcatctttttcatgccaccaacaaacttgttgtgtgtgtgcgtgtgtgtgtgtgtgtgtgtgtgtgtgtgtgtgttctgtacccactaggatttgtttaggtgcccattgcatctttttgtgctatggagttgtttacattaagcatgaccgaacgagagacaatactatttcccacaggagtccattgggttcagctttgaaagaggaatagaatcgaggctcctttgaccatcaaaatgatgaactttacttatgtggtacccaatgccagaatgtaagagttgcaagtgattttgtgctgctattcattaaaacttgtattccagtcttgccagcttaaggagatcaagatattaagaggtatccttgatttattttccagtattcagtagtaaaattttcctgtccactgtgaatcaaagcctgagtcactctatttaaccttggacacactaataaggttttattttgattgtgttcgtttccccccccccaatagtaaaatttctcctcctttaactcctcctaccccccaaggtaagaaacaaaaaacaaacaaacaaa

SEQ ID NO: 246376 - protein, 137 aa, Artificial Sequence
  derived and/or modified sequence
MDNARMNSFLEYPILSSGDSGTCSARAYPSDHRITTFQSCAVSANSCGGDDRFLVGRGVQIGSPHHHHHHHHRHPQPATYQTSGNLGVSYSHSSCGPSYGSQNFSAPYSPYALNQEADPPRSLSLPRIGDIFSSADF

SEQ ID NO: 246377 - DNA, 414 bp, Artificial Sequence
  derived and/or modified sequence
atggataatgctaggatgaactcttttctagagtatccgatactcagttcgggcgactctggcacatgtagcgctagggcctatccttcagatcatcgcatcacaactttccagtcctgcgcagtgtcagcaaattcatgtgggggggatgataggttcctggtgggacgcggagtacagatcggaagcccccaccatcatcatcaccatcatcaccgccacccgcaaccggcgacctatcagacctcgggcaacctgggagtttcctactcccactcaagttgtgggccctcctacgggtcccagaacttttccgccccatacagcccctacgccctgaaccaggaggccgatccacccaggtcattgtctctaccacgcattggggatatattctcatccgcagacttctag

SEQ ID NO: 246378 - DNA, 2016 bp, Artificial Sequence
  derived and/or modified sequence
tttttcttctccggccccatggaggaagtgagaaagttggcacagtcacgccgggcttcgcaggaccaggtcactcagtgacagatggacaatgcaagaatgaactccttcctggaataccccatacttagcagtggcgactcggggacctgctcagcccgagcctacccctcggaccataggattacaactttccagtcgtgcgcggtcagcgccaacagttgcggcggcgacgaccgcttcctagtgggcaggggggtgcagatcggttcgccccaccaccaccaccaccaccaccatcgccacccccagccggctacctaccagacttccgggaacctgggggtgtcctactcccactcaagttgtggtccaagctatggctcacagaacttcagtgcgccttacagcccctacgcgttaaatcaggaagcagacccaccaagaagcctgtcgctcccccgcatcggagacatcttctccagcgcagacttttgactggatgaaagtcaaaagaaaccctcccaaaacagggaaagttggagagtacggctacctgggtcaacccaacgcggtgcgcaccaacttcactaccaagcagctcacggaactggagaaggagttccacttcaacaagtacctgacgcgcgcccgcagggtggagatcgctgcatccctgcagctcaacgagacccaagtgaagatctggttccagaaccgccgaatgaagcaaaagaaacgtgagaaggagggtctcttgcccatctctccggccaccccgccaggaaacgacgagaaggccgaggaatcctcagagaagtccagctcttcgccctgcgttccttccccggggtcttctacctcagacactctgactacctcccactgaggcggctccagccccagacaacagcccaggcatctccttgggctgggacttcttacccaaagcacatgcttagcttatctttctttccatttacagtctctttcttcctttctaatcctatctggggagctcctggccaggataatatatttgcagataattctggaccagagacttggtgcggggttaacaccttcatccagattgggtgccagcatacattttctggtgggccttaacatccctcctgcttttaggagaattcacagaacctactgttcctttcagatgaccttttggaaaatagttccctttgccaacagaaacatgccagaaggaatcttctcatcttttatctaactatatgtacagctctcccctcccttgtccttgaaagtaggatatagcgaaaggcgagtccaggagctcaggaagaagagatgcactatatgtttacacaattaattcatcccttaatttaagtcattttcatgtgtgtgagtttgctggttgtaaatactttgtcctaagagatttatctttatacagattttctagaaatgtttaggttactaaaacagggtgggcaaactctctaaactggtacaattttataggtgaaagaaaaaattccctcatttaaacccaatcagatgcctcagagggtagccttgatttgttcttacagttaagaagccctgcagagcacaaacttcagaaacccggcttcctgtgctaagtctttcccaatctctacccctttcttctcgggccaccctctgtttaaaatttgtgctgggttattcagaacctaaaagtattattcaaaccaatttcttccttccacagttatcttagctggatataatgtattttcagctcaattgttaatgtgatggatggcacaatgaatgtatattttgtgttattcgtgaatagtcttttgcatgtcgcacaatgtttgatgtccccaaagtaccacactgagttctatcagttatcctttgtgagcctatgatattccccatttcctgtacaatcatgaacagctctgagatcctggagtgatatgatccagagcagagtttacgggtcttaggatgtctgtaataaataaatatactcaa

SEQ ID NO: 246379 - DNA, 414 bp, Artificial Sequence
  derived and/or modified sequence
atggacaatgccaggatgaacagcttcctggagtaccccatcctgagcagcggggacagcggcacctgcagcgcccgggcctaccccagcgaccaccgcatcaccaccttccagagctgtgctgtgtctgccaacagctgtggaggagatgaccgcttcctggtgggccggggcgtgcagatcggcagcccccaccaccaccaccaccaccaccaccgccacccccagcctgccacctaccagaccagcggcaacctgggcgtgtcctacagccacagcagctgtggccccagctatggcagccagaacttcagcgccccctacagcccctatgccctgaaccaggaggccgaccccccaagaagcctgagcctgccccgcatcggggacatcttcagcagcgctgacttctag

SEQ ID NO: 246380 - DNA, 414 bp, Artificial Sequence
  derived and/or modified sequence
atggacaacgcccggatgaacagcttcctggagtaccccatcctgagctctggagactcggggacctgctccgcacgggcgtatccaagtgaccacaggatcactacctttcagtcctgcgctgtgtctgccaactcatgcgggggggacgataggttccttgttggacgcggtgtgcagatcggcagcccgcaccatcatcaccaccatcatcaccggcacccccaacctgctacctaccagacgtcagggaacctgggtgtctcttattcgcacagcagttgcggccccagctatggctctcaaaatttctctgccccttattctccctatgctctgaatcaggaggccgaccctccccgttcactatcacttcctcggattggcgatatatttagctccgctgacttttag

SEQ ID NO: 246381 - DNA, 414 bp, Artificial Sequence
  derived and/or modified sequence
atggacaatgcccgaatgaacagctttctcgagtaccctattctgtctagtggcgattcaggaacctgctcggcgcgtgcatacccatccgatcataggattaccacctttcagtcttgcgccgtctctgcaaatagctgtggaggcgatgatcgcttccttgtgggtcgtggagtgcagattggctccccccatcatcaccaccatcaccatcaccgacacccacagccagcgacttatcaaacctctggtaatcttggtgtttcgtatagccacagttcatgcgggccaagctacggttcacaaaactttagcgctccatacagcccttatgccctcaatcaggaggccgaccccccacgttccctgtctcttccacgcattggtgacatcttctctagtgccgacttctag

SEQ ID NO: 246382 - DNA, 414 bp, Artificial Sequence
  derived and/or modified sequence
atggacaacgccagaatgaacagcttcctggagtaccccatcctgagcagcggcgacagcggcacctgcagcgccagagcctaccccagcgaccacagaatcaccaccttccagagctgcgccgtgagcgccaacagctgcggcggcgacgacagattcctggtgggcagaggcgtgcagatcggcagcccccaccaccaccaccaccaccaccacagacacccccagcccgccacctaccagaccagcggcaacctgggcgtgagctacagccacagcagctgcggccccagctacggcagccagaacttcagcgccccctacagcccctacgccctgaaccaggaggccgacccccccagaagcctgagcctgcccagaatcggcgacatcttcagcagcgccgacttctag

SEQ ID NO: 246383 - protein, 264 aa, Artificial Sequence
  derived and/or modified sequence
MIMSSYLMDSNYIDPKFPPCEEYSQNSYIPEHSPEYYGRTRESGFQHHHQELYPPPPPRPSYPERQYSCTSLQGPGNSRGHGPAQAGHHHPEKSQSLCEPAPLSGASASPSPAPPACSQPAPDHPSSAASKQPIVYPWMKKIHVSTVNPNYNGGEPKRSRTAYTRQQVLELEKEFHYNRYLTRRRRIEIAHSLCLSERQIKIWFQNRRMKWKKDHRLPNTKVRSAPPAGAAPSTLSAATPGTSEDHSQSATPPEQQRAEDITRL

SEQ ID NO: 246384 - DNA, 2300 bp, Artificial Sequence
  derived and/or modified sequence
ttattgtggtttgtccgttccgagcgctccgcagaacagtcctccctgtaagagcctaaccattgccagggaaacctgccctgggcgctcccttcattagcagtattttttttaaattaatctgattaataattatttttcccccatttaattttttttcctcccaggtggagttgccgaagctgggggcagctggggagggtggggatgggaggggagagacagaagttgagggcatctctctcttccttcccgaccctctggcccccaaggggcaggaggaatgcaggagcaggagttgagcttgggagctgcagatgcctccgcccctcctctctcccaggctcttcctcctgcccccttcttgcaactctccttaattttgtttggcttttggatgattataattatttttatttttgaatttatataaagtatatgtgtgtgtgtgtggagctgagacaggctcggcagcggcacagaatgagggaagacgagaaagagagtgggagagagagaggcagagagggagagagggagagtgacagcagcgctcgcgggggctcaacccccagacctccagaaatgacgtcagaatcatttgcatcccgctgcctctacctgcctggtccagctgggaccctgcctcgccggccgcatggccagagggttggaaattaatgatcatgagctcgtatttgatggactctaactacatcgatccgaaatttcctccatgcgaagaatattcgcaaaatagctacatccctgaacacagtccggaatattacggccggaccagggaatcgggattccagcatcaccaccaggagctgtacccaccaccgcctccgcgccctagctaccctgagcgccagtatagctgcaccagtctccaggggcccggcaattcgcgaggccacgggccggcccaggcgggccaccaccaccccgagaaatcacagtcgctctgcgagccggcgcctctctcaggcgcctccgcctccccgtccccagccccgccagcctgcagccagccagcccccgaccatccctccagcgccgccagcaagcaacccatagtctacccatggatgaaaaaaattcacgttagcacggtgaaccccaattataacggaggggaacccaagcgctcgaggacagcctatacccggcagcaagtcctggaattagagaaagagtttcattacaaccgctacctgacccgaaggagaaggatcgagatcgcccactcgctgtgcctctctgagaggcagatcaaaatctggttccaaaaccgtcgcatgaaatggaagaaggaccaccgactccccaacaccaaagtcaggtcagcacccccggccggcgctgcgcccagcaccctttcggcagctaccccgggtacttctgaagaccactcccagagcgccacgccgccggagcagcaacgggcagaggacattaccaggttataaaacataactcacacccctgcccccaccccatgcccccaccctcccctcacacacaaattgactcttatttatagaatttaatatatatatatatatatatatatataggttcttttctctcttcctctcaccttgtcccttgtcagttccaaacagacaaaacagataaacaaacaagccccctgccctcctctccctcccactgttaaggacccttttaagcatgtgatgttgtcttagcatggtacctgctgggtgtttttttttaaaaggccattttggggggttatttattttttaagaaaaaaagctgcaaaaattatatattgcaaggtgtgatggtctggcttgggtgaatttcaggggaaatgaggaaaagaaaaaaggaaagaaattttaaagccaattctcatccttctcctcctcctccttccccccctctttccttaggccttttgcattgaaaatgcaccaggggaggttagtgagggggaagtcattttaaggagaacaaagctatgaagttcttttgtattattgttgggggggggtgtgggaggagagggggcgaagacagcagacaaagctaaatgcatctggagagcctctcagagctgttcagtttgaggagccaaaagaaaatcaaaatgaactttcagttcagagaggcagtctataggtagaatctctccccacccctatcgtggttattgtgtttttggactgaatttacttgattattgtaaaacttgcaataaagaattttagtgtcgatgtgaaatgccccgtgatcaataataaaccagtggatgtgaattagtttta

SEQ ID NO: 246385 - DNA, 908 bp, Artificial Sequence
  derived and/or modified sequence
gccaagccctccccatcccatgtatttatctctatttaatatttatgtctatttaagcctcatatttaaagacagggaagagcagaacggagccccaggcctctgtgtccttccctgcatttctgagtttcattctcctgcctgtagcagtgagaaaaagctcctgtcctcccatcccctggactgggaggtagataggtaaataccaagtatttattactatgactgctccccagccctggctctgcaatgggcactgggatgagccgctgtgagcccctggtcctgagggtccccacctgggacccttgagagtatcaggtctcccacgtgggagacaagaaatccctgtttaatatttaaacagcagtgttccccatctgggtccttgcacccctcactctggcctcagccgactgcacagcggcccctgcatccccttggctgtgaggcccctggacaagcagaggtggccagagctgggaggcatggccctggggtcccacgaatttgctggggaatctcgtttttcttcttaagacttttgggacatggtttgactcccgaacatcaccgacgcgtctcctgtttttctgggtggcctcgggacacctgccctgcccccacgagggtcaggactgtgactctttttagggccaggcaggtgcctggacatttgccttgctggacggggactggggatgtgggagggagcagacaggaggaatcatgtcaggcctgtgtgtgaaaggaagctccactgtcaccctccacctcttcaccccccactcaccagtgtcccctccactgtcacattgtaactgaacttcaggataataaagtgtttgcctccatggtctttgaataaagcctgagtaggaaggcggccgctcgagcatgcatctaga

SEQ ID NO: 246386 - DNA, 795 bp, Artificial Sequence
  derived and/or modified sequence
atgattatgtcgtcttacttgatggatagcaactacatagaccccaaattcccaccctgtgaggaatacagtcaaaacagctatatccccgaacactcccctgaatactacggccggacccgagaatccggatttcagcaccaccaccaggaactgtaccccccaccccctccgcgtccctcctatccggaacgccagtatagctgcacctctctgcaggggccaggtaacagtcgagggcacggcccggctcaggccggtcaccaccatcctgagaaatctcagtccctgtgcgaacccgcacccctaagtggagcgtcagcatctccatctccagcccctccagcgtgttcacagcctgcccctgaccatccaagctcagccgcctccaagcagcccattgtgtatccctggatgaagaagattcatgtgtccaccgtgaatcctaattacaacggcggtgaacctaaacggagtagaaccgcttataccaggcaacaggtgctggaactcgagaaagaattccactataatcgctacttgacacggagacggaggattgagattgcccacagtttgtgcctgtccgaacggcagataaaaatctggtttcaaaacagaagaatgaagtggaagaaagatcaccggctccctaataccaaggtgcgctcagcaccaccagctggcgcagcgcccagcactctgtcagcagcaacacccggcacctctgaggaccatagccaatccgcaacccctcccgagcaacaacgagccgaagatattacgcggctgtag

SEQ ID NO: 246387 - DNA, 795 bp, Artificial Sequence
  derived and/or modified sequence
atgatcatgtcttcctacctcatggatagtaactatatagacccgaagtttccaccttgtgaggaatatagccagaacagctatattccggaacacagccctgaatactatggtaggaccagggaatcaggcttccaacatcaccaccaggaactttaccctccccccccccctaggccttcttaccccgaacgacaatacagttgcacatctctccagggtcctggcaactcacgtgggcacggacccgcgcaagccggccaccaccacccagagaagagccagtctctatgtgagcccgccccattatcaggtgcatctgcaagcccctcccccgccccccctgcctgcagccagcctgcacctgaccatccttcatctgcagcaagcaaacagcccatagtctatccctggatgaaaaagattcacgtgagcacagtcaaccctaactacaatggtggggaacctaagcggagtagaacagcctacacaaggcagcaggtgctggagttagagaaggaatttcattataatagatacttaaccaggagaagaaggatcgagatcgcccactctttgtgcctgagcgaaagacagattaaaatctggtttcagaataggagaatgaagtggaagaaggaccaccggctgcccaatactaaagtgcggagcgcccctcccgccggcgcggctcctagtactctctctgccgccacgcccggcacatccgaggaccatagccagtcggccacaccaccagagcagcagcgagcagaagacataaccaggctatag

SEQ ID NO: 246388 - DNA, 1524 bp, Artificial Sequence
  derived and/or modified sequence
acctgccctgggcgctcccttcattagcagtattttttttaaattaatctgattaataattatttttcccccatttaattttttttcctcccaggtggagttgccgaagctgggggcagctggggagggtggggatgggaggggagagacagaagttgagggcatctctctcttccttcccgaccctctggcccccaaggggcaggaggaatgcaggagcaggagttgagcttgggagctgcagatgcctccgcccctcctctctcccaggctcttcctcctgcccccttcttgcaactctccttaattttgtttggcttttggatgattataattatttttatttttgaatttatataaagtatatgtgtgtgtgtgtggagctgagacaggctcggcagcggcacagaatgagggaagacgagaaagagagtgggagagagagaggcagagagggagagagggagagtgacagcagcgctcgcgggggctcaacccccagacctccagaaatgacgtcagaatcatttgcatcccgctgcctctacctgcctggtccagctgggaccctgcctcgccggccgcatggccagagggttggaaattaatgatcatgagctcgtatttgatggactctaactacatcgatccgaaatttcctccatgcgaagaatattcgcaaaatagctacatccctgaacacagtccggaatattacggccggaccagggaatcgggattccagcatcaccaccaggagctgtacccaccaccgcctccgcgccctagctaccctgagcgccagtatagctgcaccagtctccaggggcccggcaattcgcgaggccacgggccggcccaggcgggccaccaccaccccgagaaatcacagtcgctctgcgagccggcgcctctctcaggcgcctccgcctccccgtccccagccccgccagcctgcagccagccagcccccgaccatccctccagcgccgccagcaagcaacccatagtctacccatggatgaaaaaaattcacgttagcacggtgaaccccaattataacggaggggaacccaagcgctcgaggacagcctatacccggcagcaagtcctggaattagagaaagagtttcattacaaccgctacctgacccgaaggagaaggatcgagatcgcccactcgctgtgcctctctgagaggcagatcaaaatctggttccaaaaccgtcgcatgaaatggaagaaggaccaccgactccccaacaccaaagtcaggtcagcacccccggccggcgctgcgcccagcaccctttcggcagctaccccgggtacttctgaagaccactcccagagcgccacgccgccggagcagcaacgggcagaggacattaccaggttataaaacataactcacacccctgcccccaccccatgcccccaccctcccctcacacacaaattgactcttatttatagaatttaatatatatatatatatatatatatataggttcttttctctct

SEQ ID NO: 246389 - DNA, 1666 bp, Artificial Sequence
  derived and/or modified sequence
agaaaaacgacaaagcgagaaaaattattttccactccagaaattaatgatcatgagctcgtatttgatggactctaactacatcgatccgaaatttcctccatgcgaagaatattcgcaaaatagctacatccctgaacacagtccggaatattacggccggaccagggaatcgggattccagcatcaccaccaggagctgtacccaccaccgcctccgcgccctagctaccctgagcgccagtatagctgcaccagtctccaggggcccggcaattcgcgaggccacgggccggcccaggcgggccaccaccaccccgagaaatcacagtcgctctgcgagccggcgcctctctcaggcgcctccgcctccccgtccccagccccgccagcctgcagccagccagcccccgaccatccctccagcgccgccagcaagcaacccatagtctacccatggatgaaaaaaattcacgttagcacggtgaaccccaattataacggaggggaacccaagcgctcgaggacagcctatacccggcagcaagtcctggaattagagaaagagtttcattacaaccgctacctgacccgaaggagaaggatcgagatcgcccactcgctgtgcctctctgagaggcagatcaaaatctggttccaaaaccgtcgcatgaaatggaagaaggaccaccgactccccaacaccaaagtcaggtcagcacccccggccggcgctgcgcccagcaccctttcggcagctaccccgggtacttctgaagaccactcccagagcgccacgccgccggagcagcaacgggcagaggacattaccaggttataaaacataactcacacccctgcccccaccccatgcccccaccctcccctcacacacaaattgactcttatttatagaatttaatatatatatatatatatatatatataggttcttttctctcttcctctcaccttgtcccttgtcagttccaaacagacaaaacagataaacaaacaagccccctgccctcctctccctcccactgttaaggacccttttaagcatgtgatgttgtcttagcatggtacctgctgggtgtttttttttaaaaggccattttggggggttatttattttttaagaaaaaaagctgcaaaaattatatattgcaaggtgtgatggtctggcttgggtgaatttcaggggaaatgaggaaaagaaaaaaggaaagaaattttaaagccaattctcatccttctcctcctcctccttccccccctctttccttaggccttttgcattgaaaatgcaccaggggaggttagtgagggggaagtcattttaaggagaacaaagctatgaagttcttttgtattattgttgggggggggtgtgggaggagagggggcgaagacagcagacaaagctaaatgcatctggagagcctctcagagctgttcagtttgaggagccaaaagaaaatcaaaatgaactttcagttcagagaggcagtctataggtagaatctctccccacccctatcgtggttattgtgtttttggactgaatttacttgattattgtaaaacttgcaataaagaattttagtgtcgatgtgaaatgccccgtgatcaataataaaccagtggatgtgaattagtttta

SEQ ID NO: 246390 - DNA, 795 bp, Artificial Sequence
  derived and/or modified sequence
atgatcatgagcagctacctgatggacagcaactacatcgaccccaagttccccccctgtgaggagtacagccagaacagctacatccctgagcacagccctgagtactacggccgcacccgggagagcggcttccagcaccaccaccaggagctgtacccacctcctccaccccggcccagctacccagagcggcagtacagctgcaccagcctgcagggccctggcaacagccggggccacggccctgcccaggccggccaccaccaccctgagaagagccagagcctgtgtgagcccgcccccctgagcggggccagcgccagccccagccctgcccccccagcctgcagccagcctgccccagaccaccccagcagcgctgccagcaagcagcccatcgtgtacccctggatgaagaagatccacgtgtccacagtgaaccccaactacaacggcggggagcccaagaggagcaggacagcctacacccggcagcaggtgctggagctggagaaggagttccactacaaccgctacctgaccaggagaagaagaattgaaattgcccacagcctgtgcctgtctgagcggcagatcaagatctggttccagaacagaaggatgaagtggaagaaggaccaccggctgcccaacaccaaggtgcgcagcgcccccccagctggggccgcccccagcaccctgtctgctgccaccccaggcaccagcgaggaccacagccagagcgccaccccacctgagcagcagagagctgaggacatcacccggctgtag

SEQ ID NO: 246391 - DNA, 795 bp, Artificial Sequence
  derived and/or modified sequence
atgatcatgagcagctacctgatggacagcaactacatcgaccccaaattccccccttgcgaagagtactcccagaactcttacatccccgagcattctcctgagtattatggacgcactcgcgaatcgggtttccagcatcatcaccaggaactctaccccccaccaccccctagaccgagttatcctgaacggcagtattcttgtacttcactgcagggacccggcaattctaggggccatggacccgcccaagccggacatcaccatccagagaagagccagtccttgtgcgaacctgctcccctcagcggagcttctgcatcgccgtcccctgcaccgcctgcgtgctcccagcctgcgccagatcacccctccagcgccgcgtcaaaacagcctatcgtctatccttggatgaaaaaaattcacgttagtaccgtaaatcccaattacaacggaggtgagccaaagcgaagccgaaccgcttataccaggcagcaggtgctggagctggagaaggaattccattataacaggtacctgactaggagacggagaattgaaattgctcacagtctttgcttaagtgaacgccagatcaaaatttggttccagaacaggcgcatgaagtggaaaaaggatcataggcttcctaacacaaaagtccggtccgcccccccagctggggcagcaccgtctaccctttcagcagccaccccagggacatcagaagaccacagtcagtcagcgacccctcctgagcagcagcgagcggaagatatcacaagactgtag

SEQ ID NO: 246392 - DNA, 795 bp, Artificial Sequence
  derived and/or modified sequence
atgatcatgagcagctacctgatggacagcaactacatcgaccccaaattcccgccgtgcgaagaatattcgcagaatagttatatcccagagcacagtcccgagtattatggccgcaccagggagtctgggtttcagcatcatcaccaggaactgtatccacctccgcctccccggccctcgtaccctgagcggcagtatagttgtacctctttacagggcccgggcaacagtaggggccacggtcccgcccaggccggccatcaccacccagagaagtcacaatccctctgcgaacctgccccattgtctggagctagtgcctcaccatcgccagctccccctgcgtgctctcaaccagcccctgatcacccaagctccgccgcctctaagcagcccattgtgtacccttggatgaagaagattcatgtctccaccgtgaacccaaactacaacggcggcgagcctaagagaagtcgcaccgcatatacacggcagcaggtcctggagttagaaaaggagttccactacaaccggtatctgacaagacggaggcggatcgagattgcgcactccctgtgcctttcggaacggcaaattaaaatttggttccagaaccgtagaatgaaatggaagaaggaccacaggcttccaaatacaaaagtgcgaagtgctccgccagccggtgctgcaccatcgacactttctgctgccactcctgggaccagcgaggaccactctcagagcgcaacaccacccgagcagcagcgagctgaggacattaccagactttag

SEQ ID NO: 246393 - DNA, 795 bp, Artificial Sequence
  derived and/or modified sequence
atgatcatgtcttcctatctgatggatagcaactatatcgatcctaaattcccaccttgcgaggagtactcccagaactcatatatacccgagcactcccccgagtactacggcagaactcgcgagagcggcttccagcatcatcatcaggagttgtacccaccgcctccacctagacccagttatcctgaacgtcagtattcatgtacaagcctgcaggggcctggaaactcgagggggcatggcccagcccaagccggacaccaccacccggagaagtcccagagcctttgcgaacccgcacctcttagcggggcttcagcctctccctcccctgcgccaccagcgtgttcccagccagctcccgaccatccgagcagcgctgccagcaagcaaccgattgtctatccctggatgaagaagatccatgtgtccactgtcaaccccaactacaacggaggcgaaccaaagcggtctagaacagcatacaccaggcagcaagttctggaactcgaaaaggagtttcattataatcgctacttgaccagacgcagacggatagaaatcgctcactccctgtgtctgtcggagagacagatcaaaatatggttccagaatcgcaggatgaaatggaaaaaggaccataggctgccaaacacaaaggtgcgctcagctcccccagctggggctgccccaagtacgctctccgccgcaacccccggaaccagtgaagaccactctcagtctgctaccccacccgagcagcagagggcagaagacataacaaggctgtag

SEQ ID NO: 246394 - DNA, 795 bp, Artificial Sequence
  derived and/or modified sequence
atgataatgagttcttatctaatggacagcaattatatcgatccgaagttcccgccttgtgaagagtactcacagaactcttacatccccgaacactcaccggagtactacggtaggacaagagagtccggattccaacaccatcatcaggagctttatcctccgccacctcctcggccatcataccctgaaagacaatattcatgtaccagcctgcagggacctggtaatagtcgcggtcatggtcccgctcaggcaggccaccaccaccctgaaaagtcacaatccctatgcgaacctgcacctctgagcggagcttccgcttctcccagccctgcccctcccgcttgttcgcagcctgccccagaccatcctagttcagctgcatccaagcaaccgattgtttacccctggatgaaaaagatccacgtgtctaccgtgaatccaaattacaacggcggtgagcccaagcggtctcggacagcctacactcgtcagcaggtcctcgagctggagaaggaattccattacaatcgctatctgacacgcagacggcgaattgagatagcccactccctgtgtctgagtgaacgccagatcaaaatatggttccaaaatcgacgaatgaagtggaaaaaagatcacagactgccaaataccaaggtccgctctgcgcctccagctggggctgcaccgtccactctgtcagctgcaactcctgggacatcagaggaccactcacaaagcgcgacgccccctgagcagcagagagccgaggatatcacccgcctgtag

SEQ ID NO: 246395 - DNA, 795 bp, Artificial Sequence
  derived and/or modified sequence
atgatcatgagcagctacctgatggacagcaactacatcgaccccaagttccccccctgcgaggagtacagccagaacagctacatccccgagcacagccccgagtactacggcagaaccagagagagcggcttccagcaccaccaccaggagctgtaccccccccccccccccagacccagctaccccgagagacagtacagctgcaccagcctgcagggccccggcaacagcagaggccacggccccgcccaggccggccaccaccaccccgagaagagccagagcctgtgcgagcccgcccccctgagcggcgccagcgccagccccagccccgccccccccgcctgcagccagcccgcccccgaccaccccagcagcgccgccagcaagcagcccatcgtgtacccctggatgaagaagatccacgtgagcaccgtgaaccccaactacaacggcggcgagcccaagagaagcagaaccgcctacaccagacagcaggtgctggagctggagaaggagttccactacaacagatacctgaccagaagaagaagaatcgagatcgcccacagcctgtgcctgagcgagagacagatcaagatctggttccagaacagaagaatgaagtggaagaaggaccacagactgcccaacaccaaggtgagaagcgccccccccgccggcgccgcccccagcaccctgagcgccgccacccccggcaccagcgaggaccacagccagagcgccaccccccccgagcagcagagagccgaggacatcaccagactgtag

SEQ ID NO: 246396 - protein, 564 aa, Artificial Sequence
  derived and/or modified sequence
MDSRYNSTAGIGDLNQLSAAIPATRVEVSVSCRNLLDRDTFSKSDPICVLYVQGVGNKEWREFGRTEVIDNTLNPDFVRKFILDYFFEERENLRFDLYDVDSKSPNLSKHDFLGQVFCTLGEIVGSQGSRLEKPIVGIPGKKCGTIILTAEELNCCRDAVLMQFCANKLDKKDFFGKSDPFLVFYRSNEDGSFTICHKTEVVKNTLNPVWQAFKISVRALCNGDYDRTIKVEVYDWDRDGSHDFIGEFTTSYRELSRGQSQFNVYEVVNPKKKGKKKKYTNSGTVTLLSFLVETEVSFLDYIKGGTQINFTVAIDFTASNGNPAQPTSLHYMNPYQLNAYGMALKAVGEIVQDYDSDKMFPALGFGAKLPPDGRISHEFALNGNPQNPYCDGIEGVMEAYYRSLKSVQLYGPTNFAPVINHVARYASSVKDGSQYFVLLIVTDGVISDMAQTKESIVNASKLPMSIIIVGVGPAEFDAMVELDGDDVRVSSRGKYAERDIVQFVPFRDYIDRSGNHILSMARLAKDVLAEIPEQFLSYMRARGIKPSPAPPPYTPPTHVLQTQI

SEQ ID NO: 246397 - DNA, 1695 bp, Artificial Sequence
  derived and/or modified sequence
atggacagcagatacaacagcaccgccggcatcggcgacctgaaccagctgagcgccgccatccccgccaccagagtggaggtgagcgtgagctgcagaaacctgctggacagagacaccttcagcaagagcgaccccatctgcgtgctgtacgtgcagggcgtgggcaacaaggagtggagagagttcggcagaaccgaggtgatcgacaacaccctgaaccccgacttcgtgagaaagttcatcctggactacttcttcgaggagagagagaacctgagattcgacctgtacgacgtggacagcaagagccccaacctgagcaagcacgacttcctgggccaggtgttctgcaccctgggcgagatcgtgggcagccagggcagcagactggagaagcccatcgtgggcatccccggcaagaagtgcggcaccatcatcctgaccgccgaggagctgaactgctgcagagacgccgtgctgatgcagttctgcgccaacaagctggacaagaaggacttcttcggcaagagcgaccccttcctggtgttctacagaagcaacgaggacggcagcttcaccatctgccacaagaccgaggtggtgaagaacaccctgaaccccgtgtggcaggccttcaagatcagcgtgagagccctgtgcaacggcgactacgacagaaccatcaaggtggaggtgtacgactgggacagagacggcagccacgacttcatcggcgagttcaccaccagctacagagagctgagcagaggccagagccagttcaacgtgtacgaggtggtgaaccccaagaagaagggcaagaagaagaagtacaccaacagcggcaccgtgaccctgctgagcttcctggtggagaccgaggtgagcttcctggactacatcaagggcggcacccagatcaacttcaccgtggccatcgacttcaccgccagcaacggcaaccccgcccagcccaccagcctgcactacatgaacccctaccagctgaacgcctacggcatggccctgaaggccgtgggcgagatcgtgcaggactacgacagcgacaagatgttccccgccctgggcttcggcgccaagctgccccccgacggcagaatcagccacgagttcgccctgaacggcaacccccagaacccctactgcgacggcatcgagggcgtgatggaggcctactacagaagcctgaagagcgtgcagctgtacggccccaccaacttcgcccccgtgatcaaccacgtggccagatacgccagcagcgtgaaggacggcagccagtacttcgtgctgctgatcgtgaccgacggcgtgatcagcgacatggcccagaccaaggagagcatcgtgaacgccagcaagctgcccatgagcatcatcatcgtgggcgtgggccccgccgagttcgacgccatggtggagctggacggcgacgacgtgagagtgagcagcagaggcaagtacgccgagagagacatcgtgcagttcgtgcccttcagagactacatcgacagaagcggcaaccacatcctgagcatggccagactggccaaggacgtgctggccgagatccccgagcagttcctgagctacatgagagccagaggcatcaagcccagccccgccccccccccctacaccccccccacccacgtgctgcagacccagatctag

SEQ ID NO: 246398 - DNA, 3489 bp, Artificial Sequence
  derived and/or modified sequence
accctcaacccccatccccgcctgacgggagctagccctcagtccgcccgagctgtggttgtgggcgccggacaagtccaaggcgcctcctcccaatatggacagccgctacaacagcactgcgggcatcggggacttgaaccagctgagcgctgccatcccggccacgcgggtggaggtgtccgtgtcctgcagaaatcttcttgacagagacacattttctaaatctgatccaatttgtgtcttatatgtacaaggagttggaaataaagaatggagagagtttggaagaactgaagtaattgataatactttaaatcctgattttgtaagaaagtttattctggactacttttttgaagaaagagagaatcttcgttttgacttgtatgatgttgattcaaagagccccaacttatccaaacatgactttctgggacaagtgttttgtacattgggagagatcgttggttcacagggaagtcgcctggaaaaaccaatagtaggaattccagggaagaaatgtggtacaatcatacttacagcagaggaattaaactgttgcagggatgccgttttgatgcaattttgtgcgaacaaattggacaagaaggacttctttggaaaatcagatcctttccttgtattttatcgaagtaatgaagatggcagttttacaatttgtcacaagacagaagttgtcaaaaacactctaaatccagtatggcaagcattcaagatctcagtcagagcattatgtaatggagactatgacagaacaatcaaagtagaggtgtatgactgggaccgagatggaagtcatgatttcattggagaatttacaacaagctatagggaactttctagagggcagtcacaattcaacgtatatgaggtggtgaatcccaaaaagaaaggaaaaaagaaaaaatatactaattctggaacagtaactttactctctttcttggtagaaacagaagtttcattccttgactacattaagggagggacgcaaatcaatttcacagtggctattgattttacagcatcaaacggcaaccctgctcagcccacttccctccactacatgaatccttaccaactgaatgcctatggtatggcactaaaagcagtgggagaaattgttcaagattatgacagtgataaaatgtttccagctctaggatttggtgcaaaactgcctccagatggaaggatatctcacgaatttgctttgaatgggaatcctcaaaacccctactgtgatggcattgagggggtcatggaggcttattacaggagtctgaaatctgtacaactatatgggcccaccaactttgctcctgtaattaatcatgtagcaagatatgcttcttctgtaaaggatggctcccagtattttgtgcttctgattgttacagatggtgttatctcagatatggcccagactaaggagtccatagttaatgcctcaaaacttccaatgtcaataattatagtaggtgttggaccagcagaatttgatgcaatggtcgaattggatggagatgatgtaagagtctcctctagaggaaaatatgctgaaagagacattgtgcagtttgtgccattcagggattatattgacagaagtggaaaccacatactgagcatggctagattggctaaagatgtcctagctgagatccctgagcagtttctctcctatatgagagcccgaggaatcaagccatcacctgcgcctcccccatacaccccacctacacatgtgttacagactcaaatatgactgtgctctgaaatgctaatgtcaactacaaatcaaaagtgctgagttaatgctttgtgcctggtgctctgtaatgaaccaggcaatgagatagttttctcagtttggtttcagcagttaatgtgctttcttggatccaaatttaaatatcttcctaaaccaaaactgtaaatatggttgttgcatgagcaacagaaaaaattgtttaaatgcttgaagcaaagtatggatgtcttctctaaatctttctttctttttttttttaacagaaacagctaatttccaatgtattgttgggaaaaagcacaaactgtgtttttaactcaaatattgtcttcgactgctatgtgtataggaaagcagtctctgtatcaatgtttacatgttactactttttaaatttcaatacttttataactgttcttaaaaataagagttttaaatactgaatcctttgtcttctaaattgcaatagctataatcacaagagcaatatctctttgaatgactgtctggacaaacacaattgcaaataagggaagggaaaaatgcttttctatttttcagtaactggattgtcttaagaaactacatctgcttaataaacaatttctcagcaatgtttgctgggtatgggagtttaagcccggcagatgtgtctcctggttgaacatgcatttttcatggagtttgggttctaaatttagactgcagttggtttgtattttgtaacactaagtagaaattataaaaagtcaaacattgtgatctataaatgcacagaaaatactttgtaaaaagtagcatccttatataataatgctatttagaaagactgaaaccaagactatttaactgtgaactatgtagcagatgttttaaactttttattccattatatcttgtctagatattttaattcaaagggatactggctctcttgatcggaatttcttgttatcaccattccacgttgccacacaaggtgcacaggctggaagtcttttgtgaaattcccagttaaatatatacaactatgtgacttagtgcacaacacatttgtgaaataacctactcctatatactgacctgcctgtccacgaataattgtaaagggtttttgcatgtacagtttttacaagaattacagttttgtgaagttgtgtctaaattaaagcatttctttagaacaaatggccttaaattctcacggaattcctggaaatgattgtgaattgccttcaaataatagaaaagtgtatttatttgtgtgtgtgtgtgtgtcaaaaatgtaactgctttataatattttttccttacctatatattctatttaatacttggtttatttctactgtacattgttttctttgtcccaagttgacctagggtgacttttataagcatgaaactattttactggaaagaaaaatatatacatccacatatctaacagtatcaatgttatataactatgtaataattgttgatttttaattatgtattaaaatctttaaatcataactatttgctttgtacgtttcatgtatgaatgacaatagtttgatgatttcctttactgatcttaaatatttatgccactacagtgtattacctacagatttttaaatttagctttatttatcaacccaaaaaacaaataaataagatcaatattcttttcttcttgtcaaaca

SEQ ID NO: 246399 - DNA, 1695 bp, Artificial Sequence
  derived and/or modified sequence
atggattctcggtacaattctactgcggggatcggggatctgaatcagttgtcagccgcgatcccagctacgcgggtcgaggtgtcagtatcgtgtaggaatttgcttgacagagatactttctcaaaatcagatccaatatgcgtgctatacgttcagggtgtgggcaataaagagtggagggaattcggaaggaccgaagttatagataatactcttaatcctgacttcgtaagaaagttcattttagactacttctttgaagagagagaaaacctacgctttgacctgtacgatgtggactctaaatctccgaacctaagcaagcacgacttcctcggacaggtcttctgcactctcggagaaatcgtcggctcacaaggctcaaggttagaaaaacccatcgttggcatccccgggaagaaatgcggcactatcatcctcacagcagaggaactgaactgctgcagggatgccgtcctgatgcaattctgtgccaacaagctcgacaagaaggacttctttgggaagagcgatccttttctagtgttttaccggtccaacgaggacggtagtttcacaatctgtcacaaaacagaagtcgttaagaacacactgaatcccgtgtggcaggccttcaagatatcagtacgtgcactctgtaatggcgactacgaccggacgataaaagttgaagtctatgactgggacagggatggttctcatgatttcatcggcgagtttaccacgtcctaccgggagctgagcagaggtcaatctcagttcaacgtctacgaggtggttaacccaaagaagaagggaaagaaaaaaaagtataccaattcaggaacagttacgttactatcctttttggtcgagaccgaggtcagcttcttggactatataaagggcggcacccagatcaacttcacagtggccatcgacttcaccgcaagtaacggcaaccctgcacaacccacctccctacactacatgaacccgtatcagctcaacgcctatggcatggctctgaaggccgtgggcgagattgtgcaggattacgacagtgataaaatgtttcccgctctcggtttcggtgccaaactgccacccgacggtaggattagccacgagttcgccctgaacgggaatccccaaaatccgtactgtgacgggattgagggcgtcatggaggcctactaccgttccctgaagtccgttcagttatacggccccaccaacttcgctcccgtgataaaccacgttgctaggtacgcgtctagtgtgaaggacgggagtcagtattttgtgcttctgatcgtcacagacggggtgatcagtgatatggctcagactaaagaatccatcgtaaatgcctcaaagcttcctatgagcatcatcatcgtcggggtggggccggccgagttcgatgccatggtagaactagacggggacgatgtccgcgtgtcgtccagaggcaaatacgccgagcgagatattgtccagtttgttcccttccgagattacattgatcgatctggtaaccacatactatccatggctcgcctcgcaaaagacgtgctggctgaaatacccgagcagtttctcagctatatgcgggctcggggcattaaaccgagccccgccccacccccgtataccccccctactcacgtgctacagacccaaatatag

SEQ ID NO: 246400 - DNA, 1695 bp, Artificial Sequence
  derived and/or modified sequence
atggacagccgctacaacagcacagctggcattggagacctgaaccagctgtctgctgccatcccagccaccagggtggaggtgtctgtgtcctgcaggaacctgctggaccgggacaccttcagcaagagtgaccccatctgtgtgctgtatgtgcagggcgtgggcaacaaggagtggagggagtttggaagaacagaggtgattgacaacaccctgaacccagactttgtgaggaagttcatcctggactacttctttgaggagcgggagaacctgcgctttgacctgtatgatgtggacagcaagagccccaacctgagcaagcatgacttcctgggccaggtgttctgcaccctgggggagatcgtgggcagccagggcagccggctggagaagcccatcgtgggcatccctgggaagaagtgtggcaccatcatcctgacagctgaggagctgaactgctgcagagatgctgtgctgatgcagttctgtgccaacaagctggacaagaaggacttcttcggcaagagtgaccccttcctggtgttctaccgcagcaatgaagatggcagcttcaccatctgccacaagacagaggtggtgaagaacaccctgaaccctgtgtggcaggccttcaagatctctgtgcgggccctgtgcaatggagactatgacaggaccatcaaggtggaggtgtatgactgggacagagatggcagccatgacttcatcggggagttcaccaccagctaccgggagctgagccggggccagagccagttcaacgtgtatgaggtggtgaaccccaagaagaagggcaagaagaagaagtacaccaacagcggcaccgtgaccctgctgtccttcctggtggagacagaggtgtccttcctggactacatcaagggcggcacccagatcaacttcaccgtggccatcgacttcaccgccagcaatggaaatcctgcccagcccaccagcctgcactacatgaacccctaccagctgaatgcctacggcatggccctgaaggctgtgggggagatcgtgcaggactatgacagcgacaagatgtttcctgccctgggctttggagccaagctgcccccagatggccgcatcagccatgaatttgccctgaatggaaacccccagaacccctactgtgatggcattgaaggagtgatggaggcctactaccgcagcctgaagtctgtgcagctgtatggccccaccaactttgcccctgtgatcaaccacgtggcccgctatgccagctctgtgaaggatggcagccagtactttgtgctgctgattgtgacagatggagtcatcagtgacatggcccagaccaaggagagcatcgtgaatgccagcaagctgcccatgagcatcatcatcgtgggcgtgggccctgctgagtttgatgccatggtggagctggatggagatgatgtgcgggtgagcagccggggcaagtatgcagagcgggacatcgtgcagtttgtgcccttccgggactacatcgacagaagtggcaaccacatcctgtccatggcccggctggccaaggatgtgctggccgagatccctgagcagttcctgagctacatgagggcccggggcatcaagcccagccctgcccccccaccctacaccccacccacccacgtgctgcagacccagatctag

SEQ ID NO: 246401 - DNA, 1695 bp, Artificial Sequence
  derived and/or modified sequence
atggacagccggtacaacagcaccgccggcatcggcgacctgaaccagctctccgcagccattcccgcaactcgcgtggaagtgtcagtctcctgccggaatttgctggaccgtgacacattctcaaagtccgaccctatttgcgtcctatacgtacagggggtgggtaataaagagtggcgcgagttcggacggactgaggtgattgacaatacccttaatcctgatttcgttagaaagttcatactcgactatttcttcgaagaacgcgagaatcttcgttttgatctttacgacgtcgattcgaaaagtcctaatttgtcaaagcatgactttttagggcaggtcttttgtaccttaggagaaatcgtagggtcacaagggtcaagactcgaaaagccaattgtgggtatacccggaaagaagtgtggcactatcatcttgacagccgaggagctgaattgttgcagggacgccgttttgatgcagttttgcgcgaataagctagataagaaggacttctttgggaagagtgatcccttcctcgtcttctaccggtcaaatgaagacgggagttttaccatctgccacaagaccgaggtggtgaaaaatactctgaacccggtgtggcaagctttcaaaatcagcgtgcgcgcattatgtaacggagattatgacagaaccatcaaggtggaggtctatgactgggatagagacggctctcacgactttattggtgaattcacaacaagttacagggaattatctcgtggccagtcccaattcaacgtgtatgaagtggtgaacccaaagaaaaaaggcaaaaaaaagaaatatacaaattctgggaccgtgacgctgttgtctttccttgtggaaacagaggtttcatttctggattacataaaaggtggaactcagataaattttactgtcgctattgatttcactgcaagcaacggaaacccagcgcaacctactagccttcactacatgaacccataccaactgaacgcgtacggaatggcactgaaagccgtcggggagattgtgcaggattatgatagcgacaaaatgtttccggcattgggtttcggcgccaagctgccaccagatgggcgaatcagccacgagttcgcactcaacgggaatccacagaacccttactgcgacggaattgagggcgttatggaggcgtattacagatccctcaaatcggttcagctttatggccctacgaactttgcgcccgtgattaaccacgtcgcgagatatgcatctagcgttaaggatggctctcaatactttgtgctccttattgtcacagacggggtgatcagcgatatggcccagacaaaggaatctatcgtgaatgccagcaagctgccgatgtcaatcattattgttggagttgggcccgccgagttcgacgcaatggtggagctggatggcgatgatgttagggtctcgagtcgggggaagtacgccgagcgtgatattgtgcagtttgtcccctttagggattatatcgacaggtctggtaatcacatcttgagtatggctcggttggcgaaggatgttttggccgagattccagagcaatttctgagctacatgcgggccaggggtattaagccttccccggcacccccgccctatactcccccaacccatgtcctgcagactcagatctag

SEQ ID NO: 246402 - DNA, 1695 bp, Artificial Sequence
  derived and/or modified sequence
atggattcgcggtacaacagtaccgccggaattggcgatcttaaccagctttccgccgctatcccagcaacccgcgtagaagtgagcgtcagttgccggaacctcctcgatagagatactttcagtaagagcgaccctatatgtgtgctctacgtgcagggggtgggtaataaggagtggcgggagttcgggagaacagaagtgatcgataatacgctcaaccctgattttgtgagaaaatttatcctcgactacttcttcgaggaaagggagaatttgcgctttgacttgtatgacgtggatagtaagagtcctaacttgtccaaacacgacttcctgggtcaggtgttctgtacccttggggagatcgtgggcagtcaggggtctagactggagaagcctatagttggaatccctggcaagaagtgtgggaccattattctaacggcagaggagctgaattgctgtcgcgacgccgttctaatgcagttctgtgcaaacaagctcgataagaaagacttctttggcaagtctgatccattcctggtgttctacaggagcaatgaggatggcagtttcaccatctgtcacaagaccgaagtggtgaaaaacacactgaaccctgtatggcaggccttcaagatctctgtgagagccttatgcaacggcgactatgaccgcaccataaaagttgaggtgtacgattgggatagggatggctcacatgactttatcggcgagtttactaccagttaccgggagctgtctcgaggacagtcccagtttaacgtctacgaagtagtgaatcctaagaagaagggaaaaaaaaaaaagtacacgaacagtggaacagtgactttgctgtccttcctggttgagacggaagtctccttcttagattacatcaaaggcggtacacagattaattttaccgtagccatagatttcacagcctcgaacggcaatcccgcacagcctacatctctccattatatgaatccctatcaactgaatgcctacggcatggctctcaaagccgtaggcgagatcgtccaggattacgattcagataaaatgttccccgctctcgggtttggggcaaagctgccgcctgacggcagaatctctcatgaatttgcacttaatgggaacccccaaaacccatactgcgacgggatcgaaggagtaatggaagcatattatcgaagtttgaagtccgtgcagctgtatgggcctacgaacttcgcccctgttattaatcatgtcgccaggtacgcaagttccgtgaaggacgggagccaatactttgtgctgctcattgtgaccgacggcgtgatcagtgacatggcccagaccaaggaaagtattgtgaatgccagcaagcttcctatgtctattattatcgtgggtgtcggacctgctgaatttgacgcgatggtggaacttgatggggacgatgttagggtaagtagccgaggcaaatacgccgaaagagatattgtgcaatttgtgcctttccgggattatatcgataggtcggggaatcatattttgagtatggcacggctggctaaagatgtgctcgccgagataccagagcagttcttgtcctatatgcgagcacgaggcattaaaccctccccggctccccctccgtacacacccccaacccatgtgctgcagacacaaatatag

SEQ ID NO: 246403 - protein, 558 aa, Artificial Sequence
  derived and/or modified sequence
MSAGSERGAAATPGGLPAPCASKVELRLSCRHLLDRDPLTKSDPSVALLQQAQGQWVQVGRTEVVRSSLHPVFSKVFTVDYYFEEVQRLRFEVYDTHGPSGFSCQEDDFLGGMECTLGQIVAQKKVTRPLLLKFGRNAGKSTITVIAEDISGNNGYVELSFRARKLDDKDLFSKSDPFLELYRVNDDQGLQLVYRTEVVKNNLNPVWEAFKVSLSSLCSCEETRPLKCLVWDYDSRGKHDFIGEFSTTFEEMQKAFEEGQAQWDCVNPKYKQKRRSYKNSGVVVLADLKFHRVYSFLDYIMGGCQIHFTVAIDFTASNGDPRNSCSLHYINPYQPNEYLKALVSVGEICQDYDSDKRFSALGFGARIPPKYEVSHDFAINFNPEDDECEGIQGVVEAYQNCLPRVQLYGPTNVAPIISKVARVAAAEESTGKASQYYILLILTDGVVTDMADTREAIVRASRLPMSIIIVGVGNADFTDMQVLDGDDGVLRSPRGEPALRDIVQFVPFRELKNASPAALAKCVLAEVPKQVVEYYSHRGLPPRSLGVPAGEASPGCTP

SEQ ID NO: 246404 - DNA, 1677 bp, Artificial Sequence
  derived and/or modified sequence
atgtctgctggatcagagcgaggcgcagccgccacacctggaggtcttcccgctccttgtgcctccaaagtagagctcagattaagctgccgccacttattagaccgggaccctctgactaagagtgaccctagtgtggcattgcttcagcaggcccaggggcaatgggtgcaggtgggccgaaccgaagtagtaagaagcagcctacatcctgtgttttctaaagtattcaccgtggattattacttcgaggaggttcagcgccttaggtttgaggtgtatgacacacatgggccttcaggcttttcttgccaggaggatgacttcttgggtgggatggagtgcacactcgggcagatcgttgctcagaagaaagtgactcgacctcttctgctgaaattcggacggaacgccggcaaatcgacaattacggtgatcgcagaagacatatctggaaataatggttacgtggagctttcttttagggccagaaaacttgatgacaaggatttattcagcaaatcagaccctttcctcgaactttacagggtaaatgacgaccagggattgcagctggtatacagaactgaagtggtgaagaacaacctgaaccccgtttgggaggcctttaaggtatcactctcctccttgtgctcatgcgaagagacacgacctctaaagtgcttagtgtgggattacgattcccgtggaaaacacgatttcattggagagttcagtactaccttcgaagagatgcagaaagcgttcgaagagggacaggcccagtgggactgtgtgaacccaaagtacaagcagaaacgaaggtcctacaagaatagtggggtggtggtactggcagatctcaaatttcacagagtgtattcttttctggattacatcatgggtgggtgtcagattcatttcaccgtagctattgactttacagcctccaatggggatccccgtaacagctgttcactgcattacattaacccctatcaaccgaacgaatatttgaaggcattggttagtgtaggcgaaatctgccaggattacgactccgacaaaagattcagtgcattaggctttggagcgcggatacctcccaagtacgaggtgagccatgatttcgcgattaactttaacccggaggatgacgagtgcgagggaattcagggggtggtagaagcataccaaaactgtctccctcgagtgcagctgtacggaccaaccaacgtagccccgatcattagcaaagtcgcccgtgtggccgctgccgaggagagcaccgggaaggctagccagtattatatacttctgatcctgactgatggggttgttaccgacatggccgacactagggaagcaattgttcgcgcaagtcggttacccatgtcgatcattatcgtcggcgtggggaacgcagacttcacagatatgcaggtcctggacggcgacgatggagtgctgagatctcccagaggcgagccagcactgcgagatatcgtccagtttgtgccatttagagagctcaagaacgccagcccagcggctctggccaagtgcgtgctggcggaggtcccgaaacaagttgtcgagtattacagccaccgtggacttccgccaagatcgctcggcgtcccggcaggggaagccagtccagggtgcaccccttag

SEQ ID NO: 246405 - DNA, 1677 bp, Artificial Sequence
  derived and/or modified sequence
atgtctgctggcagcgagagaggagctgctgccaccccaggcggcctgcctgccccctgtgccagcaaggtggagctgcggctgagctgccgccacctgctggaccgggaccccctgaccaagagtgaccccagcgtggccctgctgcagcaggcccagggccagtgggtgcaggtgggccgcacagaggtggtgcgcagcagcctgcaccctgtgttcagcaaggtgttcaccgtggactactactttgaggaggtgcagaggctgcgctttgaggtgtatgacacccacggccccagcggcttcagctgccaggaggatgacttcctgggcggcatggagtgcaccctgggccagatcgtggcccagaagaaggtgacccggcccctgctgctgaagtttggaagaaatgctgggaagagcaccatcaccgtgattgctgaggacatcagcggcaacaacggctacgtggagctgtccttccgggccaggaagctggatgacaaggacctcttcagcaagagtgaccccttcctggagctgtacagagtgaatgatgaccagggcctgcagctggtgtacagaacagaggtggtgaagaacaacctgaaccctgtgtgggaggccttcaaggtgtccctgagcagcctgtgcagctgtgaggagacccggcccctgaagtgcctggtgtgggactatgacagccggggcaagcatgacttcatcggggagttcagcaccacctttgaggagatgcagaaggcctttgaggagggccaggcccagtgggactgtgtgaaccccaagtacaagcagaagaggaggagctacaagaacagcggcgtggtggtgctggccgacctgaagttccaccgggtgtacagcttcctggactacatcatgggcggctgccagatccacttcaccgtggccatcgacttcaccgccagcaatggagaccccaggaacagctgcagcctgcactacatcaacccctaccagcccaatgagtacctgaaggccctggtgtctgtgggggagatctgccaggactatgacagcgacaagcgcttcagcgccctgggctttggagcccgcatcccccccaagtatgaggtgtcccatgactttgccatcaacttcaacccagaagatgatgaatgtgagggcatccagggcgtggtggaggcctaccagaactgcctgccccgggtgcagctgtatggccccaccaacgtggcccccatcatcagcaaggtggcccgggtggccgctgctgaggagagcacaggcaaggccagccagtactacatcctgctgatcctgacagatggagtggtgacagacatggctgacacccgggaggccatcgtgcgggccagccggctgcccatgagcatcatcatcgtgggcgtgggcaatgctgacttcacagacatgcaggtgctggatggagatgatggagtgctgcggagccccagaggagagcccgccctgcgggacatcgtgcagtttgtgcccttccgggagctgaagaatgccagccctgctgccctggccaagtgtgtgctggccgaggtgcccaagcaggtggtggagtactacagccaccggggcctgcccccaagaagcctgggcgtgcctgctggggaggccagccctggctgcaccccctag

SEQ ID NO: 246406 - DNA, 1677 bp, Artificial Sequence
  derived and/or modified sequence
atgagcgccggcagcgagcggggcgccgccgccacccccggcggcctccctgccccctgtgctagcaaggtggaattgagactgagctgtcgccatctgctggaccgcgacccactgaccaagagcgatccaagtgtggctctgttacagcaggcccagggtcaatgggtccaggtggggagaaccgaagttgtacgttcctctctgcatcccgtcttcagtaaagtgttcacggtggactattattttgaggaagtgcaacgcctgcgtttcgaggtctatgatactcatgggcccagcgggttctcttgtcaggaagatgatttcctcggggggatggagtgcactctcggccagatcgttgcccagaagaaagttacccgtccgctgttgctgaagtttggccgaaacgcgggcaagagcacaattactgtcatcgcagaggatatctccggtaacaatggttacgtggaactgtcatttcgcgccaggaaactcgacgacaaggatctgttctctaaatccgacccttttctggagttataccgggtgaatgacgaccagggcctgcaattagtctacaggacagaagtggtgaaaaacaatttaaatcccgtgtgggaagcctttaaggtctccctgagttccctgtgttcttgtgaggagacgagaccactcaagtgtctagtgtgggattacgacagcagaggcaaacatgactttattggcgaattctccacgaccttcgaggagatgcaaaaggcctttgaggagggccaggcgcagtgggactgtgtaaatccaaagtacaaacagaagcggcggtcttataagaacagcggagtggtggtcctggccgatctgaaattccaccgggtgtactcttttctggactacatcatggggggctgccagattcattttacagtggccattgatttcaccgcctccaacggtgaccctagaaatagctgctcattgcattatatcaacccttaccaaccgaacgagtacctgaaagctttggttagcgtcggggagatctgtcaggactatgactctgacaagcggttctctgcactgggcttcggggcacgtattcctcccaaatacgaggtgtctcatgatttcgctattaatttcaaccccgaagatgacgagtgcgaaggaatccagggtgtagtggaggcttatcaaaattgcttacctcgcgtacagctgtatgggcccaccaacgtggcgccgattatttcaaaagtggctagggtggcagccgccgaagaatccaccgggaaggcttctcagtactacattttgctcatcttgacggatggggttgttactgatatggctgacacacgggaggcgatagtccgggcttctaggctccccatgagtataattatcgtgggggttggcaatgctgatttcaccgatatgcaggtcctggatggtgatgacggcgtgctgagatcaccgcgtggggagcccgccctcagggatatcgtccagttcgtcccctttcgggaactgaaaaacgctagccctgcagctctcgccaagtgtgtgcttgcggaagttcctaaacaggtcgtggagtactattcccaccgaggccttccaccgcgcagtctgggggttccagctggcgaggcaagcccaggctgtacaccctag

SEQ ID NO: 246407 - DNA, 1677 bp, Artificial Sequence
  derived and/or modified sequence
atgagcgcagggtcagaaagaggggctgcggctacacccggaggactgccagctccgtgcgccagtaaagttgaactgcgattaagttgcagacacctgcttgatcgggatcctctcaccaagagcgatcctagcgtcgccctgctccagcaagcacaaggccagtgggttcaggtgggtaggaccgaggtcgtgcggagctcacttcatcctgtgtttagtaaagtgtttactgtcgactactattttgaagaggttcagcgcctgcgcttcgaggtctacgatacacatgggccttccgggttctcctgccaagaggacgatttcttaggcggtatggagtgcaccctgggccagatagtcgctcagaagaaggtgacccgacctcttctgctgaagttcggaagaaacgcaggtaaatccaccattacagtgatcgccgaggatatctcgggcaataatggttacgtcgagctctcatttcgggcaaggaagctggacgacaaggacctgttctctaagagcgacccatttctagagctttatcgagtcaacgatgaccaggggctgcagctggtgtatcgcacagaggtcgtaaagaataacctcaaccccgtctgggaagctttcaaagtctcactgagctcactgtgttcctgtgaagagacgcgccctctgaagtgcctcgtgtgggactatgacagcaggggtaaacatgatttcatcggcgaattttctactacattcgaggaaatgcagaaagcatttgaggaaggtcaggctcagtgggattgtgttaatccaaaatacaaacaaaaacgcagatcatataaaaattccggtgtggtggtgcttgcagatctcaaatttcaccgtgtgtatagctttctcgactacatcatgggagggtgtcagatccacttcacggtcgccatcgatttcacggcatccaatggggacccgagaaactcatgctcccttcactatatcaacccatatcaacccaacgagtacttgaaagcgctggtctcagtcggagaaatttgccaggattacgactcagacaaacggttcagcgctctggggtttggcgcacgaatcccaccaaaatacgaggtctctcatgactttgccattaactttaatcccgaggacgacgaatgtgagggcatacagggggtggtcgaggcctatcagaactgtttgcccagagtgcagctgtacggcccaacaaatgttgcaccaatcatctccaaggttgctagggtggcggctgccgaagagtcaacggggaaggccagtcagtactatatcctgctgatcttgactgacggcgtagtgacagatatggccgacacacgggaagccatcgtgcgggcatccaggctgcccatgagcatcattatagtgggggtggggaatgctgatttcactgatatgcaggtactggatggtgatgatggggtacttcgttcccctaggggtgaacccgctcttagggatattgttcagtttgtgcccttcagagaactgaagaatgccagtcctgctgccctggccaaatgtgtccttgccgaggtccccaagcaagtggtggagtattacagccatcggggactgcctcctaggagtctcggagtaccggcaggagaggccagtccagggtgtaccccatag

SEQ ID NO: 246408 - DNA, 2433 bp, Artificial Sequence
  derived and/or modified sequence
cgcgcccggcaggcgttcagggaagcgcggccacgcctgggccggccaccatttcccgggcgccgcggcggcgccgactcgcgggcagcggcccctcagtgcgcccagccgggcccccgaacgccgggagcatgagcgcgggctcggagcgcggggcggcggcaacccccgggggtttgcccgcgccctgcgcctcgaaggtggagctgcggctcagctgccggcacctgctggaccgcgacccgctcaccaagtccgaccccagcgtggcgttgctgcagcaggcgcagggccagtgggtgcaggtgggcagaaccgaggtggtccggagcagcctgcatcccgtgttctccaaggtcttcacggtggactactacttcgaggaggtgcagaggctgcgctttgaggtgtacgacacgcatgggcccagcggcttcagctgtcaggaggacgatttcctggggggcatggagtgcaccctggggcagattgtggcccagaagaaggtgacccgcccgctgctgctcaagtttggcaggaacgctggcaagtccaccatcacggtgatcgccgaggacatctcggggaacaacggctacgtggagctctccttccgggccaggaagctggacgacaaggacctcttcagcaagtccgaccccttcctggagctctacagggtcaacgacgaccagggcttgcagctggtgtacaggacggaggtggtgaagaacaacctgaacccggtgtgggaggccttcaaagtctctctgagttccctctgcagctgcgaggagacaaggcctctaaagtgcctggtctgggattacgactctcgaggaaagcacgacttcatcggagaattctctaccaccttcgaggagatgcagaaggcctttgaggaggggcaggcccagtgggactgtgtgaaccccaaatacaagcagaagagacgcagttataagaactcaggagtggtcgtcctggctgacctcaagttccacagggtgtactccttcctggactatatcatgggcggctgccagatccacttcaccgtggccattgacttcaccgcctccaatggagacccgcggaacagctgctccctgcactacatcaacccctaccagccgaacgagtacctgaaggcactggtgtccgtgggcgagatctgccaggactatgacagtgacaagaggttttccgctttggggtttggagcccggatccctcccaagtatgaggtgtcccatgactttgccatcaatttcaaccctgaggacgatgagtgtgaaggcatccagggcgtggtggaggcctaccagaactgcctgcccagggtccagctctacggccccaccaacgtggcgcccatcatctccaaggtggcacgcgtggcggcggccgaggagagcaccgggaaagcctctcaatactacatcctgctgatcctgacggacggcgtggtgaccgacatggccgacacacgggaggccattgtgcgtgcctcacgcctgcccatgtccatcatcatcgtgggcgtgggcaacgccgacttcaccgacatgcaggtcctggacggcgacgacggcgtcctgcgctccccacggggtgagcccgcgctccgggacatcgtacagttcgtgcccttccgggagctcaagaacgcatcccctgcggcgctggccaagtgcgtgctggccgaggtcccgaagcaggtggtggagtactacagccacagaggcctgcccccgagaagcctgggtgtccctgccggagaggccagcccaggctgcacaccgtgaagatgtggagggcgtagggtgggggcagtgaggaatgggtccgtacagcctctgtctgcaacatgcttggggtcccttaagctccctccgacctcccagaagcctccagtccccaccaggccccactcccagtcctcctgggatcctgctggcttgggcccggctctggggcccccaaggccgaagggtgacaaaatacaggcccccatgcctggccctgcctgagccaggtgggtggagggagggagatcatgagggacttggagggagctgggagttcatccacgggagaccctgccccgatgagaaggggcagggactgggggctctgctttgcgtctaacctttgtgggggagggccagcaaggcagtccccccacgcccgagaaagcctgggggacccagacacctgtccccacagtcaaagcctggggacccagacatcctgtccccacagtcagcctcctgtccctgctggtgcccccacacccacctaccctgtgctttttgccgtcgggcctctgcacctgggtccatggggtctgcggggtctgcggggtctgcctggcctgtgggttctgccggtggggcttcaggagtaataaagtgtcaccctatccttgta

SEQ ID NO: 246409 - DNA, 1677 bp, Artificial Sequence
  derived and/or modified sequence
atgagcgccggcagcgagagaggcgccgccgccacccccggcggcctgcccgccccctgcgccagcaaggtggagctgagactgagctgcagacacctgctggacagagaccccctgaccaagagcgaccccagcgtggccctgctgcagcaggcccagggccagtgggtgcaggtgggcagaaccgaggtggtgagaagcagcctgcaccccgtgttcagcaaggtgttcaccgtggactactacttcgaggaggtgcagagactgagattcgaggtgtacgacacccacggccccagcggcttcagctgccaggaggacgacttcctgggcggcatggagtgcaccctgggccagatcgtggcccagaagaaggtgaccagacccctgctgctgaagttcggcagaaacgccggcaagagcaccatcaccgtgatcgccgaggacatcagcggcaacaacggctacgtggagctgagcttcagagccagaaagctggacgacaaggacctgttcagcaagagcgaccccttcctggagctgtacagagtgaacgacgaccagggcctgcagctggtgtacagaaccgaggtggtgaagaacaacctgaaccccgtgtgggaggccttcaaggtgagcctgagcagcctgtgcagctgcgaggagaccagacccctgaagtgcctggtgtgggactacgacagcagaggcaagcacgacttcatcggcgagttcagcaccaccttcgaggagatgcagaaggccttcgaggagggccaggcccagtgggactgcgtgaaccccaagtacaagcagaagagaagaagctacaagaacagcggcgtggtggtgctggccgacctgaagttccacagagtgtacagcttcctggactacatcatgggcggctgccagatccacttcaccgtggccatcgacttcaccgccagcaacggcgaccccagaaacagctgcagcctgcactacatcaacccctaccagcccaacgagtacctgaaggccctggtgagcgtgggcgagatctgccaggactacgacagcgacaagagattcagcgccctgggcttcggcgccagaatcccccccaagtacgaggtgagccacgacttcgccatcaacttcaaccccgaggacgacgagtgcgagggcatccagggcgtggtggaggcctaccagaactgcctgcccagagtgcagctgtacggccccaccaacgtggcccccatcatcagcaaggtggccagagtggccgccgccgaggagagcaccggcaaggccagccagtactacatcctgctgatcctgaccgacggcgtggtgaccgacatggccgacaccagagaggccatcgtgagagccagcagactgcccatgagcatcatcatcgtgggcgtgggcaacgccgacttcaccgacatgcaggtgctggacggcgacgacggcgtgctgagaagccccagaggcgagcccgccctgagagacatcgtgcagttcgtgcccttcagagagctgaagaacgccagccccgccgccctggccaagtgcgtgctggccgaggtgcccaagcaggtggtggagtactacagccacagaggcctgccccccagaagcctgggcgtgcccgccggcgaggccagccccggctgcaccccctag

SEQ ID NO: 246410 - protein, 570 aa, Artificial Sequence
  derived and/or modified sequence
MRRLGPFHPRVHWAAPPSLSSGLHRLLFLRGTRIPSSTTLSPPRHDSLSLDGGTVNPPRVREPTGREAFGPSPASSDWLPARWRNGRGGRPRARLCSGWTAAEEARRNPTLGGLLGRQRLLLRMGGGRLGAPMERHGRASATSVSSAGEQAAGDPEGRRQEPLRRRASSASVPAVGASAEGTRRDRLGSYSGPTSVSRQRVESLRKKRPLFPWFGLDIGGTLVKLVYFEPKDITAEEEEEEVESLKSIRKYLTSNVAYGSTGIRDVHLELKDLTLCGRKGNLHFIRFPTHDMPAFIQMGRDKNFSSLHTVFCATGGGAYKFEQDFLTIGDLQLCKLDELDCLIKGILYIDSVGFNGRSQCYYFENPADSEKCQKLPFDLKNPYPLLLVNIGSGVSILAVYSKDNYKRVTGTSLGGGTFFGLCCLLTGCTTFEEALEMASRGDSTKVDKLVRDIYGGDYERFGLPGWAVASSFGNMMSKEKREAVSKEDLARATLITITNNIGSIARMCALNENINQVVFVGNFLRINTIAMRLLAYALDYWSKGQLKALFSEHEGYFGAVGALLELLKIP

SEQ ID NO: 246411 - protein, 386 aa, Artificial Sequence
  derived and/or modified sequence
SGRVNPAGGLGCSESGTFGGPPAPIVFPWFGLDIGGTLVKLVYFEPKDITAEEEEEEVESLKSIRKYLTSNVAYGSTGIRDVHLELKDLTLCGRKGNLHFIRFPTHDMPAFIQMGRDKNFSSLHTVFCATGGGAYKFEQDFLTIGDLQLCKLDELDCLIKGILYIDSVGFNGRSQCYYFENPADSEKCQKLPFDLKNPYPLLLVNIGSGVSILAVYSKDNYKRVTGTSLGGGTFFGLCCLLTGCTTFEEALEMASRGDSTKVDKLVRDIYGGDYERFGLPGWAVASSFGNMMSKEKREAVSKEDLARATLITITNNIGSIARMCALNENINQVVFVGNFLRINTIAMRLLAYALDYWSKGQLKALFSEHEGYFGAVGALLELLKIP

SEQ ID NO: 246412 - protein, 279 aa, Artificial Sequence
  derived and/or modified sequence
MPAFIQMGRDKNFSSLHTVFCATGGGAYKFEQDFLTIGDLQLCKLDELDCLIKGILYIDSVGFNGRSQCYYFENPADSEKCQKLPFDLKNPYPLLLVNIGSGVSILAVYSKDNYKRVTGTSLGGGTFFGLCCLLTGCTTFEEALEMASRGDSTKVDKLVRDIYGGDYERFGLPGWAVASSFGNMMSKEKREAVSKEDLARATLITITNNIGSIARMCALNENINQVVFVGNFLRINTIAMRLLAYALDYWSKGQLKALFSEHEGYFGAVGALLELLKIP

SEQ ID NO: 246413 - DNA, 1713 bp, Artificial Sequence
  derived and/or modified sequence
atgcgccgcttaggtcccttccacccccgggtccactgggcggctcctccatccctgtcctccggcctgcatagattgctattcttgaggggcacccgcattccatcctctactaccttaagtcctccacgtcatgactccttgagtctcgacgggggcaccgtcaatccccccagggtgagagagccaactggcagagaggcattcggcccaagtcccgcatcaagtgattggcttcctgcaagatggcggaacgggagaggaggtaggccaagggctcggctttgctctgggtggactgccgctgaggaagcgcgcagaaaccccactctaggtggtctcctcggcaggcagagactgcttttgaggatggggggagggcggctgggcgctccgatggagagacacggccgggctagtgcgacgtccgtgagctcggctggtgaacaagctgcaggcgatccagaagggaggagacaggaacctcttcgaaggcgggcgagttcggcctcggtacctgcggtcggtgcctctgcagaaggcacaagacgcgatcgcctcggatcttactccgggcctacaagcgtctctagacagagagtcgagagcctgaggaaaaagagacctcttttcccctggttcggcctcgatataggagggacattagtgaaattggtttatttcgagcctaaggatatcacggccgaggaggaggaagaagaagtggaaagtctgaagtcaatcaggaaatacctgacttctaacgttgcttacggtagcaccggcattcgggacgtccacctcgaactcaaagacctgaccctgtgtggcaggaaaggtaacctgcatttcattaggtttccgacccatgatatgccagccttcatccagatgggtcgggataagaacttcagcagcctgcatactgtgttttgtgctactggcggcggagcctacaagttcgaacaggactttttaaccataggcgacctccagctgtgcaagctcgacgagctggactgtctgatcaaaggtatcctgtatattgacagcgtgggcttcaatggaaggtcccagtgctactacttcgagaatcccgctgacagtgagaagtgccagaaactgccatttgacttgaagaatccgtatccacttctcttggtcaacattggatccggggtcagcatcttagccgtgtacagcaaggataactataagagagtcacagggactagcctgggtggcgggaccttcttcggcctgtgctgcctgctaacgggttgtactacgtttgaagaagccttggagatggccagccggggggacagcaccaaggtggataaactagttcgggatatttatggcggcgactatgaacggtttggtctccccggatgggctgtggcttcctccttcggcaacatgatgtcaaaggaaaagcgggaggcagtgtcaaaagaagatcttgcaagagccactttaattactattacaaacaatataggcagtatcgcacggatgtgtgctctgaacgagaacattaaccaggtggtttttgtgggtaacttcctcagaattaatactatcgcgatgcggctcttggcttacgccctggattattggtcaaaagggcaactcaaggcactgttcagtgagcacgaggggtacttcggagccgtgggagccctcctggaactccttaagatcccttag

SEQ ID NO: 246414 - DNA, 1713 bp, Artificial Sequence
  derived and/or modified sequence
atgaggcggctgggccccttccacccccgggtgcactgggccgccccacccagcctgagcagcggcctgcaccggctgctcttcctgcggggcacccgcatccccagcagcaccaccctgagcccccccaggcatgacagcctgagcctggatggcggcaccgtgaaccccccccgggtgcgggagcccaccggccgggaggccttcggccccagccctgccagcagtgactggctgcctgcccgctggagaaatggccggggcggccggccccgggcccggctgtgcagcggctggacagctgctgaggaggcccggaggaaccccaccctgggcggcctgctgggccggcagaggctgctgctgaggatgggcggcggccgcctgggcgcccccatggagcggcacggccgggccagcgccacctctgtgagcagcgctggggagcaggccgccggggaccctgagggccggcggcaggagcccctgcggcggcgggccagcagcgcctctgtgcctgctgtgggcgccagcgctgagggcacccggcgggaccggctgggcagctacagcggccccacctctgtgtcccggcagagggtggagagcctgaggaagaagaggcccctcttcccctggtttggcctggacatcggcggcaccctggtgaagctggtgtactttgagcccaaggacatcacagctgaggaggaggaggaggaggtggagagcctgaagagcatcaggaagtacctgaccagcaatgtggcctacggcagcacaggcatcagagatgtgcacctggagctgaaggacctgaccctgtgtggcaggaaaggaaacctgcacttcatccgcttccccacccatgacatgcctgccttcatccagatgggccgggacaagaacttcagcagcctgcacacagtgttctgtgccaccggcggcggggcctacaagtttgagcaggacttcctgaccatcggggacctgcagctgtgcaagctggatgagctggactgcctgatcaagggcatcctgtacattgattctgtgggcttcaacggccgcagccagtgctactactttgagaacccagctgacagcgagaagtgccagaagctgccctttgacctgaagaacccctaccccctgctgctggtgaacatcggcagcggcgtgtccatcctggccgtgtacagcaaggacaactacaagagggtgacaggcaccagcctgggcggcggcaccttcttcggcctgtgctgcctgctgaccggctgcaccacctttgaggaggccctggagatggccagcagaggagacagcaccaaggtggacaagctggtgcgggacatctacggcggggactatgaaagatttggcctgcccggctgggccgtggccagcagctttggaaacatgatgagcaaggagaagcgggaggccgtgtccaaagaagacctggcccgggccaccctcatcaccatcaccaacaacatcggcagcatcgccaggatgtgtgccctgaatgaaaacatcaaccaggtggtgtttgtgggcaacttcctgcgcatcaacaccatcgccatgaggctgctggcctatgccctggactactggagcaagggccagctgaaggccctcttcagcgagcacgagggctactttggagctgtgggcgccctgctggagctgctgaagatcccctag

SEQ ID NO: 246415 - DNA, 1713 bp, Artificial Sequence
  derived and/or modified sequence
atgcggcggctgggccccttccacccccgggtgcactgggccgcccctcccagcctgtcgtcaggactgcatcgtctgctgttcctcagaggtacacggatcccatctagtacaacactcagtcctccccggcatgattcactgagcctggatggtggcacagtgaatccaccacgggttcgggagcccactggtcgggaggccttcggaccctctcctgccagtagtgactggttgcctgcccgatggagaaacgggcggggcggtcgccccagggcccggctttgttccggctggactgccgccgaggaagcaagaagaaatcctacattgggagggcttctgggccggcagagactactccttagaatgggcggtggccgcttgggggccccaatggaaagacatggccgggccagtgcgacctccgtttctagtgccggggagcaggcagccggcgaccccgaaggaaggcgccaagaacccttaaggcgccgtgcttccagcgcctcagtgcctgccgttggcgctagcgccgaagggacacgccgcgaccgacttggctcttactcgggtcccacaagcgtcagtcgtcagcgtgttgaatctctgcggaaaaaacgtccactgttcccttggttcggtctcgatattggcggcacactggtgaagctggtctactttgaaccaaaggatatcacagctgaagaggaagaggaggaggtggaatcattgaagtctatcagaaagtatctgacttcaaatgtcgcctatggttcaactgggattagagacgtgcatcttgaattaaaggatctcaccctatgcggtagaaagggcaaccttcacttcattcgcttcccaacacacgatatgcccgcattcattcaaatgggccgggataagaacttcagctcattacacactgttttctgcgctactggggggggggcatacaaatttgaacaagattttttgactattggcgacctacaactttgcaaactggacgagcttgattgcttgattaagggtatactctacattgactccgtgggctttaatggtagaagtcaatgttattattttgaaaaccccgctgacagtgagaagtgtcagaagctgccatttgacctgaaaaacccctacccccttctgcttgtcaacataggctcaggcgtgtcaatactggctgtatatagcaaagataactacaagcgcgtgactggaacttcccttggcgggggcacttttttcggtctttgttgtctgttgaccggctgcactaccttcgaagaggctttggagatggcctcccggggcgactctaccaaggtagacaagctggtgcgcgatatttacggaggcgattacgagcgtttcggtctccctggatgggccgtcgcctcatcatttgggaacatgatgagtaaagagaagagagaagcggtttcaaaagaagatttggccagagctaccctgatcacaatcaccaataacatcgggagtattgctcggatgtgtgctctcaatgaaaatattaatcaagtcgtcttcgtggggaactttctccgaattaacacgatcgctatgcgtctgctggcatacgctctcgattactggtcaaaggggcaattgaaggccctgttttctgagcatgagggctacttcggggctgtcggggctctgctcgaactgctgaagattccttag

SEQ ID NO: 246416 - DNA, 2280 bp, Artificial Sequence
  derived and/or modified sequence
gggtggatgaggaggctcgggcccttccacccacgcgtccattgggcggcgccgccatcactctcttctgggctacaccgccttctcttcctccgcggaacccggatcccctcctccaccaccctctccccgccccgtcacgatagcctctcattggacggaggcacggtcaatcctcctcgagttagggagccgactggacgcgaggcctttgggccgtccccagcctcgtcggattggcttcctgcgcgttggcgcaacggaagaggcggccggccgagggcgcgcctctgctctggctggactgccgcggaggaggcgagaaggaatccgacgctggggggcttgctcgggcggcagcgactgctgctgcggatgggagggggccggctcggcgcgcccatggagcgccacggcagggcttccgccacctccgtctcgtcggctggggagcaggcggccggggaccccgaagggcggcggcaggagccactgcggcgccgggcgagcagcgcgtcggtgcccgcggtcggggcctcggctgagggcacgaggcgggatcgactgggctcttacagcggccccacctcggtctcccgccagcgcgtcgaaagcctgaggaaaaagcggccgctttttccatggtttggactggatatcggtggaactctggtcaagctggtatattttgaacccaaagacatcactgctgaagaagaagaggaagaagtggaaagtcttaaaagcattcggaagtacctgacctccaatgtggcttatgggtctacaggcattcgggacgtgcacctcgagctgaaggacctgactctgtgtggacgcaaaggcaatctgcactttatacgctttcccactcatgacatgcctgcttttattcaaatgggcagagataaaaacttctcgagtctccacactgtcttttgtgccactggaggtggagcgtacaaatttgagcaggattttctcacaataggtgatcttcagctttgcaaactggatgaactagattgcttgatcaaaggaattttatacattgactcagtcggattcaatggacggtcacagtgctattactttgaaaaccctgctgattctgaaaagtgtcagaagttaccatttgatttgaaaaatccgtatcctctgcttctggtgaacattggctcaggggttagcatcttagcagtatattccaaagataattacaaacgggtcacaggtactagtcttggaggaggaactttttttggtctctgctgtcttcttactggctgtaccacttttgaagaagctcttgaaatggcatctcgtggagatagcaccaaagtggataaactagtacgagatatttatggaggggactatgagaggtttggactgccaggctgggctgtggcttcaagctttggaaacatgatgagcaaggagaagcgagaggctgtcagtaaagaggacctggccagagcgactttgatcaccatcaccaacaacattggctcaatagcaagaatgtgtgcccttaatgaaaacattaaccaggtggtatttgttggaaatttcttgagaattaatacgatcgccatgcggcttttggcatatgctttggattattggtccaaggggcagttgaaagcacttttttcggaacacgagggttattttggagctgttggagcactccttgagctgttgaagatcccgtgatcattacctggggaggggttcctgaaaccttccacaatgggatctgtggactttcatttttttaagagacttactcaatttcatgactgtactacctgaaacaaagtgagaaaggacaggtgtatttttctaagtcatcaagataaatccttaagaattcagtctaaattagcaaccaggaaggaaaaatatattaaaaacaacaaaaaagtggcacatgtccaggcagtgtgaggatttgctgtatataagttgcctgctttgtatttttgaaatctctgcatcactcattggaagtgcttctgaagagagctgctctgtgttcagttgactggttttgtgtcctgtttgaacttgctgaatgtaaggcaggctactatgcgttataatctaatcacaatttgtcaatatggtcttggcaatcatctgtgcattactctggtttgcattaagcctgtgtgtgaacttactgtaaaacatgttttatttcaaggttctgcaaaattaattgggcaggttaattgtgtacctgaaacttaacaagcagtttttggaagggca

SEQ ID NO: 246417 - DNA, 1713 bp, Artificial Sequence
  derived and/or modified sequence
atgagacggctaggtccattccatccccgagtgcactgggcagcacctccttcactgagctccgggctgcatagactcctgttcctgcgagggactcggatccctagttccactaccctttctcctccgcgacacgatagcctctccctggacggaggaaccgttaacccccctcgcgtacgggagcccactgggagagaagcgtttgggccaagccccgctagttccgactggcttccagcacgctggaggaatggtcgtggcggtcgcccacgagccagattatgctccgggtggacagccgctgaggaggccagacgtaatccgacactcgggggattacttgggaggcagagactgctgctgcggatgggtggcggtaggcttggcgcacctatggaacgacatggcagagcatcagctacttctgtttcatctgctggtgaacaggctgctggggaccccgaggggcgacgtcaagagcccctgcgtcgaagggcctctagcgcttctgttccagcggttggagcttcagctgaggggacccgcagagaccgtctgggaagttatagtggacctaccagcgtgagtcgccagcgggtcgagagcctccggaaaaagcgacccctctttccctggtttggactcgatatcggtggtactcttgttaaattggtatattttgaaccaaaagatatcactgcggaagaagaagaggaggaggtggaatctcttaaatccattcggaagtacctcactagcaatgtagcttatggatccaccgggatccgtgatgtgcacctcgaacttaaagatcttactctttgcggaaggaagggaaacctacacttcattaggttccccacccatgacatgcccgcattcattcaaatggggagagacaaaaatttcagctctttgcacaccgttttctgcgcaaccggcggaggcgcttacaaatttgagcaagactttctgaccataggcgacctgcagttgtgcaagctagacgagctcgattgtttaatcaaaggcatactgtacatcgactctgtggggtttaatggtcgaagccagtgctactatttcgagaatcctgcagactctgaaaagtgccagaagttaccgtttgacctcaagaacccataccctttactcctagtgaacatcgggtcaggggtgtccattctggccgtttactctaaggacaattataaacgggttaccggcacctccttaggaggcggaaccttttttggcctgtgctgcctgctgaccggatgcacaaccttcgaagaggcactggagatggcaagcaggggagactctacaaaagtcgataagctcgtcagagatatctacggcggtgattatgagaggtttggccttccaggatgggcagtggcttctagtttcggcaatatgatgagcaaagaaaagagagaggccgtgtccaaggaggacctggccagagccaccttaataacaattacaaacaacattgggtccatcgccagaatgtgtgccttaaatgagaacatcaaccaggttgtgtttgtcggaaattttcttaggattaacaccatcgccatgagactcctggcatacgctttggattactggtccaaggggcagctgaaggctctgttctctgaacacgaagggtattttggcgctgtaggagctctgctcgagctgctcaaaatcccttag

SEQ ID NO: 246418 - DNA, 1713 bp, Artificial Sequence
  derived and/or modified sequence
atgagaagactgggccccttccaccccagagtgcactgggccgccccccccagcctgagcagcggcctgcacagactgctgttcctgagaggcaccagaatccccagcagcaccaccctgagcccccccagacacgacagcctgagcctggacggcggcaccgtgaacccccccagagtgagagagcccaccggcagagaggccttcggccccagccccgccagcagcgactggctgcccgccagatggagaaacggcagaggcggcagacccagagccagactgtgcagcggctggaccgccgccgaggaggccagaagaaaccccaccctgggcggcctgctgggcagacagagactgctgctgagaatgggcggcggcagactgggcgcccccatggagagacacggcagagccagcgccaccagcgtgagcagcgccggcgagcaggccgccggcgaccccgagggcagaagacaggagcccctgagaagaagagccagcagcgccagcgtgcccgccgtgggcgccagcgccgagggcaccagaagagacagactgggcagctacagcggccccaccagcgtgagcagacagagagtggagagcctgagaaagaagagacccctgttcccctggttcggcctggacatcggcggcaccctggtgaagctggtgtacttcgagcccaaggacatcaccgccgaggaggaggaggaggaggtggagagcctgaagagcatcagaaagtacctgaccagcaacgtggcctacggcagcaccggcatcagagacgtgcacctggagctgaaggacctgaccctgtgcggcagaaagggcaacctgcacttcatcagattccccacccacgacatgcccgccttcatccagatgggcagagacaagaacttcagcagcctgcacaccgtgttctgcgccaccggcggcggcgcctacaagttcgagcaggacttcctgaccatcggcgacctgcagctgtgcaagctggacgagctggactgcctgatcaagggcatcctgtacatcgacagcgtgggcttcaacggcagaagccagtgctactacttcgagaaccccgccgacagcgagaagtgccagaagctgcccttcgacctgaagaacccctaccccctgctgctggtgaacatcggcagcggcgtgagcatcctggccgtgtacagcaaggacaactacaagagagtgaccggcaccagcctgggcggcggcaccttcttcggcctgtgctgcctgctgaccggctgcaccaccttcgaggaggccctggagatggccagcagaggcgacagcaccaaggtggacaagctggtgagagacatctacggcggcgactacgagagattcggcctgcccggctgggccgtggccagcagcttcggcaacatgatgagcaaggagaagagagaggccgtgagcaaggaggacctggccagagccaccctgatcaccatcaccaacaacatcggcagcatcgccagaatgtgcgccctgaacgagaacatcaaccaggtggtgttcgtgggcaacttcctgagaatcaacaccatcgccatgagactgctggcctacgccctggactactggagcaagggccagctgaaggccctgttcagcgagcacgagggctacttcggcgccgtgggcgccctgctggagctgctgaagatcccctag

SEQ ID NO: 246419 - DNA, 840 bp, Artificial Sequence
  derived and/or modified sequence
atgccagcattcatacagatgggcagggataagaatttcagttccttacatacagtcttctgtgccacaggcgggggcgcatacaagttcgaacaagacttcttaacaatcggagacctccaattatgcaaattagacgaactcgattgcttgattaagggcattttgtacattgattctgtcggattcaatggccggtcccagtgctattattttgagaatcctgcagacagcgagaagtgtcaaaaactgccattcgatctgaagaatccctacccacttctgctcgtcaatataggctccggagtttccatcttggcagtgtattcaaaggacaactacaaaagggttacaggcacttcactgggtggcgggacttttttcggcctatgctgcctgctgacgggctgcactactttcgaggaggctctcgagatggcgagtcgcggggattcgaccaaagtagacaagcttgttcgagatatttacggtggggactacgaacgctttggcctgcctggctgggccgtcgccagcagctttggtaacatgatgtcaaaagagaagcgcgaggcagtatctaaagaggacctggcccgcgcaactctgataacaatcacaaacaatatcgggtcgattgctcgcatgtgcgcgctgaacgagaacataaaccaggtggtgttcgtaggcaatttcctgcgtatcaatactattgcaatgcggctgcttgcttatgctttggattactggtccaaagggcaactcaaggccctattttccgaacacgagggatattttggcgccgtcggagcgctgttggagttgttgaagataccctag

SEQ ID NO: 246420 - DNA, 840 bp, Artificial Sequence
  derived and/or modified sequence
atgcctgccttcatccagatgggccgggacaagaacttcagcagcctgcacacagtgttctgtgccactggaggaggagcctacaagtttgagcaggacttcctgaccatcggggacctgcagctgtgcaagctggatgagctggactgcctgatcaagggcatcctgtacatcgacagcgtgggcttcaacggccgcagccagtgctactactttgaaaatcctgctgacagcgagaagtgccagaagctgccctttgacctgaagaacccctaccccctgctgctggtgaacatcggcagcggcgtgtccatcctggccgtgtacagcaaggacaactacaagagggtgacaggcaccagcctgggcggcggcaccttcttcggcctgtgctgcctgctgaccggctgcaccacctttgaggaggccctggagatggccagcagaggagacagcaccaaggtggacaagctggtgcgggacatctatggaggagactatgagcgcttcggcctgcccggctgggccgtggccagcagctttggaaacatgatgagcaaggagaagcgggaggccgtgtccaaggaggacctggcccgggccaccctcatcaccatcaccaacaacatcggcagcatcgccaggatgtgtgccctgaatgaaaacatcaaccaggtggtgtttgtgggcaacttcctgcgcatcaacaccatcgccatgaggctgctggcctatgccctggactactggagcaagggccagctgaaggccctcttcagcgagcacgagggctactttggagctgtgggcgccctgctggagctgctgaagatcccctag

SEQ ID NO: 246421 - DNA, 840 bp, Artificial Sequence
  derived and/or modified sequence
atgcccgccttcatccagatgggccgggacaagaacttcagcagcctccatacagtcttctgtgcaacggggggaggggcctataagtttgagcaggattttctgaccattggagatttgcagctgtgcaaactggacgagctggactgtctgatcaagggtatcctgtacatcgattcggtgggcttcaatggacggagccagtgttactatttcgaaaatccggccgatagcgagaaatgtcaaaagctacccttcgatctgaaaaacccataccctctgctcctggttaacatcggctctggagtgtccatcttggctgtttacagcaaggataattacaagagagtaactggcactagccttggagggggtacgttttttggactgtgttgtctgctgaccggctgtaccacttttgaggaggctctcgagatggccagccgaggggactctactaaggtcgacaagctagtgcgtgatatttatggcggtgactacgagcgctttgggcttccgggatgggccgtcgcaagctcatttggaaatatgatgtccaaggagaagagagaagcggtgagtaaggaggacttagcacgagctaccctgataacaataaccaataatattggtagcattgcacggatgtgcgctctaaacgagaacattaaccaggtggttttcgtgggcaattttctgcgcataaacactatcgccatgcgactgctcgcatacgctcttgactactggagtaaaggccaactcaaggcgctattttcagagcacgaggggtatttcggcgcggtcggagccctgctggagttgctcaaaatcccatag

SEQ ID NO: 246422 - DNA, 840 bp, Artificial Sequence
  derived and/or modified sequence
atgcccgcattcatacagatgggcagagataagaacttctcatctctgcatacagtgttctgtgctactggcggtggggcatataaatttgaacaggatttcctgactataggtgacctccagctgtgcaaactggatgaattggactgtctgatcaagggaattctgtatattgactctgtggggtttaatggtaggtcgcagtgctattattttgagaatccggctgattcggagaaatgccagaaactccccttcgatttgaagaatccctacccactgctgttggttaacatcgggtcaggtgtgagcatcctggccgtgtattccaaagacaactataagcgtgtcaccggcacctccctggggggtggcacatttttcggtctgtgttgcctgctcaccggctgcactactttcgaagaggcccttgaaatggcatctcgtggggacagtaccaaagtggataagttagtacgtgatatctacgggggagactatgaacgctttgggcttcctggctgggccgtggcatcctcgtttggcaacatgatgtccaaggagaagagagaggctgtgtctaaagaagatctcgccagagcaactctgattaccatcaccaataatataggatccatagcacggatgtgcgccttgaatgaaaacatcaatcaggtggtgtttgtgggcaacttcttgaggatcaatacaatcgccatgaggctgctggcgtatgcactcgattactggagcaaggggcagctcaaggcgttattcagtgaacacgagggctatttcggggcagtgggagcacttctggagctgttaaagattccctag

SEQ ID NO: 246423 - DNA, 840 bp, Artificial Sequence
  derived and/or modified sequence
atgcccgccttcatccagatgggcagagacaagaacttcagcagcctgcacaccgtgttctgcgccaccggcggcggcgcctacaagttcgagcaggacttcctgaccatcggcgacctgcagctgtgcaagctggacgagctggactgcctgatcaagggcatcctgtacatcgacagcgtgggcttcaacggcagaagccagtgctactacttcgagaaccccgccgacagcgagaagtgccagaagctgcccttcgacctgaagaacccctaccccctgctgctggtgaacatcggcagcggcgtgagcatcctggccgtgtacagcaaggacaactacaagagagtgaccggcaccagcctgggcggcggcaccttcttcggcctgtgctgcctgctgaccggctgcaccaccttcgaggaggccctggagatggccagcagaggcgacagcaccaaggtggacaagctggtgagagacatctacggcggcgactacgagagattcggcctgcccggctgggccgtggccagcagcttcggcaacatgatgagcaaggagaagagagaggccgtgagcaaggaggacctggccagagccaccctgatcaccatcaccaacaacatcggcagcatcgccagaatgtgcgccctgaacgagaacatcaaccaggtggtgttcgtgggcaacttcctgagaatcaacaccatcgccatgagactgctggcctacgccctggactactggagcaagggccagctgaaggccctgttcagcgagcacgagggctacttcggcgccgtgggcgccctgctggagctgctgaagatcccctag

SEQ ID NO: 246424 - protein, 605 aa, Artificial Sequence
  derived and/or modified sequence
MLPQQVGFVCAVLALVCCASGLFGSLGHKTASASKRVLPDTWRNRKLMAPVNGTQTAKNCTDPAIHEFPTDLFSNKERQHGAVLLHILGALYMFYALAIVCDDFFVPSLEKICERLHLSEDVAGATFMAAGSSTPELFASVIGVFITHGDVGVGTIVGSAVFNILCIIGVCGLFAGQVVRLTWWAVCRDSVYYTISVIVLIVFIYDEQIVWWEGLVLIILYVFYILIMKYNVKMQAFFTVKQKSIANGNPVNSELEAGNDFYDGSYDDPSVPLLGQVKEKPQYGKNPVVMVDEIMSSSPPKFTFPEAGLRIMITNKFGPRTRLRMASRIIINERQRLINSANGVSSKPLQNGRHENIENGNVPVENPEDPQQNQEQQPPPQPPPPEPEPVEADFLSPFSVPEARGDKVKWVFTWPLIFLLCVTIPNCSKPRWEKFFMVTFITATLWIAVFSYIMVWLVTIIGYTLGIPDVIMGITFLAAGTSVPDCMASLIVARQGLGDMAVSNTIGSNVFDILVGLGVPWGLQTMVVNYGSTVKINSRGLVYSVVLLLGSVALTVLGIHLNKWRLDRKLGVYVLVLYAIFLCFSIMIEFNVFTFVNLPMCREDD

SEQ ID NO: 246425 - protein, 622 aa, Artificial Sequence
  derived and/or modified sequence
MALRGTLRPLKVRRRREMLPQQVGFVCAVLALVCCASGLFGSLGHKTASASKRVLPDTWRNRKLMAPVNGTQTAKNCTDPAIHEFPTDLFSNKERQHGAVLLHILGALYMFYALAIVCDDFFVPSLEKICERLHLSEDVAGATFMAAGSSTPELFASVIGVFITHGDVGVGTIVGSAVFNILCIIGVCGLFAGQVVRLTWWAVCRDSVYYTISVIVLIVFIYDEQIVWWEGLVLIILYVFYILIMKYNVKMQAFFTVKQKSIANGNPVNSELEAGNDFYDGSYDDPSVPLLGQVKEKPQYGKNPVVMVDEIMSSSPPKFTFPEAGLRIMITNKFGPRTRLRMASRIIINERQRLINSANGVSSKPLQNGRHENIENGNVPVENPEDPQQNQEQQPPPQPPPPEPEPVEADFLSPFSVPEARGDKVKWVFTWPLIFLLCVTIPNCSKPRWEKFFMVTFITATLWIAVFSYIMVWLVTIIGYTLGIPDVIMGITFLAAGTSVPDCMASLIVARQGLGDMAVSNTIGSNVFDILVGLGVPWGLQTMVVNYGSTVKINSRGLVYSVVLLLGSVALTVLGIHLNKWRLDRKLGVYVLVLYAIFLCFSIMIEFNVFTFVNLPMCREDD

SEQ ID NO: 246426 - DNA, 1818 bp, Artificial Sequence
  derived and/or modified sequence
atgctgccccagcaggtgggcttcgtgtgcgccgtgctggccctggtgtgctgcgccagcggcctgttcggcagcctgggccacaagaccgccagcgccagcaagagagtgctgcccgacacctggagaaacagaaagctgatggcccccgtgaacggcacccagaccgccaagaactgcaccgaccccgccatccacgagttccccaccgacctgttcagcaacaaggagagacagcacggcgccgtgctgctgcacatcctgggcgccctgtacatgttctacgccctggccatcgtgtgcgacgacttcttcgtgcccagcctggagaagatctgcgagagactgcacctgagcgaggacgtggccggcgccaccttcatggccgccggcagcagcacccccgagctgttcgccagcgtgatcggcgtgttcatcacccacggcgacgtgggcgtgggcaccatcgtgggcagcgccgtgttcaacatcctgtgcatcatcggcgtgtgcggcctgttcgccggccaggtggtgagactgacctggtgggccgtgtgcagagacagcgtgtactacaccatcagcgtgatcgtgctgatcgtgttcatctacgacgagcagatcgtgtggtgggagggcctggtgctgatcatcctgtacgtgttctacatcctgatcatgaagtacaacgtgaagatgcaggccttcttcaccgtgaagcagaagagcatcgccaacggcaaccccgtgaacagcgagctggaggccggcaacgacttctacgacggcagctacgacgaccccagcgtgcccctgctgggccaggtgaaggagaagccccagtacggcaagaaccccgtggtgatggtggacgagatcatgagcagcagcccccccaagttcaccttccccgaggccggcctgagaatcatgatcaccaacaagttcggccccagaaccagactgagaatggccagcagaatcatcatcaacgagagacagagactgatcaacagcgccaacggcgtgagcagcaagcccctgcagaacggcagacacgagaacatcgagaacggcaacgtgcccgtggagaaccccgaggacccccagcagaaccaggagcagcagccccccccccagccccccccccccgagcccgagcccgtggaggccgacttcctgagccccttcagcgtgcccgaggccagaggcgacaaggtgaagtgggtgttcacctggcccctgatcttcctgctgtgcgtgaccatccccaactgcagcaagcccagatgggagaagttcttcatggtgaccttcatcaccgccaccctgtggatcgccgtgttcagctacatcatggtgtggctggtgaccatcatcggctacaccctgggcatccccgacgtgatcatgggcatcaccttcctggccgccggcaccagcgtgcccgactgcatggccagcctgatcgtggccagacagggcctgggcgacatggccgtgagcaacaccatcggcagcaacgtgttcgacatcctggtgggcctgggcgtgccctggggcctgcagaccatggtggtgaactacggcagcaccgtgaagatcaacagcagaggcctggtgtacagcgtggtgctgctgctgggcagcgtggccctgaccgtgctgggcatccacctgaacaagtggagactggacagaaagctgggcgtgtacgtgctggtgctgtacgccatcttcctgtgcttcagcatcatgatcgagttcaacgtgttcaccttcgtgaacctgcccatgtgcagagaggacgactag

SEQ ID NO: 246427 - DNA, 1869 bp, Artificial Sequence
  derived and/or modified sequence
atggccctgagaggcaccctgagacccctgaaggtgagaagaagaagagagatgctgccccagcaggtgggcttcgtgtgcgccgtgctggccctggtgtgctgcgccagcggcctgttcggcagcctgggccacaagaccgccagcgccagcaagagagtgctgcccgacacctggagaaacagaaagctgatggcccccgtgaacggcacccagaccgccaagaactgcaccgaccccgccatccacgagttccccaccgacctgttcagcaacaaggagagacagcacggcgccgtgctgctgcacatcctgggcgccctgtacatgttctacgccctggccatcgtgtgcgacgacttcttcgtgcccagcctggagaagatctgcgagagactgcacctgagcgaggacgtggccggcgccaccttcatggccgccggcagcagcacccccgagctgttcgccagcgtgatcggcgtgttcatcacccacggcgacgtgggcgtgggcaccatcgtgggcagcgccgtgttcaacatcctgtgcatcatcggcgtgtgcggcctgttcgccggccaggtggtgagactgacctggtgggccgtgtgcagagacagcgtgtactacaccatcagcgtgatcgtgctgatcgtgttcatctacgacgagcagatcgtgtggtgggagggcctggtgctgatcatcctgtacgtgttctacatcctgatcatgaagtacaacgtgaagatgcaggccttcttcaccgtgaagcagaagagcatcgccaacggcaaccccgtgaacagcgagctggaggccggcaacgacttctacgacggcagctacgacgaccccagcgtgcccctgctgggccaggtgaaggagaagccccagtacggcaagaaccccgtggtgatggtggacgagatcatgagcagcagcccccccaagttcaccttccccgaggccggcctgagaatcatgatcaccaacaagttcggccccagaaccagactgagaatggccagcagaatcatcatcaacgagagacagagactgatcaacagcgccaacggcgtgagcagcaagcccctgcagaacggcagacacgagaacatcgagaacggcaacgtgcccgtggagaaccccgaggacccccagcagaaccaggagcagcagccccccccccagccccccccccccgagcccgagcccgtggaggccgacttcctgagccccttcagcgtgcccgaggccagaggcgacaaggtgaagtgggtgttcacctggcccctgatcttcctgctgtgcgtgaccatccccaactgcagcaagcccagatgggagaagttcttcatggtgaccttcatcaccgccaccctgtggatcgccgtgttcagctacatcatggtgtggctggtgaccatcatcggctacaccctgggcatccccgacgtgatcatgggcatcaccttcctggccgccggcaccagcgtgcccgactgcatggccagcctgatcgtggccagacagggcctgggcgacatggccgtgagcaacaccatcggcagcaacgtgttcgacatcctggtgggcctgggcgtgccctggggcctgcagaccatggtggtgaactacggcagcaccgtgaagatcaacagcagaggcctggtgtacagcgtggtgctgctgctgggcagcgtggccctgaccgtgctgggcatccacctgaacaagtggagactggacagaaagctgggcgtgtacgtgctggtgctgtacgccatcttcctgtgcttcagcatcatgatcgagttcaacgtgttcaccttcgtgaacctgcccatgtgcagagaggacgactag

SEQ ID NO: 246428 - DNA, 1818 bp, Artificial Sequence
  derived and/or modified sequence
atgctgccccagcaagtagggtttgtgtgtgcagtgcttgcactggtctgttgcgcgtctggtttgttcggctccctgggacacaaaacggcgtctgcgtctaaaagggtgctgccagatacctggagaaaccgtaagctcatggcccctgtcaacgggacgcagaccgcaaagaattgtactgacccagccattcacgagttcccgactgatctttttagcaacaaagagcgccagcatggtgccgtgctacttcacatcctgggggccctgtacatgttctacgctcttgccatcgtctgcgacgacttcttcgtcccctcgctggagaaaatctgcgaaagactgcatctgtccgaggacgtggcaggtgctacctttatggccgccggctcctccactccggagctgttcgcctctgtgattggcgtgttcatcacacacggagacgtaggggtgggcaccattgtggggagcgccgtgtttaacatactgtgtattattggcgtatgtgggctgttcgccggccaagttgtccggctgacttggtgggctgtatgccgggattcagtgtattacaccatctctgtgattgtgctgattgtattcatttatgacgagcagatcgtgtggtgggaagggttggttctgatcattctgtacgttttttatattctgataatgaaatataatgtcaaaatgcaggccttcttcacagttaaacaaaagagcatcgcaaacggaaatcctgtgaactctgaactagaagccgggaacgacttttatgatgggagttatgatgatccttctgtgcccttattgggacaagtgaaagagaagcctcagtacgggaagaacccagtcgtgatggtggacgaaattatgtcttccagtcctcctaagttcactttcccggaagccggtctgaggataatgattaccaacaagtttggccctcgcacacgactgcggatggcgagccgtattatcatcaatgaacgccagcggcttattaacagcgctaacggcgtctcctctaagcctctgcagaatggacgtcacgagaacatcgagaatggtaatgttccggtggaaaaccccgaggatccacaacaaaatcaggaacagcaaccgcccccacagccccctcctcccgaacctgagcccgtggaggcggatttcttgagtcctttctccgttcccgaggcccgcggcgacaaagtcaagtgggttttcacctggcctctgattttcctcttgtgtgtgacaatccccaattgtagtaagccccgctgggagaaatttttcatggtgacctttatcacagccactttgtggattgccgtcttctcctatatcatggtgtggttggtgactataatcggatacacactgggaatccccgacgttatcatgggaattacatttttggctgccgggacttctgtccctgactgcatggcatcgctcattgtggctagacagggactaggtgacatggccgtgagcaacaccataggaagcaacgtctttgacatactggtggggcttggcgtcccttgggggctgcaaacaatggtggtgaattatgggtctacagttaagatcaactctagaggcttggtttattccgtagtcctgctcttgggatccgtggcgttaactgttttaggtatccacttgaataagtggcgactagaccgcaagcttggagtgtatgtccttgtgctttacgccatcttcctttgcttctcaattatgattgagtttaacgtgttcacgttcgtcaacctacctatgtgccgggaagacgattag

SEQ ID NO: 246429 - DNA, 1869 bp, Artificial Sequence
  derived and/or modified sequence
atggctcttcggggtacattacggcccctcaaggtccggagaagaagagagatgctgccacagcaggttggctttgtttgcgcagtgctcgcgctggtgtgctgcgcttctggtctgtttggcagtctgggtcataagaccgcttctgcgtctaagagggttctgcccgatacctggcgtaaccgcaaactaatggcaccggttaacggtacccagaccgctaaaaattgcacggatccagcaattcatgaatttcctaccgacctattctctaataaggagaggcagcatggggccgtcctgctgcacatattaggcgcgctgtacatgttttacgcacttgccattgtatgcgatgatttctttgtgccaagcctcgaaaaaatttgcgaacgcctccatctatcagaggacgtcgcgggtgcaacttttatggccgccgggtcctcgacacccgagctcttcgcaagcgtgatcggcgtcttcataacccatggggacgtcggagtcggaactattgtgggaagtgcagtattcaacatcctatgtatcataggggtgtgtggactgttcgcaggccaggtggtgagactgacctggtgggctgtgtgtagggactctgtgtattataccatctcagtaatcgtcctgatcgtgtttatatacgacgagcagattgtttggtgggaggggttggttttaataatcttatacgttttctacatattgatcatgaaatacaacgtcaagatgcaggctttttttaccgttaagcagaaaagcatcgcgaatgggaatccagtgaactctgagctggaagctggtaatgacttctacgacggcagctatgacgaccctagcgtgcctttactgggacaagttaaggaaaaaccccagtacgggaaaaatcctgtggtcatggtcgatgaaatcatgagttctagccctccaaagttcacattccctgaggctggattacgtatcatgatcaccaacaaattcggcccccgaacccgattgagaatggctagtaggatcatcattaatgagagacaacggctgatcaattctgccaacggggtgtcttctaaacctctgcagaatggcaggcatgagaacatcgaaaacggcaatgtccccgtagagaatccagaggatcctcagcagaatcaggaacaacaacctccgccgcagccaccaccccccgaacccgagccggttgaagcggactttctgagtcctttcagcgtacccgaggcccggggagataaggtcaaatgggtgttcacgtggcccctaatcttcctcctctgtgtcactatcccaaactgctccaagccacgatgggagaaattctttatggtgacatttatcacagcaaccctctggatcgccgtattttcttatataatggtgtggctggtgacaatcatcggctatacactgggaatacccgatgtcattatgggaattacgtttctcgctgcaggcaccagtgtccccgactgcatggcctcattgatagtagcgcgacaagggctgggagacatggcggtgagtaacacaattggcagtaacgtgttcgacatcctagtgggcttgggagtcccgtgggggttgcagacaatggtcgtgaattacggctccacggtgaagataaacagccgaggtcttgtgtacagtgttgtgctgctgttagggagtgtggctctgacagtcctgggcatccaccttaacaagtggaggttggataggaagcttggagtgtacgtcctcgtgctatatgccattttcttgtgtttttcaataatgatcgaatttaacgtgttcacttttgtgaatctccccatgtgcagagaggacgattag

SEQ ID NO: 246430 - DNA, 1818 bp, Artificial Sequence
  derived and/or modified sequence
atgctgccccagcaggtgggctttgtgtgtgctgtgctggccctggtgtgctgtgccagcggcctgtttggcagcctgggccacaagacagccagcgccagcaagagggtgctgcctgacacctggaggaacaggaagctgatggcccctgtgaatggcacccagacagccaagaactgcacagatcctgccatccacgagttccccacagacctcttcagcaacaaggagcggcagcacggggctgtgctgctgcacatcctgggcgccctgtacatgttttatgccctggccatcgtgtgtgatgacttctttgtgcccagcctggagaagatctgtgagcggctgcacctgtctgaagatgtggccggggccaccttcatggccgccggcagcagcaccccagagctgtttgccagcgtcatcggggtcttcatcacccatggagatgtgggcgtgggcaccatcgtgggcagcgctgtgttcaacatcctgtgcatcatcggcgtgtgtggcctgtttgctggccaggtggtgcggctgacctggtgggccgtgtgccgggacagcgtgtactacaccatcagcgtcatcgtgctgattgtgttcatctatgatgagcagatcgtgtggtgggagggcctggtgctgatcatcctgtatgtgttctacatcctgatcatgaagtacaacgtgaagatgcaggccttcttcaccgtgaagcagaagagcatcgccaatggaaatcctgtgaacagcgagctggaggccggaaatgacttctatgatggcagctatgatgaccccagcgtgcccctgctgggccaggtgaaggagaagccccagtatggcaagaaccctgtggtgatggtggatgagatcatgagcagcagcccccccaagttcaccttccctgaggccggcctgcgcatcatgatcaccaacaagtttggccccaggacccggctgaggatggccagccgcatcatcatcaatgaaaggcagaggctcatcaacagcgccaacggggtgagcagcaagcccctgcagaatggaagacatgaaaatattgaaaatggaaatgtgcctgtggagaaccctgaggacccccagcagaaccaggagcagcagcccccaccccagcccccacctcctgagcctgagcctgtggaggccgacttcctgagccccttctctgtgcctgaggcccggggggacaaggtgaagtgggtgttcacctggcccctcatcttcctgctgtgtgtgaccatccccaactgcagcaagccccgctgggagaagttcttcatggtgaccttcatcacagccaccctgtggattgctgtgttctcctacatcatggtgtggctggtgaccatcatcggctacaccctgggcatcccagatgtgatcatgggcatcaccttcctggccgccggcacctctgtgcctgactgcatggccagcctgattgtggcccggcagggcctgggggacatggctgtgagcaacaccatcggcagcaatgtgtttgacatcctggtgggcctgggcgtgccctggggcctgcagaccatggtggtgaactacggcagcacagtgaagatcaacagccggggcctggtgtacagcgtggtgctgctgctgggctctgtggccctgactgtgctgggcatccacctgaacaagtggaggctggacaggaagctgggcgtgtatgtgctggtgctgtatgccatcttcctgtgcttcagcatcatgattgagttcaacgtgttcacctttgtgaacctgcccatgtgcagagaagatgactag

SEQ ID NO: 246431 - DNA, 1869 bp, Artificial Sequence
  derived and/or modified sequence
atggccctgcggggcaccctgcggcccctgaaggtgagaagaagaagagagatgctgccccagcaggtgggctttgtgtgtgctgtgctggccctggtgtgctgtgccagcggcctgtttggcagcctgggccacaagacagccagcgccagcaagagggtgctgcctgacacctggaggaacaggaagctgatggcccctgtgaatggcacccagacagccaagaactgcacagatcctgccatccacgagttccccacagacctcttcagcaacaaggagcggcagcacggggctgtgctgctgcacatcctgggcgccctgtacatgttctacgccctggccatcgtgtgtgatgacttctttgtgcccagcctggagaagatctgtgagcggctgcacctgtctgaagatgtggccggggccaccttcatggctgctggcagcagcaccccagagctgtttgcctctgtgattggagtcttcatcacccatggagatgtgggcgtgggcaccatcgtgggcagcgctgtgttcaacatcctgtgcatcattggagtgtgtggcctgtttgctggccaggtggtgcggctgacctggtgggccgtgtgccgggacagcgtgtactacaccatctctgtgattgtgctgattgtgttcatctatgatgagcagatcgtgtggtgggagggcctggtgctgatcatcctgtatgtgttctacatcctgatcatgaagtacaacgtgaagatgcaggccttcttcaccgtgaagcagaagagcatcgccaacggcaaccctgtgaacagcgagctggaggccggaaatgacttctatgatggcagctatgatgaccccagcgtgcccctgctgggccaggtgaaggagaagccccagtatggcaagaaccctgtggtgatggtggatgagatcatgagcagcagcccccccaagttcaccttccctgaggccggcctgcgcatcatgatcaccaacaagtttggccccaggacccggctgaggatggccagccgcatcatcatcaatgaaaggcagaggctcatcaacagcgccaatggagtgagcagcaagcccctgcagaatggaagacatgagaacattgaaaatggaaatgtgcctgtggagaaccctgaggacccccagcagaaccaggagcagcagcccccaccccagcccccacctcctgagcctgagcctgtggaggccgacttcctgagccccttctctgtgcctgaggcccggggggacaaggtgaagtgggtgttcacctggcccctcatcttcctgctgtgtgtgaccatccccaactgcagcaagccccgctgggagaagttcttcatggtgaccttcatcacagccaccctgtggattgctgtgttctcctacatcatggtgtggctggtgaccatcatcggctacaccctgggcatcccagatgtgatcatgggcatcaccttcctggccgccggcacctctgtgcctgactgcatggccagcctcatcgtggcccggcagggcctgggggacatggctgtgagcaacaccatcggcagcaatgtgtttgacatcctggtgggcctgggcgtgccctggggcctgcagaccatggtggtgaactacggcagcacagtgaagatcaacagccggggcctggtgtacagcgtggtgctgctgctgggctctgtggccctgactgtgctgggcatccacctgaacaagtggaggctggacaggaagctgggcgtgtatgtgctggtgctgtatgccatcttcctgtgcttcagcatcatgattgagttcaacgtgttcacctttgtgaacctgcccatgtgccgggaggatgactag

SEQ ID NO: 246432 - DNA, 1818 bp, Artificial Sequence
  derived and/or modified sequence
atgctgccccagcaggtgggcttcgtgtgcgccgtgctggccctggtttgttgcgcatctggcctattcggtagcctgggccataagaccgcctccgctagcaaacgcgttttgcccgatacatggcgaaatcggaagctgatggcccctgtgaacggtacccagacagcaaaaaattgtacggatcccgctatacatgaattccctaccgatctgttctccaataaggaacgacaacacggcgccgtgttactgcacatccttggggctctgtacatgttctatgccttagctattgtgtgcgatgatttctttgtgccatcattggaaaagatttgtgaacgattgcacttatcggaagatgtggccggagcaacgttcatggcagctgggtccagtacacccgagctgtttgcaagcgtcatcggtgtgtttattacacacggggacgtcggcgtgggaacgatcgttgggtcagctgtatttaacatcctgtgcatcataggagtgtgcggattgttcgctggccaggtggtgcgcctgacgtggtgggctgtctgccgggattccgtgtactacaccatcagcgtaattgtacttattgtgtttatctacgacgagcaaattgtgtggtgggagggacttgtgctcatcatcttgtacgtcttctatattcttatcatgaagtacaacgtcaagatgcaagccttcttcacagttaagcagaagagcatagcaaatggtaatccggttaatagcgaactcgaagcgggaaacgacttctacgacgggtcttacgatgaccccagtgtccctctgttgggacaagttaaggagaaaccacagtacggaaagaatcctgtcgtgatggtcgacgaaataatgagttcctctccacccaagtttacctttcctgaagctggcctgaggattatgatcaccaataagttcggaccccgaacccgactgaggatggcaagcaggatcatcataaacgaaaggcagagactgatcaactcagctaatggggtgtcatccaagcccctccagaatgggagacatgaaaacatcgagaacggcaacgtccctgtggaaaaccccgaggatccccagcagaatcaggagcaacagccaccaccccagccacctccacccgaacccgaaccggttgaggcagactttttgtcacccttcagcgtccctgaagcccgcggagacaaggtgaagtgggtattcacttggccactgatcttcctgttatgtgttacaattcccaattgtagcaagcctaggtgggaaaaattcttcatggttacatttatcacagctaccctttggatcgccgttttttcctacatcatggtgtggctggtcaccattatcggatacactcttggcatacccgacgtgataatggggataacctttctggctgccggcacgagcgtgcctgattgtatggcctccctgatagtcgccaggcaggggctgggagacatggctgtgtctaataccataggatcaaatgtttttgacattcttgtgggtctcggcgttccttggggacttcagactatggttgttaactacgggtccaccgttaagatcaactctcgaggactcgtgtattccgtggtgttgctcctgggcagtgtggcgctgaccgtcctgggtatacatcttaacaagtggagattggaccggaagctgggggtgtacgtactcgttctgtacgccatctttctctgtttttccattatgattgaattcaacgtctttacctttgtaaacctgccaatgtgcagggaggacgactag

SEQ ID NO: 246433 - DNA, 1869 bp, Artificial Sequence
  derived and/or modified sequence
atggccctgcggggcaccctgcggcccctgaaggtgcggcggcggcgcgagatgctcccacagcaggtcggcttcgtttgtgcagtgctcgccctagtgtgctgcgctagcggcttatttggaagcctgggtcacaagaccgcaagcgcttccaagagggtattgcccgacacgtggcgtaacagaaagctgatggcacctgtgaacggtactcagaccgccaaaaactgtactgatccggccattcacgagtttccaacagatctattctccaataaggagcggcaacatggggctgtgttactccatatccttggggcgttgtatatgttctacgctcttgctatcgtctgtgatgatttttttgttcccagtctggagaaaatctgcgagcggctgcatttgagcgaagatgtagcgggcgctacattcatggccgcaggtagcagtacccccgagctctttgcatccgtgatcggagtgtttattacccatggagacgttggggtcggcacaattgttgggtctgccgtttttaatatcttgtgtataatcggcgtgtgtggcttgttcgctggccaagtggtgcgcctcacatggtgggccgtgtgtcgagacagcgtctattacaccatatctgttatcgtccttattgtgtttatatacgacgagcaaatcgtgtggtgggaagggctagttctaatcatcctctacgttttctatatcctgattatgaaatacaacgtgaaaatgcaagctttttttacggtgaagcagaagtcaattgcaaacggaaacccagtgaactcagagcttgaggccggaaatgatttctacgatggaagttacgacgatccctctgtccctctcttgggacaggttaaggagaaacctcagtacggaaaaaatccagtggttatggtggacgagattatgtctagctcaccgcctaagtttacttttccagaagcagggttaaggatcatgatcactaataagttcggcccgcggactaggcttaggatggccagtcggatcatcatcaatgagcggcagagactgattaatagtgcaaacggggtgtcctcgaagcctctgcaaaacggacgacatgagaatatagagaacggaaatgtgccagttgagaatcccgaagacccccagcagaatcaagagcagcagcctcctccacaaccccccccacccgagcccgaaccggtcgaagcagattttctgagcccatttagtgtgccagaagcgagaggcgataaagtgaagtgggtctttacatggccgctcatcttcctgctatgtgtgaccatccccaactgttctaagccgcgctgggagaagttttttatggtcactttcatcactgccaccctgtggatcgctgtctttagttacattatggtatggttggtgacaatcatcggttacacactcggcatacccgacgtgattatgggtattacattcctcgcagccgggacctccgttcccgactgcatggcctccttgattgtcgcccgacagggcttgggagacatggccgtgtctaacaccatcggaagcaacgtgttcgatatcctggtggggttgggggtcccatggggcttacagaccatggtagtaaactacggttccactgtgaagatcaattccagaggactggtgtatagcgtcgtgctgctgcttgggtcggtggctttaaccgtgctgggtattcacttgaataaatggagactggatagaaaactaggggtgtatgtgcttgtgttgtatgctatcttcttgtgctttagcatcatgatcgaattcaacgtttttactttcgtaaaccttccaatgtgccgggaggacgattag

SEQ ID NO: 246434 - DNA, 1818 bp, Artificial Sequence
  derived and/or modified sequence
atgttacctcagcaggtcggctttgtgtgtgccgttttggccctggtgtgctgcgcgagtggactgtttggatccctgggacacaagactgcctcagccagcaagagggtgctgcccgatacttggcgcaaccgaaagcttatggcaccagtaaatgggactcagacagcgaagaactgtaccgacccagcaattcacgaatttcctaccgatcttttttccaacaaagagcggcagcacggggctgtcctgctgcacattctgggcgctctttatatgttctatgcgctcgccattgtgtgtgacgatttttttgtcccttccctcgaaaagatttgtgagaggctacacctcagtgaagatgtcgccggagcgacattcatggccgctgggtcctctactcctgagcttttcgcatcagtcatcggtgtctttattacccacggagacgtgggcgtagggacaatcgtagggtcagccgtgttcaacatcttatgcattataggggtatgtggcctgtttgccggtcaggtggtgcggcttacatggtgggccgtatgccgagactcagtgtactacacgatttcggtcatcgtgttgatcgtttttatttacgacgaacaaattgtgtggtgggagggcttggtactgattatcctttacgttttttacatcctgataatgaagtataatgtcaaaatgcaggccttttttaccgttaagcagaaaagcattgccaatggcaaccccgtgaatagtgagttagaagcaggaaatgacttctatgacggctcttacgacgacccttcagtgcctctgctgggccaggttaaagagaagccgcagtatgggaagaatcctgtggttatggtggatgagatcatgtcctcctcccccccaaagtttaccttcccagaggccggacttagaattatgataaccaacaagttcggcccacgcacgagactgcgcatggcttcccgcatcattataaatgagcggcagagactcataaacagcgcaaacggggtgtcaagcaagcccctccagaatgggcgtcacgaaaacattgaaaatggtaacgtgccagtggagaaccccgaagacccccagcaaaatcaggagcagcagccgccacctcagccaccaccccctgagcctgaaccggtcgaggcagattttctgtctccgtttagtgtgcctgaagcaagaggcgacaaggtcaagtgggttttcacctggccactgatctttttgttgtgcgttacgattcctaactgctccaagcctagatgggagaagttttttatggtgacattcatcacagccacattatggatcgctgttttctcttacattatggtgtggctggtgacaattataggctacaccctgggaatccccgatgttattatggggatcaccttccttgcagcaggcacttccgtgccagactgtatggccagcctgatagtcgctcggcagggactaggcgacatggcggtgtccaataccattggatccaacgtcttcgacattctggtagggctaggcgttccttggggcctgcagacaatggtagttaactacggatcaactgtgaagatcaactcccgaggactggtctattcagtggtgctgttgctagggagcgtggctctgacagtgttaggaatccacttaaacaaatggcgattggaccgtaagttaggggtctacgtcttagtcttgtatgcgatttttctgtgcttctctattatgattgaattcaatgtcttcacttttgtgaacctcccgatgtgtcgcgaggatgactag

SEQ ID NO: 246435 - DNA, 1869 bp, Artificial Sequence
  derived and/or modified sequence
atggctctgcggggaactttacgacccctgaaggtgcgacgacgcagagagatgttgccccagcaggtcgggttcgtttgcgccgtcctggccctggtgtgctgcgcctccggcctgttcgggtctctaggacataagactgctagcgcctccaagagagtgctcccggatacctggaggaaccgcaaattaatggcccctgtgaatgggacgcagaccgccaaaaactgtactgaccccgcaattcacgaattccccactgacctgtttagcaataaggagcgtcagcacggggcagtgctactacacatcctgggtgccctctatatgttttacgcgctcgcaattgtctgtgacgacttcttcgtgccgagcttggagaagatctgtgaaagactccacctgagtgaagatgtcgctggcgcaacctttatggccgcaggcagcagtactcccgaactgttcgcaagcgtgattggcgtgtttattacacatggggatgtgggggtgggcacgattgttggctcagctgtgtttaacattctctgcataatcggggtgtgcggcctgttcgcgggtcaggtcgtacgcctgacctggtgggcagtctgtcgggacagtgtgtactatactatcagcgtgatagtgctcatcgtcttcatatacgacgagcaaattgtctggtgggagggactagtgctaatcatcctgtacgtgttctacatcttgataatgaaatacaatgtcaagatgcaggcattctttaccgtgaaacaaaaaagcattgccaatggaaaccctgtaaattctgagctggaggcgggtaatgacttctacgacggttcatatgacgatccgtccgtgcccttactaggccaagtgaaggaaaagccacagtatggaaagaaccctgtagtgatggtcgatgagattatgtcctccagtcccccaaagttcaccttcccggaagctggcctcaggattatgatcaccaacaaatttggaccacgtacccgtcttaggatggcttctcgcatcattataaatgagcggcaacgattaatcaattccgccaacggggtgagtagtaaacctctccagaacggcagacatgaaaatatcgaaaacggcaacgtcccagttgaaaatcctgaggatcctcaacagaaccaggaacaacaaccaccgccacagccccctcctcccgagccagagcccgtagaggccgattttttgagccccttttccgtacccgaggccagaggagacaaagtgaagtgggttttcacatggccactcatcttcctgctgtgtgtcaccatcccgaattgctctaaacctagatgggaaaagttctttatggttacctttattactgcgacattatggatcgccgtgttctcatacatcatggtgtggttagtcacaatcatcgggtataccctgggcatcccagacgtcatcatgggaataacttttctggcagcaggcacttccgtacccgactgcatggcgagtctgatagtggcacgccagggcttgggcgatatggctgtgagcaatacaattggctctaacgtcttcgacattcttgtggggctgggggtgccttggggtctgcagacaatggtggtgaactatggctcgactgttaagatcaattctcggggtcttgtgtactctgtggtcctgctcctcggctctgtggccctgaccgtgctgggaatccatttgaacaagtggagattagatcgcaagctgggcgtgtatgtcctggtcttgtacgccatatttttatgcttcagcattatgattgagttcaacgtgttcacattcgtgaacttacctatgtgtcgagaagacgattag

SEQ ID NO: 246436 - DNA, 4465 bp, Artificial Sequence
  derived and/or modified sequence
ctcaaagttcgcaggaggcgagagatgctgccgcagcaagtcggcttcgtgtgcgcggtgctggccctggtgtgctgtgcgtccggcctcttcggcagcttggggcacaaaacagcttctgctagcaaacgtgtcctgccagacacgtggagaaatagaaagttgatggccccagtgaatgggacacagacagccaagaactgcacagatcctgcgattcacgagttccccacagatctgttctccaataaggagcgacagcacggagccgtcctgctgcacatccttggtgctctgtatatgttctatgccttggccatagtgtgcgatgacttctttgttccgtctctagagaagatctgtgagagactccatctgagcgaagatgtggctggagccaccttcatggctgcaggaagctcaacgccagagctgtttgcgtctgttattggggtgttcatcacccatggggacgtcggggtgggcaccatcgtgggctctgctgtgttcaacatcctgtgcataattggagtgtgcggactgtttgctggccaggtggtccgtctgacgtggtgggccgtgtgccgagactccgtgtactacaccatctctgtcatcgtgctcatcgtgttcatatatgatgaacaaattgtgtggtgggaaggcctggtgctcatcatcttgtatgtgttttatattctgatcatgaagtacaatgtgaagatgcaagcctttttcacagtcaaacaaaagagcattgcaaacggtaacccggtcaacagtgagctggaggctggtaatgatttctatgacggtagctatgatgacccttccgtgccattgctggggcaagtgaaggagaagccacagtatggcaagaaccccgtggtgatggtggacgagattatgagctccagccctcccaagttcaccttccctgaagcaggcttacgaatcatgatcaccaataagtttggacccaggacccgactacggatggccagcaggatcatcattaatgagcggcagagactgatcaactcggccaatggtgtgagcagtaagccgcttcaaaacgggaggcacgagaacattgagaacgggaatgttcctgtggaaaaccccgaagaccctcagcagaatcaggagcagcagccgccgccacagccaccaccgccagagccagagccggtggaggctgacttcctgtcccccttctccgtgccggaggccagaggggacaaggtcaagtgggtgttcacctggcccctcatcttcctcctgtgcgtcaccattcccaactgcagcaagccccgctgggagaagttcttcatggtcaccttcatcaccgccacgctgtggatcgctgtgttctcctacatcatggtgtggctggtgactattatcggatacacacttgggatcccggatgtcatcatgggcattactttcctggcagcagggacaagtgttccagactgcatggccagcctaattgtggcgagacaaggccttggggacatggcagtctccaacaccataggaagcaacgtgtttgacatcctggtaggacttggtgtaccgtggggcctgcagaccatggttgttaattatggatcaacagtgaagatcaacagccgggggctggtctattccgtggtcctgttgctgggctctgtcgctctcaccgtcctcggcatccacctaaacaagtggcgactggaccggaagctgggtgtctacgtgctggttctctacgccatcttcttgtgcttctccataatgatagagtttaacgtctttaccttcgtcaacttgccgatgtgccgggaagacgattagcgctgagtcgcggcccctgggagctgatctggacaccctgtgacactggcgttctcctctcccctccttcccccaccacaggtctctcctgcataggcagccactgtccgttctttcacacactggaaggaagagccatcgtggtctttgtctggccacaggccaggctgctgggcatcctcctcctccttggagttccgcccctgcaaggctggatttgggggccattatctgagcagcttcaaagacccctgagctgccaaccacggagatgtgccaagcatctcatctctcctgcacactttagtcagaaggacttctgcatgcagtttgtctttctgttctgcaggcagcttcagaattgaggtcatttgtgagcacaagatctcatagggcaggtgcaaaataggaatgttgttctcaagtgtcacctccagcccagaggtggttccttaggcagcatgtgctcctgggagcctctgacttttgctggaagcagccacagtttggaaggggcaagacctcaacctgttggggtttagggcccatgatggcagacattctaccccttttcctggaaaaactggaagaatgaaaataatttttttctgtggaagagagaaaatgagtgaatattcttctcacttttattgatgcattcagagaataagcaatgaaatattaaaaaatgaaacatcatataggtcatcatacttgaaaattatcattccatatgaaaggatcatgatacacaccaaaaaagtaatgatcgtaaagacacaaatcctctgtatgccatcttgcattggcactgaggtgtttggtttggaatagggaaaaaggtaagagactaacgtggaaaggtgctaactcagagactggagattatagtttacagctgtactttccagatcttctatgtgacacaatgcactgtccttgtgggtttgtcatttattggttaatgctctagtttcaaaaccaccctgttgaaagttccagttatttatatgcccaacaaatttcatagcctgctgaactgaactgagtgtgtcagaagtgctggttaatgacgagaagagattgcctgaaaaacaacaaactgctttctggttagctgaaggcaagtgtgaaaatcagaatttagaatatttagagctaagcttctggaaccacgtagtttctacacgtggcaggccaagaatgggaggctgactcaaaactagatagaaaaatataaaataatcttcgaccacttgatagctctcaaatatatatttaaaagatttatgaatacaaaccatttatggtttatgatttctaaaaagaaagcacaattaattttatagagaggttttttatttttttaatatttctattgcaaaagtctatccgatttgatgcactttgaatattgagatattttgcacggatgaatgtatgggaactacccatgatgatgtaagaggaaagaacatttttttgtgattcaccagacatcactttaaacttggtgatgagtttaaatccagtagctaatcccttcctgagactcaaagatcgtgacgctggttggaatttctgactgtgccctttagggcctcctgagtttcaaaaggaggaagtgttcgtgcttgtgtccctgaagttccctgttgcatgagcctgcgacaggacctcacccccaccaccaggcttctatttgggattcacatcagtattagtatcgtagctacaccaagttcaggcttctctttttgtttttttacctagaaattgggctcagtggtcttcaacttgaggacgagggtgattttcctaagaaatcagcaaagagggaaggcagggcccctgtagattcaccagtataaacttcagctgcagggattccagagccctcgggaccactctgtcaccttaatagccaagttctcctggttcctccgatcttacaggctcatccaggttccaaagtgcttctgtctctgttttgattctccaaactgctctgtgatgtatgtagggattattctccccacttaacagaaagtagtgtcttggagaggtcaagggtctctagttcaatggccagtcatagcagaagggaggccaagcaccagtccatcacccctcccaggccagcctctgtaagttggccacacttggggagtgagtgtgggtatgactttaccctcctggttggttcttactgtttgagtcaaaacctcatcaatatatcattgactcctgggttcctcaggtcatttcctaatatctgtccctatccaatgcctctattttatcttgaaaaaaggaccaaaaattatttttagctatggcaaggcacaggccacatggcccctgatggcgtccctgctggttttcaattctctgaagccttgtgtagctttcagagcacacgtatcctaattaccctcctcttcctcagcagaacccatttgagattctaaatgaatactcttagtctctaaagttgcagttagaaactaaaataatgttttttaatatgtaatatgctcctcttggctaattttcttttgactttaatgtgccaatgtaacttcctttaaaggatctatgcatttattaaatctggaaaact

SEQ ID NO: 246437 - DNA, 1359 bp, Artificial Sequence
  derived and/or modified sequence
ctcaaagttcgcaggaggcgagagatgctgccgcagcaagtcggcttcgtgtgcgcggtgctggccctggtgtgctgtgcgtccggcctcttcggcagcttggggcacaaaacagcttctgctagcaaacgtgtcctgccagacacgtggagaaatagaaagttgatggccccagtgaatgggacacagacagccaagaactgcacagatcctgcgattcacgagttccccacagatctgttctccaataaggagcgacagcacggagccgtcctgctgcacatccttggtgctctgtatatgttctatgccttggccatagtgtgcgatgacttctttgttccgtctctagagaagatctgtgagagactccatctgagcgaagatgtggctggagccaccttcatggctgcaggaagctcaacgccagagctgtttgcgtctgttattggggtgttcatcacccatggggacgtcggggtgggcaccatctctgtttcttttgccttacagttcatatatgatgaacaaattgtgtggtgggaaggcctggtgctcatcatcttgtatgtgttttatattctgatcatgaagtacaatgtgaagatgcaagcctttttcacagtcaaacaaaagagcattgcaaacggtaacccggtcaacagtgagctggaggctggtaatgatttctatgacggtagctatgatgacccttccgtgccattgctggggcaagtgaaggagaagccacagtatggcaagaaccccgtggtgatggtggacgagattatgagctccagccctcccaagttcaccttccctgaagcaggcttacgaatcatgatcaccaataagtttggacccaggacccgactacggatggccagcaggatcatcattaatgagcggcagagactgatcaactcggccaatggtgtgagcagtaagccgcttcaaaacgggaggcacgagaacattgagaacgggaatgttcctgtggaaaaccccgaagaccctcagcagaatcaggagcagcagccgccgccacagccaccaccgccagagccagagccggtggaggctgacttcctgtcccccttctccgtgccggaggccagaggggacaaggtcaagtgggtgttcacctggcccctcatcttcctcctgtgcgtcaccattcccaactgcagcaagccccgctgggagaagttcttcatggtcaccttcatcaccgccacgctgtggatcgctgtgttctcctacatcatggtgtggctggagcaaagagaggggaagcagttccagcatggctgcagttctgttgattgtgaaactcactctcagccccttacaccctag

SEQ ID NO: 246438 - DNA, 4718 bp, Artificial Sequence
  derived and/or modified sequence
gcacgcggcgcgcgggactctgagctccggccgcgtcgcgcgtccccaccttcccaaggggctcccccgccgacctcgccctcgggccatgaggctttggcccggagctcctcgcctctgagtcgcgcaccgcctgctccagccccagcgccgctcggccactgattgcactctggccgctgaagctccccatcctctcccagagacggcacccaggcgctccgggatggcgctccgcgggaccctccggccgctcaaagttcgcaggaggcgagagatgctgccgcagcaagtcggcttcgtgtgcgcggtgctggccctggtgtgctgtgcgtccggcctcttcggcagcttggggcacaaaacagcttctgctagcaaacgtgtcctgccagacacgtggagaaatagaaagttgatggccccagtgaatgggacacagacagccaagaactgcacagatcctgcgattcacgagttccccacagatctgttctccaataaggagcgacagcacggagccgtcctgctgcacatccttggtgctctgtatatgttctatgccttggccatagtgtgcgatgacttctttgttccgtctctagagaagatctgtgagagactccatctgagcgaagatgtggctggagccaccttcatggctgcaggaagctcaacgccagagctgtttgcgtctgttattggggtgttcatcacccatggggacgtcggggtgggcaccatcgtgggctctgctgtgttcaacatcctgtgcataattggagtgtgcggactgtttgctggccaggtggtccgtctgacgtggtgggccgtgtgccgagactccgtgtactacaccatctctgtcatcgtgctcatcgtgttcatatatgatgaacaaattgtgtggtgggaaggcctggtgctcatcatcttgtatgtgttttatattctgatcatgaagtacaatgtgaagatgcaagcctttttcacagtcaaacaaaagagcattgcaaacggtaacccggtcaacagtgagctggaggctggtaatgatttctatgacggtagctatgatgacccttccgtgccattgctggggcaagtgaaggagaagccacagtatggcaagaaccccgtggtgatggtggacgagattatgagctccagccctcccaagttcaccttccctgaagcaggcttacgaatcatgatcaccaataagtttggacccaggacccgactacggatggccagcaggatcatcattaatgagcggcagagactgatcaactcggccaatggtgtgagcagtaagccgcttcaaaacgggaggcacgagaacattgagaacgggaatgttcctgtggaaaaccccgaagaccctcagcagaatcaggagcagcagccgccgccacagccaccaccgccagagccagagccggtggaggctgacttcctgtcccccttctccgtgccggaggccagaggggacaaggtcaagtgggtgttcacctggcccctcatcttcctcctgtgcgtcaccattcccaactgcagcaagccccgctgggagaagttcttcatggtcaccttcatcaccgccacgctgtggatcgctgtgttctcctacatcatggtgtggctggtgactattatcggatacacacttgggatcccggatgtcatcatgggcattactttcctggcagcagggacaagtgttccagactgcatggccagcctaattgtggcgagacaaggccttggggacatggcagtctccaacaccataggaagcaacgtgtttgacatcctggtaggacttggtgtaccgtggggcctgcagaccatggttgttaattatggatcaacagtgaagatcaacagccgggggctggtctattccgtggtcctgttgctgggctctgtcgctctcaccgtcctcggcatccacctaaacaagtggcgactggaccggaagctgggtgtctacgtgctggttctctacgccatcttcttgtgcttctccataatgatagagtttaacgtctttaccttcgtcaacttgccgatgtgccgggaagacgattagcgctgagtcgcggcccctgggagctgatctggacaccctgtgacactggcgttctcctctcccctccttcccccaccacaggtctctcctgcataggcagccactgtccgttctttcacacactggaaggaagagccatcgtggtctttgtctggccacaggccaggctgctgggcatcctcctcctccttggagttccgcccctgcaaggctggatttgggggccattatctgagcagcttcaaagacccctgagctgccaaccacggagatgtgccaagcatctcatctctcctgcacactttagtcagaaggacttctgcatgcagtttgtctttctgttctgcaggcagcttcagaattgaggtcatttgtgagcacaagatctcatagggcaggtgcaaaataggaatgttgttctcaagtgtcacctccagcccagaggtggttccttaggcagcatgtgctcctgggagcctctgacttttgctggaagcagccacagtttggaaggggcaagacctcaacctgttggggtttagggcccatgatggcagacattctaccccttttcctggaaaaactggaagaatgaaaataatttttttctgtggaagagagaaaatgagtgaatattcttctcacttttattgatgcattcagagaataagcaatgaaatattaaaaaatgaaacatcatataggtcatcatacttgaaaattatcattccatatgaaaggatcatgatacacaccaaaaaagtaatgatcgtaaagacacaaatcctctgtatgccatcttgcattggcactgaggtgtttggtttggaatagggaaaaaggtaagagactaacgtggaaaggtgctaactcagagactggagattatagtttacagctgtactttccagatcttctatgtgacacaatgcactgtccttgtgggtttgtcatttattggttaatgctctagtttcaaaaccaccctgttgaaagttccagttatttatatgcccaacaaatttcatagcctgctgaactgaactgagtgtgtcagaagtgctggttaatgacgagaagagattgcctgaaaaacaacaaactgctttctggttagctgaaggcaagtgtgaaaatcagaatttagaatatttagagctaagcttctggaaccacgtagtttctacacgtggcaggccaagaatgggaggctgactcaaaactagatagaaaaatataaaataatcttcgaccacttgatagctctcaaatatatatttaaaagatttatgaatacaaaccatttatggtttatgatttctaaaaagaaagcacaattaattttatagagaggttttttatttttttaatatttctattgcaaaagtctatccgatttgatgcactttgaatattgagatattttgcacggatgaatgtatgggaactacccatgatgatgtaagaggaaagaacatttttttgtgattcaccagacatcactttaaacttggtgatgagtttaaatccagtagctaatcccttcctgagactcaaagatcgtgacgctggttggaatttctgactgtgccctttagggcctcctgagtttcaaaaggaggaagtgttcgtgcttgtgtccctgaagttccctgttgcatgagcctgcgacaggacctcacccccaccaccaggcttctatttgggattcacatcagtattagtatcgtagctacaccaagttcaggcttctctttttgtttttttacctagaaattgggctcagtggtcttcaacttgaggacgagggtgattttcctaagaaatcagcaaagagggaaggcagggcccctgtagattcaccagtataaacttcagctgcagggattccagagccctcgggaccactctgtcaccttaatagccaagttctcctggttcctccgatcttacaggctcatccaggttccaaagtgcttctgtctctgttttgattctccaaactgctctgtgatgtatgtagggattattctccccacttaacagaaagtagtgtcttggagaggtcaagggtctctagttcaatggccagtcatagcagaagggaggccaagcaccagtccatcacccctcccaggccagcctctgtaagttggccacacttggggagtgagtgtgggtatgactttaccctcctggttggttcttactgtttgagtcaaaacctcatcaatatatcattgactcctgggttcctcaggtcatttcctaatatctgtccctatccaatgcctctattttatcttgaaaaaaggaccaaaaattatttttagctatggcaaggcacaggccacatggcccctgatggcgtccctgctggttttcaattctctgaagccttgtgtagctttcagagcacacgtatcctaattaccctcctcttcctcagcagaacccatttgagattctaaatgaatactcttagtctctaaagttgcagttagaaactaaaataatgttttttaatatgtaatatgctcctcttggctaattttcttttgactttaatgtgccaatgtaacttcctttaaaggatctatgcatttattaaatctggaaaact

SEQ ID NO: 246439 - protein, 586 aa, Artificial Sequence
  derived and/or modified sequence
MLPQQVGFVCAVLALVCCASGLFGSLGHKTASASKRVLPDTWRNRKLMAPVNGTQTAKNCTDPAIHEFPTDLFSNKERQHGAVLLHILGALYMFYALAIVCDDFFVPSLEKICERLHLSEDVAGATFMAAGSSTPELFASVIGVFITHGDVGVGTIVGSAVFNILCIIGVCGLFAGQVVRLTWWAVCRDSVYYTISVIVLIVFIYDEQIVWWEGLVLIILYVFYILIMKYNVKMQAFFTVKQKSIANGNPVNSELEAVKEKPQYGKNPVVMVDEIMSSSPPKFTFPEAGLRIMITNKFGPRTRLRMASRIIINERQRLINSANGVSSKPLQNGRHENIENGNVPVENPEDPQQNQEQQPPPQPPPPEPEPVEADFLSPFSVPEARGDKVKWVFTWPLIFLLCVTIPNCSKPRWEKFFMVTFITATLWIAVFSYIMVWLVTIIGYTLGIPDVIMGITFLAAGTSVPDCMASLIVARQGLGDMAVSNTIGSNVFDILVGLGVPWGLQTMVVNYGSTVKINSRGLVYSVVLLLGSVALTVLGIHLNKWRLDRKLGVYVLVLYAIFLCFSIMIEFNVFTFVNLPMCREDD

SEQ ID NO: 246440 - protein, 603 aa, Artificial Sequence
  derived and/or modified sequence
MALRGTLRPLKVRRRREMLPQQVGFVCAVLALVCCASGLFGSLGHKTASASKRVLPDTWRNRKLMAPVNGTQTAKNCTDPAIHEFPTDLFSNKERQHGAVLLHILGALYMFYALAIVCDDFFVPSLEKICERLHLSEDVAGATFMAAGSSTPELFASVIGVFITHGDVGVGTIVGSAVFNILCIIGVCGLFAGQVVRLTWWAVCRDSVYYTISVIVLIVFIYDEQIVWWEGLVLIILYVFYILIMKYNVKMQAFFTVKQKSIANGNPVNSELEAVKEKPQYGKNPVVMVDEIMSSSPPKFTFPEAGLRIMITNKFGPRTRLRMASRIIINERQRLINSANGVSSKPLQNGRHENIENGNVPVENPEDPQQNQEQQPPPQPPPPEPEPVEADFLSPFSVPEARGDKVKWVFTWPLIFLLCVTIPNCSKPRWEKFFMVTFITATLWIAVFSYIMVWLVTIIGYTLGIPDVIMGITFLAAGTSVPDCMASLIVARQGLGDMAVSNTIGSNVFDILVGLGVPWGLQTMVVNYGSTVKINSRGLVYSVVLLLGSVALTVLGIHLNKWRLDRKLGVYVLVLYAIFLCFSIMIEFNVFTFVNLPMCREDD

SEQ ID NO: 246441 - DNA, 1761 bp, Artificial Sequence
  derived and/or modified sequence
atgctgccccagcaggtgggcttcgtgtgcgccgtgctggccctggtgtgctgcgccagcggcctgttcggcagcctgggccacaagaccgccagcgccagcaagagagtgctgcccgacacctggagaaacagaaagctgatggcccccgtgaacggcacccagaccgccaagaactgcaccgaccccgccatccacgagttccccaccgacctgttcagcaacaaggagagacagcacggcgccgtgctgctgcacatcctgggcgccctgtacatgttctacgccctggccatcgtgtgcgacgacttcttcgtgcccagcctggagaagatctgcgagagactgcacctgagcgaggacgtggccggcgccaccttcatggccgccggcagcagcacccccgagctgttcgccagcgtgatcggcgtgttcatcacccacggcgacgtgggcgtgggcaccatcgtgggcagcgccgtgttcaacatcctgtgcatcatcggcgtgtgcggcctgttcgccggccaggtggtgagactgacctggtgggccgtgtgcagagacagcgtgtactacaccatcagcgtgatcgtgctgatcgtgttcatctacgacgagcagatcgtgtggtgggagggcctggtgctgatcatcctgtacgtgttctacatcctgatcatgaagtacaacgtgaagatgcaggccttcttcaccgtgaagcagaagagcatcgccaacggcaaccccgtgaacagcgagctggaggccgtgaaggagaagccccagtacggcaagaaccccgtggtgatggtggacgagatcatgagcagcagcccccccaagttcaccttccccgaggccggcctgagaatcatgatcaccaacaagttcggccccagaaccagactgagaatggccagcagaatcatcatcaacgagagacagagactgatcaacagcgccaacggcgtgagcagcaagcccctgcagaacggcagacacgagaacatcgagaacggcaacgtgcccgtggagaaccccgaggacccccagcagaaccaggagcagcagccccccccccagccccccccccccgagcccgagcccgtggaggccgacttcctgagccccttcagcgtgcccgaggccagaggcgacaaggtgaagtgggtgttcacctggcccctgatcttcctgctgtgcgtgaccatccccaactgcagcaagcccagatgggagaagttcttcatggtgaccttcatcaccgccaccctgtggatcgccgtgttcagctacatcatggtgtggctggtgaccatcatcggctacaccctgggcatccccgacgtgatcatgggcatcaccttcctggccgccggcaccagcgtgcccgactgcatggccagcctgatcgtggccagacagggcctgggcgacatggccgtgagcaacaccatcggcagcaacgtgttcgacatcctggtgggcctgggcgtgccctggggcctgcagaccatggtggtgaactacggcagcaccgtgaagatcaacagcagaggcctggtgtacagcgtggtgctgctgctgggcagcgtggccctgaccgtgctgggcatccacctgaacaagtggagactggacagaaagctgggcgtgtacgtgctggtgctgtacgccatcttcctgtgcttcagcatcatgatcgagttcaacgtgttcaccttcgtgaacctgcccatgtgcagagaggacgactag

SEQ ID NO: 246442 - DNA, 1812 bp, Artificial Sequence
  derived and/or modified sequence
atggccctgagaggcaccctgagacccctgaaggtgagaagaagaagagagatgctgccccagcaggtgggcttcgtgtgcgccgtgctggccctggtgtgctgcgccagcggcctgttcggcagcctgggccacaagaccgccagcgccagcaagagagtgctgcccgacacctggagaaacagaaagctgatggcccccgtgaacggcacccagaccgccaagaactgcaccgaccccgccatccacgagttccccaccgacctgttcagcaacaaggagagacagcacggcgccgtgctgctgcacatcctgggcgccctgtacatgttctacgccctggccatcgtgtgcgacgacttcttcgtgcccagcctggagaagatctgcgagagactgcacctgagcgaggacgtggccggcgccaccttcatggccgccggcagcagcacccccgagctgttcgccagcgtgatcggcgtgttcatcacccacggcgacgtgggcgtgggcaccatcgtgggcagcgccgtgttcaacatcctgtgcatcatcggcgtgtgcggcctgttcgccggccaggtggtgagactgacctggtgggccgtgtgcagagacagcgtgtactacaccatcagcgtgatcgtgctgatcgtgttcatctacgacgagcagatcgtgtggtgggagggcctggtgctgatcatcctgtacgtgttctacatcctgatcatgaagtacaacgtgaagatgcaggccttcttcaccgtgaagcagaagagcatcgccaacggcaaccccgtgaacagcgagctggaggccgtgaaggagaagccccagtacggcaagaaccccgtggtgatggtggacgagatcatgagcagcagcccccccaagttcaccttccccgaggccggcctgagaatcatgatcaccaacaagttcggccccagaaccagactgagaatggccagcagaatcatcatcaacgagagacagagactgatcaacagcgccaacggcgtgagcagcaagcccctgcagaacggcagacacgagaacatcgagaacggcaacgtgcccgtggagaaccccgaggacccccagcagaaccaggagcagcagccccccccccagccccccccccccgagcccgagcccgtggaggccgacttcctgagccccttcagcgtgcccgaggccagaggcgacaaggtgaagtgggtgttcacctggcccctgatcttcctgctgtgcgtgaccatccccaactgcagcaagcccagatgggagaagttcttcatggtgaccttcatcaccgccaccctgtggatcgccgtgttcagctacatcatggtgtggctggtgaccatcatcggctacaccctgggcatccccgacgtgatcatgggcatcaccttcctggccgccggcaccagcgtgcccgactgcatggccagcctgatcgtggccagacagggcctgggcgacatggccgtgagcaacaccatcggcagcaacgtgttcgacatcctggtgggcctgggcgtgccctggggcctgcagaccatggtggtgaactacggcagcaccgtgaagatcaacagcagaggcctggtgtacagcgtggtgctgctgctgggcagcgtggccctgaccgtgctgggcatccacctgaacaagtggagactggacagaaagctgggcgtgtacgtgctggtgctgtacgccatcttcctgtgcttcagcatcatgatcgagttcaacgtgttcaccttcgtgaacctgcccatgtgcagagaggacgactag

SEQ ID NO: 246443 - DNA, 1761 bp, Artificial Sequence
  derived and/or modified sequence
atgctgccccaacaggtgggctttgtctgtgccgttctggccctcgtttgttgtgcctctgggctcttcgggtcattagggcataagacggcaagcgcaagcaagcgagtgctgcctgacacttggaggaaccgtaaacttatggcaccagtaaacggaactcaaaccgctaaaaactgtacggaccccgcaatccacgaattcccgaccgatttgttttcgaataaggagcgtcagcatggggccgtcctcttacacatcctcggcgccttgtacatgttttacgccctggcgatcgtgtgtgacgatttttttgtgccatccctggagaaaatctgcgagagactgcatctgtctgaagatgtggccggtgccacttttatggcagctggctcctctaccccagaactatttgcttccgtcatcggtgtgttcattacccacggagacgttggcgtgggaactattgttgggtctgccgtttttaatattctgtgtatcatcggagtgtgtggccttttcgctggacaggttgtccggctcacctggtgggccgtctgtcgtgactctgtctattatactattagtgttatcgtccttattgtttttatttatgacgagcagatcgtgtggtgggaggggctggtgctgattatcctgtatgtgttctacatactgattatgaaatacaacgtcaagatgcaggcattttttacagtgaaacaaaagtctatcgcaaacgggaatccagttaattccgagttggaggcggttaaggagaaaccccagtatggcaagaatccagttgtgatggtggatgaaatcatgtcatcctcccctccaaagtttacattccctgaagccggactgcgaatcatgataactaacaagtttggcccaaggacacgactgaggatggcatcccgtatcatcattaatgaacggcagaggcttatcaactcagcgaatggggtctcgtccaagccgttacagaacggccggcatgagaacattgagaacggcaacgtacccgtggagaatcccgaggacccacaacaaaatcaggagcagcagccacccccccagcccccaccaccagagccagagcccgtggaggccgactttttgagtccgttttctgtcccggaggctaggggcgacaaggttaaatgggtgttcacatggcccctgatatttctgttgtgcgtgactatcccaaattgtagcaagccgcggtgggagaagtttttcatggtgaccttcattacagcaaccctgtggattgcagtctttagttacattatggtttggctcgtgaccatcattgggtacaccctggggatacctgacgtgataatgggaatcacattcctggctgctggaacctcagtgcctgattgcatggctagtctgatcgtggccagacagggattgggggatatggcggtgtcgaataccatcggatctaacgtgttcgacatccttgtgggcctaggagtgccctgggggctgcaaaccatggtcgtcaactacggatctactgtgaagatcaattcaaggggactggtgtactcggtggtgctactgctgggaagcgtggccctgaccgtgctcggcatacacctcaataagtggcgactcgacagaaagttaggcgtgtatgtactggtgctgtacgctatatttctgtgtttctctattatgatcgagtttaatgtctttacattcgtgaatctccccatgtgtcgcgaggacgactag

SEQ ID NO: 246444 - DNA, 1812 bp, Artificial Sequence
  derived and/or modified sequence
atggcactgcgcggtacactgcggcccctcaaggttaggaggaggcgagagatgctcccacagcaggtgggctttgtgtgtgcagtgcttgcactggtttgttgtgcatctggattgtttgggagtctgggccacaagactgctagtgcatctaaacgcgtgctccccgacacatggcgtaaccggaagctgatggcccctgtgaatgggacccaaacagctaagaattgcaccgaccctgctattcacgaattccccaccgatttgtttagtaataaagaaaggcagcacggtgccgtcttgctccacattttgggagcactgtacatgttctacgcccttgcaatagtctgtgatgatttcttcgtccccagcctggagaagatttgcgagcggctgcacctgtctgaagatgtcgcgggtgccacatttatggcggctggaagtagcacgcccgaactctttgcttcagtgatcggggtgtttattacacacggggatgttggggtggggactattgtaggatccgccgtattcaatatcctctgtatcatcggcgtttgcggactctttgcagggcaagtcgtgcgacttacctggtgggcagtgtgtcgggatagtgtgtattacacgatatctgtgattgtgcttattgtcttcatctacgacgaacagatagtgtggtgggaaggtctggttctgataatcttatatgtgttttacattcttattatgaagtacaatgtgaagatgcaggctttcttcaccgtgaagcaaaagtccattgccaacggcaaccctgtgaacagtgagctggaggcggtgaaggaaaagccccagtacggcaaaaaccccgtggtgatggtggatgaaatcatgtccagctctcctcccaagttcacctttcccgaagcagggcttcggattatgatcaccaataagttcggaccacgcacacgcctgagaatggcatccagaatcattattaacgagcgacagaggcttatcaatagtgcgaacggcgtgagctcaaagccattgcagaacgggcgacatgagaatatcgaaaacgggaacgtcccggtggagaatcccgaagatccacagcaaaatcaggagcagcagcctcctcctcagcccccgcctccagaacctgaacccgtggaggccgatttcctgtcccctttctccgtccccgaagctcggggtgacaaagtgaagtgggtcttcacttggcccctcatatttttactgtgtgtgaccatcccaaactgttcgaagccccgatgggagaaattcttcatggttacattcatcactgctacgctctggattgcagtattctcttatattatggtgtggctggtgaccatcattgggtacacactcggtatacctgatgtcataatgggcataacgttcttagctgccggcacgagtgttccagactgtatggcttccctgatcgtggcaagacagggccttggtgacatggctgtgtctaataccattggatcaaacgtttttgacatcctggtgggcctgggagtcccatggggccttcagaccatggtcgtcaattatggctcgaccgttaaaataaacagccgcggactggtctactccgtggtgctgttgttaggctcggtagcgttaacagttctgggtattcatctcaataagtggcgtctggacagaaagctgggagtgtatgtgctcgtgctttacgctatattcctgtgtttctcaatcatgatcgaattcaacgtgttcactttcgttaatttaccaatgtgtcgggaagatgactag

SEQ ID NO: 246445 - DNA, 1761 bp, Artificial Sequence
  derived and/or modified sequence
atgctgccccagcaggtgggctttgtgtgtgctgtgctggccctggtgtgctgtgccagcggcctgtttggcagcctgggccacaagacagccagcgccagcaagagggtgctgcctgacacctggaggaacaggaagctgatggcccctgtgaatggcacccagacagccaagaactgcacagatcctgccatccacgagttccccacagacctcttcagcaacaaggagcggcagcacggggctgtgctgctgcacatcctgggcgccctgtacatgttttatgccctggccatcgtgtgtgatgacttctttgtgcccagcctggagaagatctgtgagcggctgcacctgtctgaagatgtggccggggccaccttcatggccgccggcagcagcaccccagagctgtttgccagcgtcatcggggtcttcatcacccatggagatgtgggcgtgggcaccatcgtgggcagcgctgtgttcaacatcctgtgcatcatcggcgtgtgtggcctgtttgctggccaggtggtgcggctgacctggtgggccgtgtgccgggacagcgtgtactacaccatcagcgtcatcgtgctgattgtgttcatctatgatgagcagatcgtgtggtgggagggcctggtgctgatcatcctgtatgtgttctacatcctgatcatgaagtacaacgtgaagatgcaggccttcttcaccgtgaagcagaagagcatcgccaatggaaatcctgtgaacagcgagctggaggccgtgaaggagaagccccagtatggcaagaaccctgtggtgatggtggatgagatcatgagcagcagcccccccaagttcaccttccctgaggccggcctgcgcatcatgatcaccaacaagtttggccccaggacccggctgaggatggccagccgcatcatcatcaatgaaaggcagaggctcatcaacagcgccaatggagtgagcagcaagcccctgcagaatggaagacatgagaacattgaaaatggaaatgtgcctgtggagaaccctgaggacccccagcagaaccaggagcagcagcccccaccccagcccccacctcctgagcctgagcctgtggaggccgacttcctgagccccttctctgtgcctgaggcccggggggacaaggtgaagtgggtgttcacctggcccctcatcttcctgctgtgtgtgaccatccccaactgcagcaagccccgctgggagaagttcttcatggtgaccttcatcacagccaccctgtggattgctgtgttctcctacatcatggtgtggctggtgaccatcatcggctacaccctgggcatcccagatgtgatcatgggcatcaccttcctggccgccggcacctctgtgcctgactgcatggccagcctcatcgtggcccggcagggcctgggggacatggctgtgagcaacaccatcggcagcaatgtgtttgacatcctggtgggcctgggcgtgccctggggcctgcagaccatggtggtgaactacggcagcacagtgaagatcaacagccggggcctggtgtacagcgtggtgctgctgctgggctctgtggccctgactgtgctgggcatccacctgaacaagtggaggctggacaggaagctgggcgtgtatgtgctggtgctgtatgccatcttcctgtgcttcagcatcatgattgagttcaacgtgttcacctttgtgaacctgcccatgtgccgggaggatgactag

SEQ ID NO: 246446 - DNA, 1812 bp, Artificial Sequence
  derived and/or modified sequence
atggccctgcggggcaccctgcggcccctgaaggtgagaagaagaagagagatgctgccccagcaggtgggctttgtgtgtgctgtgctggccctggtgtgctgtgccagcggcctgtttggcagcctgggccacaagacagccagcgccagcaagagggtgctgcctgacacctggaggaacaggaagctgatggcccctgtgaatggcacccagacagccaagaactgcacagatcctgccatccacgagttccccacagacctcttcagcaacaaggagcggcagcacggggctgtgctgctgcacatcctgggcgccctgtacatgttctacgccctggccatcgtgtgtgatgacttctttgtgcccagcctggagaagatctgtgagcggctgcacctgtctgaagatgtggccggggccaccttcatggctgctggcagcagcaccccagagctgtttgcctctgtgattggagtcttcatcacccatggagatgtgggcgtgggcaccatcgtgggcagcgctgtgttcaacatcctgtgcatcattggagtgtgtggcctgtttgctggccaggtggtgcggctgacctggtgggccgtgtgccgggacagcgtgtactacaccatctctgtgattgtgctgattgtgttcatctatgatgagcagatcgtgtggtgggagggcctggtgctgatcatcctgtatgtgttctacatcctgatcatgaagtacaacgtgaagatgcaggccttcttcaccgtgaagcagaagagcatcgccaacggcaaccctgtgaacagcgagctggaggccgtgaaggagaagccccagtatggcaagaaccctgtggtgatggtggatgagatcatgagcagcagcccccccaagttcaccttccctgaggccggcctgcgcatcatgatcaccaacaagtttggccccaggacccggctgaggatggccagccgcatcatcatcaatgaaaggcagaggctcatcaacagcgccaacggggtgagcagcaagcccctgcagaatggaagacatgaaaatattgaaaatggaaatgtgcctgtggagaaccctgaggacccccagcagaaccaggagcagcagcccccaccccagcccccacctcctgagcctgagcctgtggaggccgacttcctgagccccttctctgtgcctgaggcccggggggacaaggtgaagtgggtgttcacctggcccctcatcttcctgctgtgtgtgaccatccccaactgcagcaagccccgctgggagaagttcttcatggtgaccttcatcacagccaccctgtggattgctgtgttctcctacatcatggtgtggctggtgaccatcatcggctacaccctgggcatcccagatgtgatcatgggcatcaccttcctggccgccggcacctctgtgcctgactgcatggccagcctgattgtggcccggcagggcctgggggacatggctgtgagcaacaccatcggcagcaatgtgtttgacatcctggtgggcctgggcgtgccctggggcctgcagaccatggtggtgaactacggcagcacagtgaagatcaacagccggggcctggtgtacagcgtggtgctgctgctgggctctgtggccctgactgtgctgggcatccacctgaacaagtggaggctggacaggaagctgggcgtgtatgtgctggtgctgtatgccatcttcctgtgcttcagcatcatgattgagttcaacgtgttcacctttgtgaacctgcccatgtgcagagaagatgactag

SEQ ID NO: 246447 - DNA, 1761 bp, Artificial Sequence
  derived and/or modified sequence
atgctgccccagcaggtgggcttcgtgtgcgccgtgctggccctggtctgttgcgcctccggcttattcgggtccctgggtcataagaccgcttcggccagcaaacgggtgctgcccgacacatggcggaacagaaagctgatggcccctgtcaatggcacacagacggctaagaactgtaccgacccagctatccatgaattccccacagacctttttagcaacaaggagagacagcacggtgccgtgcttctccacatccttggcgccctgtatatgttctatgccttagccattgtgtgcgacgatttcttcgtcccttcactggaaaagatttgcgagcggcttcacctgtctgaagacgtcgctggtgcaacatttatggccgctggctcttctactcctgaattgttcgccagtgtgattggcgttttcattacgcatggcgacgtaggagttggaacgattgtgggcagcgcagtgttcaacatcctctgtatcataggggtgtgcggcctgttcgccggccaagtcgtgcgactaacttggtgggctgtctgccgcgattcggtgtactacacaataagcgtgattgtgctgattgttttcatctatgatgagcaaattgtgtggtgggaggggctggtgctgattatcctgtacgtgttctatatcttgatcatgaaatacaatgtgaaaatgcaggcctttttcactgtaaaacagaaaagtatcgcgaacggcaatccagtgaattcggagctcgaggcagttaaggagaaacctcagtacgggaagaaccctgttgtgatggtagacgaaatcatgtcaagttctcccccgaaatttacatttcccgaggcgggactgagaataatgatcacaaacaagttcggacccaggaccaggcttagaatggcctctaggatcatcatcaacgaacggcagcgcctgatcaactcagctaacggcgtatcttctaagcccctgcagaacgggagacatgagaatattgagaatggaaatgtacccgtggagaatcccgaggacccccagcaaaaccaggagcagcagcctcctccccagccccctccgccagaacctgaaccggtagaagccgatttcctctccccattttctgtccctgaggcacggggagataaagtaaagtgggtgttcacctggcctctcatttttctcttatgcgtgaccatcccaaactgtagcaagcctcgatgggaaaagttctttatggttacttttattactgctaccttatggatcgccgtattctcctacatcatggtctggctggtgaccattatcggctatacccttggaatacccgatgttattatggggattacgttcctggccgccggcacttcagtgcctgattgtatggctagcctgatcgtggcgagacagggactgggtgacatggcagtctccaatactatcgggtccaatgtcttcgacattctggtgggacttggagtgccctggggattgcagactatggtcgtaaattacggatccacagtcaaaatcaactctcgcgggttggtctactctgtggttttactcttggggtccgtggctctcacggtgctcgggattcacctcaataagtggagacttgatcgcaaactaggggtctacgtgctggtgctgtacgccatctttctatgcttctctatcatgatcgagtttaacgtgtttacgtttgtgaatcttccaatgtgtagggaggacgactag

SEQ ID NO: 246448 - DNA, 1812 bp, Artificial Sequence
  derived and/or modified sequence
atggccctgcggggcaccctgcggcccctgaaggtgcggcggcggcgggagatgctgccacagcaagttggtttcgtgtgcgcggtactggccctggtgtgctgtgcctctggcctgttcggtagcctcgggcataagaccgcttcagcctcaaaaagggtgctgccagatacatggcgcaaccgcaagctgatggctcccgtgaatggcactcagactgcaaagaactgcacagatcctgccattcatgaatttccaacagacctattctcaaacaaggagagacagcacggcgctgtgttgttgcacattcttggtgcgctgtacatgttttacgctctggccattgtttgtgacgacttcttcgtcccaagccttgagaagatttgtgagaggctgcatctcagtgaggacgtggccggggccacattcatggccgctggtagctcgacacccgagctgttcgcctcagtgattggagtgtttataactcacggcgacgtcggcgttggaaccatcgtggggtcagctgtgttcaatattttgtgcatcatcggcgtgtgtggtctgtttgccggacaggtagtacgcctgacttggtgggccgtgtgccgggacagtgtctattacacaatttcagtgatcgtgctcattgtgtttatatacgatgagcaaatcgtttggtgggaaggcttagtcctcataatcctgtacgtcttctatatattgattatgaagtataacgtgaaaatgcaggccttcttcaccgtgaagcagaaatcaattgctaatggaaaccctgttaactccgaattggaggcagttaaggagaaacctcaatatggtaagaatcctgtggtgatggtggatgagatcatgtccagcagtcccccaaagtttacctttcccgaagccggcctgcggatcatgatcactaataagtttggccccagaaccaggctaagaatggcctcacgtattatcattaacgagcgtcaacggctaatcaactccgcaaatggcgtgagttcaaaacccttacagaatggcagacacgaaaacattgagaatggcaacgttcccgtggaaaatcccgaggaccctcagcaaaaccaagagcaacagcctcccccacagccaccgccacccgagccagagcccgtggaagccgacttcttatccccctttagcgtccccgaggcaaggggggataaggtgaaatgggtgtttacatggcctctgattttcttactctgcgtgacaatacccaactgttccaagcccagatgggaaaaattttttatggtgacattcatcaccgccaccctctggattgccgttttttcgtatattatggtgtggctggtcacgattataggctacacactcgggatccctgacgtgattatgggaataacttttttggcggcgggcacatctgttccagactgcatggcctctctcatagtggctcgccagggccttggagatatggcggtcagcaatactatcggctctaatgtgtttgacattctcgtagggctgggcgtgccctgggggctgcaaacaatggtggttaactacggcagcaccgtgaagatcaatagtagaggcttagtgtatagcgtggttctgttattaggttccgttgcactgactgtactgggtatccacctgaacaaatggcgcctggacagaaagctcggggtgtatgtgttggtgttatatgcgatcttcctttgtttttccatcatgatagagttcaatgtgttcaccttcgtgaatctcccaatgtgtagagaagatgattag

SEQ ID NO: 246449 - DNA, 1761 bp, Artificial Sequence
  derived and/or modified sequence
atgctgcctcagcaggtgggctttgtctgcgccgtgttagcgctggtttgctgtgcctctggattattcggaagtttggggcataagaccgcctcggcctcaaagcgcgtactgcccgacacatggcgcaatcggaaacttatggccccagtaaatggaacccagacagcgaagaactgtaccgatcccgctattcacgaatttcccaccgatttattctcaaacaaggaacgccaacacggcgctgttttgctccatattttgggagccctgtatatgttctacgctcttgcaatcgtttgtgatgatttctttgttcctagccttgagaagatctgcgaaagactgcatctttccgaagacgttgcaggtgccacatttatggccgcaggtagttcaacccccgaattgttcgcctcagtgataggggtatttattacacatggggatgtaggagtcggcacaattgttgggagcgctgtgttcaatatcctgtgcattataggcgtatgcgggctgttcgccggacaggtagtgagactcacgtggtgggccgtatgccgagatagtgtgtactataccatttcagttattgtactcattgtcttcatctacgatgaacagatcgtgtggtgggaaggcctcgttcttatcatcctgtacgtgttttacatcttaattatgaaatataatgtgaagatgcaggctttttttacggttaaacagaagagcatcgctaatggcaaccccgtgaattccgagctggaggcagtgaaagaaaagccacagtacggcaaaaatccggtagtgatggtcgacgagatcatgtctagctccccacctaagttcacttttcccgaggcaggcctgcggatcatgatcactaacaaatttggccctcgcacaagactccgcatggctagtagaattatcatcaatgaacgtcagcggctgatcaatagcgcaaatggtgtgtcatctaagccccttcagaatgggaggcatgaaaacatcgagaacggtaatgtgcccgtggagaacccagaggacccccaacagaatcaggagcaacaacccccacctcagccaccccctccggagcctgagcccgttgaggcagattttctgtcgccattttccgtccccgaggccaggggagataaagtaaagtgggtcttcacctggcctctcatttttttactgtgcgtgaccatcccaaattgctctaaaccgagatgggagaagttttttatggtgacatttatcactgcaacactctggattgctgtgttctcatacatcatggtctggctcgtcactattatcggctatacgctgggcataccggacgtgatcatgggaatcaccttcctggccgcaggcacttcagtcccagattgcatggctagcttgatagttgcacgccagggcctgggcgacatggcggtgtccaacacaattggatccaacgtatttgatatacttgttggattgggcgttccttggggcctgcagacaatggtagtgaactacggctcaacagttaagatcaattctaggggtcttgtttactccgtggtcctgctgttagggtctgtggctcttactgtgctgggcattcacctgaataagtggcggctcgaccgcaagttgggggtgtatgtcttggtgttgtatgcaattttcctttgttttagtattatgattgaatttaatgtgttcacctttgtgaacctccctatgtgtagggaagacgattag

SEQ ID NO: 246450 - DNA, 1812 bp, Artificial Sequence
  derived and/or modified sequence
atggctctcagaggaacactgcggccattgaaagttcggagacgcagagagatgctccctcaacaggtgggatttgtgtgcgccgtgctcgcgctggtctgctgcgctagtggtctgtttggctctctcggacacaaaacagcctccgcaagcaagagagtcctaccagatacttggcgcaatagaaaactgatggccccagtgaacgggacacagacggcaaaaaactgcaccgacccagcaatacatgaatttcccacggatttgttcagtaataaagagagacaacatggagcggtgttactccacattcttggcgcactctatatgttttacgcattagctatagtgtgtgacgactttttcgtgcctagtctggaaaaaatttgtgaacgcttacatctgtccgaggatgtagccggagctacatttatggccgcagggagctcaacacccgaactgttcgctagcgtcatcggcgtgtttatcacacatggcgatgtcggagtcggaacgattgtcggaagtgcagtgtttaatattttgtgtataatcggtgtttgcggcctgtttgccggtcaggtggtgaggctcacctggtgggccgtctgcagagattccgtgtattatacaataagtgttatcgtgctgattgtctttatatatgacgagcagatagtgtggtgggaggggctggtgctgattatattatacgtattctacatcttaattatgaagtataacgtgaaaatgcaagcttttttcaccgtcaaacagaagtccatcgccaatggcaaccccgtaaattcagaactggaagcggtgaaggagaagcctcagtacggaaagaatccagtcgtaatggtcgatgaaatcatgagcagcagccccccaaaattcacgtttccagaagctggcctaaggattatgattacaaacaagtttggccctaggacccgtctaaggatggcctcgcggattattatcaacgagagacagaggctgataaactctgctaatggggtgtcttcaaagccactccagaacggcaggcacgagaacattgagaatggaaacgtgcctgttgaaaacccagaagatcctcaacagaaccaggagcagcaaccgcctccacagccaccaccgccagaaccagagcctgttgaggcagatttccttagtccattctcagttccagaggccaggggggacaaggtaaagtgggtcttcacctggcccctgattttcttgttatgcgtgaccattcctaattgttctaaacccagatgggagaaatttttcatggtgacattcataaccgccaccctttggatcgctgtgttctcctatatcatggtctggcttgtcactattatcggctatacgctaggtatccctgatgtgatcatgggcatcacatttctggcagcagggaccagcgtgccggattgcatggcgagtctgattgtggctcggcagggattaggtgatatggcagtctctaataccattggctcaaacgtctttgatatcctggtgggccttggtgtgccttggggattacagacaatggtggttaattacggttcaacagtgaaaatcaactcgaggggccttgtgtattccgtggtcctcctcctgggctctgtggcgctgactgtcttgggcattcacctcaacaagtggagactggatcggaagctgggcgtctacgtgctcgtcctatacgccattttcctgtgtttctctatcatgattgagtttaacgtgttcactttcgtaaatctcccaatgtgtcgggaggatgattag

SEQ ID NO: 246451 - DNA, 4408 bp, Artificial Sequence
  derived and/or modified sequence
ctcaaagttcgcaggaggcgagagatgctgccgcagcaagtcggcttcgtgtgcgcggtgctggccctggtgtgctgtgcgtccggcctcttcggcagcttggggcacaaaacagcttctgctagcaaacgtgtcctgccagacacgtggagaaatagaaagttgatggccccagtgaatgggacacagacagccaagaactgcacagatcctgcgattcacgagttccccacagatctgttctccaataaggagcgacagcacggagccgtcctgctgcacatccttggtgctctgtatatgttctatgccttggccatagtgtgcgatgacttctttgttccgtctctagagaagatctgtgagagactccatctgagcgaagatgtggctggagccaccttcatggctgcaggaagctcaacgccagagctgtttgcgtctgttattggggtgttcatcacccatggggacgtcggggtgggcaccatcgtgggctctgctgtgttcaacatcctgtgcataattggagtgtgcggactgtttgctggccaggtggtccgtctgacgtggtgggccgtgtgccgagactccgtgtactacaccatctctgtcatcgtgctcatcgtgttcatatatgatgaacaaattgtgtggtgggaaggcctggtgctcatcatcttgtatgtgttttatattctgatcatgaagtacaatgtgaagatgcaagcctttttcacagtcaaacaaaagagcattgcaaacggtaacccggtcaacagtgagctggaggctgtgaaggagaagccacagtatggcaagaaccccgtggtgatggtggacgagattatgagctccagccctcccaagttcaccttccctgaagcaggcttacgaatcatgatcaccaataagtttggacccaggacccgactacggatggccagcaggatcatcattaatgagcggcagagactgatcaactcggccaatggtgtgagcagtaagccgcttcaaaacgggaggcacgagaacattgagaacgggaatgttcctgtggaaaaccccgaagaccctcagcagaatcaggagcagcagccgccgccacagccaccaccgccagagccagagccggtggaggctgacttcctgtcccccttctccgtgccggaggccagaggggacaaggtcaagtgggtgttcacctggcccctcatcttcctcctgtgcgtcaccattcccaactgcagcaagccccgctgggagaagttcttcatggtcaccttcatcaccgccacgctgtggatcgctgtgttctcctacatcatggtgtggctggtgactattatcggatacacacttgggatcccggatgtcatcatgggcattactttcctggcagcagggacaagtgttccagactgcatggccagcctaattgtggcgagacaaggccttggggacatggcagtctccaacaccataggaagcaacgtgtttgacatcctggtaggacttggtgtaccgtggggcctgcagaccatggttgttaattatggatcaacagtgaagatcaacagccgggggctggtctattccgtggtcctgttgctgggctctgtcgctctcaccgtcctcggcatccacctaaacaagtggcgactggaccggaagctgggtgtctacgtgctggttctctacgccatcttcttgtgcttctccataatgatagagtttaacgtctttaccttcgtcaacttgccgatgtgccgggaagacgattagcgctgagtcgcggcccctgggagctgatctggacaccctgtgacactggcgttctcctctcccctccttcccccaccacaggtctctcctgcataggcagccactgtccgttctttcacacactggaaggaagagccatcgtggtctttgtctggccacaggccaggctgctgggcatcctcctcctccttggagttccgcccctgcaaggctggatttgggggccattatctgagcagcttcaaagacccctgagctgccaaccacggagatgtgccaagcatctcatctctcctgcacactttagtcagaaggacttctgcatgcagtttgtctttctgttctgcaggcagcttcagaattgaggtcatttgtgagcacaagatctcatagggcaggtgcaaaataggaatgttgttctcaagtgtcacctccagcccagaggtggttccttaggcagcatgtgctcctgggagcctctgacttttgctggaagcagccacagtttggaaggggcaagacctcaacctgttggggtttagggcccatgatggcagacattctaccccttttcctggaaaaactggaagaatgaaaataatttttttctgtggaagagagaaaatgagtgaatattcttctcacttttattgatgcattcagagaataagcaatgaaatattaaaaaatgaaacatcatataggtcatcatacttgaaaattatcattccatatgaaaggatcatgatacacaccaaaaaagtaatgatcgtaaagacacaaatcctctgtatgccatcttgcattggcactgaggtgtttggtttggaatagggaaaaaggtaagagactaacgtggaaaggtgctaactcagagactggagattatagtttacagctgtactttccagatcttctatgtgacacaatgcactgtccttgtgggtttgtcatttattggttaatgctctagtttcaaaaccaccctgttgaaagttccagttatttatatgcccaacaaatttcatagcctgctgaactgaactgagtgtgtcagaagtgctggttaatgacgagaagagattgcctgaaaaacaacaaactgctttctggttagctgaaggcaagtgtgaaaatcagaatttagaatatttagagctaagcttctggaaccacgtagtttctacacgtggcaggccaagaatgggaggctgactcaaaactagatagaaaaatataaaataatcttcgaccacttgatagctctcaaatatatatttaaaagatttatgaatacaaaccatttatggtttatgatttctaaaaagaaagcacaattaattttatagagaggttttttatttttttaatatttctattgcaaaagtctatccgatttgatgcactttgaatattgagatattttgcacggatgaatgtatgggaactacccatgatgatgtaagaggaaagaacatttttttgtgattcaccagacatcactttaaacttggtgatgagtttaaatccagtagctaatcccttcctgagactcaaagatcgtgacgctggttggaatttctgactgtgccctttagggcctcctgagtttcaaaaggaggaagtgttcgtgcttgtgtccctgaagttccctgttgcatgagcctgcgacaggacctcacccccaccaccaggcttctatttgggattcacatcagtattagtatcgtagctacaccaagttcaggcttctctttttgtttttttacctagaaattgggctcagtggtcttcaacttgaggacgagggtgattttcctaagaaatcagcaaagagggaaggcagggcccctgtagattcaccagtataaacttcagctgcagggattccagagccctcgggaccactctgtcaccttaatagccaagttctcctggttcctccgatcttacaggctcatccaggttccaaagtgcttctgtctctgttttgattctccaaactgctctgtgatgtatgtagggattattctccccacttaacagaaagtagtgtcttggagaggtcaagggtctctagttcaatggccagtcatagcagaagggaggccaagcaccagtccatcacccctcccaggccagcctctgtaagttggccacacttggggagtgagtgtgggtatgactttaccctcctggttggttcttactgtttgagtcaaaacctcatcaatatatcattgactcctgggttcctcaggtcatttcctaatatctgtccctatccaatgcctctattttatcttgaaaaaaggaccaaaaattatttttagctatggcaaggcacaggccacatggcccctgatggcgtccctgctggttttcaattctctgaagccttgtgtagctttcagagcacacgtatcctaattaccctcctcttcctcagcagaacccatttgagattctaaatgaatactcttagtctctaaagttgcagttagaaactaaaataatgttttttaatatgtaatatgctcctcttggctaattttcttttgactttaatgtgccaatgtaacttcctttaaaggatctatgcatttattaaatctggaaaact

SEQ ID NO: 246452 - DNA, 4531 bp, Artificial Sequence
  derived and/or modified sequence
agagagaaagttcccggggagagctcgcccctgggagggccgacgtcgagcctgctcgccgcgagggtctcagagacggcacccaggcgctccgggatggcgctccgcgggaccctccggccgctcaaagttcgcaggaggcgagagatgctgccgcagcaagtcggcttcgtgtgcgcggtgctggccctggtgtgctgtgcgtccggcctcttcggcagcttggggcacaaaacagcttctgctagcaaacgtgtcctgccagacacgtggagaaatagaaagttgatggccccagtgaatgggacacagacagccaagaactgcacagatcctgcgattcacgagttccccacagatctgttctccaataaggagcgacagcacggagccgtcctgctgcacatccttggtgctctgtatatgttctatgccttggccatagtgtgcgatgacttctttgttccgtctctagagaagatctgtgagagactccatctgagcgaagatgtggctggagccaccttcatggctgcaggaagctcaacgccagagctgtttgcgtctgttattggggtgttcatcacccatggggacgtcggggtgggcaccatcgtgggctctgctgtgttcaacatcctgtgcataattggagtgtgcggactgtttgctggccaggtggtccgtctgacgtggtgggccgtgtgccgagactccgtgtactacaccatctctgtcatcgtgctcatcgtgttcatatatgatgaacaaattgtgtggtgggaaggcctggtgctcatcatcttgtatgtgttttatattctgatcatgaagtacaatgtgaagatgcaagcctttttcacagtcaaacaaaagagcattgcaaacggtaacccggtcaacagtgagctggaggctgtgaaggagaagccacagtatggcaagaaccccgtggtgatggtggacgagattatgagctccagccctcccaagttcaccttccctgaagcaggcttacgaatcatgatcaccaataagtttggacccaggacccgactacggatggccagcaggatcatcattaatgagcggcagagactgatcaactcggccaatggtgtgagcagtaagccgcttcaaaacgggaggcacgagaacattgagaacgggaatgttcctgtggaaaaccccgaagaccctcagcagaatcaggagcagcagccgccgccacagccaccaccgccagagccagagccggtggaggctgacttcctgtcccccttctccgtgccggaggccagaggggacaaggtcaagtgggtgttcacctggcccctcatcttcctcctgtgcgtcaccattcccaactgcagcaagccccgctgggagaagttcttcatggtcaccttcatcaccgccacgctgtggatcgctgtgttctcctacatcatggtgtggctggtgactattatcggatacacacttgggatcccggatgtcatcatgggcattactttcctggcagcagggacaagtgttccagactgcatggccagcctaattgtggcgagacaaggccttggggacatggcagtctccaacaccataggaagcaacgtgtttgacatcctggtaggacttggtgtaccgtggggcctgcagaccatggttgttaattatggatcaacagtgaagatcaacagccgggggctggtctattccgtggtcctgttgctgggctctgtcgctctcaccgtcctcggcatccacctaaacaagtggcgactggaccggaagctgggtgtctacgtgctggttctctacgccatcttcttgtgcttctccataatgatagagtttaacgtctttaccttcgtcaacttgccgatgtgccgggaagacgattagcgctgagtcgcggcccctgggagctgatctggacaccctgtgacactggcgttctcctctcccctccttcccccaccacaggtctctcctgcataggcagccactgtccgttctttcacacactggaaggaagagccatcgtggtctttgtctggccacaggccaggctgctgggcatcctcctcctccttggagttccgcccctgcaaggctggatttgggggccattatctgagcagcttcaaagacccctgagctgccaaccacggagatgtgccaagcatctcatctctcctgcacactttagtcagaaggacttctgcatgcagtttgtctttctgttctgcaggcagcttcagaattgaggtcatttgtgagcacaagatctcatagggcaggtgcaaaataggaatgttgttctcaagtgtcacctccagcccagaggtggttccttaggcagcatgtgctcctgggagcctctgacttttgctggaagcagccacagtttggaaggggcaagacctcaacctgttggggtttagggcccatgatggcagacattctaccccttttcctggaaaaactggaagaatgaaaataatttttttctgtggaagagagaaaatgagtgaatattcttctcacttttattgatgcattcagagaataagcaatgaaatattaaaaaatgaaacatcatataggtcatcatacttgaaaattatcattccatatgaaaggatcatgatacacaccaaaaaagtaatgatcgtaaagacacaaatcctctgtatgccatcttgcattggcactgaggtgtttggtttggaatagggaaaaaggtaagagactaacgtggaaaggtgctaactcagagactggagattatagtttacagctgtactttccagatcttctatgtgacacaatgcactgtccttgtgggtttgtcatttattggttaatgctctagtttcaaaaccaccctgttgaaagttccagttatttatatgcccaacaaatttcatagcctgctgaactgaactgagtgtgtcagaagtgctggttaatgacgagaagagattgcctgaaaaacaacaaactgctttctggttagctgaaggcaagtgtgaaaatcagaatttagaatatttagagctaagcttctggaaccacgtagtttctacacgtggcaggccaagaatgggaggctgactcaaaactagatagaaaaatataaaataatcttcgaccacttgatagctctcaaatatatatttaaaagatttatgaatacaaaccatttatggtttatgatttctaaaaagaaagcacaattaattttatagagaggttttttatttttttaatatttctattgcaaaagtctatccgatttgatgcactttgaatattgagatattttgcacggatgaatgtatgggaactacccatgatgatgtaagaggaaagaacatttttttgtgattcaccagacatcactttaaacttggtgatgagtttaaatccagtagctaatcccttcctgagactcaaagatcgtgacgctggttggaatttctgactgtgccctttagggcctcctgagtttcaaaaggaggaagtgttcgtgcttgtgtccctgaagttccctgttgcatgagcctgcgacaggacctcacccccaccaccaggcttctatttgggattcacatcagtattagtatcgtagctacaccaagttcaggcttctctttttgtttttttacctagaaattgggctcagtggtcttcaacttgaggacgagggtgattttcctaagaaatcagcaaagagggaaggcagggcccctgtagattcaccagtataaacttcagctgcagggattccagagccctcgggaccactctgtcaccttaatagccaagttctcctggttcctccgatcttacaggctcatccaggttccaaagtgcttctgtctctgttttgattctccaaactgctctgtgatgtatgtagggattattctccccacttaacagaaagtagtgtcttggagaggtcaagggtctctagttcaatggccagtcatagcagaagggaggccaagcaccagtccatcacccctcccaggccagcctctgtaagttggccacacttggggagtgagtgtgggtatgactttaccctcctggttggttcttactgtttgagtcaaaacctcatcaatatatcattgactcctgggttcctcaggtcatttcctaatatctgtccctatccaatgcctctattttatcttgaaaaaaggaccaaaaattatttttagctatggcaaggcacaggccacatggcccctgatggcgtccctgctggttttcaattctctgaagccttgtgtagctttcagagcacacgtatcctaattaccctcctcttcctcagcagaacccatttgagattctaaatgaatactcttagtctctaaagttgcagttagaaactaaaataatgttttttaatatgtaatatgctcctcttggctaattttcttttgactttaatgtgccaatgtaacttcctttaaaggatctatgcatttattaaatctggaaaact

SEQ ID NO: 246453 - DNA, 1677 bp, Artificial Sequence
  derived and/or modified sequence
atggcccccgtgaacggcacccagaccgccaagaactgcaccgaccccgccatccacgagttccccaccgacctgttcagcaacaaggagagacagcacggcgccgtgctgctgcacatcctgggcgccctgtacatgttctacgccctggccatcgtgtgcgacgacttcttcgtgcccagcctggagaagatctgcgagagactgcacctgagcgaggacgtggccggcgccaccttcatggccgccggcagcagcacccccgagctgttcgccagcgtgatcggcgtgttcatcacccacggcgacgtgggcgtgggcaccatcgtgggcagcgccgtgttcaacatcctgtgcatcatcggcgtgtgcggcctgttcgccggccaggtggtgagactgacctggtgggccgtgtgcagagacagcgtgtactacaccatcagcgtgatcgtgctgatcgtgttcatctacgacgagcagatcgtgtggtgggagggcctggtgctgatcatcctgtacgtgttctacatcctgatcatgaagtacaacgtgaagatgcaggccttcttcaccgtgaagcagaagagcatcgccaacggcaaccccgtgaacagcgagctggaggccggcaacgacttctacgacggcagctacgacgaccccagcgtgcccctgctgggccaggtgaaggagaagccccagtacggcaagaaccccgtggtgatggtggacgagatcatgagcagcagcccccccaagttcaccttccccgaggccggcctgagaatcatgatcaccaacaagttcggccccagaaccagactgagaatggccagcagaatcatcatcaacgagagacagagactgatcaacagcgccaacggcgtgagcagcaagcccctgcagaacggcagacacgagaacatcgagaacggcaacgtgcccgtggagaaccccgaggacccccagcagaaccaggagcagcagccccccccccagccccccccccccgagcccgagcccgtggaggccgacttcctgagccccttcagcgtgcccgaggccagaggcgacaaggtgaagtgggtgttcacctggcccctgatcttcctgctgtgcgtgaccatccccaactgcagcaagcccagatgggagaagttcttcatggtgaccttcatcaccgccaccctgtggatcgccgtgttcagctacatcatggtgtggctggtgaccatcatcggctacaccctgggcatccccgacgtgatcatgggcatcaccttcctggccgccggcaccagcgtgcccgactgcatggccagcctgatcgtggccagacagggcctgggcgacatggccgtgagcaacaccatcggcagcaacgtgttcgacatcctggtgggcctgggcgtgccctggggcctgcagaccatggtggtgaactacggcagcaccgtgaagatcaacagcagaggcctggtgtacagcgtggtgctgctgctgggcagcgtggccctgaccgtgctgggcatccacctgaacaagtggagactggacagaaagctgggcgtgtacgtgctggtgctgtacgccatcttcctgtgcttcagcatcatgatcgagttcaacgtgttcaccttcgtgaacctgcccatgtgcagagaggacgactag

SEQ ID NO: 246454 - DNA, 1677 bp, Artificial Sequence
  derived and/or modified sequence
atggctcctgtgaatggtacccagacagcaaagaattgcacagatcccgcaattcacgaattcccaacggacctcttttctaataaggagaggcagcacggggccgtgttactccatatcctgggcgctctttacatgttttatgccttagctattgtgtgtgacgactttttcgtgccgagcctcgaaaaaatttgcgagaggctgcatcttagcgaggacgtagccggagccacctttatggccgccggatcctcaacccctgagctgttcgctagcgtcattggggtttttataacccacggagacgttggggtgggcacaatagtgggaagcgcagtattcaacattctgtgtattataggcgtctgtggcctcttcgccggccaggtggttcgcctcacatggtgggcagtgtgtcgagatagcgtctactacaccatttcagttattgtcctgatcgtgtttatctatgatgagcagattgtttggtgggagggcctcgtactgattatactgtatgtcttttatattctcatcatgaagtacaatgtgaaaatgcaggcctttttcactgtcaaacagaaatccattgccaacgggaatccggtgaatagcgagcttgaagcaggaaacgatttttatgacggcagttacgacgatccctcagtacccctactgggacaggtaaaagaaaaaccccagtacggcaaaaaccctgtggtgatggtggatgagataatgtcatccagcccccctaagtttaccttcccggaggccggtctgaggattatgattaccaacaaattcgggccacgcaccagactcaggatggcttccagaattatcatcaatgaacggcaacgtctgattaattcagccaacggggtttcctcaaaaccactccaaaatggcagacacgagaatattgagaatggcaatgtgccagtcgagaatcccgaggaccctcagcagaatcaggagcaacagccaccgccccagccccctccccccgagccagagcctgtcgaggccgactttcttagtcctttctctgtgccagaagctcggggtgataaggtcaagtgggtttttacctggcctctgatctttctcctttgtgtgaccataccgaattgttcgaagccacgttgggagaagttttttatggtgacctttataacagcaacattatggattgcagtcttctcttatattatggtctggctggtcaccatcataggatacacactaggtattcctgatgtgattatgggcatcacatttctcgccgccggaacaagtgtgcccgactgcatggcttcccttatcgtagccagacaggggctgggagacatggcagtttcaaacaccattggttccaacgtgtttgacatcctagtgggtctaggcgtaccctgggggctacaaacaatggtggtcaactacggatcaactgtgaaaataaattcacgtggactggtttacagcgtagtgttgttgctaggctctgtagccctcacggtcctcggcattcacctcaacaagtggcggttggatcgcaaattgggcgtgtatgtcctggtactgtatgccatcttcctctgcttttcaataatgatcgagtttaacgtcttcaccttcgtgaacctgcctatgtgtagagaagacgactag

SEQ ID NO: 246455 - DNA, 1677 bp, Artificial Sequence
  derived and/or modified sequence
atggcccctgtgaatggcacccagacagccaagaactgcacagatcctgccatccacgagttccccacagacctcttcagcaacaaggagcggcagcacggggctgtgctgctgcacatcctgggcgccctgtacatgttctacgccctggccatcgtgtgtgatgacttctttgtgcccagcctggagaagatctgtgagcggctgcacctgtctgaagatgtggccggggccaccttcatggctgctggcagcagcaccccagagctgtttgcctctgtgattggagtcttcatcacccatggagatgtgggcgtgggcaccatcgtgggcagcgctgtgttcaacatcctgtgcatcattggagtgtgtggcctgtttgctggccaggtggtgcggctgacctggtgggccgtgtgccgggacagcgtgtactacaccatctctgtgattgtgctgattgtgttcatctatgatgagcagatcgtgtggtgggagggcctggtgctgatcatcctgtatgtgttctacatcctgatcatgaagtacaacgtgaagatgcaggccttcttcaccgtgaagcagaagagcatcgccaacggcaaccctgtgaacagcgagctggaggccggaaatgacttctatgatggcagctatgatgaccccagcgtgcccctgctgggccaggtgaaggagaagccccagtatggcaagaaccctgtggtgatggtggatgagatcatgagcagcagcccccccaagttcaccttccctgaggccggcctgcgcatcatgatcaccaacaagtttggccccaggacccggctgaggatggccagccgcatcatcatcaatgaaaggcagaggctcatcaacagcgccaatggagtgagcagcaagcccctgcagaatggaagacatgagaacattgaaaatggaaatgtgcctgtggagaaccctgaggacccccagcagaaccaggagcagcagcccccaccccagcccccacctcctgagcctgagcctgtggaggccgacttcctgagccccttctctgtgcctgaggcccggggggacaaggtgaagtgggtgttcacctggcccctcatcttcctgctgtgtgtgaccatccccaactgcagcaagccccgctgggagaagttcttcatggtgaccttcatcacagccaccctgtggattgctgtgttctcctacatcatggtgtggctggtgaccatcatcggctacaccctgggcatcccagatgtgatcatgggcatcaccttcctggccgccggcacctctgtgcctgactgcatggccagcctcatcgtggcccggcagggcctgggggacatggctgtgagcaacaccatcggcagcaatgtgtttgacatcctggtgggcctgggcgtgccctggggcctgcagaccatggtggtgaactacggcagcacagtgaagatcaacagccggggcctggtgtacagcgtggtgctgctgctgggctctgtggccctgactgtgctgggcatccacctgaacaagtggaggctggacaggaagctgggcgtgtatgtgctggtgctgtatgccatcttcctgtgcttcagcatcatgattgagttcaacgtgttcacctttgtgaacctgcccatgtgccgggaggatgactag

SEQ ID NO: 246456 - DNA, 1677 bp, Artificial Sequence
  derived and/or modified sequence
atggcccccgtgaacggcacccagaccgccaagaactgcaccgacccagcaatccatgaattccccactgacctcttctccaacaaggagagacagcacggcgccgtgctgctgcacatactcggcgcgctgtatatgttttacgctctcgccatagtctgcgacgacttttttgtgccttcccttgagaaaatctgcgagagattgcatctctccgaggacgtcgcgggggccaccttcatggccgcagggagtagtacccctgaacttttcgctagcgttatcggggtctttattactcacggagatgtgggagtcgggacaatagtggggtctgcagtgtttaacatactgtgcattataggcgtttgcggcctcttcgctggtcaagtagtgagactcacatggtgggcagtatgccgcgacagtgtgtactacacaatatccgtgatcgtccttatcgtctttatttatgacgaacagattgtgtggtgggagggactggttctcataatcctgtatgtattctatattcttataatgaagtacaatgtgaaaatgcaggctttttttaccgtgaaacaaaagagcatagctaatggaaatccagtcaacagcgagcttgaagcaggcaacgatttctatgacgggtcttacgacgatccgagcgtcccgctcctcgggcaggtcaaggaaaagcctcagtatggaaaaaacccagttgtcatggtggatgagatcatgagcagcagtccaccaaagtttaccttcccagaggcaggcctgcggatcatgatcaccaacaagtttggacctcgcactagacttaggatggccagcaggatcattataaatgaaaggcagcgacttattaattcggctaatggcgtgtcatcgaagcccttacagaatggccgtcatgagaatattgaaaacgggaatgtacccgtggaaaatccggaggacccacagcagaaccaggaacagcagccaccaccacagcccccgcctcctgagccagagcccgtagaggccgatttcctgagcccctttagcgtgcccgaggccagaggcgacaaggtgaaatgggtattcacatggccccttatcttcctgctgtgcgttaccatccccaactgctccaagcctcggtgggaaaagttttttatggttaccttcattactgccaccctgtggatcgctgttttctcgtatattatggtgtggcttgttaccataattggctatactctggggatcccggacgtgattatgggtattacattcctcgccgccgggacctccgtgcccgattgtatggcatccctgattgtcgctcgccagggcctcggagacatggcggtgagcaacactatcggaagcaacgtcttcgacatcctagtgggcctcggagtgccttgggggctgcagaccatggtagtcaactatggatcaacggtgaagattaactcgcgcggccttgtttacagtgtagtgctcctactgggttcagtggctctaaccgtactcggaattcatttgaacaaatggcgattggatagaaaattgggcgtatatgtgctggtgctttatgcgatcttcttatgcttctctatcatgattgagtttaatgtcttcacttttgtgaatcttcccatgtgtagagaggatgactag

SEQ ID NO: 246457 - DNA, 1677 bp, Artificial Sequence
  derived and/or modified sequence
atggctcccgtgaacgggactcagaccgccaagaactgtaccgatccagccatccatgaattcccaaccgacctcttctctaacaaagagcggcagcatggagctgtgctgcttcacattttaggggcactctacatgttttatgctctggcaatcgtgtgtgatgacttttttgttccctctctggaaaaaatttgtgagcggctgcacctctctgaggatgtggcaggggcaacattcatggctgccggatcttccacaccagagctgttcgcgtcagtcatcggggtgttcatcactcatggggatgtgggtgttgggaccatcgtaggctccgccgtgtttaatattctctgcatcatcggagtttgcgggctgttcgctggacaggttgtccgcctgacatggtgggccgtctgtcgggacagcgtctactatacaataagtgtgattgtattgatagtcttcatctacgatgaacagattgtttggtgggaagggctagtcttgatcattctctatgtcttttacattttgatcatgaaatataacgtcaaaatgcaggcgtttttcactgtgaagcagaagtctatcgctaatggcaatcctgttaattcagaactagaagcgggaaatgacttctatgacggatcttatgatgatccctcagtacccttactggggcaggtgaaggagaaaccacagtacggcaaaaatccagtcgtgatggtcgacgaaataatgtcgtcgagccctccaaagtttactttccctgaagcgggtctccgcatcatgattaccaacaagttcggcccaaggaccagactgcgcatggctagtaggatcatcattaatgaacgccagcgtctgatcaactcggctaacggggtcagctcaaaacccctacaaaacggaagacatgagaacattgaaaacggtaacgttccagtcgaaaatccagaagacccccagcaaaatcaagagcagcagcctcctccacaaccgcctccacctgaacctgaaccggtggaggccgactttttgagccccttctccgtgccagaagcacgcggtgataaggtcaagtgggtctttacctggccactgatatttctcctgtgcgtgactattccaaactgtagcaagccccgttgggaaaaattttttatggttacgttcatcactgccaccctgtggatagctgtgtttagctacatcatggtctggctggtgacaatcatagggtacaccctgggaattccagacgtgattatgggcatcacttttctggctgctgggaccagcgtgccagactgtatggcctctttaattgtcgcccgtcagggccttggcgacatggcggtgtctaataccattggaagtaacgttttcgacattctggtgggcctgggagtgccatgggggctgcagacaatggtggtaaattatggtagcaccgtgaaaattaactcaagaggactggtgtactcagtcgtgcttctgctaggaagcgtcgctcttaccgtactcgggatacacctgaataaatggcggcttgaccggaagctcggcgtgtatgtgttggtactttatgccatcttcctctgtttttccataatgatcgaatttaacgtctttacttttgtgaacctccccatgtgtcgggaagacgactag

SEQ ID NO: 246458 - protein, 224 aa, Artificial Sequence
  derived and/or modified sequence
MAGITTIEAVKRKIQVLQQQADDAEERAERLQREVEGERRAREQRLATALQKLEEAEKAADESERGMKVIENRALKDEEKMELQEIQLKEAKHIAEEADRKYEEVARKLVIIEGDLERTEERAELAESRCREMDEQIRLMDQNLKCLSAAEEKYSQKEDKYEEEIKILTDKLKEAETRAEFAERSVAKLEKTIDDLEDKLKCTKEEHLCTQRMLDQTLLDLNEM

SEQ ID NO: 246459 - protein, 248 aa, Artificial Sequence
  derived and/or modified sequence
MAGITTIEAVKRKIQVLQQQADDAEERAERLQREVEGERRAREQAEAEVASLNRRIQLVEEELDRAQERLATALQKLEEAEKAADESERGMKVIENRALKDEEKMELQEIQLKEAKHIAEEADRKYEEVARKLVIIEGDLERTEERAELAESRCREMDEQIRLMDQNLKCLSAAEEKYSQKEDKYEEEIKILTDKLKEAETRAEFAERSVAKLEKTIDDLEDKLKCTKEEHLCTQRMLDQTLLDLNEM

SEQ ID NO: 246460 - DNA, 675 bp, Artificial Sequence
  derived and/or modified sequence
atggccggcatcaccaccatcgaggccgtgaagagaaagatccaggtgctgcagcagcaggccgacgacgccgaggagagagccgagagactgcagagagaggtggagggcgagagaagagccagagagcagagactggccaccgccctgcagaagctggaggaggccgagaaggccgccgacgagagcgagagaggcatgaaggtgatcgagaacagagccctgaaggacgaggagaagatggagctgcaggagatccagctgaaggaggccaagcacatcgccgaggaggccgacagaaagtacgaggaggtggccagaaagctggtgatcatcgagggcgacctggagagaaccgaggagagagccgagctggccgagagcagatgcagagagatggacgagcagatcagactgatggaccagaacctgaagtgcctgagcgccgccgaggagaagtacagccagaaggaggacaagtacgaggaggagatcaagatcctgaccgacaagctgaaggaggccgagaccagagccgagttcgccgagagaagcgtggccaagctggagaagaccatcgacgacctggaggacaagctgaagtgcaccaaggaggagcacctgtgcacccagagaatgctggaccagaccctgctggacctgaacgagatgtag

SEQ ID NO: 246461 - DNA, 747 bp, Artificial Sequence
  derived and/or modified sequence
atggccggcatcaccaccatcgaggccgtgaagagaaagatccaggtgctgcagcagcaggccgacgacgccgaggagagagccgagagactgcagagagaggtggagggcgagagaagagccagagagcaggccgaggccgaggtggccagcctgaacagaagaatccagctggtggaggaggagctggacagagcccaggagagactggccaccgccctgcagaagctggaggaggccgagaaggccgccgacgagagcgagagaggcatgaaggtgatcgagaacagagccctgaaggacgaggagaagatggagctgcaggagatccagctgaaggaggccaagcacatcgccgaggaggccgacagaaagtacgaggaggtggccagaaagctggtgatcatcgagggcgacctggagagaaccgaggagagagccgagctggccgagagcagatgcagagagatggacgagcagatcagactgatggaccagaacctgaagtgcctgagcgccgccgaggagaagtacagccagaaggaggacaagtacgaggaggagatcaagatcctgaccgacaagctgaaggaggccgagaccagagccgagttcgccgagagaagcgtggccaagctggagaagaccatcgacgacctggaggacaagctgaagtgcaccaaggaggagcacctgtgcacccagagaatgctggaccagaccctgctggacctgaacgagatgtag

SEQ ID NO: 246462 - DNA, 675 bp, Artificial Sequence
  derived and/or modified sequence
atggcaggcattaccaccatagaggctgtgaaaaggaagatacaggttctgcaacaacaggccgacgacgctgaggagagagctgaaagattgcaacgcgaagtggagggcgaacgaagagcgcgcgagcagcgactggccaccgcccttcaaaagttagaggaggctgaaaaggcagctgatgagtctgagcgcggaatgaaggttatagagaaccgggctctgaaggatgaggagaaaatggagctacaggaaatccagttgaaggaggcaaaacatatcgctgaggaagctgacagaaagtacgaggaggtagcacgaaagctcgtcatcattgagggagatctggagagaacagaagaacgcgctgaactggcagagtctcggtgcagggagatggatgagcagatccgacttatggaccaaaaccttaaatgtctttctgccgctgaggaaaaatactcccaaaaagaggataaatatgaggaagagatcaaaatactcactgataagctgaaagaagccgaaaccagggctgagtttgcagaacggtccgtggctaaactggaaaaaactattgacgacttagaggataaacttaaatgcacaaaggaagaacacctttgtacccagagaatgttagaccagaccctgctggacctcaacgagatgtag

SEQ ID NO: 246463 - DNA, 747 bp, Artificial Sequence
  derived and/or modified sequence
atggcgggcataacaaccatcgaagcggtcaaaaggaagatacaggtccttcagcagcaggcggacgacgccgaggaaagagctgagaggcttcaacgagaagtcgagggggaaagacgtgcacgcgagcaggctgaagcagaggtagcatccctcaaccggaggattcagctggtggaagaagagcttgatcgagctcaggaaaggctggccaccgcgctgcaaaagcttgaggaggcggagaaggcagctgacgaatcagagaggggtatgaaagtgatcgagaaccgggcactcaaggacgaagagaagatggaacttcaggaaatccagttaaaggaggctaaacatatagccgaggaggcagacaggaaatatgaggaggtcgccagaaagctcgtcattatcgagggcgaccttgagaggaccgaagagcgggcagaactcgccgagtctagatgcagagagatggatgaacagattaggttaatggaccagaatctgaaatgcctatccgcggcggaagagaagtacagccagaaagaggataaatacgaggaggagatcaagattctgaccgacaagctgaaagaggctgagacacgggccgagttcgctgagagatccgttgcaaaattagaaaagacaattgacgatctagaggataagttaaagtgtaccaaagaggaacacctctgcactcagcggatgctggatcaaaccctcctggatctcaatgagatgtag

SEQ ID NO: 246464 - DNA, 675 bp, Artificial Sequence
  derived and/or modified sequence
atggccggcatcaccaccattgaagctgtgaagaggaagatccaggtgctgcagcagcaggctgatgatgctgaggagcgggcagagcggctgcagcgggaggtggagggggagcggcgggcccgggagcagaggctggccacagccctgcagaagctggaggaggccgagaaggccgcagatgaaagtgagcggggcatgaaggtgattgaaaatagagccctgaaggatgaggagaagatggagctgcaggagatccagctgaaggaggccaagcacatcgccgaggaggccgacagaaaatatgaggaggtggccaggaagctggtgatcatcgagggggacctggagaggacagaggagagagctgagctggccgagagccgctgccgggagatggatgagcagatccggctgatggaccagaacctgaagtgcctgtctgctgctgaggagaagtacagccagaaggaggacaagtatgaggaggagatcaagatcctgacagacaagctgaaggaggccgagaccagggctgagtttgctgagaggtctgtggccaagctggagaagaccattgatgacctggaggacaagctgaagtgcaccaaggaggagcacctgtgcacccagaggatgctggaccagaccctgctggacctgaatgagatgtag

SEQ ID NO: 246465 - DNA, 747 bp, Artificial Sequence
  derived and/or modified sequence
atggccggcatcaccaccattgaagctgtgaagaggaagatccaggtgctgcagcagcaggctgatgatgctgaggagcgggcagagcggctgcagcgggaggtggagggggagcggcgggcccgggagcaggccgaggccgaggtggccagcctgaacagacgcatccagctggtggaggaggagctggaccgggcccaggagcggctggccacagccctgcagaagctggaggaggccgagaaggccgcagatgaaagtgagcggggcatgaaggtgattgaaaatagagccctgaaggatgaggagaagatggagctgcaggagatccagctgaaggaggccaagcacatcgccgaggaggccgacagaaaatatgaggaggtggccaggaagctggtgatcatcgagggggacctggagaggacagaggagagagctgagctggccgagagccgctgccgggagatggatgagcagatccggctgatggaccagaacctgaagtgcctgtctgctgctgaggagaagtacagccagaaggaggacaagtatgaggaggagatcaagatcctgacagacaagctgaaggaggccgagaccagggctgagtttgctgagaggtctgtggccaagctggagaagaccattgatgacctggaggacaagctgaagtgcaccaaggaggagcacctgtgcacccagaggatgctggaccagaccctgctggacctgaatgagatgtag

SEQ ID NO: 246466 - DNA, 675 bp, Artificial Sequence
  derived and/or modified sequence
atggccggcatcaccaccatcgaggccgtgaagcggaagatccaggtgctgcagcagcaggccgacgacgcagaggaaagggccgagaggctgcagcgcgaagtagaaggcgagcgcagggccagagaacagagactggccacggcgttgcagaaactcgaagaggccgagaaggcggcggatgagtccgaaaggggcatgaaggtgatcgaaaaccgtgccctcaaggacgaagagaaaatggaactccaggagatccagttgaaagaggccaagcatatagccgaggaagccgatcgcaagtatgaggaagtggccaggaagttagtgatcatcgagggggacctggaacgaactgaggaaagagcggaattggctgaaagccgctgtagagaaatggacgagcagattagactcatggatcagaacctcaagtgccttagcgccgctgaggaaaagtactcacagaaggaggataaatacgaggaagaaatcaagatactgactgacaagctcaaggaggccgagactagggccgagtttgcggagaggtctgtggcaaagctggaaaagacaatcgatgacctagaggataagctgaaatgtacgaaagaggagcacctttgcacacagcgcatgttagaccagacgctgctagatctcaatgaaatgtag

SEQ ID NO: 246467 - DNA, 747 bp, Artificial Sequence
  derived and/or modified sequence
atggccggcatcaccaccatcgaggccgtgaagcggaagatccaggttctgcagcagcaggccgacgatgctgaggagcgggctgaaagactgcagagagaggtcgagggagaacgcagggcaagggagcaggctgaggccgaagtcgccagcttgaatcggcggatacaattggtggaggaggagctcgatagggcgcaggagaggctcgccaccgcactccagaagctggaggaggccgaaaaagccgccgacgaaagcgagcgagggatgaaggtcatagaaaaccgcgcactgaaagacgaggagaaaatggaattacaggagatccagttgaaagaggctaagcacatcgccgaagaggctgacaggaagtatgaggaagtagcacgcaagctcgtaatcatcgaaggcgatctggaaaggacagaagagcgagcagagttggcagagtcccggtgccgagaaatggatgaacagattcggctgatggatcaaaatctgaagtgcctcagcgcagctgaggaaaagtattcccaaaaggaggacaagtatgaagaggaaatcaagatattaactgacaagctgaaagaggctgagaccagggctgagtttgcagaacgctcggtggctaaactggagaaaacgatagatgacctcgaagataagctaaaatgcacaaaggaagagcacttgtgcactcagcgtatgctggaccagacattgctggaccttaatgagatgtag

SEQ ID NO: 246468 - DNA, 675 bp, Artificial Sequence
  derived and/or modified sequence
atggccggaattacaacaatcgaggccgtcaagagaaaaatacaggtccttcagcagcaggccgacgatgccgaggagcgcgctgaaaggttgcaaagggaggtcgagggcgaacgcagggctcgagagcaacgattagctactgcgctgcaaaaactggaagaggccgagaaagcggcagacgagagcgaacgcggaatgaaggtgattgagaatagagctctgaaagatgaggagaagatggagcttcaagaaatacaactcaaggaagctaagcatattgccgaagaggccgatagaaaatacgaggaggttgctaggaaactcgtcattatcgagggcgacctagagcgtacagaagagcgcgcagagttggccgaatcccgatgtagagaaatggacgagcagattagactgatggatcagaacttgaagtgcctcagtgctgctgaggagaagtatagccaaaaagaagacaagtacgaggaggagatcaaaatcctgactgacaaactgaaagaagcagagacaagagccgagtttgccgaaagaagcgtagccaaactcgagaaaacaattgacgacctggaggacaaactcaaatgtacaaaggaggagcatctgtgcacccagagaatgctggaccagactctcctggatctgaacgagatgtag

SEQ ID NO: 246469 - DNA, 747 bp, Artificial Sequence
  derived and/or modified sequence
atggctggaattactactattgaggccgtgaagcgtaaaattcaggtgttgcaacagcaggccgatgatgccgaggaacgcgctgagcggctccagagggaagtagagggggaacgcagagctagggagcaagcagaggccgaggtagctagcttgaaccgacggattcagctcgtggaggaagagctggaccgggcacaagaacggctagcaaccgcactacagaaactggaagaagcagagaaagccgctgatgagtcagagcgcggaatgaaggtcattgaaaacagggcacttaaagacgaggaaaaaatggagctgcaggagatccaactgaaagaggcgaagcacatcgccgaagaggccgatagaaagtatgaggaagtggccaggaagcttgtaattatagaaggcgatctcgagagaaccgaggaacgcgctgagctggccgaatcacgctgcagggagatggacgaacagattcggctgatggaccagaacctgaagtgcctatccgctgctgaagagaaatacagccaaaaagaagacaaatacgaagaggagatcaagatcctcacagataagctgaaagaagccgagacacgggcagagttcgccgaacggagcgtggcaaagctggagaagacaattgacgatctggaagataaactgaagtgtaccaaagaggagcatctctgcacccagcgaatgttagaccaaacactgctggatctcaacgagatgtag

SEQ ID NO: 246470 - DNA, 2010 bp, Artificial Sequence
  derived and/or modified sequence
aggctgcaacgccgagcggaggaggcaggaaccggagcgcgagcagtagctgggtgggcaccatggctgggatcaccaccatcgaggcggtgaagcgcaagatccaggttctgcagcagcaggcagatgatgcagaggagcgagctgagcgcctccagcgagaagttgagggagaaaggcgggcccgggaacagcgcctggccactgccctgcaaaagctggaagaagctgaaaaagctgctgatgagagtgagagaggtatgaaggttattgaaaaccgggccttaaaagatgaagaaaagatggaactccaggaaatccaactcaaagaagctaagcacattgcagaagaggcagataggaagtatgaagaggtggctcgtaagttggtgatcattgaaggagacttggaacgcacagaggaacgagctgagctggcagagtcccgttgccgagagatggatgagcagattagactgatggaccagaacctgaagtgtctgagtgctgctgaagaaaagtactctcaaaaagaagataaatatgaggaagaaatcaagattcttactgataaactcaaggaggcagagacccgtgctgagtttgctgagagatcggtagccaagctggaaaagacaattgatgacctggaagataaactgaaatgcaccaaagaggagcacctctgtacacaaaggatgctggaccagaccctgcttgacctgaatgagatgtagaacgccccagtcccaccctgctgctgctcctccctctgacccagactccgcctgaggccagcctgcgggaagctgacctttaactgagggctgatctttaactggaaggctgctttctcctttcaccaccccctccttccctgtgtctttttcgccaaactgtctctgcctcttcccggagaatccagctgggctagaggctgagcacctttggaaacaacatttaagggaatgtgagcacaatgcataatgtctttaaaaagcatgttgtgatgtacacattttgtaattaccttttttgttgttttgtagcaaccatttgtaaaacattccaaataattccacagtcctgaagcagcaatcgaatccctttctcacttttggaaggtgacttttcaccttaatgcatattcccctctccatagaggagaggaaaaggtgtaggcctgccttaccgagagccaaacagagcccagggagactccgctgtgggaaacctcattgttctgtacaaagtactagctaaaccagaaaggtgattccaggaggagttagccaaacaacaacaaaaacaaaaaatgtgctgttcaagttttcagctttaagatatctttggataatgttatttctattttttatttttttcattagaagttaccaaattaagatggtaagacctctgagaccaaaattttgtcccatctctaccccctcacaactgcttacagaatggatcatgtcccccttatgttgaggtgaccacttaattgctttcctgcctccttgaaagaaagaaagaaagaagactgtgtttttgccactgatttagccatgtgaaactcatctcattacccttttctgggtttgaagctgctgtctctagaagtgccatctcaattgtgctttgtatcagtcagtgctggagaaatcttgaatagcttatgtacaaaactttttaaattttatattattttgaaactttgctttgggtttgtggcaccctggccaccccatctggctgtgacagcctctgcagtccgtgggctggcagtttgttgatcttttaagtttccttccctacccagtccccattttctggtaaggtttctaggaggtctgttaggtgtacatcctgcagcttattggcttaaaatgtactctccttttatgtggtctctttggggccgattgggagaaagagaaatcaatagtgcaactgttttgatactgaatattgacaagtgtctttttgaaataaagaaccagtccctcc

SEQ ID NO: 246471 - DNA, 3131 bp, Artificial Sequence
  derived and/or modified sequence
cgccgagcggaggaggcaggaaccggagcgcgagcagtagctgggtgggcaccatggctgggatcaccaccatcgaggcggtgaagcgcaagatccaggttctgcagcagcaggcagatgatgcagaggagcgagctgagcgcctccagcgagaagttgagggagaaaggcgggcccgggaacaggctgaggctgaggtggcctccttgaaccgtaggatccagctggttgaagaagagctggaccgtgctcaggagcgcctggccactgccctgcaaaagctggaagaagctgaaaaagctgctgatgagagtgagagaggtatgaaggttattgaaaaccgggccttaaaagatgaagaaaagatggaactccaggaaatccaactcaaagaagctaagcacattgcagaagaggcagataggaagtatgaagaggtggctcgtaagttggtgatcattgaaggagacttggaacgcacagaggaacgagctgagctggcagagtcccgttgccgagagatggatgagcagattagactgatggaccagaacctgaagtgtctgagtgctgctgaagaaaagtactctcaaaaagaagataaatatgaggaagaaatcaagattcttactgataaactcaaggaggcagagacccgtgctgagtttgctgagagatcggtagccaagctggaaaagacaattgatgacctggaagataaactgaaatgcaccaaagaggagcacctctgtacacaaaggatgctggaccagaccctgcttgacctgaatgagatgtagaacgccccagtcccaccctgctgctgctcctccctctgacccagactccgcctgaggccagcctgcgggaagctgacctttaactgagggctgatctttaactggaaggctgctttctcctttcaccaccccctccttccctgtgtctttttcgccaaactgtctctgcctcttcccggagaatccagctgggctagaggctgagcacctttggaaacaacatttaagggaatgtgagcacaatgcataatgtctttaaaaagcatgttgtgatgtacacattttgtaattaccttttttgttgttttgtagcaaccatttgtaaaacattccaaataattccacagtcctgaagcagcaatcgaatccctttctcacttttggaaggtgacttttcaccttaatgcatattcccctctccatagaggagaggaaaaggtgtaggcctgccttaccgagagccaaacagagcccagggagactccgctgtgggaaacctcattgttctgtacaaagtactagctaaaccagaaaggtgattccaggaggagttagccaaacaacaacaaaaacaaaaaatgtgctgttcaagttttcagctttaagatatctttggataatgttatttctattttttatttttttcattagaagttaccaaattaagatggtaagacctctgagaccaaaattttgtcccatctctaccccctcacaactgcttacagaatggatcatgtcccccttatgttgaggtgaccacttaattgctttcctgcctccttgaaagaaagaaagaaagaagactgtgtttttgccactgatttagccatgtgaaactcatctcattacccttttctgggtttgaagctgctgtctctagaagtgccatctcaattgtgctttgtatcagtcagtgctggagaaatcttgaatagcttatgtacaaaactttttaaattttatattattttgaaactttgctttgggtttgtggcaccctggccaccccatctggctgtgacagcctctgcagtccgtgggctggcagtttgttgatcttttaagtttccttccctacccagtccccattttctggtaaggtttctaggaggtctgttaggtgtacatcctgcagcttattggcttaaaatgtactctccttttatgtggtctctttggggccgattgggagaaagagaaatcaatagtgcaactgttttgatactgaatattgacaagtgtctttttgaaataaagaaccagtccctccaaccctcagacctatttgacttttatttattaaaactaaatgtgctttctccacagaagctatgaggtttgggttaaaaatagcatctttgtgggtggtagcaacaggatttattctttattattattatttttgagatgaagtttcattcttgttgcctgggctggagcgtaatggctcgatctcggctcactgcaacctccgcctcctggttcaagagattctcctgcctcagcctcccgagtagctgggattacaggcacctgccaccatgcccgggtaattttttatattttaagtagagacagggcttcaccatgttggccaggctggtctcgaactcctgaccttcaggtgatccacctgcctcagcttcccaaaatgctgggattacgggcgtgagccaccgcacccagctggagcaacaggatttaatatagagcaaatgtttagttttatcatctgtaaaatggagataagtattgtcagagtaaacatgaagattagaaagaacacttaatgtgctgggccttttataggttaacactgacatctcaggctgaactatatacattttccttcacaaccatatcaatccttataaactatggatttatgctccttaaaacaatatataatgctgatcactactataaatgcgtggttttaaccaactgtactgaaacagctttgagtttatattctgtttggatatttggagaaaacaacaagtgctctcaagagtatttgcttagaggccggctgtgtgagtggataactttgaaagctgcttttgagacgccagtgtctggcatttcctgcattctggcctggaggccggacgtgaatctgacttctagtaaaaatacacggttcccttgacaaagtcgagctgtttatcccagagactgcacaattttccgttgataggcatggaccaatgctaactggaaatcattgcaaaaagtttttttgtcgggcggagggtgtggtgttaagataaacagtgtgcaacagaagaaattaaaactggaagaaattaaagggttttttttaga

SEQ ID NO: 246472 - protein, 899 aa, Artificial Sequence
  derived and/or modified sequence
MDRKVAREFRHKVDFLIENDAEKDYLYDVLRMYHQTMDVAVLVGDLKLVINEPSRLPLFDAIRPLIPLKHQVEYDQLTPRRSRKLKEVRLDRLHPEGLGLSVRGGLEFGCGLFISHLIKGGQADSVGLQVGDEIVRINGYSISSCTHEEVINLIRTKKTVSIKVRHIGLIPVKSSPDEPLTWQYVDQFVSESGGVRGSLGSPGNRENKEKKVFISLVGSRGLGCSISSGPIQKPGIFISHVKPGSLSAEVGLEIGDQIVEVNGVDFSNLDHKEAVNVLKSSRSLTISIVAAAGRELFMTDRERLAEARQRELQRQELLMQKRLAMESNKILQEQQEMERQRRKEIAQKAAEENERYRKEMEQIVEEEEKFKKQWEEDWGSKEQLLLPKTITAEVHPVPLRKPKSFGWFYRYDGKFPTIRKKGKDKKKAKYGSLQDLRKNKKELEFEQKLYKEKEEMLEKEKQLKINRLAQEVSETEREDLEESEKIQYWVERLCQTRLEQISSADNEISEMTTGPPPPPPSVSPLAPPLRRFAGGLHLHTTDLDDIPLDMFYYPPKTPSALPVMPHPPPSNPPHKVPAPPVLPLSGHVSASSSPWVQRTPPPIPIPPPPSVPTQDLTPTRPLPSALEEALSNHPFRTGDTGNPVEDWEAKNHSGKPTNSPVPEQSFPPTPKTFCPSPQPPRGPGVSTISKPVMVHQEPNFIYRPAVKSEVLPQEMLKRMVVYQTAFRQDFRKYEEGFDPYSMFTPEQIMGKDVRLLRIKKEGSLDLALEGGVDSPIGKVVVSAVYERGAAERHGGIVKGDEIMAINGKIVTDYTLAEAEAALQKAWNQGGDWIDLVVAVCPPKEYDDELASLPSSVAESPQPVRKLLEDRAAVHRHGFLLQLEPTDLLLKSKRGNQIHR

SEQ ID NO: 246473 - DNA, 2700 bp, Artificial Sequence
  derived and/or modified sequence
atggacagaaaggtggccagagagttcagacacaaggtggacttcctgatcgagaacgacgccgagaaggactacctgtacgacgtgctgagaatgtaccaccagaccatggacgtggccgtgctggtgggcgacctgaagctggtgatcaacgagcccagcagactgcccctgttcgacgccatcagacccctgatccccctgaagcaccaggtggagtacgaccagctgacccccagaagaagcagaaagctgaaggaggtgagactggacagactgcaccccgagggcctgggcctgagcgtgagaggcggcctggagttcggctgcggcctgttcatcagccacctgatcaagggcggccaggccgacagcgtgggcctgcaggtgggcgacgagatcgtgagaatcaacggctacagcatcagcagctgcacccacgaggaggtgatcaacctgatcagaaccaagaagaccgtgagcatcaaggtgagacacatcggcctgatccccgtgaagagcagccccgacgagcccctgacctggcagtacgtggaccagttcgtgagcgagagcggcggcgtgagaggcagcctgggcagccccggcaacagagagaacaaggagaagaaggtgttcatcagcctggtgggcagcagaggcctgggctgcagcatcagcagcggccccatccagaagcccggcatcttcatcagccacgtgaagcccggcagcctgagcgccgaggtgggcctggagatcggcgaccagatcgtggaggtgaacggcgtggacttcagcaacctggaccacaaggaggccgtgaacgtgctgaagagcagcagaagcctgaccatcagcatcgtggccgccgccggcagagagctgttcatgaccgacagagagagactggccgaggccagacagagagagctgcagagacaggagctgctgatgcagaagagactggccatggagagcaacaagatcctgcaggagcagcaggagatggagagacagagaagaaaggagatcgcccagaaggccgccgaggagaacgagagatacagaaaggagatggagcagatcgtggaggaggaggagaagttcaagaagcagtgggaggaggactggggcagcaaggagcagctgctgctgcccaagaccatcaccgccgaggtgcaccccgtgcccctgagaaagcccaagagcttcggctggttctacagatacgacggcaagttccccaccatcagaaagaagggcaaggacaagaagaaggccaagtacggcagcctgcaggacctgagaaagaacaagaaggagctggagttcgagcagaagctgtacaaggagaaggaggagatgctggagaaggagaagcagctgaagatcaacagactggcccaggaggtgagcgagaccgagagagaggacctggaggagagcgagaagatccagtactgggtggagagactgtgccagaccagactggagcagatcagcagcgccgacaacgagatcagcgagatgaccaccggcccccccccccccccccccagcgtgagccccctggccccccccctgagaagattcgccggcggcctgcacctgcacaccaccgacctggacgacatccccctggacatgttctactacccccccaagacccccagcgccctgcccgtgatgccccaccccccccccagcaaccccccccacaaggtgcccgccccccccgtgctgcccctgagcggccacgtgagcgccagcagcagcccctgggtgcagagaacccccccccccatccccatcccccccccccccagcgtgcccacccaggacctgacccccaccagacccctgcccagcgccctggaggaggccctgagcaaccaccccttcagaaccggcgacaccggcaaccccgtggaggactgggaggccaagaaccacagcggcaagcccaccaacagccccgtgcccgagcagagcttcccccccacccccaagaccttctgccccagcccccagccccccagaggccccggcgtgagcaccatcagcaagcccgtgatggtgcaccaggagcccaacttcatctacagacccgccgtgaagagcgaggtgctgccccaggagatgctgaagagaatggtggtgtaccagaccgccttcagacaggacttcagaaagtacgaggagggcttcgacccctacagcatgttcacccccgagcagatcatgggcaaggacgtgagactgctgagaatcaagaaggagggcagcctggacctggccctggagggcggcgtggacagccccatcggcaaggtggtggtgagcgccgtgtacgagagaggcgccgccgagagacacggcggcatcgtgaagggcgacgagatcatggccatcaacggcaagatcgtgaccgactacaccctggccgaggccgaggccgccctgcagaaggcctggaaccagggcggcgactggatcgacctggtggtggccgtgtgcccccccaaggagtacgacgacgagctggccagcctgcccagcagcgtggccgagagcccccagcccgtgagaaagctgctggaggacagagccgccgtgcacagacacggcttcctgctgcagctggagcccaccgacctgctgctgaagagcaagagaggcaaccagatccacagatag

SEQ ID NO: 246474 - DNA, 2700 bp, Artificial Sequence
  derived and/or modified sequence
atggatcgaaaggtagcccgcgaattcaggcacaaggttgatttcctcatagagaacgacgcagagaaggactatctctacgatgtccttaggatgtaccaccaaaccatggatgtggctgtgctcgtgggggatcttaagctggtgattaatgagcccagccgcctaccattatttgacgcaattcgaccactgattcctctcaaacatcaagtcgagtacgaccaacttactcccaggagatctcgcaaactgaaggaagtgagactggatcggctccatcccgaaggcctgggactgtccgttagaggcggccttgaattcggctgcggcctgtttatttcacatcttatcaagggagggcaggccgactccgttggccttcaagtgggcgatgagattgtccgcattaacggttactctatctcttcctgtacccatgaagaggtcattaatttgatccggacaaagaaaaccgttagcatcaaggtgaggcacattggtctaatacctgtgaagtccagtcccgatgaacccctcacctggcagtatgtggatcagtttgtatcagaaagcggcggggtgaggggctccctgggaagcccagggaatcgggaaaacaaggaaaagaaggtgtttataagtctcgtgggatcacgaggactcggatgtagcatttctagcggccctattcaaaaaccagggatattcatttctcacgtgaaacccgggtccctgagcgcagaagtcgggcttgaaattggggaccaaatagtggaggttaacggagttgatttttccaacctcgaccacaaggaagccgtgaacgtcttgaaatcgagtcgtagccttacgattagtattgtcgccgctgctggacgagagttgttcatgacagaccgtgaaagattagctgaggctcgccaacgggagctgcagaggcaagagctgctgatgcagaagaggctggccatggaaagtaacaaaattctccaggagcaacaggagatggagaggcagcgccgtaaagagatcgcccagaaggccgctgaagagaacgagaggtaccgaaaggagatggaacagatcgtcgaagaagaagaaaaatttaaaaagcaatgggaggaggattggggctccaaagaacagcttctcctgcccaagaccatcacagcggaagtccaccccgtaccattgaggaagcctaagtccttcggctggttctaccgctacgacgggaaattccctaccatcaggaaaaaagggaaggacaagaagaaggcaaaatatgggtcgctgcaagatctgcggaagaacaaaaaggagttggagtttgaacaaaaattgtataaggagaaggaggaaatgctggagaaggaaaaacagctgaagattaaccgactggcacaggaagttagcgagacggaaagagaggatcttgaggagtccgagaaaattcagtattgggttgagcgtctgtgccagacccggctggagcaaatcagcagtgccgataacgaaatatctgaaatgaccacgggccccccaccccctcctccttccgtgtcacctctagccccccccttgaggcgtttcgcaggaggcctgcacctgcacaccacagacttggacgacatccccttggatatgttctattatcccccaaagacaccttctgccctgcctgtcatgccacaccctccgccaagcaatcctccgcacaaggttcccgcacctcctgtgcttcctctttccggacatgtctctgcgtcaagctcgccttgggtgcagcggaccccaccccccatccctatcccgccgcccccttccgtgccgactcaagatcttacgcctacccgcccgctcccctccgctctggaggaggcactgtcgaaccatcctttccggacaggggatacagggaatccagttgaagattgggaagccaaaaatcattccggtaagcccacaaacagtcccgtgccggaacagagtttccctccaacgccgaaaacattttgcccctccccgcagccaccccgcggccccggagtctctacgatttctaagcccgtaatggtgcaccaagaacctaacttcatctatcgcccagcagtaaaaagcgaggttctgccacaggaaatgctgaagaggatggtggtgtatcagaccgcttttcggcaggactttagaaagtacgaggaaggttttgatccatactctatgtttacgccggagcaaatcatgggcaaagatgtgcggctgttgagaatcaaaaaggaaggttcattggatctggcgttggaaggtggagtagacagcccaatcgggaaggtcgtggttagcgctgtgtacgagcggggggccgccgaacgtcatggtggtatagtgaagggggacgaaatcatggccatcaatgggaaaattgttaccgattacacacttgccgaagccgaagctgccttgcaaaaagcttggaatcagggaggagattggattgatctggtggtggctgtgtgtcctccaaaggagtacgatgacgagctcgcttccctacctagttctgtggccgagtccccccagccagtccgaaagctgcttgaagaccgcgccgcagttcacaggcacggcttcttattacagctagagccgacagacttactgcttaaatctaaacgaggaaaccagattcacagatag

SEQ ID NO: 246475 - DNA, 2700 bp, Artificial Sequence
  derived and/or modified sequence
atggacaggaaggtggcccgggagttccgccacaaggtggacttcctgattgaaaatgatgctgagaaggactacctgtatgatgtgctgaggatgtaccaccagaccatggatgtggccgtgctggtgggggacctgaagctggtgatcaatgagcccagccggctgcccctgtttgatgccatccggcccctcatccccctgaagcaccaggtggagtatgaccagctgaccccccggcgcagcaggaagctgaaggaggtgcggctggaccggctgcaccctgagggcctgggcctgtctgtgcggggcggcctggagtttggctgcggcctcttcatcagccacctgatcaagggcggccaggccgacagcgtgggcctgcaggtgggagatgagatcgtgcgcatcaatggctacagcatcagcagctgcacccatgaggaggtgatcaacctgatccgcaccaagaagacagtgtccatcaaggtgcgccacatcggcctcatccctgtgaagagcagcccagatgagcccctgacctggcagtatgtggaccagtttgtgtctgagagcggcggcgtgcggggcagcctgggcagccctggcaaccgggagaacaaggagaagaaggtgttcatcagcctggtgggcagccggggcctgggctgcagcatcagcagcggccccatccagaagccaggcatcttcatcagccacgtgaagccaggcagcctgtctgctgaggtgggcctggagatcggggaccagatcgtggaggtgaatggagtggacttcagcaacctggaccacaaggaggccgtgaatgtgctgaagagcagccgcagcctgaccatcagcatcgtggccgccgccggccgggagctgttcatgacagaccgggagcggctggccgaggcccggcagcgggagctgcagaggcaggagctgctgatgcagaagaggctggccatggagagcaacaagatcctgcaggagcagcaggagatggagcggcagaggaggaaggagatcgcccagaaggctgctgaggagaatgaaagatacaggaaggagatggagcagatcgtggaggaggaggagaagttcaagaagcagtgggaggaggactggggcagcaaggagcagctgctgctgcccaagaccatcacagctgaggtgcaccctgtgcccctgaggaagcccaagagctttggctggttctaccgctatgatggcaagttccccaccatcaggaagaagggcaaggacaagaagaaggccaagtatggcagcctgcaggacctgaggaagaacaagaaggagctggagtttgagcagaagctgtacaaggagaaggaggagatgctggagaaggagaagcagctgaagatcaaccggctggcccaggaggtgtctgaaacagagcgggaggacctggaggagagcgagaagatccagtactgggtggagcggctgtgccagacccggctggagcagatcagcagcgctgacaatgagatcagcgagatgaccactggacctcctcctcctcctccttctgtgagccccctggccccacccctgcggagatttgctgggggcctgcacctgcacaccacagacctggatgacatccccctggacatgttctactacccacccaagaccccatctgccctgcctgtgatgccccaccccccacccagcaaccccccccacaaggtgcctgcccctcctgtgctgcccctgagcggccacgtgtctgccagcagcagcccctgggtgcagaggaccccaccacccatccccatccccccaccacccagcgtgcccacccaggacctgacccccacccggcccctgcccagcgccctggaggaggccctgagcaaccaccccttcagaactggagacaccggcaaccctgtggaggactgggaggccaagaaccacagcggcaagcccaccaacagccctgtgcctgagcagagcttcccccccacccccaagaccttctgccccagcccccagcccccccggggccctggggtgtccaccatcagcaagcctgtgatggtgcaccaggagcccaacttcatctacagacctgctgtgaagtctgaggtgctgccccaggagatgctgaagaggatggtggtgtaccagacagccttccggcaggacttcagaaaatatgaggagggctttgacccctacagcatgttcaccccagagcagatcatgggcaaggatgtgcggctgctgcgcatcaagaaggagggcagcctggacctggccctggagggcggcgtggacagccccatcggcaaggtggtggtgtctgctgtgtatgaaagaggagctgctgagagacatggaggcatcgtgaagggagatgagatcatggccatcaacgggaagatcgtgacagactacaccctggccgaggccgaggccgccctgcagaaggcctggaaccagggcggggactggattgacctggtggtggccgtgtgcccccccaaggagtatgatgatgagctggccagcctgcccagctctgtggccgagagcccccagcctgtgaggaagctgctggaggacagagctgctgtgcaccgccacggcttcctgctgcagctggagcccacagacctgctgctgaagagcaagaggggcaaccagatccacaggtag

SEQ ID NO: 246476 - DNA, 2700 bp, Artificial Sequence
  derived and/or modified sequence
atggaccggaaggtggcccgggagttccggcacaaggtggacttcttaattgaaaacgatgctgagaaagactatctatacgatgtccttcgcatgtaccatcagaccatggatgtggccgtgctagtaggagatctgaaacttgttatcaatgaaccgtcacgactcccactatttgacgcaataagaccactcatacccctgaaacatcaggtcgagtacgaccagctgacaccaaggcggagccggaaattaaaggaggtaaggcttgatcggttgcatcctgaaggtctggggctgtccgtcagaggaggcctggagttcggttgcggcctgttcatctcacaccttatcaaaggggggcaagcagactcagttgggttgcaagtaggggatgaaattgtgcggatcaacggctattccattagctcctgcacacacgaggaggtgatcaatctgatacgcacgaagaagacagtcagtatcaaggtccggcacattggactgatccccgtgaagtccagccccgacgagccattaacatggcaatacgttgaccagttcgtttccgagagcggcggcgtacgcggatccctggggagccccggcaacagggaaaataaggagaaaaaggtctttattagcctggtcgggagcaggggcctgggctgtagcatcagttctggccccattcagaagccaggtatttttatctcccatgtgaagcccggctcacttagcgcagaagtgggactggaaatcggagaccaaatcgtggaggtaaacggagtagatttctctaacctggaccataaggaggctgtgaatgtgctcaagtcttcccgcagtctgacaatttctatcgtggcagccgccgggagagagttatttatgacagatcgagagcggcttgcagaggccaggcagagggagctgcaacggcaagaattgctgatgcaaaagcggttggccatggagagtaacaaaattctacaggaacagcaagagatggaaagacagcgcaggaaggagattgcccaaaaggctgctgaggaaaatgagagatatcggaaggagatggagcagattgtggaggaggaagaaaagttcaagaaacagtgggaagaagactggggtagcaaagaacagcttttactgccaaagaccataaccgctgaggtgcatccggttccacttcggaaacccaaaagctttggatggttctaccggtacgacgggaagtttcctaccataagaaaaaagggcaaagacaagaagaaggctaagtacggttccctccaagatcttcgtaaaaacaagaaagagcttgagttcgagcagaagctctataaagaaaaagaagagatgctcgagaaagagaaacagctgaagatcaacagactggcccaggaggtgtccgaaactgaacgagaagatctggaggagtccgaaaagattcaatactgggtagagagactttgtcagacgaggcttgaacagatttcatccgcggacaatgaaatttctgaaatgacaaccgggcccccgcccccgccgccttctgtcagccccctggctccacctctgaggcgatttgccggtggactgcacttacacactaccgacctcgatgacattccgctggatatgttttactacccccctaaaacccccagcgccctccccgtgatgccccaccctccacccagtaatccccctcataaggttcccgctccacctgtgctgcctcttagcgggcacgtgagcgcttccagctctccatgggtccagaggactcccccgccaattcctattccaccccccccctctgtcccgactcaggatcttactcccacaagaccactgccttctgctctagaagaagccctgtccaaccatccgttccgaacgggagatactggtaaccctgtcgaggactgggaggctaagaaccatagcggtaagcctaccaactctcccgttcctgagcaatctttcccacccacccccaaaaccttctgcccgtcgcctcagcccccgcgaggcccgggagtgtccacaatcagcaaaccagtaatggtgcaccaagaacctaactttatctaccggcccgccgtaaaatctgaggtgcttccacaggaaatgttgaagcgcatggtggtttatcagaccgcatttaggcaagacttccggaaatatgaggagggcttcgacccttatagcatgttcactccagaacagataatgggaaaagatgtgcgtctgctccgaataaagaaagaagggagtctagacctggctttagaaggaggagtggacagtccaatcggaaaggtcgtcgtgtcagcagtgtacgagaggggcgcagcggagcggcacgggggtatcgttaagggggatgaaatcatggccattaacgggaagattgtgactgattacacactggctgaagcggaagctgccttacaaaaggcttggaatcaaggtggtgactggatcgacttagtcgtagccgtgtgtcctcctaaagagtatgacgatgagcttgcttccctgccaagtagcgtggctgagagtccccagcctgtccgaaaactgctagaggacagggccgccgtccaccgacacggttttctgcttcaactcgagcctaccgatctcttgttaaagtcgaaacggggaaaccaaattcacagatag

SEQ ID NO: 246477 - DNA, 2700 bp, Artificial Sequence
  derived and/or modified sequence
atggaccgaaaagttgcccgagagttcagacacaaagtggacttcctcattgagaacgatgccgaaaaggactacctctacgacgtgctgcgcatgtaccatcagacaatggacgtggccgtgctggtgggtgacttgaagttagttatcaatgaaccctcccggctgccactgttcgacgcgataagacctctaattccactgaagcatcaagttgaatacgatcagctcactcccaggcggtccagaaaactcaaagaggttaggttggacagactacaccccgagggactcggacttagtgtccgcggaggactggagttcgggtgcgggctgtttataagtcacctgatcaagggcggacaagccgatagcgtggggctgcaggtgggcgatgagatcgtgagaatcaacgggtactccatcagttcctgcacccacgaagaggtgatcaacctgataaggacaaaaaagaccgtatcaatcaaggttcgtcacattggccttatccccgtaaagtcttctcctgacgaaccccttacgtggcagtacgtggatcagttcgtctccgagagtggtggtgtccgaggctccctggggagtcctgggaaccgtgaaaataaggagaagaaggtgtttatctccctggtaggatcccggggtctaggctgctctatctcttctggccctattcagaagcctgggattttcatttcgcacgtgaagccgggttcccttagcgctgaagtgggcctggaaattggggatcagattgtcgaggtgaatggcgtagattttagcaatcttgaccacaaagaggccgtgaatgtgctgaagagctcacgatctctgaccatatctattgtggcggctgccggacgtgagctgttcatgactgatcgagagcgcctggccgaggcccgtcagcgtgagcttcagcgccaggaattgcttatgcagaagagactggcaatggaatcaaacaaaatcttacaggaacaacaggaaatggagagacaacggagaaaagagatcgcccaaaaagcggcagaggaaaacgagagataccggaaagagatggaacagattgtggaagaggaggagaaatttaagaagcaatgggaggaggactggggttccaaggagcagctgctcctgccgaaaaccattacagcagaggtgcaccccgtccccctaagaaagccaaagtctttcggttggttttatagatatgatggaaaatttccgacaattcggaagaaaggcaaagacaagaaaaaggccaagtacggctcactgcaggatctacgtaaaaataaaaaggagctcgagtttgagcagaaactctacaaggagaaagaggagatgctggagaaggagaaacaactcaagattaacagactagcgcaggaagtgtccgaaacggagcgcgaggaccttgaagaatccgagaaaattcaatattgggtagagcgcctgtgccagacccgactcgagcagatcagttctgccgataatgagatcagcgagatgacaaccggcccacccccaccaccacctagcgtgagtccactggcgcctccgctgagacgctttgccggtggtcttcatttacacactacagacctcgacgacatccccttagatatgttctactatccgcctaaaaccccctcagccttgcccgtgatgccccatcctccccctagtaaccctccccataaggttcctgccccaccggttctgcctctgtccggtcacgtatccgcctccagctccccctgggttcagcgtacccctccacccatccccatcccccctcctcctagcgtacccactcaggatctcacccctactcggcctctgccctccgcgctggaagaggccctgagcaatcacccctttcggacaggtgacactgggaaccccgtagaggactgggaagccaaaaaccacagcggcaaaccaaccaattcgccagtacctgagcagtccttccctcctacacctaaaaccttctgcccaagcccccagccaccaagggggccaggcgtctctacaatttcgaaacccgtgatggtgcatcaggagccaaattttatctaccgcccagccgtgaagtccgaagtgctgccccaggagatgctaaaacgcatggtcgtatatcagaccgcttttcgtcaagactttaggaagtatgaagaagggttcgacccctactccatgttcacacccgaacaaataatggggaaggatgtacgactgctgaggattaaaaaagaagggagtttggatttggccttggagggaggggtcgatagcccaatcgggaaagtagtggtgtcagccgtttatgaacgtggcgcagcagagcggcacggagggatcgtaaagggcgacgagatcatggctattaacggaaagatcgtgacggactatacactcgctgaggccgaagccgcactccaaaaagcttggaaccagggaggcgactggattgatcttgtggtggcagtgtgtccaccaaaggaatacgacgatgagttggctagcttgcccagcagtgtggccgagagccctcagcctgtgcggaagctgctggaggacagagccgctgtacatagacacggttttttgctccagcttgaaccaaccgacctgcttcttaagtccaaacgaggaaaccagatccatagatag

SEQ ID NO: 246478 - DNA, 2700 bp, Artificial Sequence
  derived and/or modified sequence
atggatcgaaaggtagccagagaatttcgtcataaagtagatttcttgattgagaacgacgccgagaaagattacttgtatgatgttctgagaatgtatcaccaaacaatggacgtggctgtgcttgtgggggatttgaagctggtgatcaacgaaccctcccgcctgcccctgtttgacgcgatacgacctctaatcccgctgaagcaccaggtggagtacgaccaacttacccctcggcggagtcgtaagttaaaagaagtgaggctcgacagactccacccggagggtctggggttgtccgtgcgaggcggactagaatttggttgcggcttgttcatcagtcacttaatcaaaggcggacaggccgactcggtggggctgcaggtcggcgatgaaatcgttcgcataaatgggtactcaatttctagttgtacccacgaggaggtgattaacctgatccgaactaagaagacagtcagtattaaagttcgacatatcggccttatcccggtcaaaagtagtccagacgagcccctgacctggcagtatgtggaccagttcgtcagtgagtctgggggcgtgaggggatcactcggctctccgggcaatcgggaaaacaaagagaaaaaggtcttcatttctttagtgggtagccggggactagggtgttcaataagttccggacctattcagaagcctggaatctttatctcacatgtgaagccaggcagtctcagtgctgaggtcgggctagagatcggggaccagatcgtcgaggttaacggggtcgacttctctaacctggaccataaagaagccgtgaatgttctaaagagtagtcgatccttaacgatctccatcgtggccgccgccggcagggagctattcatgaccgacagagagaggctggctgaggcccgccagagagagctgcagcgacaagagttactgatgcagaagcgcctggcaatggaaagcaacaagatactgcaagaacagcaggagatggaacgtcagagacgcaaggaaatcgcccaaaaagcagctgaagaaaatgagcggtacaggaaagaaatggagcagatagttgaagaggaagaaaaattcaagaaacaatgggaggaggattggggtagcaaagaacagctcttgctcccaaagacgattacggctgaggtacatcctgttcccttgagaaaacctaaaagctttgggtggttctatcggtacgatggtaagttcccaaccattagaaaaaagggaaaagacaagaaaaaagcaaaatatgggtcactgcaggacctgcggaaaaacaaaaaagagctggagttcgagcagaagctgtacaaagaaaaagaggaaatgttagagaaagagaagcagctaaagatcaaccggttggcccaggaagtctcggaaactgaacgggaggacttagaagagtcagaaaagatccaatactgggtggagaggctgtgccagactcgattggaacaaatttcatccgctgataacgagatctccgagatgactacagggccgccccctcccccaccctcagtttcccctctggccccacccctccgaaggttcgcaggtggtctgcatctgcacactaccgacctggatgacatacccctggacatgttttactatccccccaagacaccgtcggctttaccagtgatgcctcaccccccgccctctaaccccccacacaaggttcctgcccctcccgtgcttccactatcaggccacgtgtctgccagcagctctccgtgggtccaacgcactcccccacctataccaatcccaccaccacccagtgtccccactcaggatctgaccccgactcgcccattgccaagtgccctagaggaagccttgtccaatcatccctttcgcaccggtgataccggcaaccccgtggaagactgggaagcaaaaaaccactccggaaagcccaccaattcccccgtcccagagcaatcattcccacctaccccgaaaacattttgccccagccctcagccgccaagaggacctggggtctccaccatctccaaacctgtcatggtgcaccaagagcccaatttcatttatagacctgccgtgaaatccgaagttctgccacaggagatgcttaagagaatggtagtgtaccagaccgcgttcaggcaggattttcgcaaatacgaggaagggtttgacccttatagtatgttcactcccgagcaaattatgggcaaggatgtgcgtttactgcgaatcaagaaggagggttccctggaccttgccctggagggcggcgtggactccccaatcggcaaggttgtggtgagtgcagtttatgaacgaggcgcagccgagcggcatggcggtatagttaaaggagatgagatcatggccatcaatggcaaaatagttactgattataccctagccgaggcagaggcagctttgcagaaggcttggaaccagggcggcgattggattgacttggtcgtagctgtgtgccctccaaaagagtacgacgacgaactagccagtttgccgtcctcagtggcagagtcaccacagcccgtccggaagttactagaggaccgcgctgcggtacacaggcacggatttctgctccagctcgagcctaccgatttgttgctaaaaagtaagcgggggaatcaaatccacagatag

SEQ ID NO: 246479 - DNA, 2700 bp, Artificial Sequence
  derived and/or modified sequence
atggataggaaagttgccagggagtttagacataaagtggattttttgatcgaaaatgatgccgagaaagattatctctatgatgttctgagaatgtaccaccagaccatggacgtggctgtgcttgtcggtgatttaaagcttgttattaacgaacccagccggttgcctctcttcgatgcaattcgtccgctcatacccctcaagcaccaagttgaatacgaccaactcaccccacgcaggtcaaggaagcttaaggaagttagactcgaccggctccatcccgagggactgggtctctcagtgagaggtgggttagaatttggctgtggactattcatttcacacctgatcaaaggggggcaagcagatagtgtcgggctgcaggtgggagatgagatcgtgaggatcaacggatattcgattagcagctgcacacatgaagaagtcatcaacctgatccgtaccaaaaaaaccgttagcattaaagtgaggcatatcggactcatacccgtgaagtcgagtcccgatgaacccctgacctggcagtacgttgaccagtttgttagtgaatctggcggcgtgagagggagtctgggcagcccgggaaatagggaaaataaagagaagaaagtgttcattagccttgtgggaagcagaggactcggctgtagcatcagcagtggcccaatccaaaagcctggtattttcataagccacgttaagcctggttccttatccgcagaggtaggattggaaatcggagatcagatcgttgaggtgaatggcgtagactttagcaacctcgaccataaggaagccgtgaatgtcctcaagtctagcagaagcctgaccatcagcattgtggccgccgcggggcgggagttatttatgactgatcgcgaaagactagccgaggcaagacaaagggaattgcagcgtcaggaactgcttatgcaaaagcgcttggccatggagtccaataagattctgcaggaacagcaagagatggagagacagaggaggaaagagatagctcagaaggcagcagaggagaacgaaagatacaggaaagaaatggagcagattgttgaggaggaggagaagtttaaaaagcagtgggaggaggattgggggtcgaaggaacaacttctgttgcctaaaacaatcactgcagaagtgcatcctgttcctctgagaaagcccaaatcattcgggtggttttatcggtacgatggtaaatttcccacaatccgtaagaaggggaaggataaaaaaaaggctaagtacgggagcctgcaagacctgagaaagaacaagaaggagttggagttcgaacagaagctgtataaagagaaggaagaaatgttagagaaggagaaacaactgaaaatcaatcgactcgcacaggaagtctccgagacagaacgcgaagatctcgaggagagcgaaaagatacagtactgggtagaacgcctgtgccagacgcgactggaacaaatctcatccgccgataatgaaatctcggagatgacaaccgggcctcctccccctccaccctctgtgtcacctttggctccaccccttcgaagattcgctggaggcctgcatctgcacaccactgacctcgacgacattcctttggatatgttctattatccccccaagaccccatccgctcttcccgttatgccccatccccctccctcaaatcctcctcacaaggtccccgcccctcccgtccttcccctgtccggacacgttagtgccagctcgtcaccatgggtgcaaaggactccgccacctataccaatcccaccaccacccagtgtccccactcaggatctgaccccgactcgcccattgccaagtgccctagaggaagccttgtccaatcatccctttcgcaccggtgataccggcaaccccgtggaagactgggaagcaaaaaaccactccggaaagcccaccaattcccccgtcccagagcaatcattcccacctaccccgaaaacattttgccccagccctcagccgccaagaggacctggggtctccaccatctccaaacctgtcatggtgcaccaagagcccaatttcatatatagacccgccgtgaaaagcgaagtcctgcctcaggaaatgcttaagagaatggttgtatatcagactgcttttaggcaggactttagaaagtacgaagaaggtttcgatccctacagcatgtttacgcctgagcaaattatgggaaaggacgtgcggcttttgaggattaagaaagaaggctctctggatctggctctggaaggtggtgtagactccccaatcggcaaggtggtggtgtcagcagtttatgagcggggtgccgcagaacgccatggaggcatcgttaagggcgacgaaattatggcaatcaacggcaagatagtgacggactacacgttggcagaggctgaggcagcgctgcagaaagcatggaatcaaggaggtgactggatcgatttagtggtggcggtgtgccccccaaaggaatatgacgatgagctggcttctttaccctccagcgtggctgaaagcccacaacccgtcagaaaactgctcgaagacagagcagcggtacatagacatggatttttgttacagctggagccaacagatctcctgctcaaaagcaaaagaggaaaccagattcacaggtag

SEQ ID NO: 246480 - DNA, 2700 bp, Artificial Sequence
  derived and/or modified sequence
atggaccgaaaagtggcccgagaattccggcataaggtggattttctgattgaaaatgatgcagagaaggactatctctatgatgtgctgcgaatgtaccaccagaccatggacgtggccgtgctcgtgggagacctgaagctggtcatcaatgaacccagccgtctgcctctgtttgatgccattcggccgctgatcccactgaagcaccaggtggaatatgatcagctgaccccccggcgctccaggaagctgaaggaggtgcgtctggaccgtctgcaccccgaaggcctcggcctgagtgtgcgtggtggcctggagtttggctgtgggctcttcatctcccacctcatcaaaggcggtcaggcagacagcgtcgggctccaggtaggggacgagatcgtccggatcaatggatattccatctcctcctgtacccatgaggaggtcatcaacctcattcgaaccaagaaaactgtgtccatcaaagtgagacacatcggcctgatccccgtgaaaagctctcctgatgagcccctcacttggcagtatgtggatcagtttgtgtcggaatctgggggcgtgcgaggcagcctgggctcccctggaaatcgggaaaacaaggagaagaaggtcttcatcagcctggtaggctcccgaggccttggctgcagcatttccagcggccccatccagaagcctggcatctttatcagccatgtgaaacctggctccctgtctgctgaggtgggattggagataggggaccagattgtcgaagtcaatggcgtcgacttctctaacctggatcacaaggaggctgtaaatgtgctgaagagtagccgcagcctgaccatctccattgtagctgcagctggccgggagctgttcatgacagaccgggagcggctggcagaggcgcggcagcgtgagctgcagcggcaggagcttctcatgcagaagcggctggcgatggagtccaacaagatcctccaggagcagcaggagatggagcggcaaaggagaaaagaaattgcccagaaggcagcagaggaaaatgagagataccggaaggagatggaacagattgtagaggaggaagagaagtttaagaagcaatgggaagaagactggggctcaaaggaacagctactcttgcctaaaaccatcactgctgaggtacacccagtaccccttcgcaagccaaagtcttttggatggttttatcgttacgatggcaaattcccaaccatccggaagaaaggaaaagataagaagaaagccaagtatggcagcctgcaggacttgagaaagaataagaaagaactggagtttgagcaaaagctttacaaagagaaagaggaaatgctggagaaggaaaagcagctaaagatcaaccggctggcccaggaggtgtctgagacagagcgggaagaccttgaagaatcggaaaagattcaatattgggtggagaggctctgtcaaacgcgcctcgagcagatttcctctgctgataatgagatttcagagatgaccacagggcccccgcctcccccgccttctgtgtctcccctggccccacccttgagacgcttcgcaggcggactgcacctgcacaccactgacctggacgacatccctttggacatgttctactatccccccaagactccctctgccttgcctgtgatgccccaccctccaccctccaacccaccccacaaggtcccggcgccccctgtccttcccttatctggccatgtgagcgcctcatcctctccatgggtgcagcgcactccaccccccattcccatccctcccccgccatccgttcccacccaagacctcactcccacccgcccactgccctcggcgctggaagaagcactgagcaaccatcccttccgcactggggacacaggcaatccagtggaggactgggaggcaaagaaccacagtgggaagcccactaactcccctgtccctgaacagagcttcccacccaccccaaagacattttgcccaagcccacagcctccacgaggccctggcgtgtccaccatctccaaacctgtcatggtccaccaggagcccaatttcatctacaggccagctgtgaaatctgaagttctgccacaggagatgttgaagaggatggtggtttatcagacagcattcagacaagatttccggaaatatgaggaaggctttgacccctactctatgttcaccccagagcagatcatggggaaggatgtccggctcctacgcatcaagaaggagggatccttagacctggccctggaaggcggtgtggactcccccattgggaaggtggtcgtttctgctgtgtatgagcggggagctgctgagcggcatggtggcattgtgaaaggggacgagatcatggcaatcaacggcaagattgtgacagactacaccctggctgaggctgaggctgccctgcagaaggcctggaatcagggcggggactggatcgaccttgtggttgccgtctgccccccaaaggagtatgacgatgagctagcttctcttccctcctccgtagctgaaagcccccaaccggtccgaaagctccttgaagaccgtgctgccgtgcacagacacgggttcctcctgcagctggagcccacggaccttcttctgaagtccaaaaggggaaaccaaattcaccgttag

SEQ ID NO: 246481 - protein, 134 aa, Artificial Sequence
  derived and/or modified sequence
MVENSPSPLPERAIYGFVLFLSSQFGFILYLVWAFIPESWLNSLGLTYWPQKYWAVALPVYLLIAIVIGYVLLFGINMMSTSPLDSIHTITDNYAKNQQQKKYQEEAIPALRDISISEVNQMFFLAAKELYTKN

SEQ ID NO: 246482 - protein, 108 aa, Artificial Sequence
  derived and/or modified sequence
MVLYLVWAFIPESWLNSLGLTYWPQKYWAVALPVYLLIAIVIGYVLLFGINMMSTSPLDSIHTITDNYAKNQQQKKYQEEAIPALRDISISEVNQMFFLAAKELYTKN

SEQ ID NO: 246483 - protein, 25 aa, Artificial Sequence
  derived and/or modified sequence
MVLYLVWAFIPESWLNSLGLTYWPQ

SEQ ID NO: 246484 - protein, 158 aa, Artificial Sequence
  derived and/or modified sequence
MVPRSTSLALIVFLFHRLSKAPGKMVENSPSPLPERAIYGFVLFLSSQFGFILYLVWAFIPESWLNSLGLTYWPQKYWAVALPVYLLIAIVIGYVLLFGINMMSTSPLDSIHTITDNYAKNQQQKKYQEEAIPALRDISISEVNQMFFLAAKELYTKN

SEQ ID NO: 246485 - DNA, 477 bp, Artificial Sequence
  derived and/or modified sequence
atggtgccccgatcgaccagcctggccttgatcgtgttcctctttcaccggttgagtaaggcgcccggaaagatggttgaaaattctccaagtccactgcctgaacgggcaatatacgggttcgtactgtttcttagctcccagtttgggttcattctgtacctggtctgggcattcattcctgaaagctggcttaacagtctcggactcacatattggccgcaaaaatactgggcggtggctctacccgtgtacctacttatagccatagtgattggctacgtactcctgttcggcattaatatgatgtcaacctcccccctcgattctatccacacaataacagataattatgccaagaaccagcagcagaagaagtatcaggaagaggccatcccagccctgagagatatctcgatttccgaggtcaaccaaatgttctttctggcagctaaagagctttacacaaagaactag

SEQ ID NO: 246486 - DNA, 477 bp, Artificial Sequence
  derived and/or modified sequence
atggtgcccaggagcaccagcctggccctgattgtgttcctgttccaccggctgagcaaggcccctgggaagatggtggagaacagccccagccccctgcctgagcgggccatctacggctttgtgctcttcctgagcagccagtttggcttcatcctgtacctggtgtgggccttcatccctgagagctggctgaacagcctgggcctgacctactggccccagaagtactgggccgtggccctgcctgtgtacctgctgattgccatcgtcatcggctacgtgctgctgtttggcatcaacatgatgagcaccagccccctggacagcatccacaccatcacagacaactatgccaagaaccagcagcagaagaagtaccaggaggaggccatcccagccctgcgggacatcagcatcagcgaggtgaaccagatgttcttcctggccgccaaggagctgtacaccaagaactag

SEQ ID NO: 246487 - DNA, 477 bp, Artificial Sequence
  derived and/or modified sequence
atggtgccccggagcaccagcctggccctgatcgtgttcctgttccaccgactcagcaaggcaccaggtaagatggtagagaattctccatcaccacttcccgaaagagcaatctacggtttcgttctgttcctgtccagccaatttggcttcattctgtatctggtctgggcattcattcccgagagctggttgaattccctcggtcttacctactggccgcagaagtattgggctgttgctctccccgtgtacctgcttatagctatcgtgatcggttatgttctattgtttgggatcaacatgatgagcacgagccccctagattcgattcacaccattacagacaactatgccaaaaaccagcagcaaaagaaataccaggaggaggccattcctgcgctgcgagacatttctatatccgaagtcaaccagatgttttttctggctgcgaaagagctgtataccaagaattag

SEQ ID NO: 246488 - DNA, 2020 bp, Artificial Sequence
  derived and/or modified sequence
cacgcccgcccccgcgctcgctggctcccacccggggagggtcgttgtgcgcctgcgccagggtgggggttgccgtcgcgcctaggcctttccctcaggttttcctcttccccactgcggctccccagtcggcgcttgcgcggagaactcagcgctgagattgtctaaagccccaggaaaaatggtggaaaattcaccgtcgccattgccagaaagagcgatttatggctttgttcttttcttaagctcccaatttggcttcatactttacctcgtgtgggcctttattcctgaatcttggctaaactctttaggtttaacctattggcctcaaaaatattgggcagttgcattacctgtctacctccttattgctatagtaattggctacgtgctcttgtttgggattaacatgatgagtacctctccactcgactccatccatacaatcacagataactatgcaaaaaatcaacagcagaagaaataccaagaggaggccattccagccttaagagatatttctattagtgaagtaaaccaaatgttctttcttgcagccaaagaactttacaccaaaaactgaactgtgtgtaaccatagtaacaccaagcacgtatttatttataagtttttgccattataattttgaccataaattaatttgaccatctctcttattaatagagaagtaaaaaatgtaagttgaccttctcttagattatgttcaatgaatattgtaaatgttcaagtattgttaatgaatagaataaatacaatattgcattcccatatagcagacttaaaaaaaaaaatcaatgtcagtataatcaagaagttcctccagagaggcatttatattgtaatttgcaaagggcaatgatgtccttcctcctgtttgtcctgaggggcccagaattcaaacccttagtttttgggaagggtacagttagtacttgtgccatcagattcatgtctaagacacaaatatttgttgagtactcactgtgtaccaggtatttttctaggcactgaggatgaagtaatggtaagattctctctcaaagagcttatagttttagaagcagggtgaggcaactaagcaaataaacaaggaaatataatttgatgagtgctatgcaaagaattaagataatgtattctagaatgcaaagggatgactagttcacattgggtggtcaaggaaggcctctcagagagaggctgttgggatctaagtataaagcaggtgaggcaaagaccataaggtgggaaggaacttggtttgtcctaagaacagagagaagactggcattgggcatagagcataccaaacaagagagaatgtggtcccaggtgagcctggagagaccgggcccagattgtgaagggctttgtaggctggtgtaggaagtgtggatttaagtgtaagtgtgatgagtttgaggcactttaggatcaagctgttgggagtcttgaaggaaaggaatgacatggcctgatttctgtttttaaaagtcatcctgattggtgaatgaagaatagattcagaggaggagctgggaaggggacaataaccatatccttacccagtaagcatgagatggataacatgaatctgcttttcctgttccctagtttgtcccagttcctgttattttatggtgagagcatgtcaccacacttaagagcagtataaggggactggatgtggtggttcatgcctgtaatcccagcactttgggaggttgaggcagctggatcacctgaggtcaggagttggagaccagcctggccaacatggcaaaacctcatatctactaaaaatacaaaaattagtcaggcgtggtggcaggcgtctgtaatcccagctactcgggaggctgaggcaggagaattgcttgagcctgggaggcagagattgcagtgagccgagatcatgccactgcactccagccttagcaacagagcgagacggttaccttggcaaccgtctcaaaaaaaaaagaaacaaaaaaaa

SEQ ID NO: 246489 - DNA, 688 bp, Artificial Sequence
  derived and/or modified sequence
gaatgggcagggcccggggcctgggcgccgcgacctagtaggcccgcatgctgattgtctaaagccccaggaaaaatggtggaaaattcaccgtcgccattgccagaaagagcgatttatggctttgttcttttcttaagctcccaatttggcttcatactttacctcgtgtgggcctttattcctgaatcttggctaaactctttaggtttaacctattggcctcaaaaatattgggcagttgcattacctgtctacctccttattgctatagtaattggctacgtgctcttgtttgggattaacatgatgagtacctctccactcgactccatccatacaatcacagataactatgcaaaaaatcaacagcagaagaaataccaagaggaggccattccagccttaagagatatttctattagtgaagtaaaccaaatgttctttcttgcagccaaagaactttacaccaaaaactgaactgtgtgtaaccatagtaacaccaagcacgtatttatttataagtttttgccattataattttgaccataaattaatttgaccatctctcttattaatagagaagtaaaaaatgtaagttgaccttctcttagattatgttcaatgaatattgtaaatgttcaagtattgttaatgaatagaataaatacaatattgcattcccata

SEQ ID NO: 246490 - DNA, 656 bp, Artificial Sequence
  derived and/or modified sequence
ctcagcgctgaggtggccgagattgtctaaagccccaggaaaaatggtggaaaattcaccgtcgccattgccagaaagagcgatttatggctttgttcttttcttaagctcccaatttggcttcatactttacctcgtgtgggcctttattcctgaatcttggctaaactctttaggtttaacctattggcctcaaaaatattgggcagttgcattacctgtctacctccttattgctatagtaattggctacgtgctcttgtttgggattaacatgatgagtacctctccactcgactccatccatacaatcacagataactatgcaaaaaatcaacagcagaagaaataccaagaggaggccattccagccttaagagatatttctattagtgaagtaaaccaaatgttctttcttgcagccaaagaactttacaccaaaaactgaactgtgtgtaaccatagtaacaccaagcacgtatttatttataagtttttgccattataattttgaccataaattaatttgaccatctctcttattaatagagaagtaaaaaatgtaagttgaccttctcttagattatgttcaatgaatattgtaaatgttcaagtattgttaatgaatagaataaatacaatattgcattcccata

SEQ ID NO: 246491 - DNA, 803 bp, Artificial Sequence
  derived and/or modified sequence
ggccgaggtgtcgggaggggcctgggtgggcgtatgaaggacccgaggtcgagggcccccccataccccgcctcgaatgagaaatagaagtctccacgaatgggcagggcccggggcctgggcgccgcgacctagtaggcccgcatgctggtgggcgccgcgcgagccttgttccctgccctcccctcccacagggaggccacgcttgcagagctggagcgcgcgtctatcgccccagaacccccctccctgccctatcctccgccaccccttctgttgcggggcgcgcgccagcctgggtgtctgtatgcgctcgaggcgggggcgcgggttgcggacggaggcgcgggaggcggttctgcgcggcgggggccgtacccgcggcggagcgaggaggcgagaatggatcaatggtgccacggagcacatcgctggcgctgattgtgttccttttccacagattgtctaaagccccaggaaaaatggtggaaaattcaccgtcgccattgccagaaagagcgatttatggctttgttcttttcttaagctcccaatttggcttcaaaaatctgaagggatctcgtgtttgctgagtgttccgtgtgccagcactagcctaggaggttttagtctctacaaatatttatacagcaccagacgcgatggcaaagtggataaagcctggtccctgcccttaaggaggtcgtggtcttgtggaggagacagatggtactttacctcgtgtgggcctttattcctgaatcttggctaaactctttaggtttaacctattggcctcaaaa

SEQ ID NO: 246492 - DNA, 3437 bp, Artificial Sequence
  derived and/or modified sequence
tcccacagggaggccacgcttgcagagctggagcgcgcgtctatcgccccagaacccccctccctgccctatcctccgccaccccttctgttgcggggcgcgcgccagcctgggtgtctgtatgcgctcgaggcgggggcgcgggttgcggacggaggcgcgggaggcggttctgcgcggcgggggccgtacccgcggcggagcgaggaggcgagaatggatcaatggtgccacggagcacatcgctggcgctgattgtgttccttttccacagattgtctaaagccccaggaaaaatggtggaaaattcaccgtcgccattgccagaaagagcgatttatggctttgttcttttcttaagctcccaatttggcttcatactttacctcgtgtgggcctttattcctgaatcttggctaaactctttaggtttaacctattggcctcaaaaatattgggcagttgcattacctgtctacctccttattgctatagtaattggctacgtgctcttgtttgggattaacatgatgagtacctctccactcgactccatccatacaatcacagataactatgcaaaaaatcaacagcagaagaaataccaagaggaggccattccagccttaagagatatttctattagtgaagtaaaccaaatgttctttcttgcagccaaagaactttacaccaaaaactgaactgtgtgtaaccatagtaacaccaagcacgtatttatttataagtttttgccattataattttgaccataaattaatttgaccatctctcttattaatagagaagtaaaaaatgtaagttgaccttctcttagattatgttcaatgaatattgtaaatgttcaagtattgttaatgaatagaataaatacaatattgcattcccatatagcagacttaaaaaaaaaaatcaatgtcagtataatcaagaagttcctccagagaggcatttatattgtaatttgcaaagggcaatgatgtccttcctcctgtttgtcctgaggggcccagaattcaaacccttagtttttgggaagggtacagttagtacttgtgccatcagattcatgtctaagacacaaatatttgttgagtactcactgtgtaccaggtatttttctaggcactgaggatgaagtaatggtaagattctctctcaaagagcttatagttttagaagcagggtgaggcaactaagcaaataaacaaggaaatataatttgatgagtgctatgcaaagaattaagataatgtattctagaatgcaaagggatgactagttcacattgggtggtcaaggaaggcctctcagagagaggctgttgggatctaagtataaagcaggtgaggcaaagaccataaggtgggaaggaacttggtttgtcctaagaacagagagaagactggcattgggcatagagcataccaaacaagagagaatgtggtcccaggtgagcctggagagaccgggcccagattgtgaagggctttgtaggctggtgtaggaagtgtggatttaagtgtaagtgtgatgagtttgaggcactttaggatcaagctgttgggagtcttgaaggaaaggaatgacatggcctgatttctgtttttaaaagtcatcctgattggtgaatgaagaatagattcagaggaggagctgggaaggggacaataaccatatccttacccagtaagcatgagatggataacatgaatctgcttttcctgttccctagtttgtcccagttcctgttattttatggtgagagcatgtcaccacacttaagagcagtataaggggactggatgtggtggttcatgcctgtaatcccagcactttgggaggttgaggcagctggatcacctgaggtcaggagttggagaccagcctggccaacatggcaaaacctcatatctactaaaaatacaaaaattagtcaggcgtggtggcaggcgtctgtaatcccagctactcgggaggctgaggcaggagaattgcttgagcctgggaggcagagattgcagtgagccgagatcatgccactgcactccagccttagcaacagagcgagacggttaccttggcaaccgtctcaaaaaaaaaagaaacaaaaaaaagcagtgtaagggaaccagcgaactccaccaagtatagaatgataaataaatcatggtctgtttctacaattgaacactacacagccatgcaaacaagaatgcattacttctctacctaataatatgaattaatatggccataacattgggcaaaaaaagccagacacaaaagagtaaactactgcgtggttccctttatttgaagttcaaaatcaggaaaaactaatctatggtggcaaatattagaataatggttacctttggagaagagtattatctaggaggaggcatgaaggagcctgctggtgaattgaaaatgccctacatcttgatctgggtggtggttatggttacatggaggtaatacatgtttttaaaaaatcattaagttattaagatttctgcttctgatgcaagttacacctcaataaaaaggggaaaaaaaaacagtgcctatgcctacctccagaaaatgttgattcattggtctggagtagagcacaggcaggggtaattttttaacatcttccagatgcttccaatatgcagccagggtcgagaatgactcccttacatgattggactcccttacatgattggactcccttacatgattggactcccttacatgattggactcccttacatgattagacttaactgagttttggtcaagcagggcagtagctgtaagctttggaagagaaagccagcagttatccgagcggttccctcccatctgtgagactcttgctcatgtcagcagtattcccttgtcttcccctcggacaggtgatgggcctgagacgggtttgaaataggtcaggatagaaccttcatggactctagtgttctattgcacattaagcctcaaattaacttttcattctggtttccaaccactctgtccttacaggtcatgaaaggaacaccaatgttttgcaaactatgggcagcagtgtttttgagggtcatgatcagtttagtgtagcaattctctatcttttcttaagatcttaggacccctttattcttgtaaagagtgagagccccaaagaccttttgtgtatgtagatatatttaaaaattaaaatagaaaatttttaaatatttgtttataaataatacgttaccttttagatataaaattaactcatcacataatgagaaacaaaatttctgttacagaaacatttcacccaaatcattgtagtaatactaagctgattctaaaaggacaaatttaacataaacatattcatgagaaataactattttctaaaacaaaaaaattcagtgaga

SEQ ID NO: 246493 - DNA, 477 bp, Artificial Sequence
  derived and/or modified sequence
atggtgcctcgctctacatcactcgcgttaattgtgtttctgtttcatcggctcagcaaagctccaggcaagatggtagaaaactctccttcaccattacccgagcgcgctatctacggattcgtactgtttttgtccagtcagtttgggttcattttgtatcttgtgtgggcctttatccctgagtcttggctcaattctctcggcctgacttattggccacagaagtactgggcagtcgccctgccagtctacctgttgatagcaatcgttattggatacgttcttctttttgggatcaatatgatgtcgacatctccactggatagcatccacacaatcaccgataattacgcaaaaaatcagcaacagaagaaataccaggaggaggctattcctgcactcagagacatttcaatcagcgaggtcaatcagatgttctttctcgccgcaaaggaactatatacaaaaaactag

SEQ ID NO: 246494 - DNA, 477 bp, Artificial Sequence
  derived and/or modified sequence
atggtgcccagaagcaccagcctggccctgatcgtgttcctgttccacagactgagcaaggcccccggcaagatggtggagaacagccccagccccctgcccgagagagccatctacggcttcgtgctgttcctgagcagccagttcggcttcatcctgtacctggtgtgggccttcatccccgagagctggctgaacagcctgggcctgacctactggccccagaagtactgggccgtggccctgcccgtgtacctgctgatcgccatcgtgatcggctacgtgctgctgttcggcatcaacatgatgagcaccagccccctggacagcatccacaccatcaccgacaactacgccaagaaccagcagcagaagaagtaccaggaggaggccatccccgccctgagagacatcagcatcagcgaggtgaaccagatgttcttcctggccgccaaggagctgtacaccaagaactag

SEQ ID NO: 246495 - DNA, 405 bp, Artificial Sequence
  derived and/or modified sequence
atggtggagaacagccccagcccgctgccagaaagggctatttatggcttcgttttgttcctctcatctcagttcggcttcatactgtatctggtgtgggcatttatacccgaatcgtggttgaattcactgggccttacctactggcctcagaagtattgggctgtggccctcccagtgtatttgctaatagccatcgtgatcggttacgtgctgctcttcggcattaatatgatgtcaaccagcccactcgatagcattcacactataaccgacaattatgccaagaatcagcagcaaaagaagtaccaggaggaggccatccctgcactgcgcgatatctcaatttccgaggtcaatcagatgtttttccttgcagcaaaggagctgtacactaagaactag

SEQ ID NO: 246496 - DNA, 327 bp, Artificial Sequence
  derived and/or modified sequence
atggtcctgtatcttgtgtgggccttcatccctgagtcgtggctcaactcactcgggttgacgtattggcctcagaaatattgggccgttgccctgcccgtctacctgctgatcgccatcgtgattggttacgtgctcctattcggcatcaatatgatgtctacgtctcccttggattctatccacaccataaccgacaattacgccaagaatcagcaacagaagaagtaccaagaagaagcgatcccggccctccgcgacatttccatatcggaggtgaaccagatgttcttcctggccgcaaaggaactatacaccaagaactag

SEQ ID NO: 246497 - DNA, 405 bp, Artificial Sequence
  derived and/or modified sequence
atggtggagaactcccctagcccactgcctgaaagggctatctacggatttgttctgttcctgagtagtcagtttgggttcatcttgtaccttgtctgggccttcatccccgagtcctggcttaacagcctggggttgacgtactggccccagaagtactgggctgtggccctcccagtgtacctactaatcgcgatcgtgatcggttacgtacttttattcggaatcaatatgatgagtacctctccccttgactcgattcacacgattacggataactacgctaagaaccagcaacaaaagaagtaccaggaggaggccataccagcgcttcgggacatcagcatttctgaggtgaatcaaatgttcttcctcgctgcaaaggaactctataccaagaattag

SEQ ID NO: 246498 - DNA, 405 bp, Artificial Sequence
  derived and/or modified sequence
atggtggaaaacagtccatccccccttccagagagggcaatctatggatttgtgttgttcctcagcagccaattcgggttcattctttatctggtatgggcctttattcccgagtcgtggctaaattcacttgggttaacctactggccgcagaaatactgggccgttgccctccctgtgtatctcttgatcgccatcgtgattgggtatgtactcctttttggaattaacatgatgtctacaagccctctggacagcattcacaccatcacagataattatgccaaaaaccagcaacagaagaagtatcaggaagaggcaatcccagcacttcgggacatctccatttccgaagtgaatcagatgttctttctggcagccaaagaactatacactaaaaactag

SEQ ID NO: 246499 - DNA, 78 bp, Artificial Sequence
  derived and/or modified sequence
atggtgctgtatctggtatgggccttcattccagagtcgtggctcaattctttgggccttacctactggccacagtag

SEQ ID NO: 246500 - DNA, 405 bp, Artificial Sequence
  derived and/or modified sequence
atggtggagaacagccccagccccctgcctgagcgggccatctacggctttgtgctcttcctgagcagccagtttggcttcatcctgtacctggtgtgggccttcatccctgagagctggctgaacagcctgggcctgacctactggccccagaagtactgggccgtggccctgcctgtgtacctgctgattgccatcgtcatcggctacgtgctgctgtttggcatcaacatgatgagcaccagccccctggacagcatccacaccatcacagacaactatgccaagaaccagcagcagaagaagtaccaggaggaggccatcccagccctgcgggacatcagcatcagcgaggtgaaccagatgttcttcctggccgccaaggagctgtacaccaagaactag

SEQ ID NO: 246501 - DNA, 327 bp, Artificial Sequence
  derived and/or modified sequence
atggtgctgtacctggtgtgggccttcatccctgagagctggctgaacagcctgggcctgacctactggccccagaagtactgggccgtggccctgcctgtgtacctgctgattgccatcgtcatcggctacgtgctgctgtttggcatcaacatgatgagcaccagccccctggacagcatccacaccatcacagacaactatgccaagaaccagcagcagaagaagtaccaggaggaggccatcccagccctgcgggacatcagcatcagcgaggtgaaccagatgttcttcctggccgccaaggagctgtacaccaagaactag

SEQ ID NO: 246502 - DNA, 78 bp, Artificial Sequence
  derived and/or modified sequence
atggtgctgtacctggtgtgggccttcatccctgagagctggctgaacagcctgggcctgacctactggccccagtag

SEQ ID NO: 246503 - DNA, 405 bp, Artificial Sequence
  derived and/or modified sequence
atggtggagaacagccccagccccctgcccgagcgggccatctacggctttgtgctttttttaagttctcagtttgggtttattctttacctggtatgggccttcattccagaaagctggctcaacagtctgggcttaacttactggccgcagaaatactgggccgtggctctgcctgtgtatctactcattgccattgtgataggttacgtgctgttgtttggtattaatatgatgagcacgagtccattagactcgatccatacgatcacagacaattatgccaagaaccagcagcaaaagaagtatcaggaggaagctattccagctctacgcgatatctccattagcgaggtgaatcaaatgttcttcttagccgcgaaggagctttataccaagaactag

SEQ ID NO: 246504 - DNA, 327 bp, Artificial Sequence
  derived and/or modified sequence
atggtgctgtacctggtgtgggccttcatccccgagagctggctgaacagtctgggtctgacctactggccccagaagtattgggccgtcgctctgccggtttacttgctgatcgcgatcgtgatcggctacgttctcctttttggcattaatatgatgtcaaccagtcctctggatagcatccatactataacagataactacgctaagaaccagcagcaaaaaaagtaccaggaggaagctattccagcattgagggatatctccattagcgaagtaaatcagatgttcttccttgctgccaaggaactctacactaagaactag

SEQ ID NO: 246505 - DNA, 405 bp, Artificial Sequence
  derived and/or modified sequence
atggtggagaacagccccagccccctgcccgagcgggccatctacgggttcgtgctgttcctgtctagtcagttcggtttcattctgtaccttgtgtgggcattcatacccgaatcgtggctcaattctctgggtttaacatattggccgcaaaagtattgggccgtggccctgcccgtgtatcttttgatagcaatcgttatcggctatgtgctgttgttcggaattaacatgatgtctacaagtccattggacagtattcacaccatcaccgacaattatgccaagaatcagcagcaaaagaagtatcaagaagaagcaataccagccctacgcgatattagcatatccgaagttaaccagatgttcttcctagctgcaaaggagctatacactaagaattag

SEQ ID NO: 246506 - DNA, 405 bp, Artificial Sequence
  derived and/or modified sequence
atggtggagaacagccccagccccctgcccgagcgggccatctacggcttcgtgctttttcttagcagccagttcgggtttattctttatctcgtgtgggcctttatcccagaaagctggctcaatagtcttggcctcacatactggcctcagaaatactgggctgtggcactccctgtgtacctgctgatcgccatcgtgattgggtacgtcctgctgtttggtattaacatgatgtccacctcaccacttgactctatccacaccattacagataattatgccaagaaccaacagcagaaaaaataccaagaggaggccatccctgctctgcgcgacatttcaatcagcgaagtgaatcagatgttcttcttagccgccaaagagctgtataccaagaattag

SEQ ID NO: 246507 - DNA, 78 bp, Artificial Sequence
  derived and/or modified sequence
atggtgctgtacctggtgtgggccttcatccccgagagctggctgaatagcttgggtctgacctattggccccagtag

SEQ ID NO: 246508 - DNA, 972 bp, Artificial Sequence
  derived and/or modified sequence
gagccgcgggatcacgcccgcccccgcgctcgctggctcccacccggggagggtcgttgtgcgcctgcgccagggtgggggttgccgtcgcgcctaggcctttccctcaggttttcctcttccccactgcggctccccagtcggcgcttgcgcggagaactcagcgctgagattgtctaaagccccaggaaaaatggtggaaaattcaccgtcgccattgccagaaagagcgatttatggctttgttcttttcttaagctcccaatttggcttcaaaaatctgaagggatctcgtgtttgctgagtgttccgtgtgccagcactagcctaggaggttttagtctctacaaatatttatacagcaccagacgcgatggcaaagtggataaagcctggtccctgcccttaaggaggtcgtggtcttgtggaggagacagatggtactttacctcgtgtgggcctttattcctgaatcttggctaaactctttaggtttaacctattggcctcaaaaatattgggcagttgcattacctgtctacctccttattgctatagtaattggctacgtgctcttgtttgggattaacatgatgagtacctctccactcgactccatccatacaatcacagataactatgcaaaaaatcaacagcagaagaaataccaagaggaggccattccagccttaagagatatttctattagtgaagtaaaccaaatgttctttcttgcagccaaagaactttacaccaaaaactgaactgtgtgtaaccatagtaacaccaagcacgtatttatttataagtttttgccattataattttgaccataaattaatttgaccatctctcttattaatagagaagtaaaaaatgtaagttgaccttctcttagattatgttcaatgaatattgtaaatgttcaagtattgttaatgaatagaataaatacaatattgcattcccata

SEQ ID NO: 246509 - DNA, 405 bp, Artificial Sequence
  derived and/or modified sequence
atggtggagaattctccctcccctctgcccgagcgggctatttacggttttgtgctcttcctcagctctcagtttgggttcattctgtatcttgtgtgggcatttatacccgagagttggttgaattccctcggcctgacatactggccccagaaatattgggctgtggctttacccgtctatttactcatcgctatagttatcggttacgtcctcctcttcggaattaatatgatgtcgacttcgcccttggacagtattcataccataaccgataattacgccaaaaaccaacagcagaaaaaataccaagaggaagcaattcccgcacttagagatatttcaatctccgaagttaaccaaatgttttttctcgcagctaaagagctgtacacaaagaactag

SEQ ID NO: 246510 - DNA, 327 bp, Artificial Sequence
  derived and/or modified sequence
atggtactgtaccttgtctgggccttcatccctgaaagttggctgaacagtctcggcctgacttactggccgcagaagtattgggccgtcgctcttccggtctacctgctgatagcaatcgttattggatacgtcctcctgtttggtataaatatgatgtccacaagccctctagattctatccatactattactgacaactatgcgaagaaccagcagcagaagaaataccaggaagaagccatccccgctctgagggatatcagcatatcagaggtgaaccagatgttttttctggccgctaaggagttatacactaagaactag

SEQ ID NO: 246511 - DNA, 405 bp, Artificial Sequence
  derived and/or modified sequence
atggtcgagaacagtccatctccactgcctgaaagggcaatctacggattcgtcctgtttctttcctctcaatttggcttcatactgtaccttgtgtgggcgttcatacctgagtcctggctaaatagcctgggtttgacatactggccacagaaatattgggccgtcgcactgcctgtctacttactgattgctatcgtcataggatatgtcctcttattcggcattaacatgatgagcacaagtccactggactcaattcatacaattaccgataattacgccaaaaaccagcagcaaaaaaagtaccaggaagaagctatcccggcacttcgcgatatctcgatctcagaagtaaaccagatgttcttcctcgctgccaaagagttgtatactaagaactag

SEQ ID NO: 246512 - DNA, 405 bp, Artificial Sequence
  derived and/or modified sequence
atggttgaaaactcccctagtccattgcccgaacgggctatctatgggtttgtgctgtttttatcatcgcaattcggatttatcttgtacctggtgtgggctttcataccagagagttggctaaactcacttggcttgacatattggccacaaaagtactgggcagtcgctcttcccgtgtatttgctgatcgcgatcgtgatcggctacgtgttgctgtttgggatcaatatgatgtccacctctccactggacagcatacatacgatcacagacaattatgcaaagaatcagcagcagaaaaaatatcaggaagaggcaatacccgctctcagagatatatccatcagtgaggtcaaccaaatgtttttcctggccgctaaagaactgtacactaagaattag

SEQ ID NO: 246513 - DNA, 78 bp, Artificial Sequence
  derived and/or modified sequence
atggtgctgtatctggtctgggctttcattcctgagagttggctcaactcactggggttgacctactggccccagtag

SEQ ID NO: 246514 - DNA, 405 bp, Artificial Sequence
  derived and/or modified sequence
atggtggagaacagccccagccccctgcccgagagagccatctacggcttcgtgctgttcctgagcagccagttcggcttcatcctgtacctggtgtgggccttcatccccgagagctggctgaacagcctgggcctgacctactggccccagaagtactgggccgtggccctgcccgtgtacctgctgatcgccatcgtgatcggctacgtgctgctgttcggcatcaacatgatgagcaccagccccctggacagcatccacaccatcaccgacaactacgccaagaaccagcagcagaagaagtaccaggaggaggccatccccgccctgagagacatcagcatcagcgaggtgaaccagatgttcttcctggccgccaaggagctgtacaccaagaactag

SEQ ID NO: 246515 - DNA, 327 bp, Artificial Sequence
  derived and/or modified sequence
atggtgctgtacctggtgtgggccttcatccccgagagctggctgaacagcctgggcctgacctactggccccagaagtactgggccgtggccctgcccgtgtacctgctgatcgccatcgtgatcggctacgtgctgctgttcggcatcaacatgatgagcaccagccccctggacagcatccacaccatcaccgacaactacgccaagaaccagcagcagaagaagtaccaggaggaggccatccccgccctgagagacatcagcatcagcgaggtgaaccagatgttcttcctggccgccaaggagctgtacaccaagaactag

SEQ ID NO: 246516 - DNA, 78 bp, Artificial Sequence
  derived and/or modified sequence
atggtgctgtacctggtgtgggccttcatccccgagagctggctgaacagcctgggcctgacctactggccccagtag

SEQ ID NO: 246517 - protein, 476 aa, Artificial Sequence
  derived and/or modified sequence
MIRPQLRTAGLGRCLLPGLLLLLVPVLWAGAEKLHTQPSCPAVCQPTRCPALPTCALGTTPVFDLCRCCRVCPAAEREVCGGAQGQPCAPGLQCLQPLRPGFPSTCGCPTLGGAVCGSDRRTYPSMCALRAENRAARRLGKVPAVPVQWGNCGDTGTRSAGPLRRNYNFIAAVVEKVAPSVVHVQLWGRLLHGSRLVPVYSGSGFIVSEDGLIITNAHVVRNQQWIEVVLQNGARYEAVVKDIDLKLDLAVIKIESNAELPVLMLGRSSDLRAGEFVVALGSPFSLQNTATAGIVSTKQRGGKELGMKDSDMDYVQIDATINYGNSGGPLVNLDGDVIGVNSLRVTDGISFAIPSDRVRQFLAEYHEHQMKGKAFSNKKYLGLQMLSLTVPLSEELKMHYPDFPDVSSGVYVCKVVEGTAAQSSGLRDHDVIVNINGKPITTTTDVVKALDSDSLSMAVLRGKDNLLLTVIPETIN

SEQ ID NO: 246518 - DNA, 1431 bp, Artificial Sequence
  derived and/or modified sequence
atgataagacctcaacttaggacagccggtcttgggagatgcctcttgcccggcctgctgttgctgctggtgcccgtgttatgggccggcgcagagaagttgcacacccagccgagctgcccagccgtgtgccaacctacgcggtgtcctgctttacctacatgtgctcttgggaccacccccgtattcgacctttgtaggtgctgtcgtgtgtgcccggccgctgagcgggaagtgtgtgggggagctcagggtcagccttgcgctcctggcctgcagtgcctacagcccttgcgacctggcttccccagcacttgtggatgcccaacactcggcggcgccgtgtgcgggtctgatagacggacgtatccaagtatgtgcgctctccgcgcggagaatagggcagcccggcgcctgggcaaagtgccagccgttccagttcagtggggaaattgtggcgataccggcacacggtccgcgggacctctgcggcggaattacaactttattgccgctgtggtggagaaggtggcaccttcagtggtgcacgtgcagctttgggggcgattgctccacggctcacgtttggtgccagtgtacagcggatccggattcatagtgtcagaggatggcttgattatcacgaatgctcacgtagtccgaaatcagcaatggattgaggtcgtgctgcagaatggcgctagatatgaggccgttgtgaaagacatcgacctgaaattagacctggctgtcatcaaaatagaatcaaacgcagagttacccgttctgatgctggggcggtcttctgacctccgggcgggcgagttcgtggtggcgctcggttcccccttttcactgcagaacaccgccactgccggcattgtttctaccaaacagagaggaggtaaagagctgggaatgaaagacagtgatatggattacgtgcagattgatgcaaccatcaattacgggaattccggtggtcccctggtgaatctggatggggatgtgatcggtgtgaacagccttagagtaaccgacgggatctcatttgcgatccctagcgacagagtgcgccagttcctggctgagtaccacgagcaccaaatgaagggaaaggcgttttctaataagaagtaccttgggctgcaaatgttatcattaacagtgccactttccgaagaacttaaaatgcattaccctgactttccagacgtgtcctcaggagtgtatgtgtgcaaagttgtagagggaactgccgcccagagttccggacttagagaccacgacgtgattgtgaatataaatggaaaacctatcactactactacggatgtagttaaagctctggactctgactctctgtcaatggccgtgctgagaggaaaggataacctgctgctcaccgtcatacccgagactattaattag

SEQ ID NO: 246519 - DNA, 2095 bp, Artificial Sequence
  derived and/or modified sequence
gcggaggcggcgccgtggccgggagaaagtgtctctcatttaggagggtttgcaggtccagagtaaagtcactgaagagtggaagcgaggaaggaacaggatgattagacctcagctgcggaccgcggggctgggacgatgcctcctgccggggctgctgctgctcctggtgcccgtcctctgggccggggctgaaaagctacatacccagccctcctgccccgcggtctgccagcccacgcgctgccccgcgctgcccacctgcgcgctggggaccacgccggtgttcgacctgtgccgctgttgccgcgtctgccccgcggccgagcgtgaagtctgcggcggggcgcagggccaaccgtgcgccccggggctgcagtgcctccagccgctgcgccccgggttccccagcacctgcggttgcccgacgctgggaggggccgtgtgcggcagcgacaggcgcacctaccccagcatgtgcgcgctccgggccgaaaaccgcgccgcgcgccgcctgggcaaggtcccggccgtgcctgtgcagtgggggaactgcggggatacagggaccagaagcgcaggcccgctcaggaggaattacaacttcatcgccgcggtggtggagaaggtggcgccatcggtggttcacgtgcagctgtggggcaggttacttcacggcagcaggcttgttcctgtgtacagtggctctgggttcatagtgtctgaggacgggctcattattaccaatgcccatgttgtcaggaaccagcagtggattgaggtggtgctccagaatggggcccgttatgaagctgttgtcaaggatattgaccttaaattggatcttgcggtgattaagattgaatcaaatgctgaacttcctgtactgatgctgggaagatcatctgaccttcgggctggagagtttgtggtggctttgggcagcccattttctctgcagaacacagctactgcaggaattgtcagcaccaaacagcgagggggcaaagaactggggatgaaggattcagatatggactacgtccagattgatgccacaattaattatgggaattctggtggtcctctggtgaacttggatggtgatgtgattggcgtcaattcattgagggtgactgatggaatctcctttgcaattccttcagatcgagttaggcagttcttggcagaataccatgagcaccagatgaaaggaaaggcgttttcaaataagaaatatctgggtctgcaaatgctgtccctcactgtgccccttagtgaagaattgaaaatgcattatccagatttccctgatgtgagttctggggtttatgtatgtaaagtggttgaaggaacagctgctcaaagctctggattgagagatcacgatgtaattgtcaacataaatgggaaacctattactactacaactgatgttgttaaagctcttgacagtgattccctttccatggctgttcttcggggaaaagataatttgctcctgacagtcatacctgaaacaatcaattaaatatcttgttttaaagtgggattatctaaaaaaaaaaaaaccagttatatcacgtggtttgtattggagatgtgccaaacatggcaagaagtttttggatctttttcttacaaagaaaaatggatggttatcaacccaaatgcccatcaatgacagactggataaagcaaatgtggtacatatacaccatggaatactatgcagccataaaaagcaacagtcctctgcagggacatggatggagctggaaaccattatcctcagcaaactaacgcaggaacagaaaaccaaatactgcatgttctcacttataagtgggagctgaacaatgagaacacatgaacatagggaggggaacaacacacactggggcctggcagtgggtagggtagagggagggagagcattagcaaaaatagctaatgcatgctgggcttaacacccaggtgatgggttgattgataggtgcagcaaaccatcatggcacacatttacctatgaaacaaacctgcacatcctgcatatgtacctcagaacttaaaaataaaaataaaaagaaaaatg

SEQ ID NO: 246520 - DNA, 1431 bp, Artificial Sequence
  derived and/or modified sequence
atgatccggccccagctgaggacagctggcctgggccgctgcctgctgcccggcctgctgctgctgctggtgcctgtgctgtgggccggggctgagaagctgcacacccagcccagctgcccagctgtgtgccagcccacccgctgcccagccctgcccacctgtgccctgggcaccacccctgtgtttgacctgtgccgctgctgccgggtgtgcccagctgctgagcgggaggtgtgtggcggggcccagggccagccctgtgcccctggcctgcagtgcctgcagcccctgcggcccggcttccccagcacctgtggctgccccaccctgggcggcgctgtgtgtggcagtgacaggaggacctaccccagcatgtgtgccctgcgggcagagaacagagctgcccggcggctgggcaaggtgcctgctgtgcctgtgcagtggggcaactgtggggacaccggcaccaggtctgctggccccctgcggaggaactacaacttcatcgctgctgtggtggagaaggtggcccccagcgtggtgcacgtgcagctgtggggccgcctgctgcacggcagccggctggtgcctgtgtacagcggcagcggcttcatcgtgtctgaagatggcctcatcatcaccaatgcccacgtggtgaggaaccagcagtggattgaggtggtgctgcagaatggagcccgctatgaggccgtggtgaaggacatcgacctgaagctggacctggccgtcatcaagattgagagcaatgctgagctgcctgtgctgatgctgggccgcagcagtgacctgcgggccggggagtttgtggtggccctgggcagccccttcagcctgcagaacacagccacagctggcatcgtgtccaccaagcagagaggaggcaaggagctgggcatgaaggacagcgacatggactatgtgcagattgatgccaccatcaactacggcaacagcggcggccccctggtgaacctggatggagatgtgattggagtgaacagcctgcgggtgacagatggcatcagctttgccatccccagcgacagagtgcggcagttcctggccgagtaccacgagcaccagatgaagggcaaggccttcagcaacaagaagtacctgggcctgcagatgctgagcctgactgtgcccctgtctgaggagctgaagatgcactacccagacttcccagatgtgagcagcggcgtgtatgtgtgcaaggtggtggagggcacagctgcccagagcagcggcctgcgggaccatgatgtgattgtgaacatcaacgggaagcccatcaccaccaccacagatgtggtgaaggccctggacagcgacagcctgtccatggctgtgctgcggggcaaggacaacctgctgctgaccgtcatccctgagaccatcaactag

SEQ ID NO: 246521 - DNA, 1431 bp, Artificial Sequence
  derived and/or modified sequence
atgatccggccccagctgcggaccgccggcctgggccggtgcctgctgcctggcctccttttacttctggtccccgtgttgtgggcaggggccgaaaagctgcacacacaacccagctgcccagctgtgtgccagccgaccaggtgccccgccttacccacctgcgcacttggaacaaccccagtgtttgacctttgtagatgctgtagggtttgcccagccgcggagcgcgaggtctgtggaggtgcacagggccagccatgtgctcctggattgcagtgtttgcagcctctgcggccgggcttcccgagtacttgcgggtgccccaccctagggggtgctgtgtgtggcagtgataggagaacttatcccagcatgtgtgcgcttagggcagaaaatcgcgctgccagacggctaggcaaggttccagcagtgcccgtgcagtgggggaattgcggtgacacaggaactagaagtgctggacccttgagaagaaactacaacttcatagctgcagttgtggagaaggtcgctccaagcgtcgtccatgttcagctctggggccggctcctgcacgggtcccgtttggtacctgtttatagcggtagcggcttcatagtctctgaagacgggttaataataaccaatgcacatgtcgttcgaaatcagcagtggatagaggtcgtgttgcagaacggtgctagatacgaggccgtagtgaaggatatcgatctgaaactcgacctggcagtcatcaagattgagtccaacgcagagctgcctgtccttatgctcggcagatccagtgacctacgggccggagagttcgttgtggcccttgggagccccttctccctccaaaacacagctactgccggcattgtgagtacgaaacagcgcggcggaaaggaactaggtatgaaggattccgatatggactatgtgcaaattgatgctacaatcaactatggtaactctggcggtcctttagtaaaccttgacggtgacgtaattggggtgaacagcctgagggtgacggatggtattagcttcgccatcccatccgaccgggtgagacagtttttagccgaatatcacgaacaccagatgaaaggaaaggctttctccaataagaagtatcttggcctgcagatgctgtccctgacggttcccctgtcagaggaactcaagatgcactatcccgactttccagatgtgtcttcaggcgtgtacgtgtgtaaggtggttgagggaacagcagcacagtcatctggcctccgcgaccatgacgtgatcgtcaatatcaacgggaagcccattaccacaacaacagacgtggtcaaggccctagatagcgactccctaagcatggccgtattacgaggaaaagataatctgctccttacagtgattcccgagacaataaattag

SEQ ID NO: 246522 - DNA, 1431 bp, Artificial Sequence
  derived and/or modified sequence
atgatcaggccccaattacgcacagcgggactggggagatgtctcttacccggactcctgctgctgttggtgcccgttttgtgggctggtgcagaaaaattacacacacagccgagctgtcctgcagtttgccagccaacacgatgtcctgccctccctacttgcgctctgggaactactcctgtttttgacctgtgtaggtgttgccgggtttgtccagctgctgagagggaggtgtgcggtggcgctcaaggccagccctgtgccccaggcctgcagtgtttgcagccactccggccaggatttccctcaacttgcggatgccccacactgggcggagcagtgtgtggatccgacagaagaacgtatccaagtatgtgtgcgctgcgcgcagagaatcgcgcagctcgtagactgggaaaagtgccggcagtaccagtacagtgggggaattgtggcgatacgggcactaggagcgcaggccctctgcggcgtaactataattttattgcggcagtcgttgagaaagttgccccttcagtcgtccacgtacagctgtgggggcgtctgcttcatggcagtagactggtacctgtgtacagcggctccggtttcatagtatcagaggatgggctcatcattacaaacgctcacgtggtccggaaccagcaatggattgaggtcgtgctccaaaacggtgcgcgatacgaggcggtcgtaaaggatatcgatttgaagctggatctggcagtcatcaagatagagtctaacgccgagctccccgtgctcatgctgggcagatctagtgatttgcgggctggagaattcgttgtggccctaggaagccccttttcgcttcagaacacagccactgccggtatagtctctaccaaacaaagagggggaaaggagctcgggatgaaggacagcgatatggactacgttcagatagacgcaactatcaattacggtaattccggaggtccactggtgaacctggatggggacgttataggtgtcaactccctccgggttaccgacggtatttcattcgccatcccatccgaccgcgtacgccagtttctagctgaataccacgaacaccagatgaaagggaaagccttttctaataaaaagtacttgggcttgcagatgctgagtttaactgtcccattgagcgaagagctgaagatgcattacccagatttcccagatgtctctagcggagtctatgtgtgcaaagtcgttgaggggactgccgcacagagcagtggtctgcgggaccacgacgttattgtgaatatcaacggaaaaccgataacgacaacgactgacgtcgtgaaagcgcttgactcggatagtctcagtatggccgtactaagaggaaaggacaacctactcttgactgtcatacctgagacaataaactag

SEQ ID NO: 246523 - DNA, 1431 bp, Artificial Sequence
  derived and/or modified sequence
atgatcagaccccagctgagaaccgccggcctgggcagatgcctgctgcccggcctgctgctgctgctggtgcccgtgctgtgggccggcgccgagaagctgcacacccagcccagctgccccgccgtgtgccagcccaccagatgccccgccctgcccacctgcgccctgggcaccacccccgtgttcgacctgtgcagatgctgcagagtgtgccccgccgccgagagagaggtgtgcggcggcgcccagggccagccctgcgcccccggcctgcagtgcctgcagcccctgagacccggcttccccagcacctgcggctgccccaccctgggcggcgccgtgtgcggcagcgacagaagaacctaccccagcatgtgcgccctgagagccgagaacagagccgccagaagactgggcaaggtgcccgccgtgcccgtgcagtggggcaactgcggcgacaccggcaccagaagcgccggccccctgagaagaaactacaacttcatcgccgccgtggtggagaaggtggcccccagcgtggtgcacgtgcagctgtggggcagactgctgcacggcagcagactggtgcccgtgtacagcggcagcggcttcatcgtgagcgaggacggcctgatcatcaccaacgcccacgtggtgagaaaccagcagtggatcgaggtggtgctgcagaacggcgccagatacgaggccgtggtgaaggacatcgacctgaagctggacctggccgtgatcaagatcgagagcaacgccgagctgcccgtgctgatgctgggcagaagcagcgacctgagagccggcgagttcgtggtggccctgggcagccccttcagcctgcagaacaccgccaccgccggcatcgtgagcaccaagcagagaggcggcaaggagctgggcatgaaggacagcgacatggactacgtgcagatcgacgccaccatcaactacggcaacagcggcggccccctggtgaacctggacggcgacgtgatcggcgtgaacagcctgagagtgaccgacggcatcagcttcgccatccccagcgacagagtgagacagttcctggccgagtaccacgagcaccagatgaagggcaaggccttcagcaacaagaagtacctgggcctgcagatgctgagcctgaccgtgcccctgagcgaggagctgaagatgcactaccccgacttccccgacgtgagcagcggcgtgtacgtgtgcaaggtggtggagggcaccgccgcccagagcagcggcctgagagaccacgacgtgatcgtgaacatcaacggcaagcccatcaccaccaccaccgacgtggtgaaggccctggacagcgacagcctgagcatggccgtgctgagaggcaaggacaacctgctgctgaccgtgatccccgagaccatcaactag

SEQ ID NO: 246524 - protein, 52 aa, Artificial Sequence
  derived and/or modified sequence
MLSNCRQNTLGHNTQTSIAQDFSSEQGRTAPQDQKASIQIYPWMQRMNSHSG

SEQ ID NO: 246525 - protein, 71 aa, Artificial Sequence
  derived and/or modified sequence
MLSNCRQNTLGHNTQTSIAQDFSSEQGRTAPQDQKASIQIYPWMQRMNSHSVCFVPGSLGVGYGADRRRGR

SEQ ID NO: 246526 - DNA, 462 bp, Artificial Sequence
  derived and/or modified sequence
atgctgtctaactgtaggcagaataccctgggccataacacccagactagtatagcgcaggattttagtagcgagcagggacgcacagctcctcaggaccagaaggcttcaattcagatttacccatggatgcagcggatgaacagccactccggtgttgggtacggggccgatcggcgtcggggaaggcaaatttacagtcgataccagactctcgagctggagaaggaattccatttcaataggtatctgaccagaaggagacggatagaaatagccaatgccctgtgtcttaccgaacgacaaattaagatatggttccaaaatagaaggatgaaatggaaaaaagaatctaatctgaccagcaccctgtccggagggggggggggagccacagccgattcactcggcggcaaagaagagaagagagaggagaccgaagaggaaaagcagaaggagtag

SEQ ID NO: 246527 - DNA, 159 bp, Artificial Sequence
  derived and/or modified sequence
atgctgtccaattgcagacagaacaccttaggacataacacccagacctccattgcacaggatttcagttctgaacagggacggaccgctccacaggaccagaaggcctccatccagatatatccctggatgcagcggatgaactcccactcgggatag

SEQ ID NO: 246528 - DNA, 216 bp, Artificial Sequence
  derived and/or modified sequence
atgctgtccaactgccggcagaatactctaggtcacaatacgcagactagtatcgcacaggattttagcagcgagcagggccggaccgcgccccaggaccagaaagcgtcgatccagatctacccctggatgcagcgtatgaactcacacagcgtctgcttcgtcccggggtccctcggtgtcgggtatggcgcggataggaggagaggacggtag

SEQ ID NO: 246529 - DNA, 462 bp, Artificial Sequence
  derived and/or modified sequence
atgctgagcaactgccggcagaacaccctgggccacaacacccagaccagcatcgcccaggacttcagcagcgagcagggccgcacagccccccaggaccagaaggccagcatccagatctacccctggatgcagaggatgaacagccacagcggcgtgggctatggagctgacagaagaagaggccggcagatctacagccgctaccagaccctggagctggagaaggagttccacttcaaccgctacctgaccaggagaagacgcatcgagatcgccaatgccctgtgcctgacagagcggcagatcaagatctggttccagaacagaaggatgaagtggaagaaggagagcaacctgaccagcaccctgagcggcggcggcggcggggccacagctgacagcctgggcggcaaggaggagaagcgggaggagacagaggaggagaagcagaaggagtag

SEQ ID NO: 246530 - DNA, 159 bp, Artificial Sequence
  derived and/or modified sequence
atgctgagcaactgccggcagaacaccctgggccacaacacccagaccagcatcgcccaggacttcagcagcgagcagggccgcacagccccccaggaccagaaggccagcatccagatctacccctggatgcagaggatgaacagccacagcggctag

SEQ ID NO: 246531 - DNA, 216 bp, Artificial Sequence
  derived and/or modified sequence
atgctgagcaactgccggcagaacaccctgggccacaacacccagaccagcatcgcccaggacttcagcagcgagcagggccgcacagccccccaggaccagaaggccagcatccagatctacccctggatgcagaggatgaacagccacagcgtgtgctttgtgcccggcagcctgggcgtgggctatggagctgacagaagaagaggaagatag

SEQ ID NO: 246532 - DNA, 462 bp, Artificial Sequence
  derived and/or modified sequence
atgctgagcaactgccggcagaacaccctgggccacaacacccagacatcaattgctcaggattttagtagcgagcagggaagaactgccccccaggatcagaaggctagcatccaaatttacccgtggatgcaacgcatgaactcacactctggagttggttacggcgcagatcgccgaaggggacgacagatttacagccgttaccagactctggaacttgagaaagagtttcatttcaatcgctacttaacccgtcgccgtagaattgagatcgctaacgctttatgcctcacagagcgacaaataaagatatggttccagaatcgcagaatgaaatggaaaaaggagtccaaccttaccagcactctgtctgggggcggaggaggcgccacggccgacagcctgggcggtaaggaggaaaagagggaagaaacagaagaggaaaaacaaaaagaatag

SEQ ID NO: 246533 - DNA, 159 bp, Artificial Sequence
  derived and/or modified sequence
atgctgagcaactgccggcagaacaccctgggccacaacacccagactagcatcgcgcaagacttcagctctgagcagggtcgaaccgctcctcaagatcagaaggcatctatccagatatatccctggatgcagcgtatgaatagtcattcaggatag

SEQ ID NO: 246534 - DNA, 216 bp, Artificial Sequence
  derived and/or modified sequence
atgctgagcaactgccggcagaacaccctgggccacaacacccagaccagcattgcccaagacttctcatctgaacagggaaggacagctccgcaagatcaaaaggcatcaatccaaatctacccctggatgcagcgaatgaactcccactccgtttgcttcgtgcccggcagtctaggggttgggtatggggcggatcgcaggcgaggaaggtag

SEQ ID NO: 246535 - DNA, 462 bp, Artificial Sequence
  derived and/or modified sequence
atgctgtccaattgtcgccagaacacccttgggcacaacacgcagacgagtatcgcccaggacttcagttcagagcaaggcagaaccgctccacaggatcagaaggcatcaattcagatctacccttggatgcagcggatgaattcgcattctggagtcggttacggtgcagacagaaggcgcggaaggcagatatactctcggtaccagaccttggaactggagaaagagttccatttcaaccggtatctaactcgtcgaaggagaatagagatagcgaacgctctgtgcctcaccgagcggcagatcaaaatctggtttcagaacaggcgtatgaagtggaaaaaggagtccaacctgacgagcaccctgtccggcggaggcggtggagctacggctgacagcttaggcggaaaggaggagaagcgcgaggaaacagaggaggaaaagcaaaaagaatag

SEQ ID NO: 246536 - DNA, 159 bp, Artificial Sequence
  derived and/or modified sequence
atgttgtcaaactgtagacagaacactttgggacacaatactcagacttcaatcgctcaagactttagctccgagcaagggaggactgcccctcaagaccagaaagcctcaatccagatttacccatggatgcagagaatgaactcccactcaggctag

SEQ ID NO: 246537 - DNA, 216 bp, Artificial Sequence
  derived and/or modified sequence
atgctgtctaattgcaggcaaaataccctcggtcacaatacacaaacgtccatcgcacaggattttagctctgagcagggcaggacagctccgcaagatcagaaagcgtccatacaaatctacccttggatgcaaagaatgaactcccacagtgtgtgcttcgtgcccggatctctaggggtggggtacggcgcagacaggcggcgtggacgttag

SEQ ID NO: 246538 - DNA, 462 bp, Artificial Sequence
  derived and/or modified sequence
atgctgagcaactgcagacagaacaccctgggccacaacacccagaccagcatcgcccaggacttcagcagcgagcagggcagaaccgccccccaggaccagaaggccagcatccagatctacccctggatgcagagaatgaacagccacagcggcgtgggctacggcgccgacagaagaagaggcagacagatctacagcagataccagaccctggagctggagaaggagttccacttcaacagatacctgaccagaagaagaagaatcgagatcgccaacgccctgtgcctgaccgagagacagatcaagatctggttccagaacagaagaatgaagtggaagaaggagagcaacctgaccagcaccctgagcggcggcggcggcggcgccaccgccgacagcctgggcggcaaggaggagaagagagaggagaccgaggaggagaagcagaaggagtag

SEQ ID NO: 246539 - DNA, 159 bp, Artificial Sequence
  derived and/or modified sequence
atgctgagcaactgcagacagaacaccctgggccacaacacccagaccagcatcgcccaggacttcagcagcgagcagggcagaaccgccccccaggaccagaaggccagcatccagatctacccctggatgcagagaatgaacagccacagcggctag

SEQ ID NO: 246540 - DNA, 216 bp, Artificial Sequence
  derived and/or modified sequence
atgctgagcaactgcagacagaacaccctgggccacaacacccagaccagcatcgcccaggacttcagcagcgagcagggcagaaccgccccccaggaccagaaggccagcatccagatctacccctggatgcagagaatgaacagccacagcgtgtgcttcgtgcccggcagcctgggcgtgggctacggcgccgacagaagaagaggcagatag

SEQ ID NO: 246541 - protein, 350 aa, Artificial Sequence
  derived and/or modified sequence
MIRGFEAPMAENPPPPPPPVIFCHDSPKRVLVSVIRTTPIKPTCGGGGEPEPPPPLIPTSPGFSDFMVYPWRWGENAHNVTLSPGAAGAAASAALPAAAAAEHSGLRGRGAPPPAASASAAASGGEDEEEASSPDSGHLKDGIRRGRPRADTVRDLINEGEHSSSRIRCNICNRVFPREKSLQAHKRTHTGERPYLCDYPDCGKAFVQSGQLKTHQRLHTGEKPFVCSENGCLSRFTHANRHCPKHPYARLKREEPTDTLSKHQAADNKAAAEWLARYWEMREQRTPTLKGKLVQKADQEQQDPLEYLQSDEEDDEKRGAQRRLQEQRERLHGALALIELANLTGAPLRQ

SEQ ID NO: 246542 - DNA, 1053 bp, Artificial Sequence
  derived and/or modified sequence
atgatcagaggcttcgaggcccccatggccgagaaccccccccccccccccccccccgtgatcttctgccacgacagccccaagagagtgctggtgagcgtgatcagaaccacccccatcaagcccacctgcggcggcggcggcgagcccgagccccccccccccctgatccccaccagccccggcttcagcgacttcatggtgtacccctggagatggggcgagaacgcccacaacgtgaccctgagccccggcgccgccggcgccgccgccagcgccgccctgcccgccgccgccgccgccgagcacagcggcctgagaggcagaggcgcccccccccccgccgccagcgccagcgccgccgccagcggcggcgaggacgaggaggaggccagcagccccgacagcggccacctgaaggacggcatcagaagaggcagacccagagccgacaccgtgagagacctgatcaacgagggcgagcacagcagcagcagaatcagatgcaacatctgcaacagagtgttccccagagagaagagcctgcaggcccacaagagaacccacaccggcgagagaccctacctgtgcgactaccccgactgcggcaaggccttcgtgcagagcggccagctgaagacccaccagagactgcacaccggcgagaagcccttcgtgtgcagcgagaacggctgcctgagcagattcacccacgccaacagacactgccccaagcacccctacgccagactgaagagagaggagcccaccgacaccctgagcaagcaccaggccgccgacaacaaggccgccgccgagtggctggccagatactgggagatgagagagcagagaacccccaccctgaagggcaagctggtgcagaaggccgaccaggagcagcaggaccccctggagtacctgcagagcgacgaggaggacgacgagaagagaggcgcccagagaagactgcaggagcagagagagagactgcacggcgccctggccctgatcgagctggccaacctgaccggcgcccccctgagacagtag

SEQ ID NO: 246543 - DNA, 1053 bp, Artificial Sequence
  derived and/or modified sequence
atgattcggggctttgaggccccgatggccgaaaacccacctccacctccacctcccgtgatcttttgccacgacagtcctaagagggttctggtgtcagtgatccgaaccactcccattaagccaacttgtgggggagggggagagcctgaaccaccccctccgttaatccctaccagtccagggttcagcgattttatggtttatccatggagatggggggagaatgcgcacaacgtgactctgtctccgggcgctgccggagcggctgcttcagctgctctgccggctgctgctgccgcggagcatagtgggttacgggggcgcggagcccccccgccggccgccagtgcgtccgctgcggcctccggaggcgaggatgaggaggaggccagctcacctgattctggccacctaaaagatgggatccgcaggggtaggccaagggccgacaccgtacgcgatcttattaacgagggagagcacagctcttcccggattaggtgtaacatctgcaacagagtgttcccaagggagaagtccctgcaggcccacaagaggacacacaccggcgagagaccctacctctgtgactacccggactgcggcaaggcttttgttcagtccggacagcttaaaactcatcagcggctgcataccggagaaaaaccattcgtttgttcagaaaatggatgcttatccagattcacccacgctaacaggcattgtcccaaacacccctatgccagactgaaacgcgaagagcctactgataccctgtcaaaacatcaggcggcagacaataaggcagcagccgagtggctggcaagatactgggagatgagagaacaaagaacccccacactgaagggaaagctagttcagaaagcagatcaagagcaacaggatcctctggagtacctgcagagcgatgaagaggacgatgaaaaacggggagcgcaacgcaggctgcaggaacagcgggaaagactccacggcgcgctcgctctgattgaactggctaacttgacgggcgccccgctcagacagtag

SEQ ID NO: 246544 - DNA, 3646 bp, Artificial Sequence
  derived and/or modified sequence
gcgtcctgctttcctgtcaccgcaagggccgggccgcccgctgcttcccacccctgcagcctgcgctgcggagtacaaagagcggagggcgcgcttgacctggggctggggtccagccctgcccgccggtgccgtctgctcaactagttaggtggctgctgcgcaggattccgggaaacgtcagtctgccatgagccggcaggactgagcctgcgactcggagcagagcgagtgaggggcagagcggtgctcaggagtgcggcccggggccgccggagctgggggtcgggccgggcgatgatccggggcttcgaggcgcccatggcggagaacccgccgccgccgccgccgcccgtcatcttctgccacgactccccgaagcgggtgctggtgtcggtcatcaggacgaccccgatcaagccaacgtgcggcggtggaggggagccggagccgccgccgccgctcatccccaccagccccggcttcagcgacttcatggtgtacccgtggcgctggggcgagaacgcacacaacgtgacgctcagccctggggccgcgggggccgccgcctcggccgccctgcctgcagccgcagccgccgagcactcggggcttcgtggccggggcgcgcccccgcccgccgcctcggcctccgccgccgcctcgggaggtgaggacgaggaggaagcgagcagcccagacagcggccacctcaaggatggaatccgacgtggtaggcccagagcagatactgtccgcgatttaataaatgaaggagagcattcatccagcagaatccgttgtaacatctgtaatagggtgtttccacgggagaaatcgctccaggctcacaaaaggactcatacaggtgagaggccctatctgtgtgactatccagactgtggaaaagcctttgttcaaagtggacagctcaaaacacatcagcgtcttcacaccggagagaaaccttttgtttgttcagaaaatggctgcctgagcagattcacccatgcaaaccgccactgtccgaagcacccctacgccaggctgaagagagaggagcccacggacacactcagcaaacatcaggctgccgacaacaaggccgcggccgagtggctggcgaggtattgggaaatgagagagcagcgcacccccactttgaaaggcaagctggttcagaaggctgatcaggagcagcaggaccctctggaataccttcagtctgatgaagaggacgacgagaagagaggggcccagcgccggctgcaggagcagcgggagcgcctgcatggagccctcgcgctcatagagcttgccaacctgactggggcgccactccgacagtagcttggacactgactcttccactgtacaaaagtactgcccagcatacttaaaaagtagatccttgggcataagctaagcaccttatttgcttatcataggctgctattctgtagaaatttatgaagaatgttattgccccagaatatggggtgagagagaactgcacttttttaatatggaaatgaattcatcgtaaagtttaaaatattttgtaaatatggactgcacagtacagggtagaaaactacatattgtgggaagctagattttgcaagtttaatgcattcattggaagcagttctcacaggaagcactttctgaataagacacttgtttgaaaaacagaatggtacaaatagccaaagaagattaaaacagattatttataagatcatttttaacaatatatattagtatgtttaacaatactgtaaacactgaagcaagcaagaaagtataaaatatgtaagatagataattttaattgcaaaatactgtgcccactaaggctagagaaatgggaggctattttggaagatgttctaagtaatggacttagaagaaaatagatatttgaggctcttggtaagatgcacaatagttcagaatttttgaaattggagcaaaatcagtcttattctatctggggctttacaactcagtataatgtttaagtttgaaaagcacttgtcatccctagcatgttaacttgggaacttttgcacatttcatatttctcatttgctgaaattgagtgattaatcttgcaaagtctaggtaacatagtaattggtaattttaaaaatacatattaagggccctgtaatgagatttggcacttggatttttactaaagggacacctgcagggttgttttgtagtgaaatgttttagatcttttgttagcaaacactacattttaattgtactgcttgtttagaattattagcaaatggaagcctccatatttatattttcagtgcataaagccaccttcttgctttacttcagagtaacatgccaagctattttgtgttcactaaatttagctatcagttaaacactgcagaaaatattagctactcaaataagtaggcttctgaaatagttttaactgcaagtgtgttaacttgtgtggtggtttgaagccatttttccaaataaagttattaaacaccactttatgtactgaagcatgaacagaaaaatcaagagctgagcagaccacctcctttatgtaggcaaaacttccatcattttggcttttgttctaaacagaactaaatgacatgcatagcatggtaacttacagatcgcttaattggagtaaaactcagagtaatagagggaaatatgggctcttcagtgcctttttagcttttttgagttgaagacgttcctacagatgtagtttaaacattacaaagtaggcttctttatccaaaaatcccaatgtgtcatagtacacagatagtttaaaatatgtagccacggggaaggggaggcatgtaaatgtcttgaagaggagaaaaagtatgaaagaagatacgatagttacgaataatgtgtatgatgaggacatactttaaaaatgtaattcctctgtacagtaaattacaaatctttagggatttttttgtaataagagaatttatatttgtaatggtctaagaatttttttgtaatgtggtatatagaattttaatttggagcacttataagctggtaagagagactatagcatctgaattatcttggtttatgtttcagcatttcctctagaatttttgctctcaaatatgtgatttaatgaactaaaaacaacactcatcagtcttgggaaatttgaactttgatcaacttaactaaagaaggaagggtagtaagaatttttcaaatacaaatatttgccaattcacagatgataacatttaaggccttcaaaagtaagggtttttccttgtttctccagtcagcttttgtcaactctaatagttttttcataaacattttttatttgtataattgcaacagtttaagaaattatcacaactatttagaaacatttaaaatgttctttttgatataagctatatacttggaaaaatacattggtatctaaaatttgaggtgtgttaagactgctttttgttttaaaaaatggtttacattcaaatttttgaagtgttttatgcttcatatggctaagttgtagtttggcagagttaacagcataagaataaacatgctgtaattttaaaagatgctttgaataaaaatttattttaatttaaaa

SEQ ID NO: 246545 - DNA, 1053 bp, Artificial Sequence
  derived and/or modified sequence
atgatccggggctttgaggcccccatggctgaaaatcctcctcctcctcctcctcctgtgatcttctgccacgacagccccaagagggtgctggtgtctgtcatccgcaccacccccatcaagcccacctgtggcggcggcggggagcctgagcccccaccacccctcatccccaccagccctggcttcagtgacttcatggtgtacccctggcgctggggagaaaatgcccacaacgtgaccctgagccctggagctgctggagctgctgccagcgctgccctgcctgctgctgctgctgctgagcacagcggcctgcggggccgcggggcccctcctcctgctgccagcgccagcgctgctgccagcggcggggaggatgaggaggaggccagcagcccagacagcggccacctgaaggatggcatccggcggggccggcccagggctgacacagtgcgggacctgatcaatgaaggagagcacagcagcagccgcatccgctgcaacatctgcaacagagtcttcccccgggagaagagcctgcaggcccacaagaggacccacactggagagcggccctacctgtgtgactacccagactgtgggaaggcctttgtgcagagcggccagctgaagacccaccagaggctgcacactggagagaagccctttgtgtgcagtgaaaatggctgcctgagccgcttcacccacgccaacagacactgccccaagcacccctatgcccggctgaagcgggaggagcccacagacaccctgagcaagcaccaggccgctgacaacaaggctgctgctgagtggctggcccgctactgggagatgagggagcagaggacccccaccctgaagggcaagctggtgcagaaggctgaccaggagcagcaggaccccctggagtacctgcagagtgatgaagaagatgatgagaagagaggagcccagaggcggctgcaggagcagcgggagcggctgcacggggccctggccctgattgagctggccaacctgaccggggcccccctgcggcagtag

SEQ ID NO: 246546 - DNA, 1053 bp, Artificial Sequence
  derived and/or modified sequence
atgatccggggcttcgaggcccccatggccgagaaccccccccccccgcctccacccgtcattttttgtcacgactcccccaaaagagtcctagtgagtgtgatccgcactaccccaatcaagccaacttgcgggggcggcggggaacccgaacctcccccaccactaattcctacttccccaggcttctccgactttatggtctacccatggcggtggggagagaacgcacacaacgtcactctcagccctggcgccgccggagcagcagcgtccgcagctttgcccgctgccgcagccgccgagcactcgggcttgcgcggtaggggagcaccgccccccgcggctagcgcatctgctgcagcttcaggaggggaggacgaagaggaggcctcgagccctgacagcggtcatcttaaagacgggatccgccgtggccgccctcgagccgataccgtccgggatcttataaatgagggagagcattcgtcaagcaggatacggtgcaatatctgcaatagagtattcccccgagagaaatccttgcaggctcacaaaaggacccatacgggcgagagaccctacttgtgtgactacccggattgtggaaaggctttcgtgcagagtggtcagcttaagacccatcagcgcctgcatactggcgaaaaaccctttgtgtgttctgagaacggctgcctatcacgatttacccatgcgaaccggcattgccccaagcatccctacgcgaggctcaaaagagaagagcctacggacactctatccaagcaccaggccgctgataacaaagcggcagccgaatggcttgcaagatactgggaaatgcgggagcagaggactcccacactgaagggcaagttagttcagaaagcagaccaggagcagcaagaccccctggaatatctgcagagtgacgaggaggacgatgaaaaaaggggcgcccagaggaggcttcaggaacagcgggaacggttacacggcgccctggccttgatcgagctggctaatctgacaggggcccctttgcgtcagtag

SEQ ID NO: 246547 - DNA, 1053 bp, Artificial Sequence
  derived and/or modified sequence
atgatccgaggttttgaggccccaatggctgagaatcctccccctcccccaccaccagttatcttttgtcatgacagtcccaagcgcgtgctcgtgtctgtaatccgcactaccccaattaaaccaacctgtggcggtgggggtgagcctgagcctccaccacccctgataccaacgtctcctggcttcagcgattttatggtttacccttggcgctggggtgagaacgcccataacgtgacgctgtccccgggagcagcgggagctgccgctagtgctgcactgcctgcggcagccgctgccgagcattccggactccgcggtagaggcgctcccccaccggcagcgtcggcctctgctgccgcatcgggtggcgaggacgaggaggaagccagcagccccgactcaggacacttgaaagacgggatcagaaggggaagacctagagctgacacggtccgagacttgatcaacgagggggagcacagctcttctcgcatccgctgtaacatttgtaacagagtttttcctagagagaagtcattacaggcccacaagagaacgcatacaggagaaaggccatacctatgtgactatcccgactgcgggaaagccttcgtgcagtcaggccaactgaagactcatcaacgattgcataccggggagaagccttttgtgtgctctgagaacggatgcctttctagattcacccatgctaataggcattgccccaagcacccctatgcccgtctcaaacgcgaggagcctactgacacactgtccaagcaccaggcagctgataacaaggccgctgcggaatggttagccaggtattgggaaatgcgcgaacagcgtacgcctaccctcaaagggaaattagttcagaaggcggaccaagaacaacaggatcctttagaatacttacagtccgatgaagaggatgacgagaagcgcggtgcccagaggcggctgcaggagcaacgcgagcgactacatggcgcactggccctgatagaactggctaatttaacgggagccccactgcgacagtag

SEQ ID NO: 246548 - DNA, 1104 bp, Artificial Sequence
  derived and/or modified sequence
atggccgtgctgaagctgaccgaccagccccccctggtgcaggccatcttcagcggcgaccccgaggagatcagaatgctgatccacaagaccgaggacgtgaacaccctggacagcgagaagagaacccccctgcacgtggccgccttcctgggcgacgccgagatcatcgagctgctgatcctgagcggcgccagagtgaacgccaaggacaacatgtggctgacccccctgcacagagccgtggccagcagaagcgaggaggccgtgcaggtgctgatcaagcacagcgccgacgtgaacgccagagacaagaactggcagacccccctgcacgtggccgccgccaacaaggccgtgaagtgcgccgaggtgatcatccccctgctgagcagcgtgaacgtgagcgacagaggcggcagaaccgccctgcaccacgccgccctgaacggccacgtggagatggtgaacctgctgctggccaagggcgccaacatcaacgccttcgacaagaaggacagaagagccctgcactgggccgcctacatgggccacctggacgtggtggccctgctgatcaaccacggcgccgaggtgacctgcaaggacaagaagggctacacccccctgcacgccgccgccagcaacggccagatcaacgtggtgaagcacctgctgaacctgggcgtggagatcgacgagatcaacgtgtacggcaacaccgccctgcacatcgcctgctacaacggccaggacgccgtggtgaacgagctgatcgactacggcgccaacgtgaaccagcccaacaacaacggcttcacccccctgcacttcgccgccgccagcacccacggcgccctgtgcctggagctgctggtgaacaacggcgccgacgtgaacatccagagcaaggacggcaagagccccctgcacatgaccgccgtgcacggcagattcaccagaagccagaccctgatccagaacggcggcgagatcgactgcgtggacaaggacggcaacacccccctgcacgtggccgccagatacggccacgagctgctgatcaacaccctgatcaccagcggcgccgacaccgccaagtag

SEQ ID NO: 246549 - DNA, 1104 bp, Artificial Sequence
  derived and/or modified sequence
atggctgtgctgaaacttaccgaccaacccccgctggttcaggccatcttctctggggacccagaggagattcgtatgctgattcataaaaccgaagacgtgaacacactcgattctgagaaaagaactcccctacatgtggctgcgttcctcggggacgctgaaattattgagctcctgatactgtctggggcccgagtgaatgcgaaagataacatgtggttaacgcccctccacagggcagtcgcctcaaggagcgaggaggcagtccaagttttaatcaagcacagtgcggacgtgaacgcacgagacaaaaattggcaaactccactgcacgtcgccgctgcaaataaggcagttaagtgcgccgaagtaataattcctctgctttcgagcgtgaatgtctctgaccgcggtggccgcacagctttgcatcatgccgcgctgaatggccatgttgaaatggttaacttgctacttgcaaagggcgcaaatatcaatgcgtttgataagaaagatagacgggctttgcattgggcagcgtatatgggacacctcgacgtcgtggcactcttgatcaatcacggcgcagaagtcacgtgtaaggataagaaaggttacacacccctccacgccgctgccagcaacggtcagataaacgtggttaagcacttacttaacctgggcgtcgaaatcgacgagatcaatgtctatggaaatactgctctacatatcgcctgttacaatggacaggacgctgtcgttaatgagttaatcgactatggggccaacgtgaatcagcctaacaacaacgggtttacacccttacacttcgccgccgcctccacacacggggctttatgtctagagttgctcgtaaataatggcgccgatgtgaacatccagtcaaaagacggcaagtcgccgcttcatatgacagcggtgcacggtcgcttcacccgcagccagacacttattcagaacggtggggagattgattgcgtggacaaggacggaaataccccattacacgtagcggctagatacggccacgagctgctgattaatacactcatcacttccggcgccgatacagctaagtag

SEQ ID NO: 246550 - DNA, 1104 bp, Artificial Sequence
  derived and/or modified sequence
atggctgtgctgaagctgacagaccagccccccctggtgcaggccatcttcagcggggaccctgaggagatccgcatgctgatccacaagacagaagatgtgaacaccctggacagcgagaagaggacccccctgcacgtggccgccttcctgggagatgctgagatcatcgagctgctgatcctgagcggggcccgggtgaatgccaaggacaacatgtggctgacccccctgcacagagctgtggccagccgctctgaggaggccgtgcaggtgctgatcaagcacagcgcagatgtgaatgcccgggacaagaactggcagacccccctgcacgtggccgccgccaacaaggctgtgaagtgtgccgaggtgatcatccccctgctgagctctgtgaatgtgtctgacagaggaggccgcacagccctgcaccacgccgccctgaatggccacgtggagatggtgaacctgctgctggccaagggggccaacatcaatgcctttgacaagaaggaccggcgggccctgcactgggccgcctacatgggccacctggatgtggtggccctgctgatcaaccacggggctgaggtgacctgcaaggacaagaagggctacacccccctgcacgccgccgccagcaatggccagatcaacgtggtgaagcacctgctgaacctgggcgtggagattgatgagatcaacgtgtatggcaacacagccctgcacatcgcctgctacaacggccaggatgctgtggtgaatgagctgattgattatggagccaacgtgaaccagcccaacaacaacggcttcacccccctgcactttgctgctgccagcacccacggggccctgtgcctggagctgctggtgaacaatggagcagatgtgaacatccagagcaaggatggcaagagccccctgcacatgacagctgtgcacggccgcttcaccaggagccagaccctcatccagaatggaggagaaattgactgtgtggacaaggatggcaacacccccctgcacgtggccgcccgctatggccacgagctgctgatcaacaccctcatcaccagcggggctgacacagccaagtag

SEQ ID NO: 246551 - DNA, 1104 bp, Artificial Sequence
  derived and/or modified sequence
atggccgtgctgaagctgaccgaccagccccccctggtgcaggccatcttctcaggtgaccctgaagagattcggatgctcattcacaagacggaagacgtcaacactcttgacagcgagaagaggactcccttacacgtggccgcttttctaggagatgcggagattattgagctgttgatactgtcaggagctcgggtgaatgctaaagataacatgtggcttacgccactgcaccgagccgtggcgagtagatctgaagaggccgtgcaggtgctgattaagcactcagccgacgttaacgccagggacaagaattggcagacaccactccacgtggcagccgctaataaggcggtgaagtgtgctgaggttattataccgttgctgtccagcgtaaatgtgagtgaccgggggggacggacagctctgcatcacgctgctctgaacggtcacgtggagatggttaatctgttactggcaaaaggcgccaacattaacgcttttgataaaaaagataggcgtgctttgcactgggcagcctacatgggccacttggacgtggtagcactgctcataaatcacggcgctgaagtgacgtgtaaagataaaaaagggtacacgccactgcacgctgccgcttccaatgggcagattaatgtggtcaagcatctgttgaatttaggcgttgaaattgacgagattaatgtttacgggaacaccgctctgcacattgcatgttacaatggccaggatgccgtggtgaatgaactcatcgattacggggccaacgtaaaccagccgaataacaatggatttacaccactccactttgcggccgcatccacacacggagccctgtgccttgagctcctcgtgaacaatggggcagacgttaatatacaaagcaaggacggcaagtcccccctgcacatgaccgccgtccatggtcgctttacacggagtcagactttgatccagaacggcggggaaatagactgtgtagacaaggatgggaacacccccttgcatgtggccgcccggtatgggcatgaattactgattaatactttaattacgtccggggctgatacagccaaatag

SEQ ID NO: 246552 - DNA, 1622 bp, Artificial Sequence
  derived and/or modified sequence
actagccagtgtcagcctctcggcgggaggaggcggcggcggaggaggagcagggggagggctgtcaaattcgggagccagattttttcccttctcctggcaatcccttccgcttccccggctcccggcgtgacatctgcgggccggggacctgcatgtgtgtgcgcgcgaaggagcggaagaatggcagtgctcaaactcaccgaccagccaccattggttcaggcaatcttcagcggtgatccagaggagatccggatgctcatccataaaactgaagatgtgaatactctggattctgagaaacgaacccctcttcatgtggccgcatttctgggagatgcagagatcattgaactcctgattttgtcaggagctcgtgtaaatgccaaggacaacatgtggctgactccactgcaccgggctgttgcttccagaagtgaagaagcagtacaggttttgattaagcactcagctgatgtcaatgcaagggacaagaactggcagacccctcttcatgtggcagcagccaacaaggctgtcaaatgtgcagaagtgatcattcccctgctgagcagtgtcaatgtctccgaccgaggggggcgcacagccttgcaccatgcggctctgaacggccacgtggagatggtcaatttactcttggccaaaggggcaaatatcaatgcatttgacaagaaggaccggcgtgctctgcactgggcagcatacatgggccacttggatgttgtagcattgctcattaaccatggcgcagaagtgacctgtaaggataagaagggttatacccctctgcatgctgcagcctccaatggacagattaatgttgtcaagcatctcctgaacctgggggtggagattgatgaaatcaatgtctatggaaatacagcgcttcacatcgcctgctacaatggacaggatgctgtggttaacgagttgattgactacggtgctaacgtgaaccagccaaacaataatgggttcacccctttgcattttgctgctgcctccactcatggtgctttgtgtcttgaattgttagtaaacaacggggcagatgttaacattcagagtaaagatggcaaaagtccactgcacatgacagctgtccatggaaggttcacacggtcacagaccctcattcagaatggaggtgaaattgactgtgtggataaggacggcaacactcctctccatgtggctgcaagatacggtcatgagcttttgattaacaccttaataaccagcggagctgacacagccaagtaggttaccgcaaaaatacggtggaataattgcctcaagtgggaatactgccaaaaagattcttccgtgcagtagatagttcccatttatccaggttaaggtggatctataccattatactaaatacaaattaaattttaaataaattaagtgccttttaatgacagaggcaaagaagaaccaattttattttttagcttcatccaaatgaggtctatttcagtggttttaattaaggaaacttgaactttattcgtaacttttctttctaatattcttctgtccttcccaatgcttcatattaaacaggaaaaataaaacctaactgagccaattta

SEQ ID NO: 246553 - DNA, 1104 bp, Artificial Sequence
  derived and/or modified sequence
atggctgtacttaagctgaccgaccagcccccactcgtccaggctattttctcaggcgatccggaggagatccgaatgttgattcacaagactgaggacgtcaataccctagacagcgagaaacggactccccttcatgtggccgctttcctgggtgacgctgagattatcgagcttctgatcctgagtggggcacgggtgaatgcgaaagacaacatgtggctcaccccccttcaccgggctgttgcctcaagatctgaagaagccgtgcaggttctgatcaaacatagcgccgacgtaaatgcgagagataagaactggcaaacccccctgcacgttgcagcagctaataaggcggtaaaatgtgctgaggttatcattccgctgctgagttccgtgaatgtgtcagatcggggtggtaggaccgccctccatcatgcagccttaaacggccatgtggagatggtaaaccttctgttggctaagggagctaacatcaacgcctttgataagaaagataggcgggctcttcactgggctgcctacatgggccaccttgatgtggtcgcacttctgattaaccacggtgcagaagtcacttgcaaggacaagaaggggtacacccccctgcatgctgccgcttccaatgggcagattaatgtggtgaagcacctgctgaacctgggcgtggagatcgacgagatcaatgtgtatggaaacacagcactgcacatagcttgttacaacggccaggatgccgtggttaacgagctgatagattatggcgctaatgttaaccagccaaataataacgggttcacaccacttcactttgctgcggcttccacgcacggtgcgctgtgtttagaactcctggtcaacaacggtgcggacgtcaacatccaaagcaaagatggaaaatctccgttgcatatgaccgccgtccacgggagatttacaaggtctcagactctcatacagaatgggggagagattgattgtgtcgacaaggacggcaacactcctttgcacgtggctgcccgttatgggcacgagctgctcataaataccttaataacgtcaggggcagacaccgcaaagtag

SEQ ID NO: 246554 - protein, 222 aa, Artificial Sequence
  derived and/or modified sequence
MAEKPKLHYSNARGSMESIRWLLAAAGVELEEKFLESAEDLDKLRNDGSLLFQQVPMVEIDGMKLVQTRAILNYIASKYNLYGKDMKERALIDMYTEGIVDLTEMILLLLICQPEERDAKTALVKEKIKNRYFPAFEKVLKSHRQDYLVGNKLSWADIHLVELFYYVEELDSSLISSFPLLKALKTRISNLPTVKKFLQPGSQRKPPMDEKSLEEARKIFRF

SEQ ID NO: 246555 - DNA, 669 bp, Artificial Sequence
  derived and/or modified sequence
atggcagaaaaaccaaaactacactactcaaacgcccgcggatccatggaatctattaggtggctgttggccgcagctggggttgagctggaagagaagtttctggagtccgccgaagatctggacaagctgcgtaatgacggctctcttctcttccagcaagtacctatggttgagatcgatgggatgaagctggtgcagactcgcgctatcctgaactacatagcctccaagtacaacctatatggaaaagacatgaaggaacgcgccctgatagacatgtataccgagggcattgtggatttgacggagatgatcctgttgttgctgatctgccagccagaggaacgggatgccaagacagctcttgtgaaagaaaaaatcaaaaaccgctatttccctgcctttgaaaaagtgttgaagtcgcacagacaggattatctagtcggaaacaagctctcttgggccgacattcacctggtggaactattctactacgtggaggagctggattcatctttgatcagctcttttcctctacttaaggctctgaagaccaggataagcaacctcccaaccgtaaagaaattcctacaaccagggtcccagcgaaagccaccaatggacgagaagtccctcgaagaggcgcggaaaatatttcggttttag

SEQ ID NO: 246556 - DNA, 669 bp, Artificial Sequence
  derived and/or modified sequence
atggcagagaagcccaaactgcattactcaaatgcacggggctcgatggaaagcattcggtggctcttagcagcagccggcgtggaacttgaagagaagttcctggagtcggcggaggacttggacaaactcaggaatgacggcagccttctatttcagcaagtgccaatggtggagattgacgggatgaaacttgtacagacgcgcgccatcctcaattacatcgccagtaaatataacctttacggtaaagatatgaaagaaagggcgctcatagacatgtatactgaagggatcgttgaccttaccgagatgatcctgctgttgctcatttgtcagcctgaggagagggacgccaaaaccgccctcgtaaaagagaagatcaaaaatagatactttcctgcctttgaaaaggttctaaagtctcatcggcaggactacctggtgggcaataagttgtcttgggcggacatccaccttgtggagcttttctattacgtggaagagctcgactcttccctgatctcatcttttcccctcctcaaagccctgaagacaaggatctcgaatctgccgaccgtgaaaaaatttctgcagccgggctctcagaggaaacctcctatggacgaaaagtccctagaagaggcacgtaagatctttaggttctag

SEQ ID NO: 246557 - DNA, 845 bp, Artificial Sequence
  derived and/or modified sequence
agttgcccagccacgacagtgacagagtttaacaaactaagcttagagaaacctccaggagactgctatcatggcagagaagcccaagctccactactccaatgcacggggcagtatggagtccattcggtggctcctggctgcagctggagtagagttggaagagaaatttctagaatctgcagaagatttggacaagttaagaaatgatgggagtttgctgttccagcaagtaccaatggttgagattgacgggatgaagctggtgcagaccagagccattcttaactacattgccagcaaatacaacctttatgggaaagacatgaaggagagagccctgattgatatgtacacagaaggtatagtagatttgactgaaatgatccttcttctgctcatatgtcaaccagaggaaagagatgccaagactgccttggtcaaagagaaaataaaaaatcgctacttccctgcctttgaaaaagtcttaaagagccacagacaagactaccttgttggcaacaagctgagctgggctgacattcacctggtggaacttttctactacgtggaagagcttgactcgagtcttatctccagcttccctctgctgaaggccctgaaaaccagaatcagcaacctgcccacggtgaagaagtttctgcagcctggcagccagagaaagcctcccatggatgagaaatctttagaagaagcaaggaagattttcaggttttaataaagcagctatggaggccaagaacatgccagaccaatattctacagtttgcaacaatgaagtgctttacctaagtgtggattgtgcctcttgtaaagctaataaa

SEQ ID NO: 246558 - DNA, 1021 bp, Artificial Sequence
  derived and/or modified sequence
gtgggttttccctaacttgacctttctcctttcagtgggagggaactattgaaaggaacaaagagcttataaatacattaagacctggaattcagttgcccagccacgacagtgacagagtttaacaaagcttagagaaacctccaggagactgctatcatggcagagaagcccaagctccactactccaatgcacggggcagtatggagtccattcggtggctcctggctgcagctggagtagagttggaagagaaatttctagaatctgcagaagatttggacaagttaagaaatgatgggagtttgctgttccagcaagtaccaatggttgagattgacgggatgaagctggtgcagaccagagccattcttaactacattgccagcaaatacaacctttatgggaaagacatgaaggagagagccctgattgatatgtacacagaaggtatagtagatttgactgaaatgatccttcttctgctcatatgtcaaccagaggaaagagatgccaagactgccttggtcaaagagaaaataaaaaatcgctacttccctgcctttgaaaaagtcttaaagagccacagacaagactaccttgttggcaacaagctgagctgggctgacattcacctggtggaacttttctactacgtggaagagcttgactcgagtcttatctccagcttccctctgctgaaggccctgaaaaccagaatcagcaacctgcccacggtgaagaagtttctgcagcctggcagccagagaaagcctcccatggatgagaaatctttagaagaagcaaggaagattttcaggttttaataaagcagctatggaggccaagaacatgccagaccaatattctacagtttgcaacaatgaagtgctttacctaagtgtggattgtgcctcttgtaaagctaataaactctttccaattacatgctaattaaataataaataactcttatctgtcaacttagctaaaattgatttgttttcattagtatctgat

SEQ ID NO: 246559 - DNA, 669 bp, Artificial Sequence
  derived and/or modified sequence
atggccgagaagcccaagctgcactacagcaatgcccggggctccatggagagcatccgctggctgctggccgccgccggcgtggagctggaggagaagttcctggagagcgctgaggacctggacaagctgagaaatgatggcagcctgctcttccagcaggtgcccatggtggagattgatggcatgaagctggtgcagacccgggccatcctgaactacatcgccagcaagtacaacctgtatggcaaggacatgaaggagcgggccctgattgacatgtacacagagggcatcgtggacctgacagagatgatcctgctgctgctgatctgccagcctgaggagagagatgccaagacagccctggtgaaggagaagatcaagaaccgctacttccctgcctttgagaaggtgctgaagagccaccggcaggactacctggtgggcaacaagctgtcctgggccgacatccacctggtggagctgttctactacgtggaggagctggacagcagcctcatcagcagcttccccctgctgaaggccctgaagacccgcatcagcaacctgcccaccgtgaagaagttcctgcagcccggcagccagaggaagccacccatggatgagaagagcctggaggaggccaggaagatcttccgcttctag

SEQ ID NO: 246560 - DNA, 669 bp, Artificial Sequence
  derived and/or modified sequence
atggccgagaagcccaagctgcactacagcaacgcccggggcagcatggagtctattcgctggctgctggccgcagcgggggtggaactggaggagaaatttctggaatcggctgaggacctggacaagctaagaaacgacgggtccctgctgttccagcaggtgcctatggtggagattgacggtatgaaactggttcagacacgggccatacttaactacatcgcctcaaaatacaatttgtacggaaaggacatgaaggagcgtgccctgatcgatatgtatactgagggaatagttgacctgactgaaatgattctcctactgctcatttgccagcccgaggagcgggacgctaaaacagccctggttaaggagaaaattaagaatcgatacttccctgccttcgaaaaagttctcaagagtcaccggcaggactatctggtgggaaacaaacttagttgggctgatattcacctagtggagctcttttactatgtagaggagctggatagtagtctgatttcgagctttccattgctaaaggcccttaaaacaaggatctccaaccttccaaccgtgaagaaattccttcagcctggaagccaaaggaagccgcctatggatgagaagtccctcgaggaagctagaaagatcttcagattctag

SEQ ID NO: 246561 - DNA, 669 bp, Artificial Sequence
  derived and/or modified sequence
atggccgagaagcccaagctgcactacagcaacgcccggggcagcatggagtcaatacgctggctcttggctgccgctggtgtagagctggaggagaaattcctcgaatcagcggaagaccttgacaagctgcgcaatgacggctcactgctctttcaacaggttccgatggtggagattgatggtatgaagttagttcagactagagccatcctgaattatatcgccagcaaatacaatctatacggcaaagacatgaaggagagagctcttatcgacatgtatacagaggggatcgtcgaccttaccgaaatgattctcctgttactgatctgccagcctgaggagcgggacgcgaagacggccctcgtcaaggaaaaaattaaaaaccgatattttccagcttttgagaaggtgctgaaatcccataggcaggattacctggttggcaataagctgtcctgggctgacatccatttggtggagttgttctactacgttgaagagctggactctagccttatctccagcttcccacttctgaaggctctgaaaaccaggatctctaacctcccgactgtgaagaagtttttgcaaccaggctcccagcgaaagccgcctatggacgagaaaagcctggaggaggcccgtaaaatctttcggttttag

SEQ ID NO: 246562 - DNA, 669 bp, Artificial Sequence
  derived and/or modified sequence
atggccgagaaaccaaagctgcattattccaatgcacgaggatcaatggagtctatcagatggctgctcgcagccgcaggcgtagagctcgaggagaaattcttggaaagcgccgaagacttagataaactcaggaatgatggctcactactatttcagcaggtgccgatggtggaaattgatggaatgaagctggtgcagacgcgagctatactgaactacatcgcatctaaatacaatttatacggtaaagatatgaaggagagggcgttgattgacatgtacactgagggtattgtggatctcactgagatgattttgctattactgatctgtcaacctgaagaaagagatgctaaaaccgcactggtcaaggaaaagattaagaaccggtactttcctgccttcgagaaggtgctcaagagccatcggcaggactaccttgtcggcaataagctttcctgggccgatatccatcttgtcgagctcttttactacgtcgaggaactggactcttctttgattagctcttttcccctgcttaaagccctcaagacgaggatttcaaacttgcctaccgtaaaaaaatttctgcaaccagggagtcagcggaagccccctatggacgaaaagtccctggaggaggcccgaaaaatttttcgtttctag

SEQ ID NO: 246563 - DNA, 669 bp, Artificial Sequence
  derived and/or modified sequence
atggcagaaaagcctaaactgcactacagtaacgctcggggaagcatggagtcgatcaggtggttgctggctgctgctggtgtggagctcgaggaaaagtttttagagagtgccgaggaccttgacaagctgcgtaacgacggctcactgctatttcagcaggtaccaatggtggagattgatgggatgaagttggtacaaacgagagccattcttaattatatcgcctctaaatacaatctgtatggcaaggacatgaaggagcgggcactgattgatatgtatacagaagggattgtggacctgacagaaatgatcctcctcctgttgatctgccagcctgaggagcgcgacgctaagacggccctggtaaaggagaaaatcaaaaaccgctacttccctgccttcgaaaaagttctcaaatctcataggcaggactatctagtcggaaacaaactgtcctgggccgacatccatctagtggagctgttctactatgtggaagagctcgactccagtctcatcagctcattcccactactgaaagctttgaagacccggatcagtaatctgccaactgtcaaaaagtttctgcaacccggaagccaacgtaagccccctatggacgagaaaagcttagaggaggcccgtaagatattcaggttttag

SEQ ID NO: 246564 - DNA, 669 bp, Artificial Sequence
  derived and/or modified sequence
atggccgagaagcccaagctgcactacagcaacgccagaggcagcatggagagcatcagatggctgctggccgccgccggcgtggagctggaggagaagttcctggagagcgccgaggacctggacaagctgagaaacgacggcagcctgctgttccagcaggtgcccatggtggagatcgacggcatgaagctggtgcagaccagagccatcctgaactacatcgccagcaagtacaacctgtacggcaaggacatgaaggagagagccctgatcgacatgtacaccgagggcatcgtggacctgaccgagatgatcctgctgctgctgatctgccagcccgaggagagagacgccaagaccgccctggtgaaggagaagatcaagaacagatacttccccgccttcgagaaggtgctgaagagccacagacaggactacctggtgggcaacaagctgagctgggccgacatccacctggtggagctgttctactacgtggaggagctggacagcagcctgatcagcagcttccccctgctgaaggccctgaagaccagaatcagcaacctgcccaccgtgaagaagttcctgcagcccggcagccagagaaagccccccatggacgagaagagcctggaggaggccagaaagatcttcagattctag

SEQ ID NO: 246565 - protein, 1775 aa, Artificial Sequence
  derived and/or modified sequence
MALSLWPLLLLLLLLLLLSFAVTLAPTGPHSLDPGLSFLKSLLSTLDQAPQGSLSRSRFFTFLANISSSFEPGRMGEGPVGEPPPLQPPALRLHDFLVTLRGSPDWEPMLGLLGDMLALLGQEQTPRDFLVHQAGVLGGLVEVLLGALVPGGPPTPTRPPCTRDGPSDCVLAADWLPSLLLLLEGTRWQALVQVQPSVDPTNATGLDGREAAPHFLQGLLGLLTPTGELGSKEALWGGLLRTVGAPLYAAFQEGLLRVTHSLQDEVFSILGQPEPDTNGQCQGGNLQQLLLWGVRHNLSWDVQALGFLSGSPPPPPALLHCLSTGVPLPRASQPSAHISPRQRRAITVEALCENHLGPAPPYSISNFSIHLLCQHTKPATPQPHPSTTAICQTAVWYAVSWAPGAQGWLQACHDQFPDEFLDAICSNLSFSALSGSNRRLVKRLCAGLLPPPTSCPEGLPPVPLTPDIFWGCFLENETLWAERLCGEASLQAVPPSNQAWVQHVCQGPTPDVTASPPCHIGPCGERCPDGGSFLVMVCANDTMYEVLVPFWPWLAGQCRISRGGNDTCFLEGLLGPLLPSLPPLGPSPLCLTPGPFLLGMLSQLPRCQSSVPALAHPTRLHYLLRLLTFLLGPGAGGAEAQGMLGRALLLSSLPDNCSFWDAFRPEGRRSVLRTIGEYLEQDEEQPTPSGFEPTVNPSSGISKMELLACFSPVLWDLLQREKSVWALQILVQAYLHMPPENLQQLVLSAEREAAQGFLTLMLQGKLQGKLQVPPSEEQALGRLTALLLQRYPRLTSQLFIDLSPLIPFLAVSDLMRFPPSLLANDSVLAAIRDYSPGMRPEQKEALAKRLLAPELFGEVPAWPQELLWAVLPLLPHLPLENFLQLSPHQIQALEDSWPAAGLGPGHARHVLRSLVNQSVQDGEEQVRRLGPLACFLSPEELQSLVPLSDPTGPVERGLLECAANGTLSPEGRVAYELLGVLRSSGGAVLSPRELRVWAPLFSQLGLRFLQELSEPQLRAMLPVLQGTSVTPAQAVLLLGRLLPRHDLSLEELCSLHLLLPGLSPQTLQAIPRRVLVGACSCLAPELSRLSACQTAALLQTFRVKDGVKNMGTTGAGPAVCIPGQPIPTTWPDCLLPLLPLKLLQLDSLALLANRRRYWELPWSEQQAQFLWKKMQVPTNLTLRNLQALGTLAGGMSCEFLQQINSMVDFLEVVHMIYQLPTRVRGSLRACIWAELQRRMAMPEPEWTTVGPELNGLDSKLLLDLPIQLMDRLSNESIMLVVELVQRAPEQLLALTPLHQAALAERALQNLAPKETPVSGEVLETLGPLVGFLGTESTRQIPLQILLSHLSQLQGFCLGETFATELGWLLLQESVLGKPELWSQDEVEQAGRLVFTLSTEAISLIPREALGPETLERLLEKQQSWEQSRVGQLCREPQLAAKKAALVAGVVRPAAEDLPEPVPNCADVRGTFPAAWSATQIAEMELSDFEDCLTLFAGDPGLGPEELRAAMGKAKQLWGPPRGFRPEQILQLGRLLIGLGDRELQELILVDWGVLSTLGQIDGWSTTQLRIVVSSFLRQSGRHVSHLDFVHLTALGYTLCGLRPEELQHISSWEFSQAALFLGTLHLQCSEEQLEVLAHLLVLPGGFGPISNWGPEIFTEIGTIAAGIPDLALSALLRGQIQGVTPLAISVIPPPKFAVVFSPIQLSSLTSAQAVAVTPEQMAFLSPEQRRAVAWAQHEGKESPEQQGRSTAWGLQDWSRPSWSLVLTISFLGHLL

SEQ ID NO: 246566 - protein, 699 aa, Artificial Sequence
  derived and/or modified sequence
MALSLWPLLLLLLLLLLLSFAVTLAPTGPHSLDPGLSFLKSLLSTLDQAPQGSLSRSRFFTFLANISSSFEPGRMGEGPVGEPPPLQPPALRLHDFLVTLRGSPDWEPMLGLLGDMLALLGQEQTPRDFLVHQAGVLGGLVEVLLGALVPGGPPTPTQPPCTRDGPSDCVLAADWLPSLLLLLEGTRWQALVQVQPSVDPTNATGLDGREAAPHFLQGLLGLLTPTGELGSKEALWGGLLRTVGAPLYAAFQEGLLRVTHSLQDEVFSILGQPEPDTNGQCQGGNLQQLLLWGVRHNLSWDVQALGFLSGSPPPPPALLHCLSTGVPLPRASQPSAHISPRQRRAITVEALCENHLGPAPPYSISNFSIHLLCQHTKPATPQPHPSTTAICQTAVWYAVSWAPGAQGWLQACHDQFPDEFLDAICSNLSFSALSGSNRRLVKRLCAGLLPPPTSCPEGLPPVPLTPDIFWGCFLENETLWAERLCGEASLQAVPPSNQAWVQHVCQGPTPDVTASPPCHIGPCGERCPDGGSFLVMVCANDTMYEVLVPFWPWLAGQCRISRGGNDTCFLEGLLGPLLPSLPPLGPSPLCLTPGPFLLGMLSQLPRCQSSVPALAHPTRLHYLLRLLTFLLGPGAGGAEAQGMLGRALLLSSLPDNCSFWDAFRPEGRRSVLRTIGEYNKMRSSQPHQALNPLSTPALV

SEQ ID NO: 246567 - DNA, 5328 bp, Artificial Sequence
  derived and/or modified sequence
atggccctgagcctgtggcccctgctgctgctgctgctgctgctgctgctgctgagcttcgccgtgaccctggcccccaccggcccccacagcctggaccccggcctgagcttcctgaagagcctgctgagcaccctggaccaggccccccagggcagcctgagcagaagcagattcttcaccttcctggccaacatcagcagcagcttcgagcccggcagaatgggcgagggccccgtgggcgagcccccccccctgcagccccccgccctgagactgcacgacttcctggtgaccctgagaggcagccccgactgggagcccatgctgggcctgctgggcgacatgctggccctgctgggccaggagcagacccccagagacttcctggtgcaccaggccggcgtgctgggcggcctggtggaggtgctgctgggcgccctggtgcccggcggcccccccacccccaccagacccccctgcaccagagacggccccagcgactgcgtgctggccgccgactggctgcccagcctgctgctgctgctggagggcaccagatggcaggccctggtgcaggtgcagcccagcgtggaccccaccaacgccaccggcctggacggcagagaggccgccccccacttcctgcagggcctgctgggcctgctgacccccaccggcgagctgggcagcaaggaggccctgtggggcggcctgctgagaaccgtgggcgcccccctgtacgccgccttccaggagggcctgctgagagtgacccacagcctgcaggacgaggtgttcagcatcctgggccagcccgagcccgacaccaacggccagtgccagggcggcaacctgcagcagctgctgctgtggggcgtgagacacaacctgagctgggacgtgcaggccctgggcttcctgagcggcagccccccccccccccccgccctgctgcactgcctgagcaccggcgtgcccctgcccagagccagccagcccagcgcccacatcagccccagacagagaagagccatcaccgtggaggccctgtgcgagaaccacctgggccccgcccccccctacagcatcagcaacttcagcatccacctgctgtgccagcacaccaagcccgccaccccccagccccaccccagcaccaccgccatctgccagaccgccgtgtggtacgccgtgagctgggcccccggcgcccagggctggctgcaggcctgccacgaccagttccccgacgagttcctggacgccatctgcagcaacctgagcttcagcgccctgagcggcagcaacagaagactggtgaagagactgtgcgccggcctgctgcccccccccaccagctgccccgagggcctgccccccgtgcccctgacccccgacatcttctggggctgcttcctggagaacgagaccctgtgggccgagagactgtgcggcgaggccagcctgcaggccgtgccccccagcaaccaggcctgggtgcagcacgtgtgccagggccccacccccgacgtgaccgccagccccccctgccacatcggcccctgcggcgagagatgccccgacggcggcagcttcctggtgatggtgtgcgccaacgacaccatgtacgaggtgctggtgcccttctggccctggctggccggccagtgcagaatcagcagaggcggcaacgacacctgcttcctggagggcctgctgggccccctgctgcccagcctgccccccctgggccccagccccctgtgcctgacccccggccccttcctgctgggcatgctgagccagctgcccagatgccagagcagcgtgcccgccctggcccaccccaccagactgcactacctgctgagactgctgaccttcctgctgggccccggcgccggcggcgccgaggcccagggcatgctgggcagagccctgctgctgagcagcctgcccgacaactgcagcttctgggacgccttcagacccgagggcagaagaagcgtgctgagaaccatcggcgagtacctggagcaggacgaggagcagcccacccccagcggcttcgagcccaccgtgaaccccagcagcggcatcagcaagatggagctgctggcctgcttcagccccgtgctgtgggacctgctgcagagagagaagagcgtgtgggccctgcagatcctggtgcaggcctacctgcacatgccccccgagaacctgcagcagctggtgctgagcgccgagagagaggccgcccagggcttcctgaccctgatgctgcagggcaagctgcagggcaagctgcaggtgccccccagcgaggagcaggccctgggcagactgaccgccctgctgctgcagagataccccagactgaccagccagctgttcatcgacctgagccccctgatccccttcctggccgtgagcgacctgatgagattcccccccagcctgctggccaacgacagcgtgctggccgccatcagagactacagccccggcatgagacccgagcagaaggaggccctggccaagagactgctggcccccgagctgttcggcgaggtgcccgcctggccccaggagctgctgtgggccgtgctgcccctgctgccccacctgcccctggagaacttcctgcagctgagcccccaccagatccaggccctggaggacagctggcccgccgccggcctgggccccggccacgccagacacgtgctgagaagcctggtgaaccagagcgtgcaggacggcgaggagcaggtgagaagactgggccccctggcctgcttcctgagccccgaggagctgcagagcctggtgcccctgagcgaccccaccggccccgtggagagaggcctgctggagtgcgccgccaacggcaccctgagccccgagggcagagtggcctacgagctgctgggcgtgctgagaagcagcggcggcgccgtgctgagccccagagagctgagagtgtgggcccccctgttcagccagctgggcctgagattcctgcaggagctgagcgagccccagctgagagccatgctgcccgtgctgcagggcaccagcgtgacccccgcccaggccgtgctgctgctgggcagactgctgcccagacacgacctgagcctggaggagctgtgcagcctgcacctgctgctgcccggcctgagcccccagaccctgcaggccatccccagaagagtgctggtgggcgcctgcagctgcctggcccccgagctgagcagactgagcgcctgccagaccgccgccctgctgcagaccttcagagtgaaggacggcgtgaagaacatgggcaccaccggcgccggccccgccgtgtgcatccccggccagcccatccccaccacctggcccgactgcctgctgcccctgctgcccctgaagctgctgcagctggacagcctggccctgctggccaacagaagaagatactgggagctgccctggagcgagcagcaggcccagttcctgtggaagaagatgcaggtgcccaccaacctgaccctgagaaacctgcaggccctgggcaccctggccggcggcatgagctgcgagttcctgcagcagatcaacagcatggtggacttcctggaggtggtgcacatgatctaccagctgcccaccagagtgagaggcagcctgagagcctgcatctgggccgagctgcagagaagaatggccatgcccgagcccgagtggaccaccgtgggccccgagctgaacggcctggacagcaagctgctgctggacctgcccatccagctgatggacagactgagcaacgagagcatcatgctggtggtggagctggtgcagagagcccccgagcagctgctggccctgacccccctgcaccaggccgccctggccgagagagccctgcagaacctggcccccaaggagacccccgtgagcggcgaggtgctggagaccctgggccccctggtgggcttcctgggcaccgagagcaccagacagatccccctgcagatcctgctgagccacctgagccagctgcagggcttctgcctgggcgagaccttcgccaccgagctgggctggctgctgctgcaggagagcgtgctgggcaagcccgagctgtggagccaggacgaggtggagcaggccggcagactggtgttcaccctgagcaccgaggccatcagcctgatccccagagaggccctgggccccgagaccctggagagactgctggagaagcagcagagctgggagcagagcagagtgggccagctgtgcagagagccccagctggccgccaagaaggccgccctggtggccggcgtggtgagacccgccgccgaggacctgcccgagcccgtgcccaactgcgccgacgtgagaggcaccttccccgccgcctggagcgccacccagatcgccgagatggagctgagcgacttcgaggactgcctgaccctgttcgccggcgaccccggcctgggccccgaggagctgagagccgccatgggcaaggccaagcagctgtggggcccccccagaggcttcagacccgagcagatcctgcagctgggcagactgctgatcggcctgggcgacagagagctgcaggagctgatcctggtggactggggcgtgctgagcaccctgggccagatcgacggctggagcaccacccagctgagaatcgtggtgagcagcttcctgagacagagcggcagacacgtgagccacctggacttcgtgcacctgaccgccctgggctacaccctgtgcggcctgagacccgaggagctgcagcacatcagcagctgggagttcagccaggccgccctgttcctgggcaccctgcacctgcagtgcagcgaggagcagctggaggtgctggcccacctgctggtgctgcccggcggcttcggccccatcagcaactggggccccgagatcttcaccgagatcggcaccatcgccgccggcatccccgacctggccctgagcgccctgctgagaggccagatccagggcgtgacccccctggccatcagcgtgatccccccccccaagttcgccgtggtgttcagccccatccagctgagcagcctgaccagcgcccaggccgtggccgtgacccccgagcagatggccttcctgagccccgagcagagaagagccgtggcctgggcccagcacgagggcaaggagagccccgagcagcagggcagaagcaccgcctggggcctgcaggactggagcagacccagctggagcctggtgctgaccatcagcttcctgggccacctgctgtag

SEQ ID NO: 246568 - DNA, 1056 bp, Artificial Sequence
  derived and/or modified sequence
atggccctgagcctgtggcccctgctgctgctgctgctgctgctgctgctgctgagcttcgccgtgaccctggcccccaccggcccccacagcctggaccccggcctgagcttcctgaagagcctgctgagcaccctggaccaggccccccagggcagcctgagcagaagcagattcttcaccttcctggccaacatcagcagcagcttcgagcccggcagaatgggcgagggccccgtgggcgagcccccccccctgcagccccccgccctgagactgcacgacttcctggtgaccctgagaggcagccccgactgggagcccatgctgggcctgctgggcgacatgctggccctgctgggccaggagcagacccccagagacttcctggtgcaccaggccggcgtgctgggcggcctggtggaggtgctgctgggcgccctggtgcccggcggcccccccacccccacccagcccccctgcaccagagacggccccagcgactgcgtgctggccgccgactggctgcccagcctgctgctgctgctggagggcaccagatggcaggccctggtgcaggtgcagcccagcgtggaccccaccaacgccaccggcctggacggcagagaggccgccccccacttcctgcagggcctgctgggcctgctgacccccaccggcgagctgggcagcaaggaggccctgtggggcggcctgctgagaaccgtgggcgcccccctgtacgccgccttccaggagggcctgctgagagtgacccacagcctgcaggacgaggtgttcagcatcctgggccagcccgagcccgacaccaacggccagtgccagggcggcaacctgcagcagctgctgctgtggggcgtgagacacaacctgagctgggacgtgcaggccctgggcttcctgagcggcagccccccccccccccccgccctgctgcactgcctgagcaccggcgtgcccctgcccagagccagccagcccagcgcccacatcagccccagacagagaagagccatcaccgtggaggccctgtag

SEQ ID NO: 246569 - DNA, 1056 bp, Artificial Sequence
  derived and/or modified sequence
atggccctgagcctgtggcccctgctgctgctgctgctgctgctgctgctgctgagcttcgccgtgaccctggcccccaccggcccccacagcctggaccccggcctgagcttcctgaagagcctgctgagcaccctggaccaggccccccagggcagcctgagcagaagcagattcttcaccttcctggccaacatcagcagcagcttcgagcccggcagaatgggcgagggccccgtgggcgagcccccccccctgcagccccccgccctgagactgcacgacttcctggtgaccctgagaggcagccccgactgggagcccatgctgggcctgctgggcgacatgctggccctgctgggccaggagcagacccccagagacttcctggtgcaccaggccggcgtgctgggcggcctggtggaggtgctgctgggcgccctggtgcccggcggcccccccacccccaccagacccccctgcaccagagacggccccagcgactgcgtgctggccgccgactggctgcccagcctgctgctgctgctggagggcaccagatggcaggccctggtgcaggtgcagcccagcgtggaccccaccaacgccaccggcctggacggcagagaggccgccccccacttcctgcagggcctgctgggcctgctgacccccaccggcgagctgggcagcaaggaggccctgtggggcggcctgctgagaaccgtgggcgcccccctgtacgccgccttccaggagggcctgctgagagtgacccacagcctgcaggacgaggtgttcagcatcctgggccagcccgagcccgacaccaacggccagtgccagggcggcaacctgcagcagctgctgctgtggggcgtgagacacaacctgagctgggacgtgcaggccctgggcttcctgagcggcagccccccccccccccccgccctgctgcactgcctgagcaccggcgtgcccctgcccagagccagccagcccagcgcccacatcagccccagacagagaagagccatcaccgtggaggccctgtag

SEQ ID NO: 246570 - DNA, 2100 bp, Artificial Sequence
  derived and/or modified sequence
atggccctgagcctgtggcccctgctgctgctgctgctgctgctgctgctgctgagcttcgccgtgaccctggcccccaccggcccccacagcctggaccccggcctgagcttcctgaagagcctgctgagcaccctggaccaggccccccagggcagcctgagcagaagcagattcttcaccttcctggccaacatcagcagcagcttcgagcccggcagaatgggcgagggccccgtgggcgagcccccccccctgcagccccccgccctgagactgcacgacttcctggtgaccctgagaggcagccccgactgggagcccatgctgggcctgctgggcgacatgctggccctgctgggccaggagcagacccccagagacttcctggtgcaccaggccggcgtgctgggcggcctggtggaggtgctgctgggcgccctggtgcccggcggcccccccacccccacccagcccccctgcaccagagacggccccagcgactgcgtgctggccgccgactggctgcccagcctgctgctgctgctggagggcaccagatggcaggccctggtgcaggtgcagcccagcgtggaccccaccaacgccaccggcctggacggcagagaggccgccccccacttcctgcagggcctgctgggcctgctgacccccaccggcgagctgggcagcaaggaggccctgtggggcggcctgctgagaaccgtgggcgcccccctgtacgccgccttccaggagggcctgctgagagtgacccacagcctgcaggacgaggtgttcagcatcctgggccagcccgagcccgacaccaacggccagtgccagggcggcaacctgcagcagctgctgctgtggggcgtgagacacaacctgagctgggacgtgcaggccctgggcttcctgagcggcagccccccccccccccccgccctgctgcactgcctgagcaccggcgtgcccctgcccagagccagccagcccagcgcccacatcagccccagacagagaagagccatcaccgtggaggccctgtgcgagaaccacctgggccccgcccccccctacagcatcagcaacttcagcatccacctgctgtgccagcacaccaagcccgccaccccccagccccaccccagcaccaccgccatctgccagaccgccgtgtggtacgccgtgagctgggcccccggcgcccagggctggctgcaggcctgccacgaccagttccccgacgagttcctggacgccatctgcagcaacctgagcttcagcgccctgagcggcagcaacagaagactggtgaagagactgtgcgccggcctgctgcccccccccaccagctgccccgagggcctgccccccgtgcccctgacccccgacatcttctggggctgcttcctggagaacgagaccctgtgggccgagagactgtgcggcgaggccagcctgcaggccgtgccccccagcaaccaggcctgggtgcagcacgtgtgccagggccccacccccgacgtgaccgccagccccccctgccacatcggcccctgcggcgagagatgccccgacggcggcagcttcctggtgatggtgtgcgccaacgacaccatgtacgaggtgctggtgcccttctggccctggctggccggccagtgcagaatcagcagaggcggcaacgacacctgcttcctggagggcctgctgggccccctgctgcccagcctgccccccctgggccccagccccctgtgcctgacccccggccccttcctgctgggcatgctgagccagctgcccagatgccagagcagcgtgcccgccctggcccaccccaccagactgcactacctgctgagactgctgaccttcctgctgggccccggcgccggcggcgccgaggcccagggcatgctgggcagagccctgctgctgagcagcctgcccgacaactgcagcttctgggacgccttcagacccgagggcagaagaagcgtgctgagaaccatcggcgagtacaacaagatgagaagcagccagccccaccaggccctgaaccccctgagcacccccgccctggtgtag

SEQ ID NO: 246571 - DNA, 3009 bp, Artificial Sequence
  derived and/or modified sequence
atggagctgctggcctgcttcagccccgtgctgtgggacctgctgcagagagagaagagcgtgtgggccctgcagatcctggtgcaggcctacctgcacatgccccccgagaacctgcagcagctggtgctgagcgccgagagagaggccgcccagggcttcctgaccctgatgctgcagggcaagctgcagggcaagctgcaggtgccccccagcgaggagcaggccctgggcagactgaccgccctgctgctgcagagataccccagactgaccagccagctgttcatcgacctgagccccctgatccccttcctggccgtgagcgacctgatgagattcccccccagcctgctggccaacgacagcgtgcagcagggctacagaggcagcgaggagaacagcctggaggaggacaagggcctgagacccatgacccccagaagcctggccgccatcagagactacagccccggcatgagacccgagcagaaggaggccctggccaagagactgctggcccccgagctgttcggcgaggtgcccgcctggccccaggagctgctgtgggccgtgctgcccctgctgccccacctgcccctggagaacttcctgcagctgagcccccaccagatccaggccctggaggacagctggcccgccgccggcctgggccccggccacgccagacacgtgctgagaagcctggtgaaccagagcgtgcaggacggcgaggagcaggtgagaagactgggccccctggcctgcttcctgagccccgaggagctgcagagcctggtgcccctgagcgaccccaccggccccgtggagagaggcctgctggagtgcgccgccaacggcaccctgagccccgagggcagagtggcctacgagctgctgggcgtgctgagaagcagcggcggcgccgtgctgagccccagagagctgagagtgtgggcccccctgttcagccagctgggcctgagattcctgcaggagctgagcgagccccagctgagagccatgctgcccgtgctgcagggcaccagcgtgacccccgcccaggccgtgctgctgctgggcagactgctgcccagacacgacctgctgcagctggacagcctggccctgctggccaacagaagaagatactgggagctgccctggagcgagcagcaggcccagttcctgtggaagaagatgcaggtgcccaccaacctgaccctgagaaacctgcaggccctgggcaccctggccggcggcatgagctgcgagttcctgcagcagatcaacagcatggtggacttcctggaggtggtgcacatgatctaccagctgcccaccagagtgagaggcagcctgagagcctgcatctgggccgagctgcagagaagaatggccatgcccgagcccgagtggaccaccgtgggccccgagctgaacggcctggacagcaagctgctgctggacctgcccatccagctgatggacagactgagcaacgagagcatcatgctggtggtggagctggtgcagagagcccccgagcagctgctggccctgacccccctgcaccaggccgccctggccgagagagccctgcagaacctggcccccaaggagacccccgtgagcggcgaggtgctggagaccctgggccccctggtgggcttcctgggcaccgagagcaccagacagatccccctgcagatcctgctgagccacctgagccagctgcagggcttctgcctgggcgagaccttcgccaccgagctgggctggctgctgctgcaggagagcgtgctgggcaagcccgagctgtggagccaggacgaggtggagcaggccggcagactggtgttcaccctgagcaccgaggccatcagcctgatccccagagaggccctgggccccgagaccctggagagactgctggagaagcagcagagctgggagcagagcagagtgggccagctgtgcagagagccccagctggccgccaagaaggccgccctggtggccggcgtggtgagacccgccgccgaggacctgcccgagcccgtgcccaactgcgccgacgtgagaggcaccttccccgccgcctggagcgccacccagatcgccgagatggagctgagcgacttcgaggactgcctgaccctgttcgccggcgaccccggcctgggccccgaggagctgagagccgccatgggcaaggccaagcagctgtggggcccccccagaggcttcagacccgagcagatcctgcagctgggcagactgctgatcggcctgggcgacagagagctgcaggagctgatcctggtggactggggcgtgctgagcaccctgggccagatcgacggctggagcaccacccagctgagaatcgtggtgagcagcttcctgagacagagcggcagacacgtgagccacctggacttcgtgcacctgaccgccctgggctacaccctgtgcggcctgagacccgaggagctgcagcacatcagcagctgggagttcagccaggccgccctgttcctgggcaccctgcacctgcagtgcagcgaggagcagctggaggtgctggcccacctgctggtgctgcccggcggcttcggccccatcagcaactggggccccgagatcttcaccgagatcggcaccatcgccgccggcatccccgacctggccctgagcgccctgctgagaggccagatccagggcgtgacccccctggccatcagcgtgatccccccccccaagttcgccgtggtgttcagccccatccagctgagcagcctgaccagcgcccaggccgtggccgtgacccccgagcagatggccttcctgagccccgagcagagaagagccgtggcctgggcccagcacgagggcaaggagagccccgagcagcagggcagaagcaccgcctggggcctgcaggactggagcagacccagctggagcctggtgctgaccatcagcttcctgggccacctgctgtag

SEQ ID NO: 246572 - DNA, 5328 bp, Artificial Sequence
  derived and/or modified sequence
atggcactcagtctgtggcctctcttacttttgctgctgttgcttcttctcctgagcttcgccgtcaccctggcacctaccggacctcattctctcgatcccggcctcagctttcttaaatccctgctctctacgctggatcaggcgccccagggatctctaagcagaagtcgttttttcacttttctagcaaatatttcctcctctttcgagccgggtaggatgggtgagggtccagtgggtgaaccccctccactgcaaccccctgccctccgcctgcatgatttcctggtcactctgagggggtcccccgattgggagccaatgctggggctcttgggagatatgctcgcactgctgggtcaggagcagacaccaagagattttctggtgcatcaagccggagtcttgggcggactagttgaagtgttgcttggtgctctcgttcccggcggaccgcccacccccaccagaccaccctgcacacgggacggcccaagtgactgcgtgctcgccgccgattggctgccaagcctactgttgcttttggaaggcacaagatggcaggctttagtacaagtgcagccaagcgtggatccgaccaatgcgaccggactggatggccgcgaagcggcaccccattttttgcaaggactgctgggtctgctgacacccaccggcgagctcggctctaaagaggccctttggggagggctgcttcggactgtgggagcaccgctctatgctgctttccaggagggtctgcttagagtcacccactctctgcaggacgaggtgttctctatactgggccagcctgaaccagatactaatggacagtgtcaggggggtaacttgcagcagttgctgctctggggggttagacacaacctgagctgggacgtacaagctttgggattcctgtccggttcacctccccctcctcccgctctcctccactgtttatccaccggcgtgccgcttcctagggccagtcagccatccgcacacatttcaccaaggcaaagacgggccatcacggtggaagccctgtgcgaaaaccatctcggtcccgcacctccgtatagtatctccaatttttccatacatctgctctgccagcacactaaacctgctaccccacagccgcatccttcaactaccgctatttgtcagacagctgtttggtacgcagtgagctgggccccaggtgcgcagggttggctccaggcctgtcatgatcagtttccagacgagttcctggatgctatctgctctaatctctcgttcagcgccctctctggatctaacagacggcttgtgaaacgcctgtgcgccggacttttgccgccccccacctcatgccccgaggggctccccccagtccccctgactccagatattttctgggggtgtttcttggagaatgaaaccctgtgggctgagcgtctgtgcggcgaagcttccctgcaggccgtcccccctagcaaccaggcttgggtgcagcacgtgtgtcagggccccactcctgacgtaactgcctctcctccatgtcatatcggaccgtgcggcgaacgctgcccagacggagggagttttctggtcatggtttgcgcaaatgacactatgtatgaggtgctcgtcccgttctggccctggctggccggacagtgtcgcatcagcagggggggcaacgatacatgctttctcgaaggcctgctgggtcccttgctgccgtcgttgcctcccctcggaccctcccccctctgccttacaccaggcccctttttattaggaatgctctcccaactgcctaggtgccagagcagtgtgcccgctctcgcgcaccctacccggctccactacctgctccggctattgactttcctcctcggcccaggggctggaggcgctgaagctcagggcatgctgggacgggcactcctgctctctagtctgcctgacaattgttccttttgggatgcctttcggcctgaggggcggcggtctgtgctgagaactattggtgagtacctggagcaggatgaggagcagccgaccccctctggctttgagccgaccgtaaacccaagttcggggatctcaaaaatggaacttttggcctgcttctcacccgtcctatgggatctcttacagcgtgagaaatctgtgtgggcgctgcagatactcgttcaggcctatctgcatatgcccccggagaacctccagcagctggtgctgtctgctgaacgtgaggctgctcaaggtttcctaactctgatgctccaaggaaagctgcaggggaagttgcaagtgcccccaagtgaggaacaggccttaggcaggctgaccgcccttctgttgcagagatacccacgcttgacgagtcagttgttcattgatttatctccactcattccatttctggcagtatcggatttgatgaggtttccaccttccctcctggcaaatgatagtgtgctagcagccatcagggactactccccagggatgcggcccgagcagaaggaagccctcgcaaagaggctgttagcgcctgaattgtttggtgaagtgcccgcatggccgcaagaactgctctgggcggttctgccactcctcccccacctgccgctggagaacttcctccagctcagcccacaccagattcaggccctggaggacagttggcctgccgcgggcctcggccctggacatgcccgtcatgttttgcgaagcctcgttaatcagagcgtgcaggatggggaagagcaggtgaggcgcctgggtccgctggcctgttttttatcacccgaggaacttcagagcctggtcccgcttagcgaccccaccggacccgtggagcggggtttgctggaatgcgctgctaacggaactctgtcacccgaaggcagagttgcatacgagcttcttggggtccttcgcagcagtggaggagctgtgttatcacctcgggaacttcgagtgtgggctcccctcttcagtcagctgggattaaggttcctccaggagcttagcgaaccccagctgagagctatgctccctgtgctgcaaggcacaagcgtgacacccgctcaagctgttctactgctcggccgtctgctgccccgacatgacctatccctcgaggagctgtgttccctgcacctcttacttcctggattgagcccccaaacattgcaggcaatcccccgccgggtcctggtcggtgcttgctcatgtttagcccctgagctctctagactctctgcctgccagacagctgctctgctgcagacctttagggtgaaagatggggtgaaaaatatgggcaccaccggggccgggcctgccgtgtgtatcccagggcagcccatccctacgacctggcctgattgcctcttaccccttctgccattgaaattgctccagttggacagcctggctctcttggcaaataggagacgctactgggaactcccatggtctgagcagcaggcccagtttctgtggaaaaaaatgcaagttcctaccaatctgaccctacgaaatctccaggcgctaggcacattagccggtggaatgagctgcgagttcctgcaacagattaacagtatggttgatttcttagaagtcgttcatatgatctatcaattacccacacgagtgcgcggttcccttagagcctgcatctgggcagaattacagaggcggatggccatgcccgagccagaatggaccacagtcggccctgaactaaacggcctggactccaaactgctgctggacctgccaattcagctgatggacaggctcagtaatgagtccatcatgctcgtagttgaactggtccagcgggctcccgagcagctccttgccctcacaccccttcaccaggcagctcttgcagaaagggctctccagaatctcgcccccaaggaaacacccgtgtctggagaagtgcttgaaactctgggccctctagtcggcttcctcggcaccgagagcacgcggcagatcccactacagattctcctttcacacctgtcgcagcttcagggattctgtctgggtgaaacgtttgccacggagctcgggtggctcctgttgcaagaatccgtattggggaaacccgagttgtggtctcaagacgaggtggagcaggcggggcggctagttttcaccctctccacagaagctatctctttgataccacgggaggcactaggcccagaaacattggagaggttgctcgagaaacaacaatcctgggagcaatctcgtgtgggtcagctctgtcgtgagccgcaactcgcggccaagaaagcagccctcgtcgccggagtggtcaggccggcggccgaggacctccctgagcctgtgccaaattgcgccgatgtgcgaggaacctttccagcggcctggtctgctacccaaatagcagagatggagttgagcgattttgaagattgtttgactcttttcgccggtgatcccggactgggccctgaggagttaagggccgccatgggaaaggccaagcagctctggggcccaccccggggatttaggcccgagcagattttgcagttagggagactcctgatcggcctgggagatcgcgagctccaagagttgatcctagtggattggggagtgctgagcacccttgggcaaattgacggctggtcaaccacacaactccgcattgtagtaagtagttttttaagacagagcggtaggcacgtgagccatcttgacttcgtccatctgacagcgttaggatatactctgtgcggcctgagaccggaagaactccaacacatttcaagttgggagttcagccaggccgctttgtttctcgggaccctccacctccagtgtagcgaagagcagttggaggtgctggcccatctgctggttctgcctggcggatttggacccatctccaactggggccccgagatctttaccgagatcggcacaatagcagccggcatacccgatctggctctgtccgccctgctgaggggccagatacagggtgtcacaccgctcgcgatttccgtgatccctccaccgaagttcgcagttgtgtttagcccaattcagctctcttccctgacctcagcacaagccgtggccgtgactcccgagcagatggcttttctgtcacctgaacaacgcagagccgttgcttgggcccagcacgagggcaaagagtcacctgaacaacagggccggagcacagcatgggggcttcaggattggtctagaccgagttggtcgctagttcttacaatttcattccttggacacttactgtag

SEQ ID NO: 246573 - DNA, 1056 bp, Artificial Sequence
  derived and/or modified sequence
atggccctgtcactctggccgctgcttcttttactcctgttactgttacttctcagttttgcagtgacactcgctcctacaggtccgcacagcttggatcccgggctgagtttccttaagtctttgctcagcacactcgaccaggccccacaaggatcgctttcacgctctagattctttactttcctggctaacatctcaagctccttcgaaccaggccgcatgggggagggtccggtaggtgaaccccccccccttcagcctcctgcacttcgactccatgactttcttgtgactctaagagggtctcccgattgggagcctatgctggggcttctcggggacatgctggccctgctcgggcaggagcaaactccaagggactttctcgtccatcaggccggcgttctgggagggctggttgaagtgctccttggggccctcgtgcccgggggacctcctaccccgacacagccaccatgcactcgagacggcccttccgactgtgtgctggccgcggattggttgccctcactgttactgttgctggagggtacaagatggcaagccctggtgcaggtgcaaccctccgtggatccgactaacgcaaccgggttggatgggcgtgaggcggcaccacattttctgcagggtctgcttggtttgcttactcctacaggcgagttgggcagcaaagaagctctttggggcgggctcctgcgtaccgttggggcccccctctatgccgccttccaagaaggtttactacgagtgactcacagcctacaggacgaagtattttcaattttgggtcagccggaacctgatacaaacggtcagtgtcaaggcggaaacctgcagcagttgcttctttggggggttagacacaacctctcttgggacgttcaggcactgggctttttgagcggtagtccacctcccccacccgccctgctgcattgtctgtctacaggcgtgcctctgccccgagcatctcagccgagtgcccatatctccccaagacaacgccgcgccataactgtagaggctttgtag

SEQ ID NO: 246574 - DNA, 5328 bp, Artificial Sequence
  derived and/or modified sequence
atggccctatctctttggccactgctgctgcttctgttgctcctgctcttgctgtcattcgccgtgaccctggctcctacaggtccccactctctggatcctggcctgagtttcctgaagtccttgctgagcacgctggaccaggctccacagggatctctgtcccggtctagattctttacttttctcgccaacatttcttcctcattcgaaccaggacgcatgggcgagggccccgttggtgagccacccccattacagccgccagccctgcgactccacgatttcctcgtgaccctaagaggttcccctgattgggagcccatgcttgggctcctgggcgacatgctggctctcctgggccaggagcaaaccccacgcgactttctggtgcaccaggcgggagtcctgggaggactagtagaggtattgctgggggcactggtccctggcggcccacccacacctaccagaccaccctgcacccgggatggcccttccgattgtgtgctagccgcagattggctaccaagcttactgcttctgctcgaagggacccgatggcaggcccttgtccaggtacagccctcggttgacccgaccaatgccaccggcctggacgggcgagaagccgctcctcactttttgcaagggttgctcgggttgctgacacctaccggggagctgggttcaaaggaagccctctggggtggactgcttagaaccgttggcgccccactgtacgcggcgttccaagagggtctgcttcgcgtgactcactctctgcaggatgaagtgtttagcattctgggtcagccagaacctgacacgaatggccagtgtcagggagggaacttacaacagctgcttctgtggggtgtccgtcacaatctttcatgggatgtgcaggcacttgggtttttatcaggatctccccccccaccccctgccctgctgcattgtcttagtaccggagttccactaccccgggccagtcagccttccgcccatataagccccaggcagaggcgagccataaccgttgaggcgctctgtgaaaatcatctcgggcctgctccaccctacagtattagtaacttttctatccacttgctttgtcagcataccaagcccgcaaccccacagccccaccccagtacaaccgccatatgtcagaccgcagtctggtacgcagtgtcctgggccccaggcgcgcaaggttggctccaggcctgccacgaccagtttcctgatgaatttctggatgcaatctgttcaaatctgagtttctccgctctgtctggctcaaatcgcagactcgtgaagcgcctgtgcgctggactgctgcccccaccaactagctgtccagaaggcttgccgccagtgcccctgacccccgacatcttctggggctgctttcttgagaacgaaactctatgggcagaacgactgtgtggcgaagcaagtctccaggccgtgccacctagcaaccaggcctgggtgcaacatgtctgccaggggccgaccccagacgtgaccgcatcccccccttgccacatcggcccctgtggggagaggtgtcctgatggggggagcttcctcgttatggtgtgtgccaacgatactatgtacgaggtgttagtccccttctggccatggctggccggacaatgtcgtatttcgagaggggggaatgacacctgtttcctggagggcctgctgggccccctgctgccaagtctgccacccctgggccccagtccactatgtttgacccccggaccatttctcctgggaatgctctcacagctcccacgctgccagtcttccgtgcctgctcttgcccatcctactcgtctgcattacctactgagattgctgacctttctcctcggccccggtgccggcggtgcagaggcgcagggcatgttgggacgtgccctgttgctgtccagtctgcctgataattgttcattttgggacgcatttaggccagaagggcggcggagcgtacttcgaactatcggggaatatctcgaacaggatgaggagcaacccactccgtctggattcgagccaactgtgaacccctcaagcggaatttccaaaatggagctcctggcctgtttttcccccgtgctttgggatcttttacagcgggagaagtctgtgtgggcactgcagattctagttcaagcctacctgcacatgcctccggaaaatttgcaacagttggtgctctccgctgagcgtgaagctgcacagggtttcctgacactgatgcttcagggaaagttgcagggcaagctgcaggtgcctccttccgaggagcaagcacttgggcggctcactgcccttctccttcagcgatatcctagactaacatcccaattgtttatcgatctgtcccctcttatcccattcctcgcagtgtcagatctcatgcgtttccctccctccctacttgcgaatgatagcgttctggcagccatccgagactacagccccggcatgcgccccgaacagaaagaagcacttgccaaacgcctgttggctccagaactattcggggaggttcctgcctggccccaagagctgctctgggccgtcttaccactgctccctcacctgcccctggagaactttttgcagctaagtccacaccaaatccaggcacttgaggacagctggccggcagccggactgggccccggacacgcccgccacgtattacggtcactcgtaaaccagtcagtgcaggatggcgaggagcaggtgcggcgcctgggtcccctggcatgtttcctgtcccccgaagaactgcaatctctggtccccctgtcagacccaacaggccccgtggagaggggactcctcgaatgtgccgcgaacggcactctctcacctgaggggagagtggcctatgagctcctgggagtccttcggtcttctggcggcgccgtgctatctccacgagaactcagagtctgggcaccactgttctcccaactggggcttcgatttctgcaagaactgagtgagcctcaactgcgggcaatgctgcccgtactacagggcacctcagtgactccagcccaggccgtgcttctcctgggaagactgctcccccgtcacgacctgtcactcgaggagctgtgctcattacacctgctgctccccggattatcaccgcagacactgcaggctatccctcgtagggtcctagtcggtgcttgctcctgtctggctcctgagctgagcagactcagtgcctgccaaactgccgccctgctccagaccttcagagtaaaagatggcgtgaaaaatatggggacaaccggggccggccccgctgtatgtatccccgggcagccaattcccaccacctggccagattgcctgctgcccttactgccactgaagctcttgcaactggattctctggccctcctggccaacaggaggagatactgggagttgccctggtcagagcagcaggcccagttcctctggaaaaagatgcaggtcccaacaaacctgacccttcgcaatttgcaggcactaggcaccctggccggtggtatgagctgcgagtttctccaacagataaactccatggtagacttcttggaagtggtccacatgatttaccaactgcctactcgcgtccgcggatctctcagggcctgtatttgggcagaactccagcggcgtatggccatgcccgaacccgagtggaccacagtggggccagaactaaacgggctcgattccaaactgctgttggatctcccaatacagctcatggacaggctgagcaacgaaagtatcatgctcgtggtggagctggttcagcgagctcccgagcagctgctcgctctgacaccccttcaccaggccgctctggccgaacgcgcgttgcagaacctggcacccaaggaaaccccggtgtccggggaagtgctggaaacactcggtcctctggtgggtttcttgggtacggaatccacaaggcaaatcccactgcagatcctcctgtctcacttgagccagctgcagggcttttgtctgggcgagacattcgctaccgagttaggctggctacttctgcaggaaagcgtgctgggcaaaccggaactgtggtcgcaggacgaggttgaacaggccggcagactcgtgttcaccttgtctacagaggccatttccctcatcccccgtgaggccttggggcccgagacactcgagcggctgctagagaaacagcaaagctgggaacagtccagagtcggccagctctgccgcgaacctcaattagctgctaagaaagctgccctcgtcgcaggagttgtgcgtccagcagcagaggacctgccggagccggtccccaattgcgctgacgtgaggggtacgtttcccgcggcttggtcagcaactcaaattgccgagatggagttgtctgactttgaggattgcctcacattgttcgcaggcgatccaggattgggaccagaggaactccgcgcagccatgggaaaagctaagcaactgtggggtccacccaggggcttccgacctgagcagatcttgcaactgggacgcctcctgatcggtcttggcgatagggaattgcaggagttaattctcgtagattggggcgtcctgtccaccctgggacagatcgacgggtggtccactacgcagctgcggatcgtcgtctccagtttcctcagacagagtgggagacacgtgtctcatctcgatttcgtgcatctgacagctctcgggtatacactgtgtggactcagacctgaagaacttcagcacatttcttcttgggaattctcacaagccgctctcttcctgggaacactgcatttgcagtgcagcgaggagcagttggaggtgttagcccatctgttggtgctgcctggaggcttcggaccgattagtaactggggccccgagatattcaccgagattggtaccattgctgctggtatcccagacctcgcacttagcgccttactgagaggtcagatacaaggtgtaactcctctcgccatttccgtaattccccccccgaaattcgctgtcgtctttagtcccatccagctgtctagccttacatccgctcaggccgttgcagttacccctgaacagatggcttttcttagccccgaacagcgaagagccgtggcctgggctcagcacgagggcaaggagagccccgagcagcagggcaggagcacggcgtggggtcttcaggactggtctagaccttcttggagcctcgtattgactattagtttcttaggacacctcttgtag

SEQ ID NO: 246575 - DNA, 1056 bp, Artificial Sequence
  derived and/or modified sequence
atggccctgtccctctggcccctgctgctgctgctgctgttgctgcttctccttagctttgctgtgaccctggcccccacaggcccccattctctggatcctgggctcagtttcttgaaatctctgctgtctactttggaccaagctccacagggctccttgagcaggtcaaggtttttcacatttttggctaacatatccagtagtttcgagcccggccgcatgggcgagggccctgtgggggaaccccctcccctgcagccccccgcactgcggctgcacgactttctcgtcaccttgcggggctctcctgactgggaaccaatgctcggcctgcttggagatatgttggccttgttgggacaggagcaaacccccagagattttctcgtacatcaggctggtgttctaggcggcctcgtcgaggttctacttggggctcttgtgccaggaggcccccctacccctacgaggccaccgtgtacacgagatggtccctctgattgtgtcctagcagccgactggctgccctctctgttactacttctggaggggacaagatggcaggccctggtccaggtgcagccaagcgtggaccccaccaacgcgactggcctggatgggcgagaggctgccccacatttcttacaaggactgctcggcttgcttacacccacgggtgaactggggagcaaagaagcactctggggcggcctcctgagaaccgtgggcgcccccctttatgccgccttccaggagggactgttgcgcgtcacccactctctacaagatgaggtgttcagtattcttggccaaccagagcccgacaccaatggtcaatgccaggggggcaatctgcaacagctgctgctttggggggtgcgccacaatttaagttgggacgtgcaggctctcggatttctgagcggcagccccccaccgccaccggccctgctgcactgcctgtccactggggtgccattacctagggcctctcaacccagcgcacacattagcccaagacagaggagggctatcacagtggaggctctgtag

SEQ ID NO: 246576 - DNA, 2100 bp, Artificial Sequence
  derived and/or modified sequence
atggcattgtccctgtggcctttgctccttttgcttcttcttttactcttgctgagttttgcggtcacactggccccaacaggaccccacagcttggatccagggttgagtttcctgaagtctctgttaagcacactcgatcaggccccacagggcagcctgagcagaagccggttcttcacatttcttgccaacatctcctcatcctttgagcccgggcgcatgggcgagggcccagtgggcgagccccctcctctccaacctcccgctcttcggctgcacgattttctcgtgactttacgcggaagtcccgattgggagcccatgttgggcctgctgggcgacatgctcgccctgttggggcaggagcaaaccccaagggactttctggttcaccaggcgggagtgctgggcgggctggtcgaggtgttactcggggcattagtgcccggcggccctcccacccccacgcagccgccgtgtacacgggatggaccttcagactgcgtcttggccgcggactggctgcctagcttacttttgctgctggagggtacaagatggcaagccctggtacaggtgcagccatctgttgaccctacaaatgcaaccggactggacggccgggaggcagccccccactttttacaagggcttctcggattgttgactccgaccggcgagctcgggtccaaggaggccctgtgggggggcctgctcagaactgtgggcgctccactctatgctgccttccaggaagggctattacgggtgacacactccctccaggatgaggttttctccattttgggccaacccgaaccagataccaatggacagtgtcagggcgggaacctccaacagctgcttctgtggggagtgcggcacaatcttagctgggatgtgcaggctttaggttttctaagcggaagccctcctcccccaccagcgctgctccactgcctgagcactggcgtgccattacccagagcctcccaacccagcgctcacatctcccctcgccagagacgggctataaccgtggaagctttgtgtgagaaccacctgggcccggccccgccatactcaatttctaacttctcaatccatctcttgtgtcagcacaccaaaccagccactccgcagccccatccaagcactacagccatttgccagactgccgtgtggtacgccgtatcttgggcaccaggtgcacagggatggctccaggcctgccatgaccaattccccgatgagttcctcgacgccatttgcagcaacctgagcttttctgctttgagtggatcaaataggcgcctcgtcaagcgcctctgcgcaggcttgctcccaccacctacaagttgcccagagggacttccaccagtcccactaactccagacatcttctggggatgcttcttggaaaatgagactttatgggcagagcggctctgtggtgaagcttccctgcaagccgtccccccgagtaaccaggcctgggttcagcacgtgtgccagggccccaccccagatgtcaccgccagtcctccatgccatattggcccttgtggggagcgttgtcctgatggtgggtcgttcctcgtgatggtgtgcgcaaacgataccatgtacgaagtgcttgtacccttctggccttggcttgcaggacagtgcagaatcagccgtgggggaaatgacacatgctttctggagggattgctgggccctctcctcccctctctgccccctctgggccccagcccattgtgtctgaccccaggaccatttctgctcggaatgctgagccaattaccccggtgccagtcctcagtccctgcccttgcccatcccacacgacttcattatttgctacgactgctaacattcttgctgggtcccggagcaggtggtgccgaggcccagggcatgctcggtcgggccctgctcctgtccagtctccccgacaactgttcattttgggacgctttcagacccgagggaagacgctccgtgctccgcacaattggcgaatataacaaaatgaggagctcacagccgcaccaggctctgaatccactgtctaccccggccctggtgtag

SEQ ID NO: 246577 - DNA, 3009 bp, Artificial Sequence
  derived and/or modified sequence
atggagctgcttgcttgtttttcccccgtgctgtgggatctgctgcagagagagaagagcgtgtgggctctccagatcctggttcaagcctatctgcatatgcctcccgaaaacttgcagcaactggtactctctgccgagagggaagccgcccagggcttcctgacattaatgctgcaggggaagttgcaggggaaactgcaagtgccaccctccgaggagcaggctcttggtcgtttaactgccctgctgcttcagaggtacccccggctcacgagccagcttttcatcgatctttctcccctcattcctttcctggctgtgagtgacctcatgcggtttcctccatctctgctggccaacgattctgtccagcagggataccgaggctctgaggagaacagccttgaggaagacaaggggttgcgaccaatgactcctaggtccctggcagcaatccgcgactacagccccggtatgagaccggaacagaaagaggccctcgcaaaaaggctgctggcccccgagctctttggcgaggtacctgcatggcctcaagagctgctctgggccgtgctgcccctgctcccccacctccctctggagaactttctgcagctctctccccatcaaatccaagcactggaagatagctggccagcggcgggacttggtcccggccacgccagacatgtcctgagatctctagtgaatcagtcggttcaggatggagaagaacaggtacggcgactgggcccactggcatgttttctgtcgcccgaggagttgcagtccttagtcccactgagtgatcctacagggccagttgagaggggtcttcttgaatgcgctgctaacggcactctatcccccgagggaagggtggcatacgaattgcttggagtattgcgctctagcggtggcgctgtactgtctccgcgggaacttcgcgtgtgggccccccttttctcgcagttgggactgaggttcctccaggaactgtcagagccccagctcagggccatgctgccagtgctccagggaacgagcgtgacaccggcccaagccgtgctgctgctcggacgtctgctgccccggcatgacctcctccagctggactctcttgcgttgctggccaaccggagaaggtattgggagctgccttggagtgagcaacaggcacaatttttgtggaagaagatgcaggtgccaaccaatctcaccctccgaaatctgcaagcactgggaactctggccggaggcatgagctgtgaattcctgcagcagattaatagtatggtcgattttctcgaggtggtgcatatgatataccagctgccaactcgcgttagggggagccttcgcgcctgcatatgggccgagttgcagaggcggatggccatgccagagcccgagtggaccactgtcggacctgagttgaatggcctggattcgaagctgctccttgatcttcccatccagctaatggatcggctgtctaacgagtctatcatgctggtagtggaactcgtacagagggcacccgaacagttgcttgccctgactcctcttcaccaggctgcactggctgagagggccttgcagaatctcgcaccgaaggagaccccagtcagtggtgaggtccttgagactttggggcctttagtgggtttcctgggtacagaatccacacgccaaatccctctgcagatcttgctttctcacctttcccaactgcagggcttttgtttaggagagacatttgctacagaactcgggtggctgctgctgcaggagtctgtcctgggtaaaccggagctgtggtcccaggacgaagtggagcaggccggacgcttggtgtttacgctgtcaacggaggcgatctcgcttatccccagagaagcactaggtccagaaaccttagagcgcctgctggagaaacagcagtcctgggaacaaagtcgtgtcgggcagctctgtagagaaccgcagctggccgccaagaaggctgcgttggtagctggcgtggtccgtcccgcggcagaagacttaccggaaccggtccctaattgcgcagatgtaagaggtacattcccagcggcctggagtgcaacccagattgctgagatggaactcagcgacttcgaggattgtctcaccctatttgccggtgacccggggctgggcccagaggaactgagagcagccatgggaaaagctaaacagctttgggggccacccagggggtttcgacctgagcagatccttcaattgggccggctgctcattggtctcggggaccgcgagctgcaggaactgatactggtggactggggggttctcagtactttagggcaaatcgatgggtggtctaccacacagttacgaattgttgtgagcagctttcttaggcagtcagggcgccacgttagtcacctggattttgtgcatctgaccgcgctgggttatactctgtgcggcctaagaccggaagaactgcagcacatcagtagctgggagttttcccaggccgctctcttcttaggcacattgcatctgcagtgctcggaagagcaacttgaggttttggctcatctacttgtgttaccagggggattcggccccatatccaactgggggcccgaaattttcacagaaatcgggactattgcggcaggcattcctgatttagcactttccgctttattgcgagggcaaatacagggagttacaccgctggctatctctgtgatacctcctcctaagtttgccgtggtgttttctcccatacagctgtcaagtcttacatccgcacaggcagtggctgtcactcccgaacagatggcttttctgtccccagaacagagacgtgcagtggcctgggcccagcatgaaggcaaggagtctccagagcagcaaggccgctccactgcctggggcctgcaggactggtctcgaccctcatggtctctggttctgaccatttcttttctcggccatctactgtag

SEQ ID NO: 246578 - DNA, 5328 bp, Artificial Sequence
  derived and/or modified sequence
atggccctgagcctgtggcccctgctgctgctgctgctgctgctgctgctgctgagctttgctgtgaccctggcccccaccggcccccacagcctggaccccggcctgtccttcctgaagagcctgctgagcaccctggaccaggccccccagggcagcctgagccgcagccgcttcttcaccttcctggccaacatcagcagcagctttgagcccggccgcatgggagagggccctgtgggggagcccccacccctgcagcccccagccctgcggctgcatgacttcctggtgaccctgcggggcagcccagactgggagcccatgctgggcctgctgggggacatgctggccctgctgggccaggagcagaccccccgggacttcctggtgcaccaggccggcgtgctgggcggcctggtggaggtgctgctgggcgccctggtgcctgggggcccccccacccccaccaggcctccctgcaccagagatggccccagcgactgtgtgctggccgctgactggctgcccagcctgctgctgctgctggagggcacccgctggcaggccctggtgcaggtgcagcccagcgtggaccccaccaatgccaccggcctggatggccgggaggccgccccccacttcctgcagggcctgctgggcctgctgacccccaccggggagctgggcagcaaggaggccctgtggggcggcctgctgaggacagtgggcgcccccctgtatgctgccttccaggagggcctgctgcgggtgacccacagcctgcaggatgaggtgttcagcatcctgggccagcctgagccagacaccaacggccagtgccagggcggcaacctgcagcagctgctgctgtggggcgtgcgccacaacctgtcctgggatgtgcaggccctgggcttcctgagcggcagccccccacctcctccagccctgctgcactgcctgagcactggagtgcccctgccccgggccagccagcccagcgcccacatcagcccccggcagaggcgggccatcaccgtggaggccctgtgtgagaaccacctgggccctgccccaccctacagcatcagcaacttcagcatccacctgctgtgccagcacaccaagccagccaccccccagccccaccccagcaccacagccatctgccagacagctgtgtggtatgctgtgtcctgggcccctggggcccagggctggctgcaggcctgccacgaccagttcccagatgagttcctggatgccatctgcagcaacctgtccttcagcgccctgagcggcagcaacagaaggctggtgaagaggctgtgtgccggcctgctgcccccacccaccagctgcccagagggcctgccccctgtgcccctgaccccagacatcttctggggctgcttcctggagaatgagaccctgtgggccgagcggctgtgtggggaggccagcctgcaggccgtgccccccagcaaccaggcctgggtgcagcacgtgtgccagggccccaccccagatgtgacagccagccccccctgccacatcggcccctgtggggagcgctgcccagatggcggcagcttcctggtgatggtgtgtgccaatgacaccatgtatgaggtgctggtgcccttctggccctggctggccggccagtgccgcatcagcagaggaggaaatgacacctgcttcctggagggcctgctgggccccctgctgcccagcctgccccccctgggccccagccccctgtgcctgaccccaggccccttcctgctgggcatgctgagccagctgccccgctgccagagctctgtgcctgccctggcccaccccacccggctgcactacctgctgcggctgctgaccttcctgctgggccctggagctggaggagctgaggcccagggcatgctgggccgggccctgctgctgagcagcctgcctgacaactgcagcttctgggatgccttccggcctgagggccgccgctctgtgctgcggaccatcggggagtacctggagcaggatgaggagcagcccaccccatctggctttgagcccaccgtgaaccccagcagcggcatcagcaagatggagctgctggcctgcttcagccctgtgctgtgggacctgctgcagcgggagaagtctgtgtgggccctgcagatcctggtgcaggcctacctgcacatgcctcctgagaacctgcagcagctggtgctgtctgctgagcgggaggccgcccagggcttcctgaccctgatgctgcagggcaagctgcagggcaagctgcaggtgcccccatctgaggagcaggccctgggccgcctgacagccctgctgctgcagcgctacccccggctgaccagccagctgttcatcgacctgagccccctcatccccttcctggccgtgtctgacctgatgaggttcccccccagcctgctggccaatgacagcgtgctggccgccatccgggactacagccctggcatgaggcctgagcagaaggaggccctggccaagaggctgctggcccctgagctgtttggagaggtgcctgcctggccccaggagctgctgtgggccgtgctgcccctgctgccccacctgcccctggagaacttcctgcagctgagcccccaccagatccaggccctggaggacagctggccagctgctggcctgggccctggccacgcccggcacgtgctgcggagcctggtgaaccagagcgtgcaggatggagaggagcaggtgcggcggctgggccccctggcctgcttcctgagccctgaggagctgcagagcctggtgcccctgagtgaccccactggacctgtggagcggggcctgctggagtgtgccgccaacggcaccctgagccctgagggccgggtggcctatgagctgctgggcgtgctgcggagcagcggcggcgctgtgctgagcccccgggagctgcgggtgtgggcccccctcttcagccagctgggcctgcgcttcctgcaggagctgtctgagccccagctgcgggccatgctgcctgtgctgcagggcacctctgtgaccccagcccaggccgtgctgctgctgggccgcctgctgcccaggcatgacctgagcctggaggagctgtgcagcctgcacctgctgctgcccggcctgagcccccagaccctgcaggccatcccccggcgggtgctggtgggcgcctgcagctgcctggcccctgagctgagccggctgagcgcctgccagacagctgccctgctgcagaccttccgggtgaaggatggagtgaagaacatgggcaccactggagctggccctgctgtgtgcatccctggccagcccatccccaccacctggccagactgcctgctgcccctgctgcccctgaagctgctgcagctggacagcctggccctgctggccaacagaagacgctactgggagctgccctggagcgagcagcaggcccagttcctgtggaagaagatgcaggtgcccaccaacctgaccctgaggaacctgcaggccctgggcaccctggccggcggcatgagctgtgagttcctgcagcagatcaacagcatggtggacttcctggaggtggtgcacatgatctaccagctgcccaccagggtgcggggcagcctgcgggcctgcatctgggccgagctgcagaggaggatggccatgcctgagcctgagtggaccaccgtgggccctgagctgaatggcctggacagcaagctgctgctggacctgcccatccagctgatggaccggctgagcaatgaaagcatcatgctggtggtggagctggtgcagagggcccctgagcagctgctggccctgacccccctgcaccaggccgccctggccgagcgggccctgcagaacctggcccccaaggagacccctgtgtctggagaggtgctggagaccctgggccccctggtgggcttcctgggcacagagagcacccggcagatccccctgcagatcctgctgagccacctgagccagctgcagggcttctgcctgggggagacctttgccacagagctgggctggctgctgctgcaggagagcgtgctgggcaagccagagctgtggagccaggatgaggtggagcaggccggccgcctggtgttcaccctgagcacagaggccatcagcctcatcccccgggaggccctgggccctgagaccctggagcggctgctggagaagcagcagagctgggagcagagccgggtgggccagctgtgccgggagccccagctggccgccaagaaggccgccctggtggccggcgtggtgcggcctgctgctgaggacctgcctgagcctgtgcccaactgtgctgatgtgcggggcaccttccctgctgcctggagcgccacccagattgctgagatggagctgagtgactttgaggactgcctgaccctgtttgctggggaccccggcctgggccctgaggagctgcgggccgccatgggcaaggccaagcagctgtggggccccccccggggcttccggcctgagcagatcctgcagctgggccgcctgctgattggcctgggggaccgggagctgcaggagctgatcctggtggactggggcgtgctgagcaccctgggccagattgatggctggagcaccacccagctgcgcatcgtggtgagcagcttcctgcggcagagcggccgccacgtgagccacctggactttgtgcacctgacagccctgggctacaccctgtgtggcctgcggcctgaggagctgcagcacatcagctcctgggagttcagccaggccgccctcttcctgggcaccctgcacctgcagtgcagcgaggagcagctggaggtgctggcccacctgctggtgctgcccggcggcttcggccccatcagcaactggggccctgagatcttcacagagatcggcaccatcgctgctggcatcccagacctggccctgagcgccctgctgcggggccagatccagggcgtgacccccctggccatcagcgtcatccccccacccaagtttgctgtggtgttcagccccatccagctgagcagcctgaccagcgcccaggccgtggccgtgaccccagagcagatggccttcctgagccctgagcagaggagagctgtggcctgggcccagcacgagggcaaggagagccctgagcagcagggccgcagcacagcctggggcctgcaggactggagccggcccagctggagcctggtgctgaccatctccttcctgggccacctgctgtag

SEQ ID NO: 246579 - DNA, 1056 bp, Artificial Sequence
  derived and/or modified sequence
atggccctgagcctgtggcccctgctgctgctgctgctgctgctgctgctgctgagctttgctgtgaccctggcccccaccggcccccacagcctggaccccggcctgtccttcctgaagagcctgctgagcaccctggaccaggccccccagggcagcctgagccgcagccgcttcttcaccttcctggccaacatcagcagcagctttgagcccggccgcatgggagagggccctgtgggggagcccccacccctgcagcccccagccctgcggctgcatgacttcctggtgaccctgcggggcagcccagactgggagcccatgctgggcctgctgggggacatgctggccctgctgggccaggagcagaccccccgggacttcctggtgcaccaggccggcgtgctgggcggcctggtggaggtgctgctgggcgccctggtgcctgggggcccccccacccccacccagcccccctgcaccagagatggccccagcgactgtgtgctggccgctgactggctgcccagcctgctgctgctgctggagggcacccgctggcaggccctggtgcaggtgcagcccagcgtggaccccaccaatgccaccggcctggatggccgggaggccgccccccacttcctgcagggcctgctgggcctgctgacccccaccggggagctgggcagcaaggaggccctgtggggcggcctgctgaggacagtgggcgcccccctgtatgctgccttccaggagggcctgctgcgggtgacccacagcctgcaggatgaggtgttcagcatcctgggccagcctgagccagacaccaacggccagtgccagggcggcaacctgcagcagctgctgctgtggggcgtgcgccacaacctgtcctgggatgtgcaggccctgggcttcctgagcggcagccccccacctcctccagccctgctgcactgcctgagcactggagtgcccctgccccgggccagccagcccagcgcccacatcagcccccggcagaggcgggccatcaccgtggaggccctgtag

SEQ ID NO: 246580 - DNA, 1056 bp, Artificial Sequence
  derived and/or modified sequence
atggccctgagcctgtggcccctgctgctgctgctgctgctgctgctgctgctgagctttgctgtgaccctggcccccaccggcccccacagcctggaccccggcctgtccttcctgaagagcctgctgagcaccctggaccaggccccccagggcagcctgagccgcagccgcttcttcaccttcctggccaacatcagcagcagctttgagcccggccgcatgggagagggccctgtgggggagcccccacccctgcagcccccagccctgcggctgcatgacttcctggtgaccctgcggggcagcccagactgggagcccatgctgggcctgctgggggacatgctggccctgctgggccaggagcagaccccccgggacttcctggtgcaccaggccggcgtgctgggcggcctggtggaggtgctgctgggcgccctggtgcctgggggcccccccacccccaccaggcctccctgcaccagagatggccccagcgactgtgtgctggccgctgactggctgcccagcctgctgctgctgctggagggcacccgctggcaggccctggtgcaggtgcagcccagcgtggaccccaccaatgccaccggcctggatggccgggaggccgccccccacttcctgcagggcctgctgggcctgctgacccccaccggggagctgggcagcaaggaggccctgtggggcggcctgctgaggacagtgggcgcccccctgtatgctgccttccaggagggcctgctgcgggtgacccacagcctgcaggatgaggtgttcagcatcctgggccagcctgagccagacaccaacggccagtgccagggcggcaacctgcagcagctgctgctgtggggcgtgcgccacaacctgtcctgggatgtgcaggccctgggcttcctgagcggcagccccccacctcctccagccctgctgcactgcctgagcactggagtgcccctgccccgggccagccagcccagcgcccacatcagcccccggcagaggcgggccatcaccgtggaggccctgtag

SEQ ID NO: 246581 - DNA, 2100 bp, Artificial Sequence
  derived and/or modified sequence
atggccctgagcctgtggcccctgctgctgctgctgctgctgctgctgctgctgagctttgctgtgaccctggcccccaccggcccccacagcctggaccccggcctgtccttcctgaagagcctgctgagcaccctggaccaggccccccagggcagcctgagccgcagccgcttcttcaccttcctggccaacatcagcagcagctttgagcccggccgcatgggagagggccctgtgggggagcccccacccctgcagcccccagccctgcggctgcatgacttcctggtgaccctgcggggcagcccagactgggagcccatgctgggcctgctgggggacatgctggccctgctgggccaggagcagaccccccgggacttcctggtgcaccaggccggcgtgctgggcggcctggtggaggtgctgctgggcgccctggtgcctgggggcccccccacccccacccagcccccctgcaccagagatggccccagcgactgtgtgctggccgctgactggctgcccagcctgctgctgctgctggagggcacccgctggcaggccctggtgcaggtgcagcccagcgtggaccccaccaatgccaccggcctggatggccgggaggccgccccccacttcctgcagggcctgctgggcctgctgacccccaccggggagctgggcagcaaggaggccctgtggggcggcctgctgaggacagtgggcgcccccctgtatgctgccttccaggagggcctgctgcgggtgacccacagcctgcaggatgaggtgttcagcatcctgggccagcctgagccagacaccaacggccagtgccagggcggcaacctgcagcagctgctgctgtggggcgtgcgccacaacctgtcctgggatgtgcaggccctgggcttcctgagcggcagccccccacctcctccagccctgctgcactgcctgagcactggagtgcccctgccccgggccagccagcccagcgcccacatcagcccccggcagaggcgggccatcaccgtggaggccctgtgtgagaaccacctgggccctgccccaccctacagcatcagcaacttcagcatccacctgctgtgccagcacaccaagccagccaccccccagccccaccccagcaccacagccatctgccagacagctgtgtggtatgctgtgtcctgggcccctggggcccagggctggctgcaggcctgccacgaccagttcccagatgagttcctggatgccatctgcagcaacctgtccttcagcgccctgagcggcagcaacagaaggctggtgaagaggctgtgtgccggcctgctgcccccacccaccagctgcccagagggcctgccccctgtgcccctgaccccagacatcttctggggctgcttcctggagaatgagaccctgtgggccgagcggctgtgtggggaggccagcctgcaggccgtgccccccagcaaccaggcctgggtgcagcacgtgtgccagggccccaccccagatgtgacagccagccccccctgccacatcggcccctgtggggagcgctgcccagatggcggcagcttcctggtgatggtgtgtgccaatgacaccatgtatgaggtgctggtgcccttctggccctggctggccggccagtgccgcatcagcagaggaggaaatgacacctgcttcctggagggcctgctgggccccctgctgcccagcctgccccccctgggccccagccccctgtgcctgaccccaggccccttcctgctgggcatgctgagccagctgccccgctgccagagctctgtgcctgccctggcccaccccacccggctgcactacctgctgcggctgctgaccttcctgctgggccctggagctggaggagctgaggcccagggcatgctgggccgggccctgctgctgagcagcctgcctgacaactgcagcttctgggatgccttccggcctgagggccgccgctctgtgctgcggaccatcggggagtacaacaagatgaggagcagccagccccaccaggccctgaaccccctgagcaccccagccctggtgtag

SEQ ID NO: 246582 - DNA, 3009 bp, Artificial Sequence
  derived and/or modified sequence
atggagctgctggcctgcttcagccctgtgctgtgggacctgctgcagcgggagaagtctgtgtgggccctgcagatcctggtgcaggcctacctgcacatgcccccagagaacctgcagcagctggtgctgtctgctgagcgggaggccgcccagggcttcctgaccctgatgctgcagggcaagctgcagggcaagctgcaggtgccccccagcgaggagcaggccctgggccgcctgacagccctgctgctgcagcgctacccccggctgaccagccagctgttcatcgacctgagccccctcatccccttcctggccgtgtctgacctgatgagatttcctcccagcctgctggccaatgattctgtgcagcagggctaccggggcagcgaggagaacagcctggaggaggacaagggcctgcggcccatgacccccaggagcctggccgccatccgggactacagccctggcatgaggcctgagcagaaggaggccctggccaagaggctgctggcccctgagctgtttggagaggtgcctgcctggccccaggagctgctgtgggccgtgctgcccctgctgccccacctgcccctggagaacttcctgcagctgagcccccaccagatccaggccctggaggacagctggccagctgctggcctgggccctggccacgcccggcacgtgctgcggagcctggtgaaccagagcgtgcaggatggagaggagcaggtgcggcggctgggccccctggcctgcttcctgagccctgaggagctgcagagcctggtgcccctgagtgaccccactggacctgtggagcggggcctgctggagtgtgccgccaacggcaccctgagccctgagggccgggtggcctatgagctgctgggcgtgctgcggagcagcggcggcgctgtgctgagcccccgggagctgcgggtgtgggcccccctcttcagccagctgggcctgcgcttcctgcaggagctgtctgagccccagctgcgggccatgctgcctgtgctgcagggcacctctgtgaccccagcccaggccgtgctgctgctgggccgcctgctgcccaggcatgacctgctgcagctggacagcctggccctgctggccaacagaagacgctactgggagctgccctggagcgagcagcaggcccagttcctgtggaagaagatgcaggtgcccaccaacctgaccctgaggaacctgcaggccctgggcaccctggccggcggcatgagctgtgagttcctgcagcagatcaacagcatggtggacttcctggaggtggtgcacatgatctaccagctgcccaccagggtgcggggcagcctgcgggcctgcatctgggccgagctgcagaggaggatggccatgcctgagcctgagtggaccaccgtgggccctgagctgaatggcctggacagcaagctgctgctggacctgcccatccagctgatggaccggctgagcaatgaaagcatcatgctggtggtggagctggtgcagagggcccctgagcagctgctggccctgacccccctgcaccaggccgccctggccgagcgggccctgcagaacctggcccccaaggagacccctgtgtctggagaggtgctggagaccctgggccccctggtgggcttcctgggcacagagagcacccggcagatccccctgcagatcctgctgagccacctgagccagctgcagggcttctgcctgggggagacctttgccacagagctgggctggctgctgctgcaggagagcgtgctgggcaagccagagctgtggagccaggatgaggtggagcaggccggccgcctggtgttcaccctgagcacagaggccatcagcctcatcccccgggaggccctgggccctgagaccctggagcggctgctggagaagcagcagagctgggagcagagccgggtgggccagctgtgccgggagccccagctggccgccaagaaggccgccctggtggccggcgtggtgcggcctgctgctgaggacctgcctgagcctgtgcccaactgtgctgatgtgcggggcaccttccctgctgcctggagcgccacccagattgctgagatggagctgagtgactttgaggactgcctgaccctgtttgctggggaccccggcctgggccctgaggagctgcgggccgccatgggcaaggccaagcagctgtggggccccccccggggcttccggcctgagcagatcctgcagctgggccgcctgctgattggcctgggggaccgggagctgcaggagctgatcctggtggactggggcgtgctgagcaccctgggccagattgatggctggagcaccacccagctgagaattgtggtgtcctccttcctgcggcagagcggcagacatgtgagccacctggactttgtgcacctgacagccctgggctacaccctgtgtggcctgcggcctgaggagctgcagcacatcagctcctgggagttcagccaggccgccctcttcctgggcaccctgcacctgcagtgcagcgaggagcagctggaggtgctggcccacctgctggtgctgcccggcggcttcggccccatcagcaactggggccctgagatcttcacagaaattggcaccatcgccgccggcatcccagacctggccctgagcgccctgctgcggggccagatccagggcgtgacccccctggccatcagcgtcatccccccacccaagtttgctgtggtgttcagccccatccagctgagcagcctgaccagcgcccaggccgtggccgtgaccccagagcagatggccttcctgagccctgagcagaggagagctgtggcctgggcccagcacgagggcaaggagagccctgagcagcagggccgcagcacagcctggggcctgcaggactggagccggcccagctggagcctggtgctgaccatctccttcctgggccacctgctgtag

SEQ ID NO: 246583 - DNA, 5328 bp, Artificial Sequence
  derived and/or modified sequence
atggccctgagcctgtggcccctgctgctgctgctgctgctgctgttattgctcagcttcgcagtcacactcgctcctaccgggccccactctttggatcccggactctcatttctgaaatcactcctttcaaccctggaccaagcccctcaagggagcctctctcgtagtcggttcttcacttttctcgctaacattagcagtagcttcgagccaggaaggatgggtgaggggccagtcggcgaacctccgcccctgcagccgcctgccctccggttgcatgactttttggtcacactaagggggagtcctgactgggagcctatgctaggactcttgggtgatatgctagctttactgggacaagaacagaccccacgggacttcttggtgcatcaagcaggcgtgctcgggggactagtggaggtgttgctcggggcattggtgcccggcggcccaccgactcccacgagaccaccctgtacacgggatgggccctcagattgtgtgttggccgcggattggctccctagtctgctgctgctcctggagggaacgcggtggcaggccttagttcaggtccagccatccgtggacccaaccaacgccacaggccttgacggcagggaagccgctccccacttcctacaagggctgctggggttactgacacctaccggggagttagggtcaaaggaagctctgtggggaggccttctgcggacagtaggcgctcccctgtacgccgcctttcaagagggcttgctgagggtgacacactcgctccaagacgaagtgttttcaatactcgggcagccagagcctgacaccaatgggcagtgccaaggcggtaacttgcagcagttactgctgtggggcgttagacacaatctgagttgggatgtgcaggcactggggtttctatccggctccccccctccaccacctgctttgctgcactgcctctccacgggcgtcccactcccgagagcctcacagccttccgcccatatttcaccaagacagaggcgggccataaccgtcgaggccctttgtgaaaatcatctaggacccgccccaccctacagcataagcaacttcagcatccaccttttatgccagcataccaagccagctacgccgcagccgcatccaagcaccaccgccatttgtcagacggccgtctggtatgcagtctcttgggccccgggtgcgcagggttggcttcaagcctgtcacgatcagtttccagacgaatttctcgacgccatttgctctaatctctccttctcagcactctcgggatctaatcgccgtcttgtcaaaaggctgtgtgccgggttgctgccaccgcccactagttgtccagagggtctcccaccggtcccacttacaccagatatcttctggggatgcttcctggagaacgaaaccctctgggctgaaagattgtgcggggaggcctccttacaggctgtacccccttcaaaccaggcctgggtacagcatgtctgtcagggaccgacaccagacgtcacagccagtcctccatgtcatattggcccgtgtggcgagcgttgtcccgacggcggatctttcctagtcatggtgtgtgcgaacgacacaatgtatgaagttctagtcccgttctggccatggttggccggccagtgcagaatttctcggggtggcaacgacacctgtttcctcgaggggttgctgggtcccttacttccgtccctgccccccttggggccctcccctctgtgtctcacccctggtcccttcctcctgggtatgctctcacagctcccaagatgccagtccagcgtccctgcacttgcccaccctacgaggctgcattatctcctgcggttgctgacatttctgttagggcccggagcgggcggagccgaggcccagggcatgctgggaagagcgttgcttttgtccagtctccctgacaactgtagcttttgggacgcatttcgtcccgaggggcggcgctcggtgttgcggaccatcggcgaatatctggagcaggacgaggagcagcctacacccagtggttttgagccaacagtgaaccccagcagcggaattagtaagatggaactgctagcttgctttagtcctgtgctgtgggacctgctgcagagagaaaagagcgtgtgggcactccaaattttagtgcaagcatatctgcatatgcccccagaaaatttgcagcagttagtactgtccgccgagagggaggccgctcagggttttttaacccttatgctgcagggaaaactccaagggaaactccaggtaccaccttctgaggagcaggccctcggacgtctaacagccctgttgctccagcggtatcccaggctcacgagccaactctttatcgacctgtcacctctcatccctttcctggccgtgtctgatttaatgaggttccctccgtctcttttagctaacgactccgtccttgccgccattcgggattactccccaggaatgaggcccgagcagaaggaagcactggccaaaaggctcctggcgccggagttgtttggcgaggtgcccgcctggccgcaggagctgctgtgggctgtcctgcccctactcccacaccttccgcttgaaaattttctgcagttgtcaccgcatcagattcaggcccttgaagattcgtggcctgccgcagggctgggcccgggccatgctcggcacgtcttgcgctcgcttgtcaaccaaagtgtgcaggacggcgaggagcaggtgcgtcgtctgggcccccttgcctgtttcctgtctcccgaagaactgcagtctctcgtgcccctttcagacccaaccggacccgtcgagcgcgggctcctggagtgtgcagccaatggaactttgtccccggaaggtcgcgtcgcctacgaactactcggtgtgcttcggtcttccgggggggcagttctgagccccagagagcttagggtgtgggcccctctgttcagccagctcggcctgcggtttctgcaggagcttagcgagccccagcttcgggctatgctgcctgtccttcaaggcacatccgtgaccccagcccaggcggtcttgctgctgggtagactcctgcctaggcacgacctcagtctcgaggagctgtgctcactccatcttctcctccctggtctttctccccagactctgcaagccatccctcgccgggttttagtaggggcctgctcctgcctggcaccagagctgagccgtttatcagcctgtcagacagctgctctgctccagacttttagagtaaaggatggtgtgaaaaacatggggaccaccggcgctggtcccgctgtgtgcatccccggccagcccatccccacaacgtggcccgattgtctcttgccgctcttgcctcttaagcttctgcagttggatagcttagccctgctcgcaaatcgccgacggtattgggagcttccttggagcgaacagcaggcacagtttttgtggaaaaaaatgcaggtccccaccaatctgaccctccggaaccttcaggccctggggacactggcagggggcatgtcatgcgaattccttcaacagatcaacagcatggtggattttctcgaggttgtgcatatgatctatcagctgcccacacgcgtgagaggttccttaagggcttgcatatgggcagaactacaaagacgcatggctatgccagaaccagaatggacaaccgtcggcccagaacttaatgggctcgattccaagctgttgctggatcttccaattcagctaatggaccgcctctctaacgagtctataatgctggttgtggaattggtccagagggcccccgaacagctcttggcactgacccctctgcaccaggctgccctggccgagagggctcttcaaaacttagctccaaaagaaaccccagtgtccggagaggttctggagacgcttgggcccttggttgggtttttggggacagaatctaccagacaaattcctctgcagattctgttatcacacctcagccaactgcagggcttttgtctcggagaaacctttgcgactgagctgggttggttactgcttcaggaatctgtgctaggcaagccggaactgtggtcgcaagacgaggtcgaacaagctggccggttggtcttcacactgtcaaccgaagcaattagtcttatccctagagaggccctgggaccggaaacactcgaacgactattagaaaagcagcaatcctgggagcagtcgagagtgggtcagctttgtagagaaccacagctcgcagctaaaaaggctgccttggtggctggggtggtgagaccggcggctgaggacctgcctgagcctgtccccaactgcgccgatgtgcggggcacctttcctgctgcatggagcgcaactcaaatcgcagagatggagttgagcgattttgaggattgtttgacattgtttgctggcgacccaggcctgggcccagaagaactccgagctgctatggggaaggccaagcagctctggggaccacctcgtggcttcaggccagaacaaatcttacagttaggaagactattgattggcctgggcgatcgcgaacttcaggaactcattctggttgactggggggtgctgagtacacttggacagatagatggatggtccacaacacagcttaggattgtggtttccagcttcttgcgacagtcaggccggcacgtatcccacctcgattttgtccacctgactgcccttgggtacaccctgtgtggccttcggcccgaggagctgcagcacattagttcctgggaattcagccaggcggcactattcctgggcactcttcacctgcagtgcagcgaggagcagttagaagtgctcgcccacttgcttgtcctgcctggtgggtttgggccaatcagcaactgggggccagagatcttcactgagattggcaccatcgctgccgggatcccagatctcgctctctcagctctcctcaggggccagatccagggggttacaccgctggctatctctgttataccccctccaaagttcgccgtggtcttctcccctatccagttatcctcattaacatccgctcaggccgtcgcggtcaccccagagcaaatggcttttctatctccagagcagaggcgcgccgtggcttgggcccaacacgaaggcaaagagtcacctgaacagcagggcaggtccacagcctggggcctacaggattggtccaggccctcatggtctttggtcctgacaatttctttcttgggccacctgctgtag

SEQ ID NO: 246584 - DNA, 1056 bp, Artificial Sequence
  derived and/or modified sequence
atggccctgagcctgtggcccctgctgctgctgctgctgctgctgttgctgctctctttcgccgtgacacttgctcccacgggaccccattccctcgacccagggttatctttcctgaagtctctcctgtccacactggatcaggccccgcagggatccctatcgcgatcgcgcttcttcactttcctggccaacatctctagtagctttgaacctgggaggatgggtgagggacccgtgggtgaaccccccccgcttcagccccccgctctgagactgcacgacttcttggtgacgttacgcggctctccggactgggaaccaatgctgggtctgttgggagacatgctcgcccttctgggccaagagcagaccccacgggatttcctggttcatcaggcaggagtcctaggaggattggtggaggtcctgcttggcgcgctggttccaggtgggccacctacgcctacccagccaccgtgtacccgggacggaccttccgattgtgtgctcgccgccgattggcttccatcgctgcttcttctcctggaagggaccaggtggcaggcgctggtgcaagtacagccaagcgtggatcccaccaatgcaaccggccttgatggtcgcgaggctgcccctcacttcctgcaggggctgctgggcctgctaaccccaaccggcgagctgggctcaaaagaggctctgtggggaggactgttgcgcactgtaggggcacccctgtatgctgcctttcaggaggggctgctcagggtcacacactccttgcaggacgaggtattcagcattctagggcagcccgagcccgacactaatggccaatgccaaggagggaacctacagcagctgttactatggggcgtgcgccataatctatcatgggacgtacaggcccttggcttcttatcggggagtcctccaccccctccagcactgctgcattgcctgagtacaggcgtacccttgccccgtgccagccagccctcagcacacatttccccgcggcagagaagggcaataactgttgaggcgctgtag

SEQ ID NO: 246585 - DNA, 5328 bp, Artificial Sequence
  derived and/or modified sequence
atggccctgagcctgtggcccctgctgctgctgctgctgctgctgctgctgctgtcctttgccgtgactctggcccccaccgggccacactctctggatcccgggctaagttttctgaagagtctcctgagcacacttgaccaggctccacaggggtctctgtcccggagccggttttttacatttctggccaacatctctagctcattcgagccagggcggatgggtgaaggacctgttggagagccgcctcccctgcagcctcctgcgctgcggctgcatgacttcctggtgaccctccgcggctcaccagattgggagcccatgctgggacttctgggcgacatgctggctctcctgggccaggagcagacccctagagactttctggtgcatcaagctggcgtgttgggggggttggtggaagtgctcttaggtgctttggttcccggcgggccgccaacaccgactcggcctccctgtacacgagatggacctagcgactgcgtgctggcagctgactggctacccagcctgctgctgctgctcgagggaacaaggtggcaggcgctcgttcaagtgcagccgtctgtggatcccaccaacgccactggactggatggcagggaggcagctccccactttctccaaggcctcttaggattgctaacaccaaccggtgagctgggctctaaggaggctctgtggggcgggctgctgcgcactgtcggtgcacctctttatgcagcttttcaggagggactcttgcgcgtcacacactcgctccaggatgaggtctttagtattttgggtcagcctgagccagacaccaacggtcaatgtcaagggggaaatctccagcagctgctgctttggggagttaggcacaacctcagctgggatgtccaggctcttggattcctgagcgggtcaccccctcctcccccggctttgttgcattgcctgagtaccggggtgcctcttccccgcgcttcccagccatcagcacatatttctccccgccagcggagagccatcacagttgaggccctgtgtgaaaaccatttggggcccgcgccaccatactcaatttccaacttcagcattcacctgctatgtcagcacactaagccggctaccccgcaaccgcacccctcaaccaccgccatttgccaaacggctgtgtggtatgccgtcagctgggcacccggagcacagggctggttgcaagcctgtcacgaccaatttcccgacgagtttctggacgccatctgctctaacttgagtttcagtgccctatccggcagtaatcgccggctggtgaaaagattatgcgctggtcttctcccaccacctacatcatgtcctgagggtctgccaccggtcccactcactccagacatcttttggggctgtttccttgagaacgaaacgctgtgggctgagcgcctatgtggcgaggccagcttgcaggctgtgccacccagtaatcaggcatgggtgcaacacgtttgccagggcccgacaccagatgtgacggcaagtcccccatgccatatcggaccgtgtggcgaaaggtgtcctgacggcgggagtttcttggtcatggtttgtgctaatgataccatgtacgaagtgctcgtccccttttggccctggcttgccggtcagtgccgaatatcccgaggcgggaatgacacttgtttcctcgagggccttctcgggcccctgcttccatccctccctccgctgggaccctctcccctatgcctgactccaggtcctttcctcctggggatgttgtcccagctacctaggtgccagagctccgttccagcgctggctcatcccacgagacttcactatctgcttaggttactaactttcctgctcggccctggcgcaggcggcgccgaagcccagggtatgctgggcagagcactcttgctctcttctctcccagataattgctctttttgggacgccttccgccctgagggccgtcggagcgtactcaggaccatcggagagtacctcgagcaggatgaagaacaaccaacaccatcaggatttgagcctactgtgaacccatccagcggtatcagcaaaatggagctcctggcttgtttctcacccgtgctctgggatttgctccagcgggagaagagcgtctgggctctgcagattctagtccaggcttacctgcacatgcctcccgagaatcttcagcagttggtgttatccgctgagcgagaagcagcacaaggcttcctcaccctcatgctccaaggcaaactgcagggcaagctgcaggttccccccagcgaggagcaggctctggggcgtctcacagcattattactgcagagatacccccgcctaaccagccagctctttatcgatctaagtcctctgatacccttcctcgccgtctctgatttgatgcgatttcctccctccctcttggccaatgattcggtgctagccgccatacgtgattattcccccggaatgaggcctgaacagaaggaggctctcgctaaaaggttacttgcaccggaattgttcggggaggttccagcctggccacaagaattattgtgggccgtgttgcccctcctcccacaccttccacttgaaaacttcctacaactcagtccccatcaaatacaggcgctcgaggacagctggcccgctgccggactgggtccaggtcatgcgcggcatgttttacggtcactggtgaatcagagcgtgcaggacggcgaggagcaagtgagaaggctggggccacttgcctgtttcctgagcccggaggaacttcaatccctagtcccactctcagaccccacgggcccggtggaacgcggcctgctggagtgcgctgctaatgggaccctgtcacccgagggccgcgttgcttatgagctgctgggcgtactgcgcagtagcggcggagctgtactgtctccacgcgagctacgggtttgggccccgctgttttctcagctcgggctccgctttctgcaggaactgagcgagccccagctgagagccatgctgccagttctccaggggacctccgtcactccggcccaggcggttctgctcctcggcagactgctaccccgccatgacctgtctctagaggaattgtgtagtctgcatcttttgctgcctgggctttctccacagacgctgcaggctatccccagacgcgtcctggtgggtgcctgttcctgcctggcaccggagttgtccaggctgtcagcctgtcagactgcagccctcctgcagacctttagagtaaaagatggcgtgaagaacatggggactactggtgccggtccagccgtctgtatcccggggcagcctattccgaccacttggcctgactgtttactgccgttgctcccgctgaaactgcttcagcttgactctctcgctttgctggctaatagacgccgctattgggaactgccttggtcagagcaacaggcacaatttttgtggaagaaaatgcaggtgcccacaaacttgactctgcggaatctgcaagccctcggtactttggccgggggcatgtcatgtgaattcctgcagcaaataaactccatggttgattttctggaggtcgtacatatgatatatcagctccctacccgggtgcgcgggtcgctgcgagcttgcatttgggccgagcttcagcgtcggatggctatgcctgaacccgaatggacaaccgttggtcctgaactcaacggccttgactccaagctgctgttggatttgcctatccagctaatggatcgactttccaacgaaagcatcatgctcgtcgtcgagttggtgcagagagctccagagcagctcctcgccctgacgccactgcaccaagcagcactggctgagcgagctttgcagaacctggctcccaaagaaacccccgtcagtggcgaggtgctcgagacacttggacccctcgtgggattccttgggaccgaaagtacaagacagatccctctgcagattctcctttcgcacctgagccagctgcaagggttctgcctcggggaaacctttgctaccgaactggggtggctgcttcttcaggagtctgtgctcggaaagcccgagttgtggtctcaggacgaggtggagcaggcaggaagactggttttcacacttagcacagaagccatttctctgattcctagggaggccctaggccctgagactctggagcgtctgctggagaaacagcagtcttgggagcaaagccgggttggacagctctgccgtgagcctcagctggcggctaagaaggctgcactggttgcgggcgtcgtacggcccgccgctgaagacctacccgagccggtgccgaactgcgcggacgtccgtggcacattccctgcggcgtggtccgcaacacagatagccgaaatggagctatcggacttcgaggactgcctgactctgtttgccggcgacccagggcttggacctgaagaacttcgggcagccatggggaaggccaagcagctctgggggcccccgcgcgggtttcgaccagagcaaattctccagctgggcaggctgctcataggactgggtgaccgtgagcttcaggagttgattctggttgactggggcgtcctttctacgctgggtcagatcgacgggtggagcaccacgcaacttcgtattgtcgtctcttccttcttgagacagtctggccgccacgtatcacacctggatttcgtacacctcacagcactcggctacaccttgtgtggactcaggcccgaagaactgcagcacatctcctcctgggagttcagtcaggcagctttgtttctgggcacactgcatctgcaatgttcagaagagcagcttgaagtgcttgcccatctccttgtgctccctggaggattcggcccaatatcaaactggggccctgaaattttcacagagatcggaactatagccgcaggtatcccagatctcgcgttgtccgcgttgctgagggggcagatccaaggcgttaccccactggccattagcgtgattcctccacccaaattcgcagtagtgttctcaccaattcagctcagttcccttaccagcgcccaggctgtggccgtaactccagaacagatggcattcctgagtcctgaacagcgccgcgcagtcgcctgggctcaacatgaggggaaggagagccctgaacagcagggaagatccacagcctggggcctccaagactggagtcggccctcatggtctttggtcctgacaatcagtttcctcgggcacctgttgtag

SEQ ID NO: 246586 - DNA, 1056 bp, Artificial Sequence
  derived and/or modified sequence
atggccctgagcctgtggcccctgctgctgctgctgctgctgctgctgcttctcagctttgcagtgacattggctccaactggcccacactctcttgatcccggcctgagtttcctcaaatccctgctctccactcttgaccaggcaccccagggctccttgtctcggtctaggttctttacttttttagccaacatatcatcttccttcgaaccaggaagaatgggcgaaggcccagtgggagagcctccacccttgcaaccacctgctcttcgtctgcacgacttcctcgtgacactacgtggtagccctgattgggagcctatgctgggactacttggcgacatgttagcccttctggggcaggaacaaacgccccgagacttcctcgtacatcaagcaggcgtactggggggattggtggaagtgctactgggagccctagtccccggcggcccacccacccccacccgaccaccatgtacgagggatggcccatcagattgcgtgctggccgcagactggctgcctagtctgctgctgctgctggagggaactaggtggcaagccttggttcaggtacaaccgagcgtcgatccaaccaacgcaacaggccttgatggaagggaggctgcaccacacttccttcagggactgctgggcctattaacacccactggagaactcgggagtaaggaggctctctgggggggccttctgcgcacagtaggtgctcctctttacgctgcctttcaggaaggcctcttaagggtcacccactcgctgcaggatgaagtgtttagtattctcgggcagcctgaaccagacactaatggccagtgccagggaggcaacttgcaacagcttctcctgtggggtgtccggcataacctgagttgggacgtacaggccctggggtttttgtctgggtccccaccccctccacccgcgctgttgcactgtctgtctaccggcgtgcccctgcctagggcaagtcagcccagcgcccacatttccccaaggcagcggcgggccataaccgtcgaagctctgtag

SEQ ID NO: 246587 - DNA, 2100 bp, Artificial Sequence
  derived and/or modified sequence
atggccctgagcctgtggcccctgctgctgctgctgctgctgctgcttttattaagtttcgctgtcactctggcccctacagggccacattccctcgatcctgggctctcattcctgaagagtcttctgagcacattggaccaggctccccaggggagcttaagcagatcaagatttttcaccttcttagccaacatctctagcagctttgagcctggcaggatgggggaggggcccgtgggtgagcctccgccattacagcctccggccctcaggttacatgatttcctggtaactctaagaggctcaccagactgggagcccatgttgggactgttgggggatatgctggccttgctaggacaggagcagaccccgcgtgactttttagtgcaccaggccggcgtgctgggcggactggtggaagtgctgctgggggccttggtcccaggcggtccgcctactcccacccaacctccttgtacgcgcgacggcccatcggactgcgtacttgccgccgattggctgcccagtctgctgctgcttctagaagggacaaggtggcaagcacttgtccaagtgcaaccatctgtggatcccacgaacgctaccgggttggatgggagagaagctgccccacactttctgcagggactgctgggtttactcaccccgactggggaactcgggtccaaggaggcactgtggggcgggctgctccgcaccgtaggcgctcctctgtatgcagcatttcaagaagggctgctaagggtgacccattctctgcaggatgaggttttttccatactaggtcaacccgaacccgataccaatgggcagtgccagggagggaacctgcaacagctgctgctgtggggcgttcggcataatctctcctgggatgtacaggcccttgggttcctgtccggtagcccaccaccaccacccgcactcctacattgcttgtccacaggagtccctctcccacgcgctagtcagccaagcgcgcacatttcccctcggcagcgtcgggcgattacagtggaggcgctctgtgagaatcatctcgggcccgcgccgccttacagcattagtaatttctctatccatctactctgtcaacacactaagcctgccacaccccagccccacccctcgactaccgccatttgtcagaccgctgtttggtatgccgtgtcctgggcgccgggtgcccagggttggttgcaggcatgccatgaccagttcccagacgaattcctagacgccatctgtagtaacctctcattttccgccctcagtggaagtaacagacggctggtcaagaggctttgcgcaggtctgctgcccccgccaacctcctgcccggaaggcctgcctccagtgccactcactccagacatcttctggggatgcttcctggaaaatgaaacgttatgggctgagcgactctgcggcgaggcgtctctgcaggctgtccctccttctaaccaggcgtgggtacagcatgtctgccagggaccaactcctgacgtgacagcttctccgccttgtcatattggaccctgcggcgaacgttgccccgacggcggctcctttctcgtgatggtctgcgctaatgacacaatgtacgaggttctcgtacctttttggccctggttggccggccagtgtaggatttcgagaggaggcaacgatacctgcttcttggaaggcctgctggggcccctcctgccgagcctcccacctttgggacccagtccactttgcctaaccccagggccctttttactcggcatgctgagtcagttgccaaggtgccaatcctcagtcccagccctggcccatccaacaaggctccactacctgcttcgactgctgactttcttactgggaccaggagccggtggggcggaagcacagggcatgctgggccgggcccttctcctcagcagcctacctgacaactgctccttttgggatgcattcaggccagagggaagacgcagtgtcctcagaacaattggggagtacaataagatgcggagctcgcagcctcaccaggctttaaatccactcagcacccctgcactcgtatag

SEQ ID NO: 246588 - DNA, 3009 bp, Artificial Sequence
  derived and/or modified sequence
atggagctgctggcctgcttcagccccgtgctgtgggacctgctgcagagagagaagtctgtgtgggcgctccagatattagtgcaggcctatctccatatgcccccagagaacctccaacagctggtgttgtcagcggagagggaggccgcacagggatttctaacgctgatgctccaaggcaaactgcagggaaaattgcaggtcccaccgtctgaggaacaggccttaggcaggcttacagccctgctgcttcagagataccctcggctcaccagccagctgtttattgatttaagtcctttgattcctttcttagcagttagcgacctgatgcggttcccaccttccctcctggcgaatgatagtgtccagcaaggctaccgcgggtctgaagaaaacagtctggaagaggacaaaggactgcgtccaatgaccccacggtctctggccgctattcgcgactactcccctggtatgcggccggagcaaaaggaggctctggccaaacgccttctggcgcccgaactattcggcgaggtgcctgcatggccacaggagctgctttgggccgtcttaccccttctgccgcatctccctctggaaaactttctgcagctcagtccccatcagattcaggctcttgaagatagctggcccgctgctgggctgggcccgggacacgctcgtcacgtgcttcgaagtttggtgaatcagagcgtccaggatggagaagaacaagtcagaaggctaggtcctctagcctgcttcctgtcccctgaagaactgcagtctctggtccctttgtctgaccctaccggtcctgtggagagagggctcctggagtgtgccgccaacggcaccctctcccccgaggggcgtgtggcctacgagctcctaggggtgctgcgaagttctggtggtgccgttctgagccctagggaacttagggtctgggcgcctctgttctcccagctgggccttcgattcctgcaggagctttcagagcctcaactgcgcgccatgctgccggttctgcagggcactagtgtgacgcccgctcaggcggtgcttctcttaggaagacttctgccacgccacgatttgcttcagctggactcacttgctctattggccaatcggaggcgctattgggagctcccttggagcgagcagcaagctcagtttctgtggaagaagatgcaagtcccgacgaacctgacccttaggaatctacaggccctgggtacgctggccggcggaatgagttgcgagttcctgcagcagatcaattcgatggtggatttcctcgaggttgtgcacatgatttatcagcttcccactcgagtacgcgggtcactgcgagcctgtatatgggctgaactgcagcgccgcatggctatgccggaaccagagtggaccacagttggacctgaactgaacggcttggacagcaaactgcttttagacctacctatccaattaatggacaggttgtcaaatgagagcattatgctggtagtggagctagtgcaacgagcccccgagcagctactagcgttgacccctttacaccaggctgccctggctgagagggcacttcagaatctggcaccaaaagaaacaccagtgagcggggaagtattagagacccttggtcctctggtgggattcctcggcacggaatctacgagacagatcccactgcagatactcctgagccatctatcacaactccagggattctgcctgggcgagacatttgcaacggagctgggatggctcttgctgcaggaaagtgtattagggaagcctgagttgtggtctcaggatgaagttgaacaggctggccgtttagtgtttactctctctaccgaagcgattagcctcatccccagggaggccttaggtcctgagacgctggagcggctgctggagaagcaacagtcgtgggaacagtcacgcgtgggacaactgtgccgggagccccagctcgctgcaaagaaggcagctcttgtcgctggcgtggtgagaccagccgccgaggatctacccgagcccgtgcccaactgcgctgatgtgcgcggcactttccccgcagcatggtcagcgacgcaaatagctgagatggagctttctgatttcgaggactgcctcactttgtttgccggagacccaggactcggacccgaggaactcagagctgccatgggcaaggccaaacagttgtgggggccgcctcgtggttttcgcccagagcagatcctgcagctgggacggctcctgatagggctcggcgatcgcgagcttcaagagctgatcctggtcgactggggtgtgctcagtacattgggtcaaattgacggttggagtacaacacagctcaggattgtggtgagcagctttctgaggcaaagcggccgccacgtctcacacctggacttcgttcatctgaccgccttagggtataccctctgcggactgaggccagaggaattgcagcacatttccagctgggaatttagccaggctgctctcttcctcggtacactccatcttcagtgctcagaggaacagctcgaggtgttggcccatctgctcgtgctgccgggagggtttggcccaatatccaactgggggcctgaaatttttactgagatcggtacaattgccgccggtattcccgacctggctctctcagccctgctgcgtggacagattcagggggttacccccctggccatcagcgtaatcccgccccctaagttcgcagtcgtcttttcccccattcagctgtcgtcactgacatcggcccaagcagtggccgtgacccctgaacagatggccttcctcagtcctgagcagcgccgggccgttgcctgggcccagcacgaggggaaagagagccccgagcagcaagggcgcagtaccgcatggggcctccaggattggtcccgcccaagttggtcacttgtgcttacaatcagcttcctcggtcacctattatag

SEQ ID NO: 246589 - DNA, 5327 bp, Artificial Sequence
  derived and/or modified sequence
atggcgctgagcctctggcctctactgctcctgctcctgctgctcctcctgctgtccttcgccgtaaccctagcaccaacagggcctcactccctggacccaggactgtcgttcctcaagtccttactgtccacgttggaccaggctccgcaagggagcctctccagaagccgttttttcactttcctggcgaatatctcctcttcctttgaaccaggaaggatgggcgagggacccgtcggagagccgcctcccttacaaccaccggcactcagactgcatgacttcctcgtgaccttgcggggtagccccgactgggaacctatgctgggcctgctgggtgatatgctggccctgctgggtcaggaacaaaccccacgagactttctcgtgcaccaagccggagtgctcgggggactggttgaagtgctcctgggcgctttggttccgggtggacctccaactcctacccggccaccatgtaccagagacggaccatctgactgtgtcctggctgctgattggcttccttccctccttctattattggaaggtaccagatggcaggccctcgtgcaggtgcaaccttccgtggatcccaccaacgcaacggggttggacggaagggaagcggcacctcactttctgcagggactcctgggcttactcacgccaacgggcgagcttgggagcaaggaagccctgtggggagggctcctgcgcaccgtgggagcccctctttatgccgcatttcaagaaggtctgcttcgtgtgacccatagcctccaagacgaagttttttccatcctgggacaacctgaaccagatacaaacggccagtgtcagggtggcaatcttcagcagctgttactgtggggtgttcggcacaatctgtcatgggacgttcaggccctgggctttctgagcggcagcccacctcctccacccgctttgctgcactgcttgagcaccggtgtgccactcccccgtgccagccaaccctccgcgcacatctcgcctaggcaaaggcgtgctattacggttgaagccctgtgcgagaatcacctggggcctgcacctccctattcaatatccaatttctcgatccatctgttatgccagcacacaaagcccgctacgcctcagcctcacccctcaacaacagccatctgtcagactgctgtttggtatgctgttagctgggccccaggtgcacaggggtggttgcaagcttgtcatgaccaatttcctgatgaatttctggatgctatctgttctaatttgagctttagtgcactctcaggcagcaacagaaggctagtcaagagattgtgcgcaggccttctccctccacccacttcctgcccggaggggctgccccctgtacctctgacacccgatatcttctgggggtgctttcttgagaacgaaacactgtgggctgagagattgtgtggggaggcgtcacttcaggctgtgccccctagtaaccaggcctgggtacaacatgtgtgccaaggcccaacccccgacgtgactgcgtctcctccctgtcacatcggaccatgtggtgaaagatgtccagatggtggcagtttccttgtcatggtatgcgccaatgacaccatgtatgaggtccttgtgccgttttggccttggttggcaggacaatgtaggatatcccgtggcggaaatgacacttgctttctggaaggactgctggggccattgctcccctccctgcccccactcggtccgtcccccctgtgcctgacccccggaccattcttgctcggcatgttgtcccaactgcccaggtgtcaatcgtccgtgccagctttggctcaccctacccggttgcactacctgctgcgactgttgaccttccttcttggaccaggggctggcggagctgaggcccagggcatgctgggaagagcactgcttctgtcctcactgccggacaactgctccttctgggatgctttcagacccgagggtcgaaggagcgtactaaggactattggcgagtacctggagcaggacgaggagcagccaacaccgtcggggttcgaacccaccgtgaacccatcttctggaatatcgaagatggaactgctggcatgttttagccccgtactgtgggaccttctgcagagggagaagagtgtttgggctctgcagattctcgtgcaggcctatctgcacatgcctcccgaaaacctccagcagttagtgctctctgccgaaagggaggcagctcagggatttctaactctgatgctccagggcaagctgcagggcaaactccaggtgccaccttctgaagagcaggcactgggcaggctgacggccttgctactgcaaagatacccacgtctcacatcacaactgtttattgatttgagccccctgattcccttcctggctgtatctgatctcatgcgctttccaccttcattacttgctaatgacagcgtgctcgcagcaatacgggactactcacccggaatgcggcctgaacaaaaagaggcgctggctaagagactgttagcacccgaactctttggagaggtgcctgcatggccacaagaattgttgtgggccgtcctcccgctactaccacatctcccactggagaattttctgcagctaagtccccatcagatacaggcactggaggatagctggccagctgccggtctgggacccggtcacgctagacatgttttacgatctctggtgaatcagtccgttcaggacggcgaggagcaggtaaggcggcttgggcctctagcctgctttctcagcccagaggaactgcagagtctggttcccctatctgaccccacgggcccagtggaacgcggtctgttagagtgcgccgcaaacggtacactgagtcctgaggggagagtagcgtatgagttattaggagtactccgctcaagtgggggtgctgtgctgtcccccagggagctccgcgtctgggcacctctattttctcagctcgggctgaggttcctgcaggagctatctgaacctcaacttcgggctatgctcccagtgctccagggcactagtgtgacccccgctcaggccgtgcttctgctcggacggctgctgccgcgacatgacctcagcctcgaagagctctgctctctgcatcttctgctgcccggactcagcccccaaaccctacaagccataccacgtcgcgttctagtgggcgcatgttcttgcctcgcccctgagctctcccggctttccgcttgccagactgctgcgctcttgcagacattccgagttaaagatggcgtaaagaacatggggaccacaggcgcagggcctgccgtgtgtatccctggccagccaattcctacaacgtggccagattgcttattaccactcctgcctctcaagctactgcagctagactctttagccctgctggccaatagaaggcgctattgggaactcccctggtccgagcagcaggcccagttcctgtggaaaaaaatgcaggtacctaccaacttgactctgcggaatctgcaggcactaggtacactggccggaggaatgagctgcgaattccttcagcaaattaactcaatggtcgattttctggaggtggtacacatgatataccagttgccaacccgtgtgcgaggcagtttacgcgcttgtatttgggccgagttacagagacgtatggccatgcccgagcccgaatggacaactgtaggcccagagttgaacggcctggattccaaactgctcctagatctgcctatccagctgatggatcgactcagcaacgaatctattatgctagtggtggaactcgtgcagcgggcacccgagcagctgttagccctgacgcccctgcaccaggcggcactcgcggagcgtgccctccagaacttggcccctaaggagacacccgttagcggagaggttttggagaccctcggtccgctcgtagggttcctcggtacggagtcgaccagacagattcccctgcaaatcctgttgtctcatctcagccagttgcagggcttctgtctgggcgaaacttttgctacagaactgggatggctgctactgcaggagagcgtgctcggaaagcctgaattgtggtctcaagatgaggtggaacaggctggaaggctggtgtttactctgtccacggaggctatcagcctgattccacgcgaggctctcggtcctgagaccctcgaaagactcttggaaaaacagcagtcttgggagcagtcaagagttggccaactgtgcagggagccccaactagctgcgaagaaggcagccctggtggccggagtggtaaggccggcagcagaggacctgccagagccagtaccaaattgcgctgatgtccgtggaacctttcccgcagcatggtctgctacgcagattgcagagatggagctctctgattttgaggattgccttacactcttcgccggagatccgggattagggcctgaggagctgcgcgcagctatgggaaaagctaaacaactctggggaccccctagggggtttagacccgaacagatcctccagctcgggaggctgctcataggacttggcgatagagaactccaggaacttatcctggttgactggggcgtgctatccacccttgggcagatcgacggctggtcaacaactcagctgcgcattgtggtctcatcctttcttcgccagtctggcaggcacgtgtcccaccttgatttcgtccacttaacagcgctgggatacaccctttgtggccttaggcccgaggaacttcagcacatctcttcctgggaattctctcaagccgctctctttttaggcacactgcacctacaatgttctgaagagcagctcgaggttttggcacacctcctcgtactgcctggcggattcgggccaatctccaattggggtccagaaatattcactgaaattggaacaatcgcagccggtatcccagacctggcattgagtgcacttcttagaggccagatccagggggttactcctctcgcaatttccgtgattccaccaccaaagttcgcggtggtcttttctccaatccagctgtcatccctgacttctgcacaggcggttgccgtcacacccgaacagatggccttcctttcaccagaacagcggagggccgtggcttgggcccagcatgaaggaaaagaatccccagagcagcaggggagatccaccgcctggggtctgcaggattggtcaaggcctagctggtcactggtgttgactattagtttcctgggacatctgttgta

SEQ ID NO: 246590 - DNA, 1056 bp, Artificial Sequence
  derived and/or modified sequence
atggccttgtccctgtggccgttgctgttgctgcttctccttctcctcttgctgagcttcgccgtgacccttgctccaacaggccctcactctctggaccctgggctgtctttccttaagagcttgcttagcactctcgatcaggctccacagggaagcctgagtaggtcaagattctttaccttccttgctaacatcagctctagcttcgagcccggaagaatgggagaggggcctgtgggcgaacctccaccccttcagccgcctgccctgagacttcacgattttttggttaccctgcgcggatctcccgactgggagcctatgctcggcctcttaggtgatatgttagcactacttggacaggagcaaacgcccagagatttccttgtccaccaggccggagttctgggtggcttagtggaggtgttactgggtgctctggttccaggtggtccaccaaccccaacacaaccaccctgcactagagatggcccaagcgattgcgtgctagccgctgactggctgcctagtttgctgctgttgcttgagggtacacgttggcaggcacttgtgcaggtgcaacccagtgttgaccccacaaacgcaaccggcctggacgggagagaagcagctccgcactttctgcaggggttactggggttgctaactccaacaggcgaactgggaagtaaggaggccctgtggggtgggctactacgaactgtgggcgcacctctgtacgctgcattccaggaagggctgctgcgagtaactcatagtctccaggatgaggtgttctcgatccttgggcaaccggaaccggatactaacggtcagtgccaaggcggaaatctccagcagctgctgctgtggggggttagacataacctctcttgggatgtgcaggccctggggttccttagtggatcccccccaccccctccagccctgcttcactgtctgagtaccggcgtgccgcttccacgcgcttcacagccatctgcccatattagtcctagacaacggagggccattaccgtcgaagcgctgtag

SEQ ID NO: 246591 - DNA, 5327 bp, Artificial Sequence
  derived and/or modified sequence
atggccctgagcctgtggcctctccttctactgctcctgctgctgcttctgctgagttttgccgtcacgctcgcacctacaggaccgcacagcctagaccccggtctttcttttctgaagtccctgctctctaccctggaccaggcccctcaagggagcctctcacgaagccggttttttaccttcctggccaatatctcttcctcttttgagcctggcagaatgggagagggaccggtcggtgagccccctcccctgcagcctccggctctccggttgcacgactttttagttactctgcggggaagcccagactgggaacccatgcttggtcttctgggcgatatgctcgcactgctcgggcaggagcagaccccccgagacttcctcgtacatcaagcgggtgttctaggcggactggttgaagtcttactgggggcactcgtgccgggtggtcctcctaccccaacgcgcccaccatgcacacgggatggtccctctgattgtgtcctggccgcagactggctgccctcactgctactgctgttagaaggaactagatggcaggccctggtgcaggtccagccaagcgtggatcctaccaatgccaccggccttgatgggcgtgaggcggctccccattttctgcagggactactgggattgcttacgcccactggggaactgggcagcaaggaagccctgtggggcggtttactacggacagttggtgctcctttgtacgctgctttccaggaggggttgctgcgggtcacccacagcctgcaggacgaagtgttttcgattttgggccaaccggagccggacactaacggccagtgccagggcggtaacctccagcagctgttgctttggggcgtccggcacaatctgagctgggacgtgcaagccctgggattcctttctggctcaccccctcctccacccgctctcctccattgtttatccactggggtccctctacctagggccagccagccttcggcacacatctcccctcgacagagaagagcgatcacagtagaagccctatgtgagaaccacttaggtccagctccaccctactccatctctaatttctccattcacctgctgtgccagcacacaaaacctgctacacctcagccacacccaagcaccacagcaatctgtcagaccgccgtgtggtatgccgtgagttgggctcctggcgctcagggatggctccaggcttgtcatgatcagtttccggacgagttcctggacgcaatatgttccaacctgtccttctccgccttgtctggatccaacaggcgcctggtcaaacgtctttgtgcaggtctcttacccccacctacatcttgtcctgaggggctgccacctgtacctctaacccccgatattttctggggatgctttttagaaaacgaaaccctttgggctgagaggctctgcggcgaagcctctctacaggctgttcctccatctaaccaggcgtgggtccaacacgtgtgccagggccctacccctgacgtgaccgcttccccaccctgccacattggcccttgcggagagaggtgtccagacggtgggtctttcttggtcatggtctgtgcaaacgacactatgtatgaagtcctggtgcctttctggccttggttggctgggcagtgtagaatcagccgtggcggaaatgacacatgtttcctcgagggcttgttggggcctctgctaccctcgctgcccccacttggaccttcccccctttgtctcacacccggtccgtttctcttggggatgttatcccagcttccaaggtgccagagtagcgtcccggctctggcccacccaacgcggcttcactatttgctgcgtctgctgaccttccttctgggcccaggggcaggaggcgcagaagcccaggggatgttggggagagcgctgttgctttcatccctccctgacaactgtagcttctgggatgcctttaggcccgagggcaggagatccgtgctgagaacgataggcgagtacctcgaacaggatgaagagcagcctaccccaagtgggttcgagcctacggttaacccaagttcaggaatcagcaaaatggagcttctcgcctgtttctcacccgtcctgtgggaccttcttcaacgggagaaatctgtgtgggcattgcagatcctggttcaggcgtatttacacatgccccctgaaaatctccagcagctcgtcctctcagctgagagggaagccgcacaaggctttttgaccctgatgctgcagggcaagctacagggcaaattgcaggttcctccatctgaggagcaggccttgggcaggcttactgcactcttattacagaggtatccaaggctaaccagtcagttattcatcgatctgagtcccttaattccatttctggccgtgagcgatctgatgaggtttccacccagcttgttggcgaatgatagcgtactggccgctattcgcgactatagccccggaatgagacctgagcagaaggaggcactggctaaacgtctcctcgcccctgagctgttcggcgaggtgcctgcatggccacaggaactgttgtgggccgtcttgccactgctgcctcacctcccccttgagaactttctccaactgtctcctcatcagatccaggccctcgaggactcctggcccgcagctggcctcggaccgggtcacgctaggcatgtgctacggtcgcttgtgaaccagtcagtgcaggacggtgaggagcaagttaggagattggggccacttgcatgttttctgtcccccgaagaacttcagtccttggtgcccctcagcgacccaaccggccctgtcgagagagggcttctcgaatgcgccgcaaacggcaccctgtcgccagaaggcagggtggcctacgagctgctcggcgtgcttcggtcatcggggggtgccgtgctgtcccctcgggaactgcgtgtgtgggctcccctcttcagtcagttgggactgcggttcctccaggaattaagtgaaccccaattacgagcaatgctgccagtcctacagggcaccagcgttacgcccgcacaggccgtgctgctcctgggcaggttgcttcccaggcacgacttgtctttggaggaattatgcagcctccatctcctactgcccggtctgagcccccagacgctgcaggctatcccgagaagagtcctcgtcggggcttgctcttgcttggctcctgaactatctcgactgtctgcttgccagaccgctgcactactccagaccttcagagtcaaggacggcgtcaagaatatgggcaccacaggcgctgggcctgccgtgtgcatcccaggtcagccgattcccaccacatggcctgattgtttgctccctttactgccactcaagctccttcaactggactccctggctctgctggccaatagaaggaggtattgggaactgccctggtctgagcagcaggcccaattcctgtggaaaaaaatgcaggtgcctaccaacttaaccttgcgcaatctgcaagcattaggaactttagctggaggcatgtcatgcgagtttttacagcagattaactccatggttgactttcttgaagtcgtccatatgatctaccagcttccaactcgagttcgcggttccctgcgggcatgtatttgggccgaactgcagagaagaatggccatgccggagcccgagtggaccactgtcggtccagagctgaacggccttgacagtaaactcctgctggatttacctatccagttaatggacaggctctccaatgaatcaatcatgttggtggtcgaactcgtgcagcgagccccagaacaactccttgcgttgacacctctccatcaggctgctctggcagagagagccttacagaacctggctcctaaagaaacacccgtgagcggagaagtgctggagactctcgggccactggtgggtttcttgggcaccgagtccactaggcaaattcccttgcagatacttctgtcacatctgtcccagctccagggcttctgtcttggggaaacattcgctaccgaactcgggtggcttctgctccaagagtctgtgctgggcaagcctgagctgtggtcccaggacgaggtcgagcaagccggtcggctggtgtttaccctatccacagaagcaattagcctgataccaagggaggcactgggcccagagacactcgaacgattgttggagaagcagcaatcgtgggagcagtctcgggtcggccagttgtgtagggaacctcagctggctgccaagaaggccgctctggttgccggtgtggtgcgacccgctgctgaagacctgcccgagccagtcccgaactgtgcagacgtcaggggcacttttcctgctgcctggtccgccacgcaaatcgccgagatggagctctcagattttgaggattgtctgactctcttcgcaggcgatcccggattgggcccagaggagctgagagccgctatggggaaagccaagcagctttggggccctcctcgcggatttaggcctgagcagatccttcaactaggccgtctgctgatcgggctcggcgatagggagctccaagagctgattctggtggattggggtgtgctctctactctggggcagatcgacgggtggagtaccacccaactgcgcatcgttgtctccagctttctgaggcagtccggccgacatgtctcccatctagatttcgtacacctgactgccctgggctatacactgtgcggactgaggccagaagaactgcagcatattagctcgtgggaattttcacaggctgcacttttcctgggaacactccatctgcagtgctctgaggagcaactggaagtgttagcccatctactagtgctccctggtggcttcggtcccatttctaactggggccctgagatcttcacagaaatcgggactatcgctgccggtatacctgacctagctttgagcgctctccttcgcggacagattcagggcgtgacgcctctagctatcagcgtgatcccaccacccaagttcgccgtcgtgttttcccctattcagttgtcatccctgacctctgcacaggctgttgcggtgaccccggagcagatggcattcctgagtccagagcagcgcagggctgtagcttgggcccagcacgaggggaaggagagccccgagcagcagggtcgctccacagcctgggggctgcaggattggagtaggccctcttggtctttagtgctaacaatttccttcctcgggcatctgctgta

SEQ ID NO: 246592 - DNA, 1056 bp, Artificial Sequence
  derived and/or modified sequence
atggcactgtctctgtggccgttactgctgctcctgctgctgctcctactgctgtctttcgccgtgaccctcgccccaaccgggccacactcattggatccaggcctaagcttcttgaagtcacttcttagcactctagatcaagcccctcagggatccctgtcgcgcagccggttttttacttttctggcaaatatttcctcctcttttgagccagggcgaatgggcgagggaccggttggcgagccacccccactgcagccacccgctttgaggctgcacgactttctcgtaacccttcgagggtcaccagactgggagcccatgctgggtctgttaggagatatgctggccttgcttggacaagaacagacccccagagactttctcgtgcaccaggctggcgtactcggtggcttagtggaagttctactgggtgccctggtaccaggtgggccacctactccaaccaggcccccttgcactagggatggacctagcgactgcgttctggccgctgactggcttccttcattgctgctgttgctagaaggaacacgctggcaggccttagtgcaggttcagccttccgtggatccaacaaatgcaacagggctcgacggcagagaagccgctcctcacttcttacaggggctgttaggtctgcttaccccaacgggcgaactaggtagtaaggaggccctgtggggcggactactgagaacagtgggagcccctctctacgcagctttccaggagggcctgctgcgagttacccattcactgcaggacgaggtcttttctattctgggccaaccagaacccgacacaaatggacagtgccagggcggtaacctgcagcagctgctcttatggggggtgaggcataacttgagttgggatgtccaggctttggggttcttatccggatcacccccaccaccacctgctcttttgcattgcctgtccacaggtgtgccactgcccagggccagtcaacccagtgcgcatatcagcccgcgacagagaagagccataaccgtggaagctctgtag

SEQ ID NO: 246593 - DNA, 2100 bp, Artificial Sequence
  derived and/or modified sequence
atggcccttagtctgtggcctctgctgcttctccttcttctgttgctgctgctgtcattcgctgtgacattggcccctactggtcctcacagcttggaccctggattgtcctttctgaaatctcttctgagtacattagaccaggcacctcagggctccttgtctaggtcacggtttttcacctttctggccaacatcagctccagttttgaaccgggacggatgggggaagggcctgttggagaaccacctcctctgcagcctccagctctcagactgcatgacttcctcgtcacattaaggggctctcccgattgggagcccatgctaggtcttctgggcgatatgctggctttactggggcaggaacagacccctagagactttctggtgcatcaggctggagtccttggtgggctggtggaagtgttgctgggtgccctagtgcccggtggaccccctacacccacccagccaccctgtacccgagacggtccgagcgactgtgtcttggccgctgactggctgccttccttgttgctgctgctcgaggggactaggtggcaggctctggtacaggtccagccatccgtcgatcccacaaacgcaaccggcctggatggtcgggaggcagcaccccactttctgcaggggttgctcggcctgctcacaccaactggtgaactgggcagtaaagaagcactgtggggcggactgcttagaacggtgggcgctcctctctacgctgcattccaggaggggctgttgagagtcacccatagcctgcaagatgaagtcttttccatcctcggccagcctgaaccagacacaaacggtcagtgtcagggaggaaatctgcagcagttacttctctggggagtgaggcacaatcttagttgggatgtccaagcacttggcttcctgagtggtagccccccaccgccacctgcactcttgcattgcctgtcgaccggcgtgcctctgccgagggcatcacagccttcggcccatatcagcccaaggcaacgtagagccatcaccgtggaagcattgtgtgagaaccaccttgggcctgccccaccttacagcataagcaatttttctatccacctcttatgccagcacacaaagcccgctaccccccaacctcatccatcgacgacagccatttgtcagaccgcagtctggtatgctgtgtcatgggctccaggcgcacagggatggcttcaagcgtgccatgaccagttcccggacgagttcctcgacgccatctgttcaaacctcagtttcagcgccttgagcggctcaaatcgcagactcgtgaagcgactgtgtgctgggctgctgccccctccgacttcttgcccagaaggattgcctcccgtgcccctgacacccgacattttctggggatgctttcttgaaaatgagaccctgtgggctgaacgcctgtgtggtgaggcctcactgcaggccgtcccacccagtaatcaagcctgggtccagcacgtctgccaggggccaacgccagatgttacagcatccccaccctgccacattggcccatgcggtgaacggtgccctgatggcggttcttttctggtcatggtgtgtgctaacgataccatgtatgaagtgctggtccccttctggccatggctcgccggacagtgccgcatcagccgaggcggaaatgacacatgtttcctcgaggggcttctggggcctctcctcccttcattgcctcctctcggcccttcccccttgtgtctcactccagggccatttctactggggatgctctcgcaacttcctagatgtcagagcagtgtgcctgccctcgctcatcctactcgattgcattaccttctgaggttgttaaccttccttcttgggcctggagctgggggtgctgaggcccagggaatgctgggacgggcactccttctgagttcactccctgacaactgttctttttgggacgcattccgacctgaggggcgaaggtccgtcctgagaacgattggcgagtacaacaaaatgagatcctcacagcctcaccaagcactcaatccactgtcaaccccggctctggtctag

SEQ ID NO: 246594 - DNA, 3009 bp, Artificial Sequence
  derived and/or modified sequence
atggagctactggcttgcttttctccagttctttgggacctgctccagagggaaaagtccgtttgggcactgcaaatactcgttcaggcttacctgcacatgcctccagagaacttgcagcagctggtcctgtcagccgaaagagaagcggcacagggcttcctgaccctgatgctacaggggaaattgcagggaaaactacaggttccacctagcgaggagcaagctctggggaggttaactgctctcctgcttcagcgctatccccgactcacctctcagctgtttatagatttaagccctctgatcccatttttggcagtgtctgatctgatgagatttcctccttctctcctcgcaaatgactctgtacagcagggctatagaggcagcgaggagaactctctggaggaggataagggtctgaggccaatgacccctaggagccttgctgcaatcagagattactcccccggtatgcggccagagcaaaaagaggccctggctaagcgtctgctggctcctgagcttttcggagaggtaccagcctggccacaagagttactctgggctgtgttgccacttctgccccacctgccccttgaaaatttcctccagctgtctccacaccagattcaggctttggaggacagttggcccgcagccggactggggccagggcacgcccgacatgtcctgcggagccttgtgaatcagtcagtccaggacggagaggagcaggtgagaagactggggccattagcctgttttctgtcccccgaagaactgcagtcactcgtgcccctgtcagaccccaccggacccgtggaacgtggcctgctggagtgtgcggcaaacggcacactgagcccggaaggcagagttgcttacgaacttctgggggtgctgaggtcaagcggcggtgcagtgctgagccctcgagagctgcgcgtgtgggccccactctttagtcagttaggtttaagattcttacaggaattgagcgaacctcagctaagagctatgttgcccgtgctccagggcacgtctgtgacccctgcccaagcggtgcttcttctggggcgactgttaccaaggcatgatctgctgcaactagacagcctggccctgctggccaacagacggcgttactgggaacttccatggagtgaacagcaagcacagtttctgtggaagaagatgcaggtgccaacaaatctgactctcaggaacctgcaggccctggggacgttggctggcggtatgtcatgtgagttcctgcagcagattaattcaatggtggacttcctggaagtggtgcatatgatctatcaactcccaactagagttaggggaagcttgcgggcttgcatatgggccgagcttcagcgtcgtatggcaatgcccgagccggaatggacaaccgtgggtcccgagctgaatggcctcgatagcaagcttctcttggacctgccaatccaactgatggacagattatctaatgagagcataatgctggtggtggaactggtgcagcgggcacctgagcagctcttagcccttacccctctccaccaggccgctctcgccgaaagggctctccagaacctggccccaaaagaaacccccgtgagcggcgaggtgctggagacactcggcccattggttggatttctcggcactgagtccacccgccaaatcccactccaaatcttgctgagtcatctgagccagttacaaggtttttgtctcggggagacattcgccacagaactgggatggctgctcttgcaggagagcgtgttaggcaaacctgaattgtggagccaggatgaagtggagcaggccggtaggctcgtgtttactctgagcactgaggccattagcctcatcccacgcgaggctttaggaccggaaactctggaaaggctattagagaaacagcagagctgggagcagagtagggtgggccagctctgtcgtgagccacagctggccgctaagaaagccgcactggtggcaggtgtggttcggccagccgctgaggacctgcccgagcccgttcctaattgcgccgatgtgcggggaactttccctgcggcttggtcggctacgcagatcgctgaaatggagctgtctgatttcgaggactgtctcacgctgtttgctggcgatcctggtttagggcctgaggaactgagagccgctatgggcaaggcgaagcagctatggggaccgcctagagggttccggccagagcagattttacagctcggcaggctgttgattggccttggagatagagagttgcaagagctcattctcgttgattggggagtattaagtacgttaggccagatcgacggatggtccactacacagctgcgcattgttgtcagcagcttcctgaggcaaagcggccgtcatgtaagccacttagacttcgtacatctaacggcgctgggctacacactctgtggcttaaggcccgaggaactccagcacatttcaagctgggagttctcacaggctgcccttttcctggggactctgcatctgcaatgcagcgaagagcaattggaagtgctcgctcacctattagtcctgcctggaggatttggccctatatccaactgggggccagaaatcttcactgaaattggaacaatcgcagcaggcatacccgacctggccctgagcgcattgctgagagggcaaattcagggagtgactccacttgctatttctgtcatcccaccgcctaagtttgccgtggtgttttcgccaatccagctatcctcattgacatcagcccaggccgtggccgtcaccccagagcagatggcctttctgagccctgagcagagacgcgcagtcgcttgggcacagcacgagggaaaagaatctcccgaacagcagggtagatccaccgcctggggacttcaagactggtcaagaccatcctggagcttagtgctaacaatctcatttctagggcatctgctgtag

SEQ ID NO: 246595 - DNA, 4291 bp, Artificial Sequence
  derived and/or modified sequence
cctgccctcacctggctatcccacacaggtgagaataaccagaactcacctccggtaccagtgttcacttggaaacatggctctcagcctctggcccctgctgctgctgctgctgctgctgctgctgctgtcctttgcagtgactctggcccctactgggcctcattccctggaccctggtctctccttcctgaagtcattgctctccactctggaccaggctccccagggctccctgagccgctcacggttctttacattcctggccaacatttcttcttcctttgagcctgggagaatgggggaaggaccagtaggagagcccccacctctccagccgcctgctctgcggctccatgattttctagtgacactgagaggtagccccgactgggagccaatgctagggctgctaggggatatgctggcactgctgggacaggagcagactccccgagatttcctggtgcaccaggcaggggtgctgggtggacttgtggaggtgctgctgggagccttagttcctgggggcccccctaccccaactcggcccccatgcacccgtgatgggccgtctgactgtgtcctggctgctgactggttgccttctctgctgctgttgttagagggcacacgctggcaagctctggtgcaggtgcagcccagtgtggaccccaccaatgccacaggcctcgatgggagggaggcagctcctcactttttgcagggtctgttgggtttgcttaccccaacaggggagctaggctccaaggaggctctttggggcggtctgctacgcacagtgggggcccccctctatgctgcctttcaggaggggctgctccgtgtcactcactccctgcaggatgaggtcttctccattttggggcagccagagcctgataccaatgggcagtgccagggaggtaaccttcaacagctgctcttatggggcgtccggcacaacctttcctgggatgtccaggcgctgggctttctgtctggatcaccacccccaccccctgccctccttcactgcctgagcacgggcgtgcctctgcccagagcttctcagccgtcagcccacatcagcccacgccaacggcgagccatcactgtggaggccctctagggccggcgcagtgtgctacggacgattggggaatacctggaacaagatgaggagcagccaaccccatcaggctttgaacccactgtcaaccccagctctggtataagcaagatggagctgctggcctgctttagtcctgtgctgtgggatctgctccagagggaaaagagtgtttgggccctgcagattctagtgcaggcgtacctgcatatgcccccagaaaacctccagcagctggtgctttcagcagagagggaggctgcacagggcttcctgacactcatgctgcaggggaagctgcaggggaagctgcaggtaccaccatccgaggagcaggccctgggtcgcctgacagccctgctgctccagcggtacccacgcctcacctcccagctcttcattgacctgtcaccactcatccctttcttggctgtctctgacctgatgcgcttcccaccatccctgttagccaacgacagtgtacagcagggctacagagggtcagaggaaaacagtttggaggaagacaaagggttaagacccatgactcctcgcagcctggctgccatccgggattacagcccaggaatgaggcctgaacagaaggaggctctggcaaagcgactgctggcccctgaactgtttggggaagtgcctgcctggccccaggagctgctgtgggcagtgctgcccctgctcccccacctccctctggagaactttttgcagctcagccctcaccagatccaggccctggaggatagctggccagcagcaggtctggggccagggcatgcccgccatgtgctgcgcagcctggtaaaccagagtgtccaggatggtgaggagcaggtacgcaggcttgggcccctcgcctgtttcctgagccctgaggagctgcagagcctagtgcccctgagtgatccaacggggccagtagaacgggggctgctggaatgtgcagccaatgggaccctcagcccagaaggacgggtggcatatgaacttctgggtgtgttgcgctcatctggaggagcggtgctgagcccccgggagctgcgggtctgggcccctctcttctctcagctgggcctccgcttccttcaggagctgtcagagccccagcttagagccatgcttcctgtcctgcagggaactagtgttacacctgctcaggctgtcctgctgcttggacggctccttcctaggcacgatctgctacaactggattccttggctcttctggcaaatcgaagacgctactgggagctgccctggtctgagcagcaggcacagtttctctggaagaagatgcaagtacccaccaaccttaccctcaggaatctgcaggctctgggcaccctggcaggaggcatgtcctgtgagtttctgcagcagatcaactccatggtagacttccttgaagtggtgcacatgatctatcagctgcccactagagttcgagggagcctgagggcctgtatctgggcagagctacagcggaggatggcaatgccagaaccagaatggacaactgtagggccagaactgaacgggctggatagcaagctactcctggacttaccgatccagttgatggacagactatccaatgaatccattatgttggtggtggagctggtgcaaagagctccagagcagctgctggcactgacccccctccaccaggcagccctggcagagagggcactacaaaacctggctccaaaggagactccagtctcaggggaagtgctggagaccttaggccctttggttggattcctggggacagagagcacacgacagatccccctacagatcctgctgtcccatctcagtcagctgcaaggcttctgcctaggagagacatttgccacagagctgggatggctgctattgcaggagtctgttcttgggaaaccagagttgtggagccaggatgaagtagagcaagctggacgcctagtattcactctgtctactgaggcaatttccttgatccccagggaggccttgggtccagagaccctggagcggcttctagaaaagcagcagagctgggagcagagcagagttggacagctgtgtagggagccacagcttgctgccaagaaagcagccctggtagcaggggtggtgcgaccagctgctgaggatcttccagaacctgtgccaaattgtgcagatgtacgagggacattcccagcagcctggtctgcaacccagattgcagagatggagctctcagactttgaggactgcctgacattatttgcaggagacccaggacttgggcctgaggaactgcgggcagccatgggcaaagcaaaacagttgtggggtcccccccggggatttcgtcctgagcagatcctgcagcttggtaggctcttaataggtctaggagatcgggaactacaggagctgatcctagtggactggggagtgctgagcaccctggggcagatagatggctggagcaccactcagctccgcattgtggtctccagtttcctacggcagagtggtcggcatgtgagccacctggacttcgttcatctgacagcgctgggttatactctctgtggactgcggccagaggagctccagcacatcagcagttgggagttcagccaagcagctctcttcctcggcaccctgcatctccagtgctctgaggaacaactggaggttctggcccacctacttgtactgcctggtgggtttggcccaatcagtaactgggggcctgagatcttcactgaaattggcaccatagcagctgggatcccagacctggctctttcagcactgctgcggggacagatccagggcgttactcctcttgccatttctgtcatccctcctcctaaatttgctgtggtgtttagtcccatccaactatctagtctcaccagtgctcaggctgtggctgtcactcctgagcaaatggcctttctgagtcctgagcagcgacgagcagttgcatgggcccaacatgagggaaaggagagcccagaacagcaaggtcgaagtacagcctggggcctccaggactggtcacgaccttcctggtccctggtattgactatcagcttccttggccacctgctatgagcctgtctctacagtagaaggagattgtggggagagaaa

SEQ ID NO: 246596 - protein, 381 aa, Artificial Sequence
  derived and/or modified sequence
MEPLVTWVVPLLFLFLLSRQGAACRTSECCFQDPPYPDADSGSASGPRDLRCYRISSDRYECSWQYEGPTAGVSHFLRCCLSSGRCCYFAAGSATRLQFSDQAGVSVLYTVTLWVESWARNQTEKSPEVTLQLYNSVKYEPPLGDIKVSKLAGQLRMEWETPDNQVGAEVQFRHRTPSSPWKLGDCGPQDDDTESCLCPLEMNVAQEFQLRRRQLGSQGSSWSKWSSPVCVPPENPPQPQVRFSVEQLGQDGRRRLTLKEQPTQLELPEGCQGLAPGTEVTYRLQLHMLSCPCKAKATRTLHLGKMPYLSGAAYNVAVISSNQFGPGLNQTWHIPADTHTDGMISAHCNLRLPDSRDSPASASRVAGITGICHHTRLILYF

SEQ ID NO: 246597 - DNA, 1146 bp, Artificial Sequence
  derived and/or modified sequence
atggagcctctggtgacctgggtggtaccactactgttcctgtttctactgtctaggcagggcgcagcctgtaggacatcagaatgttgttttcaagaccccccctatccagacgccgatagcggctcggcgagcgggcctagagatctgcgatgctaccgaattagctctgatcgctatgagtgcagttggcagtacgaaggaccaactgcaggcgtgtctcacttcctcagatgttgcctctcaagcggacgctgctgctatttcgccgccggatccgccacacgcctacagttctccgaccaagccggcgtctctgtcctttacacggtcacactttgggtggaatcatgggcacgcaaccagacagaaaagtctcctgaagtgacattgcaactgtacaactctgtcaaatacgaacctcctctgggggacattaaggtgagcaagctagccggccaactgcgcatggagtgggagacgccagataaccaggtgggggccgaggttcagttccgacaccggactcccagctccccgtggaaactgggtgactgcggaccacaggatgatgataccgaaagctgcctgtgccccttagagatgaacgtcgctcaggagtttcagctgaggcgcaggcagctgggatcacagggatccagctggagtaagtggtcatccccagtctgtgtgccccccgagaacccacctcagccccaggttcgcttcagtgtggagcagttgggccaagatggcagaaggcgtctgaccctgaaagagcagcccacccagctggaattgccagaaggatgtcagggcctggcccctggcaccgaagtgacgtaccggttgcaactgcacatgctcagctgcccatgcaaggccaaagcaaccagaacactccatctgggtaaaatgccatacctctccggtgcagcctacaacgtcgccgtcattagctctaatcagttcgggccaggactgaaccagacctggcacatacccgcggatacacatactgatggtatgattagcgcccattgcaacctgcggctgcctgatagccgtgactcacctgcttctgcaagcagggtggctggaatcaccggaatctgccaccacacccgccttatcttgtatttctag

SEQ ID NO: 246598 - DNA, 1146 bp, Artificial Sequence
  derived and/or modified sequence
atggagcccctggtgacctgggtggtgcccctgctcttcctgttcctgctgagccggcagggcgccgcctgcaggaccagcgagtgctgcttccaggaccccccctacccagatgctgacagcggcagcgccagcggcccccgggacctgcgctgctaccgcatcagcagtgacagatatgaatgttcctggcagtatgagggccccacagctggggtgagccacttcctgcgctgctgcctgagcagcggccgctgctgctactttgctgctggcagcgccacccggctgcagttcagtgaccaggccggcgtgtctgtgctgtacacagtgaccctgtgggtggagagctgggccaggaaccagacagagaagagccctgaggtgaccctgcagctgtacaacagcgtgaagtatgagccccccctgggggacatcaaggtgtccaagctggccggccagctgaggatggagtgggagaccccagacaaccaggtgggcgctgaggtgcagttccgccacaggacccccagcagcccctggaagctgggggactgtggcccccaggatgatgacacagagagctgcctgtgccccctggagatgaatgtggcccaggagttccagctgcggcggcggcagctgggcagccagggcagctcctggagcaagtggagcagccctgtgtgtgtgcccccagagaaccccccccagccccaggtgcgcttctctgtggagcagctgggccaggatggaagaagaaggctgaccctgaaggagcagcccacccagctggagctgcctgagggctgccagggcctggcccctggaacagaggtgacctaccgcctgcagctgcacatgctgagctgcccctgcaaggccaaggccaccaggaccctgcacctgggcaagatgccctacctgagcggggccgcctacaacgtggccgtcatcagcagcaaccagtttggacctggcctgaaccagacctggcacatcccagctgacacccacacagatggcatgatcagcgcccactgcaacctgcggctgcctgacagccgggacagccctgccagcgccagccgggtggccggcatcaccggcatctgccaccacaccaggctcatcctgtacttctag

SEQ ID NO: 246599 - DNA, 1146 bp, Artificial Sequence
  derived and/or modified sequence
atggagcccctggtgacctgggtggtgcccctgctgttcctgttcctgctgtctagacagggcgcagcttgtagaacttccgagtgttgcttccaggatcccccataccctgatgccgatagcggatccgcttccgggccccgcgaccttcgatgctataggatcagcagcgataggtatgagtgctcgtggcagtatgaagggcccactgcaggagtcagccattttcttagatgctgcctcagtagcggtaggtgttgttactttgccgcaggaagcgccacacgccttcagttttcagaccaagccggggttagcgtgctgtacaccgtcacactttgggtggagtcttgggcccggaaccaaaccgaaaagtcacctgaggtgacgctccagttatataatagtgtgaaatacgaacccccactcggagatatcaaggtgagtaagttggctggccagctacggatggagtgggagacgccggataaccaggtaggagccgaggttcagttcaggcatcggacaccgtcctctccctggaagctgggagactgcggcccccaagacgacgatactgagtcatgtttgtgcccactggaaatgaatgtggctcaagaatttcagctcaggcggcgccagctgggctcccaagggtccagctggtccaaatggtcttccccagtttgtgtgccacctgaaaacccgccacagccccaggtgaggttctccgttgaacagctgggccaggacggccggcggagactgacacttaaggaacaaccaacgcagctcgaactacccgagggttgtcagggtctcgcccctggaaccgaggtgacttatcgactgcagctgcatatgctctcatgcccttgtaaggcgaaggctaccaggactcttcatctcggaaaaatgccttacctctcaggagcggcttataatgtggccgtgatcagctctaaccaatttgggcctggcctcaatcagacttggcatatacccgccgacacccacaccgacggaatgataagcgcccactgtaatctgagactccctgattcaagagattcaccggcctcagcatcgcgcgttgccggcatcacaggcatctgccaccacacacggctcattctctatttttag

SEQ ID NO: 246600 - DNA, 1146 bp, Artificial Sequence
  derived and/or modified sequence
atggagcccctagtaacgtgggtcgtgccactcctattcttgtttttgttatcgcgccagggagctgcatgcaggacctctgagtgctgcttccaagacccaccataccctgacgccgacagcggaagtgccagcggcccacgggacctccgatgttatcgcatctcaagcgatagatacgaatgctcctggcagtacgagggtcccacagctggagtctcccattttctgaggtgctgtttgtcttcgggaaggtgctgttactttgcggcaggatcagctacccggcttcagtttagcgaccaggccggagtgagcgtcctctacactgtgactctgtgggtggaatcctgggccagaaaccaaaccgagaaatcgccagaggttacccttcaactctataactcagttaagtatgagcctcccctaggtgacattaaagttagtaagctggccggtcagctgagaatggaatgggaaactcccgataatcaggtgggggcagaggttcaatttcgccataggactcctagcagcccctggaagttaggggattgcggccctcaagacgacgacaccgagtcctgcctttgccccctggaaatgaatgtggcgcaggaattccagttgaggaggcgccagctgggctcccaggggtcctcttggagtaaatggtcttctcctgtgtgtgtacctccggagaacccacctcaaccacaggtgcgcttctccgtagagcagttgggtcaggacggtcgacgcagactcaccctgaaagaacaacctacccagctggaactcccagaaggatgccagggactagcgccaggaacagaagtcacttacagactccagttgcacatgctgtcatgtccctgtaaggctaaagcaactaggactctgcatctgggcaagatgccctatctgtcaggcgctgcttacaatgtggcggtgatatcctccaatcaatttggcccaggactcaaccagacctggcatatccctgctgatactcatacagacggtatgatcagcgcccattgtaacttgcggctgcctgattctcgggattcaccagctagcgcttcaagggtggcaggcattacggggatttgccaccacactaggttgattttgtacttttag

SEQ ID NO: 246601 - DNA, 1146 bp, Artificial Sequence
  derived and/or modified sequence
atggagcccctggtgacctgggtggtgcccctgctgttcctgttcctgctgagcagacagggcgccgcctgcagaaccagcgagtgctgcttccaggaccccccctaccccgacgccgacagcggcagcgccagcggccccagagacctgagatgctacagaatcagcagcgacagatacgagtgcagctggcagtacgagggccccaccgccggcgtgagccacttcctgagatgctgcctgagcagcggcagatgctgctacttcgccgccggcagcgccaccagactgcagttcagcgaccaggccggcgtgagcgtgctgtacaccgtgaccctgtgggtggagagctgggccagaaaccagaccgagaagagccccgaggtgaccctgcagctgtacaacagcgtgaagtacgagccccccctgggcgacatcaaggtgagcaagctggccggccagctgagaatggagtgggagacccccgacaaccaggtgggcgccgaggtgcagttcagacacagaacccccagcagcccctggaagctgggcgactgcggcccccaggacgacgacaccgagagctgcctgtgccccctggagatgaacgtggcccaggagttccagctgagaagaagacagctgggcagccagggcagcagctggagcaagtggagcagccccgtgtgcgtgccccccgagaaccccccccagccccaggtgagattcagcgtggagcagctgggccaggacggcagaagaagactgaccctgaaggagcagcccacccagctggagctgcccgagggctgccagggcctggcccccggcaccgaggtgacctacagactgcagctgcacatgctgagctgcccctgcaaggccaaggccaccagaaccctgcacctgggcaagatgccctacctgagcggcgccgcctacaacgtggccgtgatcagcagcaaccagttcggccccggcctgaaccagacctggcacatccccgccgacacccacaccgacggcatgatcagcgcccactgcaacctgagactgcccgacagcagagacagccccgccagcgccagcagagtggccggcatcaccggcatctgccaccacaccagactgatcctgtacttctag

SEQ ID NO: 246602 - protein, 168 aa, Artificial Sequence
  derived and/or modified sequence
MFISLWEFFYGHFFRFWMKWLLRQMTGKCELQRIFDTYVGAQRTHRIENSLTYSKNKVLQKATHVVQSEVDKYVDDIMKEKNINPEKDASFKICMKMCLLQITGYKQLYLDVESVRKRPYDSDNLQHEELLMKLWNLLMPTKKLNARISKQWAEIGFQGDDPKTDFRG

SEQ ID NO: 246603 - DNA, 882 bp, Artificial Sequence
  derived and/or modified sequence
atgttcatttctctctgggagtttttttatggacacttctttcgtttttggatgaaatggcttttacgccagatgacagggaaatgcgagctgcagaggatctttgacacttatgtgggggcacagcgcacccatcggatagagaattctcttacctattccaaaaataaggtcctccagaaggctacccatgtggtccaatctgaagtggacaagtacgttgacgatattatgaaagagaaaaacataaacccggagaaggatgccagcttcaagatctgcatgaagatgtgtctgctacagattaccggttacaagcagctgtatctcgacgttgagtctgtgcgtaaaaggccttacgattccgataatctgcagcacgaggagctgcttatgaaactgtggaaccttttgatgccgacaaaaaagctgaatgcacgcatctcaaaacagtgggccgagattgggtttcaaggggacgacccaaagacagatttccgcggaatggggattttgggattaattaatctggtctacttttctgagaactacacaagcgaggcgcaccaaattttgtcccggtctaaccaccccaagttgggctacagctacgctatcgtaggcatcaatttgactgagatggcctatagcttacttaaatcagaggccttgaaatttcacctttataatctggtgccaggaatcccaaccatggagcattttcaccaattctactgctacttggtctacgagtttgacaagttctggtttgaggaagagcccgaatcaattatgtattttaatctctaccgagaaaagttccacgaaaaaatcaagggactgttgctggattgcaatgtggccctcacactgaaggtgtag

SEQ ID NO: 246604 - DNA, 507 bp, Artificial Sequence
  derived and/or modified sequence
atgtttatctccctgtgggaatttttttatggccatttcttcaggttctggatgaagtggctgctgagacagatgaccggtaaatgcgaactgcagaggatattcgacacttacgtgggcgcccaacgaacgcatagaattgagaactctctcacatacagcaagaacaaggttcttcagaaagccacccacgtcgtgcaaagcgaggtcgacaagtatgtcgatgacataatgaaagagaaaaacataaatcctgagaaggatgcctcgttcaaaatatgcatgaagatgtgtctgctgcagattacaggttacaaacagctgtacttggacgtcgaatctgtccgtaaaagaccctacgattcagataaccttcagcacgaggagttgttgatgaaactgtggaatctgctcatgcccaccaagaagttgaatgcgagaatttccaagcagtgggcggaaatcggttttcaaggggatgaccccaaaacagacttccgtgggtag

SEQ ID NO: 246605 - DNA, 108 bp, Artificial Sequence
  derived and/or modified sequence
atgtttatctctctgtgggagttcttctacggccacttctttagattttggatgaaatggcttctaagacaaatgaccgggaaatgcgagctacaacgaatcttttag

SEQ ID NO: 246606 - DNA, 882 bp, Artificial Sequence
  derived and/or modified sequence
atgttcatcagcctgtgggagttcttctacggccacttcttccgcttctggatgaagtggctgctgcggcagatgactggaaaatgtgagctgcagaggatctttgacacctacgtgggcgcccagaggacccacagaattgagaacagcctgacctacagcaagaacaaggtgctgcagaaggccacccacgtggtgcagagcgaggtggacaagtatgtggatgacatcatgaaggagaagaacatcaaccctgagaaggatgccagcttcaagatctgcatgaagatgtgcctgctgcagatcaccggctacaagcagctgtacctggatgtggagagcgtgaggaagaggccctatgacagcgacaacctgcagcacgaggagctgctgatgaagctgtggaacctgctgatgcccaccaagaagctgaatgcccgcatcagcaagcagtgggccgagatcggcttccagggagatgaccccaagacagacttccggggcatgggcatcctgggcctcatcaacctggtgtacttcagcgagaactacaccagcgaggcccaccagatcctgagccgcagcaaccaccccaagctgggctacagctatgccatcgtgggcatcaacctgacagagatggcctacagcctgctgaagtctgaggccctgaagttccacctgtacaacctggtgcccggcatccccaccatggagcacttccaccagttctactgctacctggtgtatgaatttgacaagttctggtttgaggaggagcctgagagcatcatgtacttcaacctgtaccgggagaagttccacgagaagatcaagggcctgctgctggactgcaatgtggccctgaccctgaaggtgtag

SEQ ID NO: 246607 - DNA, 507 bp, Artificial Sequence
  derived and/or modified sequence
atgttcatcagcctgtgggagttcttctacggccacttcttccgcttctggatgaagtggctgctgcggcagatgactggaaaatgtgagctgcagaggatctttgacacctacgtgggcgcccagaggacccacagaattgagaacagcctgacctacagcaagaacaaggtgctgcagaaggccacccacgtggtgcagagcgaggtggacaagtatgtggatgacatcatgaaggagaagaacatcaaccctgagaaggatgccagcttcaagatctgcatgaagatgtgcctgctgcagatcaccggctacaagcagctgtacctggatgtggagagcgtgaggaagaggccctatgacagcgacaacctgcagcacgaggagctgctgatgaagctgtggaacctgctgatgcccaccaagaagctgaatgcccgcatcagcaagcagtgggccgagatcggcttccagggagatgaccccaagacagacttccggggctag

SEQ ID NO: 246608 - DNA, 108 bp, Artificial Sequence
  derived and/or modified sequence
atgttcatcagcctgtgggagttcttctacggccacttcttccgcttctggatgaagtggctgctgcggcagatgactggaaaatgtgagctgcagaggatcttctag

SEQ ID NO: 246609 - DNA, 882 bp, Artificial Sequence
  derived and/or modified sequence
atgttcatcagcctgtgggagttcttctacggccacttcttccggttctggatgaaatggttactgaggcagatgactggtaaatgcgaactgcagcgaatcttcgatacttatgtgggcgctcagcggacacacaggattgagaacagcttgacctatagcaaaaataaggttctgcaaaaggcaacccatgtggtgcagtctgaggttgacaagtacgtcgacgatatcatgaaagaaaagaacattaatccggagaaggacgcttcttttaagatctgtatgaagatgtgcctgctccagatcactggatataaacagctgtatctggacgtggaaagcgtccgcaagagaccttacgatagcgacaatctgcaacacgaagaactgctcatgaagctctggaacttactcatgccaacaaagaagttgaatgctcgaatttcaaagcagtgggctgagatcggatttcagggcgacgaccccaagacagacttccgagggatgggtatactggggctgattaacctggtgtattttagcgaaaattacaccagcgaggcgcaccagatactctcaagatcaaatcatcccaagttggggtactcttatgccatcgtcggaattaacctgacggagatggcctactccctgctgaagagcgaggctcttaagtttcacttatataatttggtgcccgggattccaacaatggaacactttcatcagttctactgctacttagtgtacgagttcgataagttctggtttgaggaggagcccgagtctataatgtacttcaatctgtatagggaaaaattccacgagaaaataaagggtctgctgctcgattgcaatgtggcactgaccctcaaggtttag

SEQ ID NO: 246610 - DNA, 507 bp, Artificial Sequence
  derived and/or modified sequence
atgttcatcagcctgtgggagttcttctacggccacttcttccggttctggatgaagtggttgttgcgccagatgacaggcaagtgcgagcttcagcggatcttcgacacttatgtgggggcacagagaacccaccggatcgagaacagtctcacctatagtaaaaacaaggtgttgcagaaggcgacacatgtggtccaatctgaagtggacaagtatgtagacgacatcatgaaggaaaaaaatatcaaccctgaaaaagatgctagttttaaaatctgcatgaagatgtgtttgctccaaattacagggtataagcagttatacttggacgttgagagcgttaggaagaggccttatgatagtgataatttacagcatgaagagttactaatgaagctctggaacttgctcatgcccaccaagaaattaaacgcgagaatctcaaagcaatgggctgagattggcttccagggagatgatccaaagacagatttcaggggatag

SEQ ID NO: 246611 - DNA, 108 bp, Artificial Sequence
  derived and/or modified sequence
atgttcatcagcctgtgggagttcttctacggccacttcttccggttctggatgaagtggctgctccggcagatgacaggaaagtgtgagcttcagaggatcttctag

SEQ ID NO: 246612 - DNA, 882 bp, Artificial Sequence
  derived and/or modified sequence
atgtttattagtttatgggagttcttttatggtcatttcttccgcttctggatgaaatggctgctgagacagatgaccggcaaatgtgaactacagcggattttcgatacctacgtaggcgcacagcgcacacatcggatcgagaatagtctcacatactctaaaaataaagtgttgcagaaagcgacccacgttgtgcagtctgaagtggataagtacgtggacgatattatgaaagagaagaacattaaccccgaaaaggacgcttcattcaaaatatgtatgaaaatgtgcctgctccaaatcaccgggtacaaacagctttacctcgatgtggagtccgttaggaaacgaccgtacgattctgataaccttcagcatgaggagcttcttatgaaactatggaatctgctgatgcctactaagaaattgaacgctcgtataagtaagcagtgggcagaaatcggctttcagggggacgatcccaagaccgactttagagggatgggcatactcgggctgattaatctggtgtacttctcggaaaactatacgagtgaggcgcaccagatattatctcgctcaaatcatccaaaactgggttattcctatgcaattgtagggataaacttgactgaaatggcctattccctcctaaagagtgaggcactcaaatttcacctctataacctggtgcccggtatccctaccatggaacacttccaccagttctactgttatttagtgtacgagtttgacaagttttggttcgaggaagaaccagaatctataatgtactttaatctgtatcgggagaagttccatgagaaaatcaaaggtctgttgctggactgcaatgtggcgctgacactgaaagtgtag

SEQ ID NO: 246613 - DNA, 507 bp, Artificial Sequence
  derived and/or modified sequence
atgtttatctctctgtgggagtttttttacggccacttcttccggttctggatgaagtggcttcttcgacagatgaccgggaagtgcgagctccaacgcattttcgacacctatgttggggcacaaagaactcatagaattgagaacagtctaacctattccaagaacaaggtactccagaaagccacacatgttgttcagtcagaggtggataagtatgttgatgatatcatgaaggagaagaatattaaccccgagaaggacgccagctttaagatctgtatgaagatgtgcttactccaaataacaggctataagcagctatacctggatgtggaatctgttaggaagcgtccatatgactctgataatctgcaacacgaggaacttctgatgaaattatggaacctgctcatgcccaccaaaaagctgaatgcccgtatcagtaagcagtgggcagaaattggcttccagggagatgatcccaagacagactttagaggctag

SEQ ID NO: 246614 - DNA, 108 bp, Artificial Sequence
  derived and/or modified sequence
atgttcattagtctgtgggagttcttctacgggcacttctttcggttttggatgaagtggctcttgcggcaaatgacagggaaatgcgagctccagcggatcttctag

SEQ ID NO: 246615 - DNA, 882 bp, Artificial Sequence
  derived and/or modified sequence
atgttcatcagcctgtgggagttcttctacggccacttcttcagattctggatgaagtggctgctgagacagatgaccggcaagtgcgagctgcagagaatcttcgacacctacgtgggcgcccagagaacccacagaatcgagaacagcctgacctacagcaagaacaaggtgctgcagaaggccacccacgtggtgcagagcgaggtggacaagtacgtggacgacatcatgaaggagaagaacatcaaccccgagaaggacgccagcttcaagatctgcatgaagatgtgcctgctgcagatcaccggctacaagcagctgtacctggacgtggagagcgtgagaaagagaccctacgacagcgacaacctgcagcacgaggagctgctgatgaagctgtggaacctgctgatgcccaccaagaagctgaacgccagaatcagcaagcagtgggccgagatcggcttccagggcgacgaccccaagaccgacttcagaggcatgggcatcctgggcctgatcaacctggtgtacttcagcgagaactacaccagcgaggcccaccagatcctgagcagaagcaaccaccccaagctgggctacagctacgccatcgtgggcatcaacctgaccgagatggcctacagcctgctgaagagcgaggccctgaagttccacctgtacaacctggtgcccggcatccccaccatggagcacttccaccagttctactgctacctggtgtacgagttcgacaagttctggttcgaggaggagcccgagagcatcatgtacttcaacctgtacagagagaagttccacgagaagatcaagggcctgctgctggactgcaacgtggccctgaccctgaaggtgtag

SEQ ID NO: 246616 - DNA, 507 bp, Artificial Sequence
  derived and/or modified sequence
atgttcatcagcctgtgggagttcttctacggccacttcttcagattctggatgaagtggctgctgagacagatgaccggcaagtgcgagctgcagagaatcttcgacacctacgtgggcgcccagagaacccacagaatcgagaacagcctgacctacagcaagaacaaggtgctgcagaaggccacccacgtggtgcagagcgaggtggacaagtacgtggacgacatcatgaaggagaagaacatcaaccccgagaaggacgccagcttcaagatctgcatgaagatgtgcctgctgcagatcaccggctacaagcagctgtacctggacgtggagagcgtgagaaagagaccctacgacagcgacaacctgcagcacgaggagctgctgatgaagctgtggaacctgctgatgcccaccaagaagctgaacgccagaatcagcaagcagtgggccgagatcggcttccagggcgacgaccccaagaccgacttcagaggctag

SEQ ID NO: 246617 - DNA, 108 bp, Artificial Sequence
  derived and/or modified sequence
atgttcatcagcctgtgggagttcttctacggccacttcttcagattctggatgaagtggctgctgagacagatgaccggcaagtgcgagctgcagagaatcttctag

SEQ ID NO: 246618 - protein, 995 aa, Artificial Sequence
  derived and/or modified sequence
MATRGGAGVAMAVWSLLSARAVTAFLLLFLPRFLQAQTFSFPFQQPEKCDNNQYFDISALSCVPCGANQRQDARGTSCVCLPGFQMISNNGGPAIICKKCPENMKGVTEDGWNCISCPSDLTAEGKCHCPIGHILVERDINGTLLSQATCELCDGNENSFMVVNALGDRCVRCEPTFVNTSRSCACSEPNILTGGLCFSSTGNFPLRRISAARYGEVGMSLTSEWFAKYLQSSAAACWVYANLTSCQALGNMCVMNMNSYDFATFDACGLFQFIFENTAGLSTVHSISFWRQNLPWLFYGDQLGLAPQVLSSTSLPTNFSFKGENQNTKLKFVAASYDIRGNFLKWQTLEGGVLQLCPDTETRLNAAYSFGTTYQQNCEIPISKILIDFPTPIFYDVYLEYTDENQHQYILAVPVLNLNLQHNKIFVNQDSNSGKWLLTRRIFLVDAVSGRENDLGTQPRVIRVATQISLSVHLVPNTINGNIYPPLITIAYSDIDIKDANSQSVKVSFSVTYEMDHGEAHVQTDIALGVLGGLAVLASLLKTAGWKRRIGSPMIDLQTVVKFLVYYAGDLANVFFIITVGTGLYWLIFFKAQKSVSVLLPMPIQEERFVTYVGCAFALKALQFLHKLISQITIDVFFIDWERPKGKVLKAVEGEGGVRSATVPVSIWRTYFVANEWNEIQTVRKINSLFQVLTVLFFLEVVGFKNLALMDSSSSLSRNPPSYIAPYSCILRYAVSAALWLAIGIIQVVFFAVFYERFIEDKIRQFVDLCSMSNISVFLLSHKCFGYYIHGRSVHGHADTNMEEMNMNLKREAENLCSQRGLVPNTDGQTFEIAISNQMRQHYDRIHETLIRKNGPARLLSSSASTFEQSIKAYHMMNKFLGSFIDHVHKEMDYFIKDKLLLERILGMEFMEPMEKSIFYNDEGYSFSSVLYYGNEATLLIFDLLFFCVVDLACQNFILASFLTYLQQEIFRYIRNTVGQKNLASKTLVDQRFLI

SEQ ID NO: 246619 - DNA, 2988 bp, Artificial Sequence
  derived and/or modified sequence
atggccaccagaggcggcgccggcgtggccatggccgtgtggagcctgctgagcgccagagccgtgaccgccttcctgctgctgttcctgcccagattcctgcaggcccagaccttcagcttccccttccagcagcccgagaagtgcgacaacaaccagtacttcgacatcagcgccctgagctgcgtgccctgcggcgccaaccagagacaggacgccagaggcaccagctgcgtgtgcctgcccggcttccagatgatcagcaacaacggcggccccgccatcatctgcaagaagtgccccgagaacatgaagggcgtgaccgaggacggctggaactgcatcagctgccccagcgacctgaccgccgagggcaagtgccactgccccatcggccacatcctggtggagagagacatcaacggcaccctgctgagccaggccacctgcgagctgtgcgacggcaacgagaacagcttcatggtggtgaacgccctgggcgacagatgcgtgagatgcgagcccaccttcgtgaacaccagcagaagctgcgcctgcagcgagcccaacatcctgaccggcggcctgtgcttcagcagcaccggcaacttccccctgagaagaatcagcgccgccagatacggcgaggtgggcatgagcctgaccagcgagtggttcgccaagtacctgcagagcagcgccgccgcctgctgggtgtacgccaacctgaccagctgccaggccctgggcaacatgtgcgtgatgaacatgaacagctacgacttcgccaccttcgacgcctgcggcctgttccagttcatcttcgagaacaccgccggcctgagcaccgtgcacagcatcagcttctggagacagaacctgccctggctgttctacggcgaccagctgggcctggccccccaggtgctgagcagcaccagcctgcccaccaacttcagcttcaagggcgagaaccagaacaccaagctgaagttcgtggccgccagctacgacatcagaggcaacttcctgaagtggcagaccctggagggcggcgtgctgcagctgtgccccgacaccgagaccagactgaacgccgcctacagcttcggcaccacctaccagcagaactgcgagatccccatcagcaagatcctgatcgacttccccacccccatcttctacgacgtgtacctggagtacaccgacgagaaccagcaccagtacatcctggccgtgcccgtgctgaacctgaacctgcagcacaacaagatcttcgtgaaccaggacagcaacagcggcaagtggctgctgaccagaagaatcttcctggtggacgccgtgagcggcagagagaacgacctgggcacccagcccagagtgatcagagtggccacccagatcagcctgagcgtgcacctggtgcccaacaccatcaacggcaacatctacccccccctgatcaccatcgcctacagcgacatcgacatcaaggacgccaacagccagagcgtgaaggtgagcttcagcgtgacctacgagatggaccacggcgaggcccacgtgcagaccgacatcgccctgggcgtgctgggcggcctggccgtgctggccagcctgctgaagaccgccggctggaagagaagaatcggcagccccatgatcgacctgcagaccgtggtgaagttcctggtgtactacgccggcgacctggccaacgtgttcttcatcatcaccgtgggcaccggcctgtactggctgatcttcttcaaggcccagaagagcgtgagcgtgctgctgcccatgcccatccaggaggagagattcgtgacctacgtgggctgcgccttcgccctgaaggccctgcagttcctgcacaagctgatcagccagatcaccatcgacgtgttcttcatcgactgggagagacccaagggcaaggtgctgaaggccgtggagggcgagggcggcgtgagaagcgccaccgtgcccgtgagcatctggagaacctacttcgtggccaacgagtggaacgagatccagaccgtgagaaagatcaacagcctgttccaggtgctgaccgtgctgttcttcctggaggtggtgggcttcaagaacctggccctgatggacagcagcagcagcctgagcagaaacccccccagctacatcgccccctacagctgcatcctgagatacgccgtgagcgccgccctgtggctggccatcggcatcatccaggtggtgttcttcgccgtgttctacgagagattcatcgaggacaagatcagacagttcgtggacctgtgcagcatgagcaacatcagcgtgttcctgctgagccacaagtgcttcggctactacatccacggcagaagcgtgcacggccacgccgacaccaacatggaggagatgaacatgaacctgaagagagaggccgagaacctgtgcagccagagaggcctggtgcccaacaccgacggccagaccttcgagatcgccatcagcaaccagatgagacagcactacgacagaatccacgagaccctgatcagaaagaacggccccgccagactgctgagcagcagcgccagcaccttcgagcagagcatcaaggcctaccacatgatgaacaagttcctgggcagcttcatcgaccacgtgcacaaggagatggactacttcatcaaggacaagctgctgctggagagaatcctgggcatggagttcatggagcccatggagaagagcatcttctacaacgacgagggctacagcttcagcagcgtgctgtactacggcaacgaggccaccctgctgatcttcgacctgctgttcttctgcgtggtggacctggcctgccagaacttcatcctggccagcttcctgacctacctgcagcaggagatcttcagatacatcagaaacaccgtgggccagaagaacctggccagcaagaccctggtggaccagagattcctgatctag

SEQ ID NO: 246620 - DNA, 2988 bp, Artificial Sequence
  derived and/or modified sequence
atggcaactcggggaggcgccggcgttgctatggcggtctggtcattactgtctgcccgcgcagtgaccgctttcctgcttctgtttctgccgcggtttctccaggcccagactttcagttttccattccagcagcccgaaaagtgtgataacaaccagtacttcgacatctccgcactctcctgtgtgccttgcggcgctaaccagcggcaggacgccagaggcacaagttgcgtatgtctgccaggattccaaatgatcagtaataacggcggtcccgccattatctgtaagaagtgcccagaaaatatgaagggagtcacggaagatggctggaattgcataagttgtccatctgaccttacagcggaagggaagtgtcactgcccaatcgggcatatcctagtggagagggacatcaatggcaccttactcagtcaggccacctgcgagctgtgtgatggtaacgagaattcctttatggtcgtaaatgctctgggcgatagatgtgtgcgatgtgaacccacctttgtgaatacatctcggtcgtgcgcgtgttctgaacccaatatcctgactggggggctgtgcttttccagtacgggcaactttccacttagaaggatctcagctgcaaggtatggtgaggtcggcatgtctctaactagtgaatggtttgcgaaatatctgcagagtagcgctgccgcctgttgggtgtatgcgaacttaacctcttgccaggctctcggcaatatgtgcgtcatgaacatgaatagttacgacttcgcaacctttgacgcttgtgggctgtttcaattcatcttcgagaacaccgccggcctgagcaccgtgcactctatctctttttggaggcagaaccttccttggcttttctacggggatcaactcggattggccccccaggtactgtctagcacttccctcccaaccaacttttctttcaaaggtgagaatcagaataccaaactcaaatttgtcgccgcatcttacgacatccgaggaaacttcctgaagtggcagacgctggaaggaggcgtccttcagttatgccccgacacagaaaccagactgaatgcagcatactcctttggaacaacttaccagcagaattgtgaaatccctatctctaaaattctgatcgattttccgactcctattttctacgacgtttatttggaatacaccgatgagaatcagcaccagtatatccttgcggtgcctgtgctgaatttaaacttgcaacacaataaaatttttgtgaatcaggattccaatagcggtaagtggttgctcacaaggcgcatctttttggtggacgcagtctcaggtagggagaatgatctcggtacccagccacgcgtcatccgagtcgcaacacaaattagtttgagtgtccacctggtgcccaatacaattaacggaaacatctacccacctcttatcacgatcgcctactcggacatcgatatcaaagacgccaatagccaatcagtgaaggtttctttctccgtaacatatgagatggaccacggcgaggcacacgtgcagacagacatcgcactcggagttttaggaggactagccgtgctcgctagcctcctgaagaccgccgggtggaagcggcgcatcggctctcccatgattgatctccagacagtggtgaagtttctagtgtattatgccggggaccttgcgaatgtcttctttataattacggtgggcactggactgtactggctgattttcttcaaagcacagaaaagcgtttccgtactgttgccaatgcccattcaggaggagcgctttgttacatacgtagggtgtgcattcgcactgaaggccctgcagtttctgcataaactgatctcacagataaccatagatgtgttcttcatagactgggaacgacccaaggggaaggtgctgaaagccgtggagggggaggggggtgttaggagcgccactgtccctgtttcaatctggaggacatatttcgtggccaacgaatggaatgagatccagaccgtgcgcaaaatcaactctctcttccaggtgttgaccgtcctgttcttccttgaagttgtggggtttaagaatctagccttaatggattctagtagctccttaagtagaaatcctccaagctatatcgctccatactcgtgcatattgcggtatgccgtcagcgccgcgctgtggctggccatcggcatcatccaagtcgtgttttttgccgttttttacgagaggttcatagaggataagatacgccagttcgtggacctgtgcagtatgtcaaacatctccgtatttctgctgtctcataagtgctttggatattacatccacggacggagcgttcacggccatgcagataccaatatggaagagatgaatatgaatctgaaacgcgaggccgagaatctctgcagccagcggggtcttgtgccgaacactgacggccaaacatttgagatcgccattagcaaccagatgcggcagcattatgatcgcatccatgagacccttatccggaaaaacggacccgctagactcctgagctcatctgcaagcacctttgagcaaagcatcaaggcgtatcatatgatgaacaaatttctgggcagctttatcgatcacgttcacaaggagatggattactttatcaaggataagctcctgttagagaggatcctgggtatggagttcatggagccaatggaaaagtccatattttataacgatgagggttactctttctccagcgtcttgtactacggaaatgaggccacactgctgattttcgacctgctgttcttttgtgtggtcgacttagcttgtcagaacttcatcctggccagctttctgacgtatctgcagcaagaaatttttcggtatatccgaaacactgtgggtcagaaaaatctggcatccaagactctcgtcgaccagcgctttttgatctag

SEQ ID NO: 246621 - DNA, 2988 bp, Artificial Sequence
  derived and/or modified sequence
atggccacccggggcggggccggcgtggccatggctgtgtggagcctgctgagcgcccgggctgtgacagccttcctgctgctcttcctgccccgcttcctgcaggcccagaccttctccttccccttccagcagcctgagaagtgtgacaacaaccagtactttgacatcagcgccctgagctgtgtgccctgtggggccaaccagaggcaggatgcccggggcaccagctgtgtgtgcctgcccggcttccagatgatcagcaacaacggcggccctgccatcatctgcaagaagtgcccagagaacatgaagggcgtgacagaagatggctggaactgcatcagctgccccagcgacctgacagctgagggcaagtgccactgccccatcggccacatcctggtggagcgggacatcaatggcaccctgctgagccaggccacctgtgagctgtgtgatggaaatgaaaattccttcatggtggtgaatgccctgggggacagatgtgtgcgctgtgagcccacctttgtgaacaccagccgcagctgtgcctgcagcgagcccaacatcctgactggaggcctgtgcttcagcagcactggaaacttccccctgcggcgcatctctgctgcccgctacggggaggtgggcatgagcctgaccagcgagtggtttgccaagtacctgcagagcagcgctgctgcctgctgggtgtatgccaacctgaccagctgccaggccctgggcaacatgtgtgtgatgaacatgaacagctatgactttgccacctttgatgcctgtggcctcttccagttcatctttgagaacacagctggcctgagcacagtgcacagcatctccttctggaggcagaacctgccctggctgttctatggagaccagctgggcctggccccccaggtgctgagcagcaccagcctgcccaccaacttctccttcaagggggagaaccagaacaccaagctgaagtttgtggccgccagctatgacatccggggcaacttcctgaagtggcagaccctggagggcggcgtgctgcagctgtgcccagacacagagacccggctgaatgctgcctacagctttggcaccacctaccagcagaactgtgagatccccatcagcaagatcctgattgacttccccacccccatcttctatgatgtgtacctggagtacacagatgagaaccagcaccagtacatcctggccgtgcctgtgctgaacctgaacctgcagcacaacaagatctttgtgaaccaggacagcaacagcggcaagtggctgctgacccggcgcatcttcctggtggatgctgtgtctggccgggagaatgacctgggcacccagcccagggtcatccgggtggccacccagatcagcctgtctgtgcacctggtgcccaacaccatcaatggaaacatctacccacccctcatcaccatcgcctacagcgacatcgacatcaaggatgccaacagccagagcgtgaaggtgtccttctctgtgacctatgagatggaccatggagaggcccacgtgcagacagacatcgccctgggcgtgctgggcggcctggccgtgctggccagcctgctgaagacagctggctggaagaggcgcatcggcagccccatgattgacctgcagacagtggtgaagttcctggtgtactatgctggggacctggccaacgtgttcttcatcatcaccgtgggcaccggcctgtactggctgatcttcttcaaggcccagaagtctgtgtctgtgctgctgcccatgcccatccaggaggagagatttgtgacctacgtgggctgtgcctttgccctgaaggccctgcagttcctgcacaagctgatcagccagatcaccattgatgtgttcttcatcgactgggagcggcccaagggcaaggtgctgaaggctgtggagggggagggcggcgtgcgcagcgccaccgtgcctgtgtccatctggaggacctactttgtggccaatgagtggaatgagatccagacagtgaggaagatcaacagcctcttccaggtgctgactgtgctcttcttcctggaggtggtgggcttcaagaacctggccctgatggacagcagcagcagcctgagcaggaacccccccagctacatcgccccctacagctgcatcctgcgctatgctgtgtctgctgccctgtggctggccatcggcatcatccaggtggtgttctttgctgtgttctatgagcgcttcatcgaggacaagatccggcagtttgtggacctgtgcagcatgagcaacatcagcgtcttcctgctgagccacaagtgcttcggctactacatccacggccgctctgtgcacggccacgccgacaccaacatggaggagatgaacatgaacctgaagcgggaggccgagaacctgtgcagccagaggggcctggtgcccaacacagatggccagacctttgaaattgccatcagcaaccagatgaggcagcactatgaccgcatccacgagaccctcatcaggaagaatggacctgcccggctgctgagcagcagcgccagcacctttgagcagagcatcaaggcctaccacatgatgaacaagttcctgggcagcttcatcgaccacgtgcacaaggagatggactacttcatcaaggacaagctgctgctggagcgcatcctgggcatggagttcatggagcccatggagaagagcatcttctacaatgatgagggctacagcttcagctctgtgctgtactatggaaatgaggccaccctgctgatctttgacctgctcttcttctgtgtggtggacctggcctgccagaacttcatcctggccagcttcctgacctacctgcagcaggagatcttccgctacatccggaacacagtgggccagaagaacctggccagcaagaccctggtggaccagcgcttcctgatctag

SEQ ID NO: 246622 - DNA, 2988 bp, Artificial Sequence
  derived and/or modified sequence
atggccacccggggcggcgccggcgtggccatggccgtgtggagcctcttatcggctagggctgtaaccgctttcctcctgctctttctgccgcgctttttgcaggctcagaccttctcttttccctttcaacagcccgaaaagtgtgacaacaatcagtatttcgacatctcagccctcagctgcgtcccctgcggggctaatcagcgccaagacgcacgggggactagttgtgtatgtcttccaggattccagatgatatccaataacggtggacctgctattatatgtaaaaaatgtccagagaatatgaaaggagttaccgaggacgggtggaactgcatctcctgcccatccgatcttactgctgaagggaaatgccactgtcccatcgggcacatccttgtggaacgagacattaatgggacactcctttcccaggccacatgtgaactgtgtgacggcaacgaaaattccttcatggtcgtgaatgccctgggcgacagatgcgtcaggtgtgaaccaaccttcgtcaatacctcccgcagctgcgcgtgtagcgaacctaacatcctgaccggtggcctgtgctttagcagcaccgggaactttccactgagaagaatttctgccgcaaggtacggggaagtgggcatgtccttgacatccgagtggttcgctaagtaccttcagtccagcgccgctgcttgctgggtctacgctaacctcacctcctgtcaagcgctggggaacatgtgcgtgatgaatatgaatagttacgactttgctacatttgatgcgtgtggcctattccaatttatattcgagaacaccgccggtctcagcactgtgcattccatttccttctggcggcagaacctgccatggctcttctacggagaccagttgggtctcgcaccgcaagtactgtcctctacaagcctccctaccaattttagcttcaaaggagaaaaccagaacactaagctaaagttcgttgctgcatcctatgatataagagggaattttctgaagtggcagaccctggagggaggtgtcctgcagctatgcccggataccgaaacccgcctgaacgcagcctattcatttggaactacctaccagcagaactgtgagatccctatttccaaaattctcattgattttcctactccaatcttttacgatgtttacctggaatacaccgacgagaaccagcaccagtacatcttggccgtccctgtgttgaatttgaaccttcagcataataagatcttcgtgaaccaagatagcaattctggaaagtggctgcttaccagaagaatttttttggtcgacgcggtgtccggccgtgagaacgatctcggtacccagcccagggtgatccgggtcgccacgcagatcagcctcagcgtacacctcgtgcccaatacgatcaatgggaacatttatccacccctcatcactatagcatactcggatattgatattaaagatgccaactcccagtccgtcaaggtttctttttccgtcacctacgagatggaccatggagaggcacacgttcagacagacattgccctcggcgttctcggcggcctggcagtcctggcctccctgctaaaaaccgcgggttggaagcgccgtattggttctcccatgatcgatctgcagaccgtagtcaagtttctcgtgtactatgccggtgatcttgctaatgtgtttttcatcatcaccgttgggactgggttatactggctgatattttttaaggcccagaaaagcgtaagtgtgttgctgccaatgcctattcaggaggagagatttgtaacctacgttggatgtgcatttgcactcaaggctctgcaattcctgcataagcttatctcacagataacaattgacgtcttctttatcgactgggaaagacctaaggggaaagtcttgaaagccgtggaaggtgaaggtggtgtgcggtcagcaacggtgccagtgtcgatctggaggacatacttcgtggccaacgagtggaacgaaatccagactgtccggaagataaactctttgtttcaggtgctgaccgttctttttttcctggaggtagtcggatttaagaatttggccctgatggatagctcttcgtcactgtctagaaacccgccttcctacattgccccgtatagctgcattttgagatacgctgtgagtgcggccttgtggttagcgatcggcatcatccaggtagtcttcttcgccgtgttctacgagcgatttatagaagataagattaggcagttcgtggacctatgttctatgtccaatataagtgtttttctactgtctcacaagtgcttcggctactacattcacggacgtagtgtgcacggtcacgcagatacgaatatggaagagatgaacatgaatctgaagagggaggccgagaacctgtgttcccagagagggttggtccctaacaccgatggacagacattcgagatcgctatctcgaaccaaatgcggcaacactatgataggatccacgagactttaatccggaagaatggccccgctcgtttgctgtcgagctctgcatccacttttgagcagagcattaaagcctatcatatgatgaataagttcctcgggtccttcattgatcacgtgcacaaagaaatggactatttcatcaaggataagctgctgctcgaacggatccttggcatggagttcatggagccgatggaaaagagtattttctataacgatgaggggtactccttcagctcagtcctttattacggtaacgaggccacattgctgatatttgatctgttatttttttgcgtggtagacctggcctgtcagaactttattttagcttccttcctgacctatttgcagcaagaaatcttccgctacattaggaacacagtgggtcagaaaaatctcgcctccaagaccctggtcgatcagcgctttttgatttag

SEQ ID NO: 246623 - DNA, 2988 bp, Artificial Sequence
  derived and/or modified sequence
atggcaacgcgaggaggagccggagtcgccatggccgtatggtccttgctgagtgccagggccgttacagccttcctgctgttattccttcctcgctttctgcaggcacaaaccttttccttcccatttcagcagccagaaaaatgtgataataatcagtattttgatattagcgcattgtcatgcgtaccatgcggtgcaaatcagcggcaggacgcacggggaacttcctgcgtctgtctaccagggtttcagatgatttccaataacgggggacccgcaatcatttgcaaaaaatgccctgagaacatgaaaggggtcacggaagatggctggaactgcatttcctgtccatccgacctgaccgccgaggggaaatgccattgccccattggccacattctggtggaaagggatatcaacggcactctcctgtctcaagcgacctgcgaactctgcgacggaaatgaaaattcctttatggtggtgaacgcattaggggacaggtgtgttcgctgtgaacctaccttcgtgaacacatctcggagttgtgcctgttctgaaccaaacattctgactggaggactctgtttttcgagtactggaaattttcctcttaggagaatttctgccgctagatatggagaagtaggaatgtccttgactagcgagtggtttgcaaaatacctgcagtccagtgcagccgcatgctgggtgtatgcgaatctcacgtcctgccaggccctggggaatatgtgtgtcatgaatatgaacagctatgactttgccacttttgacgcctgcggcctttttcaattcatatttgagaataccgccggactgtctacagttcattcaatctccttttggcggcagaacctgccgtggcttttctacggggaccaactaggattggcccctcaggtgctttcgtcgacatcactccctacaaacttttcgttcaagggggaaaatcagaatacaaaactaaaatttgtggctgcatcatacgacatcagaggcaacttcttgaagtggcagactttggagggaggcgtactgcagctgtgcccagacacagaaacccgtttaaacgcagcctactccttcggcacaacctaccagcagaattgtgagattccgatcagtaaaatactaatcgatttccccactccgatcttttacgatgtgtaccttgagtacaccgacgaaaaccagcatcaatatatattggctgtgcccgttctgaaccttaaccttcagcataacaaaattttcgtgaaccaagactctaattcggggaagtggttactgacccggaggatctttctggtggatgccgtcagcggccgtgagaatgaccttgggacccaacctcgggtgatcagagtggctacacaaataagcctgagcgtccatcttgttcccaatacaatcaacggcaatatatatcctccgcttatcactatcgcttatagcgatattgacataaaggatgctaacagtcagagcgtgaaagtcagtttttctgttacatatgagatggatcacggtgaggcccatgtgcagacagatatagccctgggcgtgctcgggggacttgctgtgttggcgtcactactgaaaaccgcgggttggaagcgtagaatcggcagccctatgatagatctgcaaacagtcgtaaagtttttggtgtactatgcaggggatctagcaaacgtgtttttcatcattaccgtcggcaccggactgtactggctgatattcttcaaagcacagaaatccgtgagcgtgctcctcccaatgccaatccaagaagagaggtttgttacttacgtgggctgcgcatttgctcttaaggccctgcagtttctgcacaagcttatctcccagatcactattgatgttttctttattgactgggagcggccaaaaggaaaagttttaaaagctgtggagggggagggaggtgtgcgatctgccacagtgccagtaagcatctggagaacatattttgtggccaacgagtggaatgagatacaaaccgtgagaaagataaactccttgtttcaagtgcttacggtgctgtttttcctcgaggtggttgggtttaagaacctggcgcttatggactcaagttcttccctgagtcgcaatccaccgtcttacatcgccccatactcctgcatcttgcggtatgccgtgtccgcagctctgtggctcgccattggcattatccaggttgtgttttttgccgtattttatgaacgttttattgaagataaaatccgacagttcgtagacttatgcagcatgagcaatatctcggttttcctcttgtctcacaaatgtttcggatattacattcacgggcgttccgtgcacgggcatgccgataccaatatggaggaaatgaacatgaacttgaagcgcgaagcggaaaatctctgttcccagcgcggactggttcctaataccgacggccaaacattcgagatcgcgatctccaaccaaatgcgccagcactacgacaggattcatgaaacactgattcggaaaaatggcccagctagattgctcagctcttccgcatccacgttcgaacaatcaatcaaggcatatcacatgatgaataagttcctgggcagctttattgaccatgttcacaaggagatggactacttcatcaaagacaagctgctgctcgagagaatcctcgggatggaattcatggagccgatggagaagagtatcttctataatgatgagggctattcgttttcatccgtcctatattatggtaatgaggccacattgctgatattcgacctgctcttcttctgcgttgtcgaccttgcctgtcagaatttcatcctggcgtccttcttgacatatctgcagcaggagatctttcgatatatcagaaatactgtgggccagaaaaatttggccagtaagacactggtggaccagcggttcctgatctag

SEQ ID NO: 246624 - DNA, 4651 bp, Artificial Sequence
  derived and/or modified sequence
aagccgccgcagaggctgatggggggctggaggctgtgaggcttccagcgtcggtaccatggcgacgcgcggtggggctggggtggcaatggcggtttggtccctcttatccgcccgggccgtgaccgcgttccttctgttgttcctccctcgcttcttacaggcccagaccttctctttccctttccagcagccggagaagtgcgacaacaaccagtactttgatatctccgccctctcgtgtgttccttgtggagctaaccagaggcaagatgcccgaggaacttcatgtgtatgtctaccaggatttcagatgatctctaataatggaggacctgctattatttgtaaaaagtgcccagaaaacatgaaaggtgttacagaagatggctggaactgcatttcttgccctagtgacttaactgccgaaggaaaatgtcactgtcccattggccatattttagtggaaagagacattaatggaacattgttgtctcaagcaacttgtgagctctgtgatggaaatgaaaactcttttatggtagtaaatgctttaggagacaggtgcgtccgatgtgagccaacatttgttaataccagcaggtcctgtgcatgttcagaacctaacattttaacagggggattatgtttcagcagcacagggaattttcctctacgtagaatttcagctgcacgttatggagaagttggcatgtctttaacttcagaatggtttgcaaagtatttgcaatcatcagcagctgcatgttgggtatatgccaatctaacatcttgtcaagctcttggaaatatgtgtgtgatgaacatgaattcttacgactttgccacatttgatgcatgtggactatttcagtttatctttgaaaatactgctggactgagcactgttcattctatttcattttggagacagaatcttccttggctgttttatggagaccagttaggattagcacctcaagtgctcagttctacctctcttcctacaaatttcagttttaaaggagaaaaccagaatacaaaactgaagtttgttgctgcttcctatgatataagaggaaattttctcaagtggcaaactttagaaggaggtgttttacagctttgtccagacacagagacaaggctaaatgctgcttattcatttggaacaacctaccaacaaaattgtgagattcctatctctaagatcttaattgactttcccactcctatattttatgatgtgtaccttgaatatactgatgaaaatcaacatcaatatattttggctgtgcctgtgttaaacctaaatcttcaacataataagatatttgtgaaccaagacagcaactctggaaagtggcttctaactcggcgcattttcttagtggatgcagtaagtggacgagaaaatgacttaggaactcagccaagagtaattcgagttgctactcaaatatcactgagtgtccaccttgtacccaacacaataaatggaaacatctaccctcccttaatcaccattgcctacagtgacattgatatcaaagatgccaacagccagtctgtgaaggtttctttctcagtcacatatgaaatggatcatggagaagcacatgtccagacagatattgctttgggtgtattgggtgggctagctgttttagcatctcttttgaagacagcaggatggaagaggcgcattgggagtcccatgattgatttacagacagttgtgaaattcttggtgtactatgctggtgatctggccaatgttttctttatcatcacagtgggaacaggtctttactggcttattttcttcaaagcacagaagtctgtgtctgttttgctgccaatgccaattcaggaagaacgttttgtcacttatgttggatgtgcctttgctctgaaggcactacaatttttgcataagctcatatcccagattacaatagatgtattctttattgattgggagcgacctaaaggaaaggttcttaaagctgttgaaggtgagggtggtgtacgaagtgccactgttcctgtaagcatatggagaacatattttgtagcaaatgaatggaatgaaattcagactgtgagaaaaattaattcactctttcaagtacttactgtcctcttctttttggaggttgtgggattcaagaacttagcattaatggactcatcttctagtctttctagaaacccacctagctacatagctccttatagctgcattttgagatatgcagtgtctgctgctctttggctagccattggaattatacaggtcgtgttctttgctgtcttttatgagagatttatagaagataaaattcgacagttcgttgatttatgctctatgagtaatatatcagtgtttctgttatcccacaaatgttttggatattacattcatggtagatcagtacatgggcatgcagatactaatatggaagaaatgaatatgaaccttaaaagagaagcggaaaatttgtgtagccagagaggtttggtacccaacacagatggtcagacttttgagattgcaatttctaaccagatgagacaacattatgacagaattcatgagacactaataaggaaaaatggtcctgctagactactgagttcatcagcaagtacttttgagcagagtataaaagcatatcatatgatgaataaatttcttggctccttcattgaccatgttcataaggaaatggattactttataaaagataagttgcttcttgaaagaattcttggaatggaattcatggaaccaatggaaaaaagcatcttttacaatgatgaaggttattctttcagcagtgtcctgtattatggaaatgaagctactcttcttatttttgatctgctgttcttctgtgttgtggatttggcttgccaaaattttattttagcatccttccttacatatctacaacaagagatttttagatatatccgtaatacagtaggacaaaagaatttggcatccaaaacattggtggatcaaagatttttgatttaacttcctgaataaataacttaaagactcagtataatcatggccaaaaaaaagtcatgatatcaggttagtttgccatattttttaaaacttataatgcagactattctgtttttgttttttatttgcagaaagatttatttttataacttgggaatatataacctgatataatagaaaatactgttttcccattgtgtgtagtatttaatgcagtaaataataaattaatactgacagtgaggccaaaaaaaatctaaatgttgctttcagcataatactttttaatgctaattaaaacagtccccatcatttgtctctgtagattattttataaactgagagctgcctgaatcttctcacattgacaaagtaatttgattccaagtttaagactagttttcagtttgatattttcatgttttgtgtgcttatggttaaataaatgttgaaagatattttcaagtttacttagaaattttaaattgtattattgctgattcaatttgcatcattctaattgctcatcctctttggcagtggattaattcactgttgggttaatatgcatctcatgaaatgatatcttttcattcctttgtatacctgtattaggtcagtatacgctttccatgaaatatatttgcatttctaatatagtttacatttattaagttataacgtatgacatttttcccaatatcattttttatacattttaattacttaatgttttaagagttctcttccagagttttgcttttcaattacgtttaaagactgtaaataacaaacagtaaggctgggcgctgtggcttacgcctgtaatcccagcactttggaaggccaaggcacgtggatcactttaggtcaggagttcaagaacagcctggccaacatggaaaaccccatctctacaaaaaatacaaaaattagttggatgtggtggcctgtaatcccagctatttgggaggctgaggcatgagaatagcttgaaaccaggaggtggaggctgtagtgagccagatagcaccactgcactccagccaggatgacagagcaagaccctgtctcagaaaaaacaaaaacaaaacactgtaaatgtatcatgtttctcactgctttctatgttaatgctgtgtaaatacttaaaatggaatactgtataaatattatttatattttctcagatgaaaatatatactaaaacatttggtatttctgttttctgtttcattaatgtatatctgatggagtaccatttaggaatataacattattggggcagaggtcccagccattgccaaagttgaatcttttacatttccctgaatcttgaggatgactgaaaaggaagtctttgaaactgcagtttctgaaggatcacagtacaggaatgcctttataaaagctgcagagataaatacatgtacttatatggcatggatatttaaaaccactcactcagaagcatatgaaagaaattcaaccatcattcaacatagaagaagttaattttagtgcaaaagtttttaagtattaaatttcacaataaaggatcaattggcttacttgctgataaattaaaacagaaaacatttaaaatca

SEQ ID NO: 246625 - protein, 377 aa, Artificial Sequence
  derived and/or modified sequence
MYTFVVRDENSSVYAEVSRLLLATGHWKRLRRDNPRFNLMLGERNRLPFGRLGHEPGLVQLVNYYRGADKLCRKASLVKLIKTSPELAESCTWFPESYVIYPTNLKTPVAPAQNGIQPPISNSRTDEREFFLASYNRKKEDGEGNVWIAKSSAGAKGEGILISSEASELLDFIDNQGQVHVIQKYLEHPLLLEPGHRKFDIRSWVLVDHQYNIYLYREGVLRTASEPYHVDNFQDKTCHLTNHCIQKEYSKNYGKYEEGNEMFFKEFNQYLTSALNITLESSILLQIKHIIRNCLLSVEPAISTKHLPYQSFQLFGFDFMVDEELKVWLIEVNGAPACAQKLYAELCQGIVDIAISSVFPPPDVEQPQTQPAAFIKL

SEQ ID NO: 246626 - DNA, 1134 bp, Artificial Sequence
  derived and/or modified sequence
atgtacaccttcgtggtgagagacgagaacagcagcgtgtacgccgaggtgagcagactgctgctggccaccggccactggaagagactgagaagagacaaccccagattcaacctgatgctgggcgagagaaacagactgcccttcggcagactgggccacgagcccggcctggtgcagctggtgaactactacagaggcgccgacaagctgtgcagaaaggccagcctggtgaagctgatcaagaccagccccgagctggccgagagctgcacctggttccccgagagctacgtgatctaccccaccaacctgaagacccccgtggcccccgcccagaacggcatccagccccccatcagcaacagcagaaccgacgagagagagttcttcctggccagctacaacagaaagaaggaggacggcgagggcaacgtgtggatcgccaagagcagcgccggcgccaagggcgagggcatcctgatcagcagcgaggccagcgagctgctggacttcatcgacaaccagggccaggtgcacgtgatccagaagtacctggagcaccccctgctgctggagcccggccacagaaagttcgacatcagaagctgggtgctggtggaccaccagtacaacatctacctgtacagagagggcgtgctgagaaccgccagcgagccctaccacgtggacaacttccaggacaagacctgccacctgaccaaccactgcatccagaaggagtacagcaagaactacggcaagtacgaggagggcaacgagatgttcttcaaggagttcaaccagtacctgaccagcgccctgaacatcaccctggagagcagcatcctgctgcagatcaagcacatcatcagaaactgcctgctgagcgtggagcccgccatcagcaccaagcacctgccctaccagagcttccagctgttcggcttcgacttcatggtggacgaggagctgaaggtgtggctgatcgaggtgaacggcgcccccgcctgcgcccagaagctgtacgccgagctgtgccagggcatcgtggacatcgccatcagcagcgtgttccccccccccgacgtggagcagccccagacccagcccgccgccttcatcaagctgtag

SEQ ID NO: 246627 - DNA, 1134 bp, Artificial Sequence
  derived and/or modified sequence
atgtataccttcgtagttagggatgagaacagcagcgtttatgcagaagtttctcggctcctgctggccacaggacactggaaaagactgcggcgcgataatccaagattcaacctcatgctcggagagaggaatagactacctttcggcaggctcgggcacgagcctggtttagtacaactcgttaactactaccggggtgccgataagctttgcaggaaggctagtctcgtgaagctcatcaagaccagccctgagttagccgaatcctgtacatggttccctgaatcttacgtgatctaccctaccaatttaaagaccccagtggcaccggctcagaacggcattcaacctcccatcagcaatagtcgcaccgacgagagagagttcttcctggcaagttataacagaaaaaaagaggatggcgagggcaatgtctggattgccaaatcctccgcaggggccaaaggtgagggaatcctaatctcatccgaggcatccgagctgctggatttcatcgacaaccaggggcaggtgcatgttattcagaagtatttggaacaccctctgctgcttgagcccggacataggaagtttgacattcgatcttgggtgctggtggaccaccagtacaacatttatctttacagggaaggcgttttgagaacagcttcagagccataccacgtcgataattttcaagataagacgtgccatctcaccaaccactgcattcagaaagagtattcaaagaactacggaaagtacgaagaaggcaatgagatgtttttcaaggagttcaaccagtatctcacctcggcacttaatattacactggagagtagcattctgttacagattaagcacatcatacgcaactgtctgttatcagtggagcctgcaatctctactaagcacctgccttatcaatcattccaactgtttggtttcgatttcatggtcgatgaggaactgaaagtgtggctcattgaggtgaacggggcacccgcatgcgcacagaaactgtatgcagagctgtgtcagggtattgtcgacatagcgattagctcagtgtttcctcctcccgatgtggaacagcctcaaacacagcccgctgcttttatcaagctgtag

SEQ ID NO: 246628 - DNA, 1134 bp, Artificial Sequence
  derived and/or modified sequence
atgtacacctttgtggtgagagatgagaacagctctgtgtatgcagaggtgtcccggctgctgctggccaccggccactggaagaggctgcggcgggacaacccccgcttcaacctgatgctgggggagaggaaccggctgcccttcggccgcctgggccacgagcccggcctggtgcagctggtgaactactacagaggagctgacaagctgtgcaggaaggccagcctggtgaagctgatcaagaccagccctgagctggccgagagctgcacctggttccctgagagctatgtgatctaccccaccaacctgaagacccctgtggccccagcccagaatggcatccagccccccatcagcaacagcaggacagatgagcgggagttcttcctggccagctacaacaggaagaaggaggatggagagggcaatgtgtggatcgccaagagcagcgctggggccaagggggagggcatcctgatcagcagcgaggccagcgagctgctggacttcatcgacaaccagggccaggtgcacgtgatccagaagtacctggagcaccccctgctgctggagcccggccacaggaagtttgacatccgctcctgggtgctggtggaccaccagtacaacatctacctgtaccgggagggcgtgctgaggacagccagcgagccctaccacgtggacaacttccaggacaagacctgccacctgaccaaccactgcatccagaaggagtacagcaagaactacggcaagtatgaggagggcaatgagatgttcttcaaggagttcaaccagtacctgaccagcgccctgaacatcaccctggagagcagcatcctgctgcagatcaagcacatcatccggaactgcctgctgtctgtggagcccgccatcagcaccaagcacctgccctaccagagcttccagctgtttggatttgacttcatggtggatgaggagctgaaggtgtggctgattgaggtgaatggagccccagcctgtgcccagaagctgtatgcagagctgtgccagggcatcgtggacatcgccatcagctctgtgttccccccaccagatgtggagcagccccagacccagcctgctgccttcatcaagctgtag

SEQ ID NO: 246629 - DNA, 1134 bp, Artificial Sequence
  derived and/or modified sequence
atgtacaccttcgtggtgcgggacgagaacagcagcgtgtacgccgaggtcagtcgcctgctcctggcgacggggcactggaagcgcttgcgaagggacaacccacgctttaacctcatgctaggagaaaggaatcggctgccctttgggcgactgggtcatgaaccaggcttagtacaactcgtcaattactataggggcgccgacaagctttgtaggaaggccagcttagtaaagctgatcaagacaagccccgagttagccgaatcttgcacctggttccccgagtcctacgtgatctacccaacaaatcttaaaactcccgtcgcccctgcccagaatggtatccagcctcccatttccaattcaagaaccgatgagagagaatttttcttagcatcctacaatagaaaaaaagaggatggagagggaaacgtgtggatcgccaagtccagcgctggagcaaaaggagaaggcatcctgattagctcagaggcctctgagctcttggacttcattgataatcaaggacaggtgcacgtgatccagaaatatttagagcatccgttactgttggaacccgggcacaggaagtttgatattcgttcatgggtgctggtggaccatcagtataatatttatttgtatcgcgagggcgtcttgaggaccgctagtgagccataccatgtggataatttccaggataagacctgtcacttgaccaaccattgtattcagaaagagtattcgaaaaactatggcaagtacgaggagggcaacgagatgttcttcaaagagtttaatcagtacctgacctccgcgctaaatatcactttggagtcatctattctgctccaaataaagcacatcatccggaattgcctgcttagtgtcgagcccgctatatcaaccaagcaccttccatatcaaagttttcagctgttcgggtttgacttcatggtggacgaagaactgaaagtctggctcattgaggttaacggggcaccagcctgcgcgcagaagttatacgccgagttgtgtcaagggattgtagacattgccatatcctccgtatttcctccccctgacgtggaacagcctcagactcaacccgcagccttcattaaactctag

SEQ ID NO: 246630 - DNA, 1134 bp, Artificial Sequence
  derived and/or modified sequence
atgtacaccttcgtggtgcgcgatgagaactcatccgtttacgcagaggtgtcacggctcctgctggccactggccattggaagagactgcggcgtgacaacccgaggttcaacctgatgctgggcgagagaaatcgcctccccttcggtagactaggccacgagcccggattagtgcagctggtcaattattaccgcggagcagacaagctgtgtcggaaggcctcactcgtgaaactgataaaaacctcgccagaactggccgagagttgtacttggttccccgaaagctatgttatttaccctacaaacctgaagacacctgtggcacccgcacagaacggtattcaacccccaatctccaacagccggacggatgaaagagaattcttcttggcgtcctataataggaagaaggaagacggcgagggtaacgtgtggattgcgaaaagttcagccggagccaagggcgaagggatcctgatttcctcagaggcttctgagttgctggactttatcgataatcaagggcaagttcacgttatccagaaatatctggagcacccactgctgttggaacctgggcacagaaagtttgatatacggtcatgggtgctggtcgaccaccaatacaacatttacctgtacagggagggcgtgctaaggaccgcgagcgagccataccacgtggataacttccaggataagacctgtcaccttaccaatcactgcattcagaaggagtattccaagaactatggtaagtacgaggaagggaacgagatgttctttaaagaatttaaccagtatctgacttctgctctcaacatcactttggaatcgagcatactactccagataaagcacataatacgcaactgccttttgagcgtggaacctgcgatcagtactaagcacctgccttatcagtcctttcagttgttcggttttgactttatggtggatgaggaactaaaggtctggttgatagaggtgaatggcgcacccgcatgcgctcagaaactatatgcagagctctgccagggaatcgtcgacatcgccatctcatctgtcttcccccctccagacgttgaacagcctcaaacacagccagctgcctttatcaaactttag

SEQ ID NO: 246631 - DNA, 5180 bp, Artificial Sequence
  derived and/or modified sequence
gcgctttcctctccggcacccggcgggcgcccgggcgcggcgccgccggcacccgagaggcgcggtagccggcgcgggcggcgggggccgggccgcggcgggcgcccgggcggggtccgcgctgagccgccttctcggccgcctggtccctgcggcggctgcccggcggcccgggcgcgcggcgcttcgccatgtacaccttcgtggtacgcgatgagaacagcagcgtctacgccgaggtctcccggctgctcctcgccaccggccactggaagaggctgcggcgagacaaccccagattcaacctgatgctgggagagaggaatcggctgcccttcgggagactgggtcacgagcccgggctggtacagttggtgaattactacaggggtgctgacaaactgtgtcgcaaagcttctttagtgaagctaatcaagacaagccctgaactggctgagtcctgcacatggttccctgaatcttatgtgatttatccaaccaatctcaagactccagttgctccagcacagaatggaattcagccaccaatcagtaactcaaggacagatgaaagagaattctttctcgcctcttataacagaaagaaagaggatggagagggcaacgtttggattgcaaagtcatcagccggtgccaaaggtgaaggcattctcatctcctcagaggcttcagagcttctcgatttcatagacaaccagggccaagtgcacgtgatccagaaatatcttgagcaccctctgctgcttgagccaggtcatcgcaagtttgacatccgaagctgggtcttggtggatcatcagtataatatctacctctatagagagggtgtgcttcggactgcttcagaaccatatcatgttgataatttccaagacaaaacctgccatttgaccaatcactgcattcaaaaagagtattcaaagaactacgggaagtatgaagaaggaaatgaaatgttcttcaaggagttcaatcagtacctaacaagtgctttgaacattaccctagaaagtagtatcttactacaaatcaaacatataataaggaactgcctcctgagcgtggagcctgccattagcaccaagcacctcccttaccagagcttccagctcttcggctttgacttcatggtcgatgaggagctgaaggtgtggctcattgaggtcaacggtgcccctgcatgtgctcagaagctctatgcagaactgtgccaaggcatcgtggacatagccatttccagtgtcttcccacccccagatgtggagcaacctcagacccagccagctgccttcatcaagctgtgacagagggcactccctgctgccttggaaaaagcacggggtcctgctccagggaatggtgaaatgactggattgctctttatccagcccacagcaggggaaagaaaggcaactcgcaaagatgagatggaagaaggcacgtgagcagaggaggcagctcccaaagagagggctgctcagggggcttcccagatgtagctctcagcagtgctgttgagacttttgaaaacaactttggtacacaaaggcagctttgtgagcagagctccttcccctctccccgggaacggcagggcactgggacctctggtcggtgcctcccacccactgcagccctagtgccttagctccatgcccggctgcagccccactgctctggactatggattggacgtcagagcatattggaggttgcctgtgtgttccccacccatcccttcggtaacactctgccacactaagctctgtacaagcatgcaccaacagtccttagttttgtgctgtgcactggcctctcggcaaaggtggtttccctcatcaccttcctgatggtgtttggtcagtcacctgtcagggtttgtgcgggttgggccccaaaacagcatatgctgctctaagtctgctctctgcatgttttagaaacaaagtggcaagtctgccctgaacctgtaagcatcaaataagcatgagagagaaaaaaacatgatatattgctttacttaataggttgaatatggtaggtctttgaaaatatgatgattcaattttctcaattttctttgctttaaccaaaattctaaatgcagttttgcctagttccctttttttttctttttttacttttttttaaacgtttgtaaaaacctctttgaggatgaggagtcagtaaaattccactccccaagtggccctgccccagacaaaggttgctttccccctttttgttctttttatgcccccaagcactttctgcagtagctagagggacaggtttccttccaggaaggattcgagttcctgtgcctgtgggtattaggagagtatatatcctgcctgaatggggaagtcttctaaaatgggaaagaagtggtttcatctccacacagtgtcttgtaaatctcaacaaatgtgtactgttagaagtggcttccgcttactggattaactaatactttataggcttttcaggaggccacatcactagcagtagggagaacaagatgtcatttgtgttcagtgtaagctgagtaaacaggcccttcctagagtgtcctggaaatcacagcaacccattgaaaactgccctccccaccagaacgtgctacgttctttcttcatgcctatgtgtgctccattcctcatttctacttggctcaagaaaacatttctgcagtcaggtgagacttttacaaaagaggagaaaatcaatgcctccttgaacatgatgagatgtgagaacttacaatgaaaaaggcaataatgatagaaattatttcttaggtacagcaatagttgataggatgtgagggtgttaccttggggtgaagtggagaaggtcccaggtgaattggctctcatggaaatttggaattacaaaataaacgtcctgggggttacccagaatacagatttaaaagtttgcctgtagagcaaaataaaacagtcagttgtagtcattaatccttgaggcccaacgcagccgatgggttggtgtttgggaaattctgagatgggagtgagatctgatcggatcctgggaagatgtatacccagttagaacgtgtagggttctgggtccctggcaagtctaggtgggcgggtgacagggaaagcatgggcatttttgtattgctgtcacatgctaacagaggtttgtaattatcttttggacccaaattatagagacattcacgagttttctagccctcacagtaacagagctaagaattcagatgtcaggaagtctgtgaatcttgatggattttctgagaaacctgactcaatggcatatataagagggaagtaagacttttaagaaaagaaaaagttatgcctcattcctcatgtggcttccaataagtatcttaggaacttatttcctttttaaaaaatattttttaaatttttaaaatttgattttaaatttcaaataaatttaaataaattttaaataaattttaaataaaattttacagagacgtggtctcactgtgttgcccaggctggattgcagtggctattcgcagttgtaatcatagcacactgcagcctcgaatttctgggcttgagcagtcctcccgtctcagcctcctgagtagctgagactacaggtgcacaccaccaagcctggctttatgtatttatttctgttcatgcggaatgattggttcagaactgttcctttcccttccatgatgtccttgacacagaaggttatgcctggctcccagtcaggcttcatacttttggtccatgtaagtgctacccgttgctgggggaggagtcatggtttatttggaaatgtcagttgcaatcatggttctgtcatttgactgcacagtatcagaggagcctgttaacctctctgtgccttagtttcttagcccatgaaagagatcattgcctgacccagggactacctcaagggcttttgatgaggacaagtgacagtaggaagatgcaagagcctttagtaccaaggttctcaacactgactacatgctggaatgactgtgaagcttttaaaaaatgttagtgcccactcttcccctgtacccccggacagttaaatcagaacctcagacagcaatatgccttgagatgccttgaaccatgcttgagaaggaaggacaaacacattattatcttggaagaattgcataaggcttatgacttaaaaaaaaaaattctttttggaaacacaagcatttctttaaggatgaccggatgttgccgtatgtatttatggcacaagcaggtgttgtctaagcagtttctctgtttgcttgtcatagcagcatttggaaactcaaacatgctttcatttacataaatagtttatgaagctttgacaacaaatgtaaacagacacgaaattataaatctgctaaatatgtattaagggtattaattattgaaagtccctttccccaaaactcaactcctatggcaattatgaactccattttaccaagaacatttaagtgcctcagcatctgtatgatatagtggagcaggtgctgacataggtaccagctgacatgatgtgtcactagctctgtgggatgattgccacatacatggaacacctgggagtgctggaaatgtactgtgatcgaagtgacaaagtgtgttttcattcacagtggaggctacatcaagcaaggggaggtccagccctcttgcaagtgtggtgagaggctctactagcaaagacatgggcaccggagtaggtcccgtgtagcatgcgggtgctgtagagaaaattcagtgacgtacatggctctggttctggacacaaaatctgtactggagaggaaatgactgctgaaataaggcgattgtatgaatatttaaaatgcctggaacactaaagtaaagtaatgatatttcaagtgtttttgtgctctttggttcttgttgtaggtattgactgtcctgggatatcactggtcatttaaattcaccatataattagccgggcatggtggcatgtggtggtggctgaggtgggaggatcgcttgaggctgaggtgtgaggctgcagtgaaccatgttcacaccactgtactctagcttgagcaacagagcaagaccctgtctcaaaagtaaataaataataaagtaaatataaatcca

SEQ ID NO: 246632 - DNA, 2799 bp, Artificial Sequence
  derived and/or modified sequence
attttgtccaggaacgcctacgtttgtggcaggtggagacagcttattaggcagcctgctctcctcttatgatggccttggtccgggatcgcagggctcattatgtcatgagcatagttattagatgggttcactgcttttcctcctccttgagggggacctttggcacacgctgggaggccatgaaagccaaggccaccgagctgcgggtctgctgcgcgcgtaggaagcgagaagctcgggaattcaagcccccgcaaatgcgcgggtccacgagacttaacatttcagatgatttaaagattggctttttcagcacagaccatgccactcaaactgattccagtgaaatactgtcagtaaaagaattgagttcatctacgcaaaagttagcacagatgatgaaatccctccaggtagattttgggttcctcaaacaattgcttcagttgaagtttgaggaccgactgaaagaggaatctttgagtctcttcaccattctgcatgacaggatcctagaaattgaaaagcattatcaacagaatgaggataagatgagaaaatccttcaatcagcagttagctgatgccatagctgttatcaaaggaatgtaccagccactgtgaaaccaaacattgagatactctggatgtgctgaaggtagcaaggtggaaagataagaagcagaggggtccttggtaatgtcatggagccatgaaagtaaccctggacttgccctgcctctggcctcttattcatgagataacaacccctcagtgtctaagccactgttagttggcttttcagttacttgcagctgaaaacatcccaggacagattgctctgctaacgatctctgtgactctgtgccaaactgtgtttccaaaggcatctgtgacactgtctcccacttacctgctcttgtgcaatgtttctctcccatcaagaggtggaatctgattcccctcccttgaatcagggctgcccttagtgacttgctgataaacacagaatgtggaggaagtgaagctgcgtgacttttaagttaacgtcaaaagaagtcttgcaagttcatccttattcactctgaatgtttcccctctacattgtccctccctgaattgagctaccatgctgacaaaagcccatgccatatggaagatctacatgtaggtactactgggtctccaggctcatctgagcccagcctttgagtcaccccagcccaggagtcaaaaatatgagtggagaagcgtccagatgactccagctgccagccatgtagactctttttatgtgaggtcacaggtcttacagaggagagataggccatccctgctgtgcttctactaattcccgactcattgaatttgttttttttttttctttgttttgctttttatttttgggtctttttttttttttttttttttttagagacagggatctcactgtctcccaggctggaatgtagggtgtgctcatagctcactgtagccttaaacttctggactcaagtgatcctctggcctcagcctcctgagtagctgggactacaggcatgtaccagcacacccagttaatttaaatatatatatatatatgacatgggatcttgctatgttatccaggctggtcttgaactcctgtcctcaagtaatcctcctgccttagcattccagagtgctaagattacaaccatgagccactgtgctggcctaattaatatttaatggaagaagacggaaggaagaaagagaaagagggaaggagggaaaatgagcattatctgtagcagttttatatatattgattttgtaaccaaaaatcttgctaaattcttgtgtttattttaataagttttctatagactctttggggctttctatgtaaacagttatgcaactgagaataaatattttttgtcacttcatttttcatccataaaccatgtaatcatttcagcagtggcctgtctggagcagctgctgcaaagatgccggctgcagcaggggagatatggccagggctgtacactctactaagctggcaggagccaggaacaagcaggagtggtgctcaccttctgagttggtgatgggggagctccacgctcctagaggcagctgcagctgcccagccatggctgcagacccaggcatccctgtgctcttgggggcctaggaagcccccctgctcccacaggctcggaagtgcctactcctgctgcctggcctctcctcactcctggcacccactctgattttgaagcaaagttgtggccaagcccaggcgctgttatgacccagccaggtgtgtgtgtgcttgggatggtgctgacacaccagccctctgctgccttggccccctccagagtttgggtgccaacaagcatgggagggaggccaagggggcactgagggtggcacagcacaggcctgcaggtgtcccttggcatgaacagcctgggcaccatgaacagcagcaggaagcgacaggctcccgagtggaaagggatgtgtcgctggtgaagctccaccttcaacccaggggtggcctgaagcctgggggccaggctgccagttccacagactggagtgagaacttatggtgcttttttcaggcccacctatggctgcccattgaccaatcagcatgagcttcctcccctctgaagcccataaaaaccctagactcagccagactctggcagaagtggggatgacctgcctgcagagaggagttattcgctgtggggtcttctctcagctaagagctgaacagatatcaggatgacct

SEQ ID NO: 246633 - DNA, 558 bp, Artificial Sequence
  derived and/or modified sequence
atgatggccctggtgagagacagaagagcccactacgtgatgagcatcgtgatcagatgggtgcactgcttcagcagcagcctgagaggcaccttcggcaccagatgggaggccatgaaggccaaggccaccgagctgagagtgtgctgcgccagaagaaagagagaggccagagagttcaagcccccccagatgagaggcagcaccagactgaacatcagcgacgacctgaagatcggcttcttcagcaccgaccacgccacccagaccgacagcagcgagatcctgagcgtgaaggagctgagcagcagcacccagaagctggcccagatgatgaagagcctgcaggtggacttcggcttcctgaagcagctgctgcagctgaagttcgaggacagactgaaggaggagagcctgagcctgttcaccatcctgcacgacagaatcctggagatcgagaagcactaccagcagaacgaggacaagatgagaaagagcttcaaccagcagctggccgacgccatcgccgtgatcaagggcatgtaccagcccctgtag

SEQ ID NO: 246634 - DNA, 558 bp, Artificial Sequence
  derived and/or modified sequence
atgatggctcttgtgcgagatcgccgggctcactatgttatgtctattgttatccggtgggtgcattgcttctcctccagtctcaggggaaccttcggcacaagatgggaggctatgaaagcaaaggccactgagctgcgtgtttgctgcgcccggcgcaagagggaggcacgagaatttaaaccccctcagatgcggggcagtaccaggttgaacatctccgatgatctgaaaattggcttcttttctacggaccacgccactcagacggactcaagcgaaatactgtctgttaaggagctctcttcctctacacagaaattagctcagatgatgaagagtctacaggtagattttgggtttctaaaacaactactgcagctcaagtttgaggatcggttgaaggaggagtccctgtctttgttcactattctgcacgacaggatactggagattgagaagcattatcagcagaatgaggataagatgagaaaatcatttaatcagcagttggctgatgcgatagcggtcatcaagggcatgtaccagccactgtag

SEQ ID NO: 246635 - DNA, 558 bp, Artificial Sequence
  derived and/or modified sequence
atgatggccctggtgcgggaccggcgggcccactacgtgatgagcatcgtcatccgctgggtgcactgcttcagcagcagcctgcggggcaccttcggcacccgctgggaggccatgaaggccaaggccacagagctgcgggtgtgctgtgcccggaggaagcgggaggcccgggagttcaagccaccccagatgaggggcagcacccggctgaacatcagtgatgacctgaagattggcttcttcagcacagaccacgccacccagacagacagcagcgagatcctgtctgtgaaggagctgagcagcagcacccagaagctggcccagatgatgaagagcctgcaggtggactttggcttcctgaagcagctgctgcagctgaagtttgaagatcggctgaaggaggagagcctgagcctcttcaccatcctgcatgaccgcatcctggagattgagaagcactaccagcagaatgaagacaagatgaggaagagcttcaaccagcagctggctgatgccatcgccgtcatcaagggcatgtaccagcccctgtag

SEQ ID NO: 246636 - DNA, 558 bp, Artificial Sequence
  derived and/or modified sequence
atgatggccctggtgcgggaccggcgggcccactacgtgatgagcatcgttattagatgggtgcactgcttttccagttccctgcgaggcacctttggcacacggtgggaagccatgaaagccaaagccaccgagctcagggtgtgctgcgcccgcagaaagcgggaagcccgggagtttaagcctccacagatgagaggtagcactagactgaatatttctgatgacctgaaaatcggatttttttccacagaccacgcgacccagacggacagcagcgagatcctctctgtcaaggagttgtcaagttcaacacagaaactggcacagatgatgaaatcgctgcaggttgatttcggatttttgaagcagctcctgcaactcaagtttgaagatcgccttaaagaggagtctctgagtctgttcaccattctccatgatcggatcttggagatagagaagcattaccaacagaacgaagataagatgaggaaatcgttcaaccagcagttagcagacgcaattgctgttataaagggcatgtaccagcctttgtag

SEQ ID NO: 246637 - DNA, 558 bp, Artificial Sequence
  derived and/or modified sequence
atgatggcccttgtccgggatcggagagcccactatgtgatgagcatagtgatccgctgggtgcactgcttctcttcttcactgcgcggtacttttggaacccgatgggaagccatgaaggctaaagctaccgagctgagggtttgctgcgccaggaggaagcgtgaggccagagaattcaaacccccacagatgcggggtagcacacggctgaacatttccgatgacctaaagatcggatttttttccacggaccatgcaacccagacagattctagcgaaatcctctctgttaaggaactttctagctcaactcagaagttggcccagatgatgaagtcacttcaagtggattttgggtttttaaaacagctgctccaacttaaattcgaggatagactcaaagaagaatctcttagcttgttcactatcttgcacgaccggatcctcgagatagaaaaacactaccaacaaaacgaggacaaaatgcggaagtcctttaaccaacaactggccgatgccattgccgtgattaaagggatgtatcaaccgctatag

SEQ ID NO: 246638 - protein, 401 aa, Artificial Sequence
  derived and/or modified sequence
MAHVSSETQDVSPKDELTASEASTRSPLCEHTFPGDSDLRSMIEEHAFQVLSQGSLLESPSYTVCVSEPDKDDDFLSLNFPRKLWKIVESDQFKSISWDENGTCIVINEELFKKEILETKAPYRIFQTDAIKSFVRQLNLYGFSKIQQNFQRSAFLATFLSEEKESSVLSKLKFYYNPNFKRGYPQLLVRVKRRIGVKNASPISTLFNEDFNKKHFRAGANMENHNSALAAEASEESLFSASKNLNMPLTRESSVRQIIANSSVPIRSGFPPPSPSTSVGPSEQIATDQHAILNQLTTIHMHSHSTYMQARGHIVNFITTTTSQYHIISPLQNGYFGLTVEPSAVPTRYPLVSVNEAPYRNMLPAGNPWLQMPTIADRSAAPHSRLALQPSPLDKYHPNYN

SEQ ID NO: 246639 - protein, 214 aa, Artificial Sequence
  derived and/or modified sequence
MAHVSSETQDVSPKDELTASEASTRSPLCEHTFPGDSDLRSMIEEHAFQVLSQGSLLESPSYTVCVSEPDKDDDFLSLNFPRKLWKIVESDQFKSISWDENGTCIVINEELFKKEILETKAPYRIFQTDAIKSFVRQLNLYGFSKIQQNFQRSAFLATFLSEEKESSVLSKLHVFVFHHSLFGATFGEHHFQPCPLPSGNKAPISTWSGDSWLL

SEQ ID NO: 246640 - DNA, 1448 bp, Artificial Sequence
  derived and/or modified sequence
agataagtgtacatgcttaggccttctgaagcagcatttgaagctgcagtcctgaaaaccatgcaggccggaagagtagataaagaaatatttatttgagatggcacatgtttcttcagaaactcaagatgtttcccccaaagatgaattaactgcttcagaagcctccactaggtctccattgtgtgaacacaccttccctggggactcagacttacggtcaatgattgaagaacatgcttttcaggttttgtcacaaggatccttgttagaaagtccaagttacacagtttgtgtctctgagccagataaagatgatgattttctttctctgaactttcccaggaaactttggaaaatagtggaaagtgaccaattcaagtctatttcatgggatgagaatggaacttgcatagtgattaatgaagaactcttcaagaaagaaattttggaaacaaaggctccttacagaatatttcaaactgatgctatcaaaagttttgttcgacagctcaacctttatggatttagtaaaattcaacagaattttcaaagatctgcctttctagccacctttctgtcagaagagaaagaatcgtctgtcttaagcaagttaaagttctattataatccaaatttcaagcgtggctatccccaacttttagtaagagtgaagagaagaattggtgttaaaaatgcttcacctatatctactttattcaacgaagatttcaacaagaagcattttagagcaggggctaacatggagaatcataattctgccttagctgctgaagctagtgaagaaagtttattttcagcctctaaaaatttaaatatgcctctaacaagggaatcttctgtcagacagataattgcaaattcatctgtccccattagaagtggtttccctcctccttcaccttcaacctcagttggaccatcagaacaaattgcaacagatcaacatgctattttaaatcagttgaccactattcatatgcactctcatagtacctacatgcaagcaaggggccacattgtgaattttattacaaccacaacttctcaataccacatcatatctcccttacaaaatggttattttgggctgacagtggaaccatctgctgttcccacacgatatcctctggtatcagtcaatgaggctccatatcgtaacatgctaccagcaggcaacccgtggttgcaaatgcctacgatcgctgatagatcagctgcccctcattccaggctagctcttcaaccatcaccactggacaaatatcaccctaattacaactgatctgccattaaaagaggaccagattatgaatgacaacagagactaacatttacattgacaaaaaaccctaaaaatttctgcaattatcttattgaacaataaaattgcatgtttacttctaaaaaaaaaaaaaaaaaaaaaa

SEQ ID NO: 246641 - DNA, 1381 bp, Artificial Sequence
  derived and/or modified sequence
tactgaagcagcatttgaagctgcagtcttgaaacacatgcaggctggaaaagtcgctaaagaattacttatttgagatggcacatgtttctgcagaaactcaagatgtttctcctaaagatgaatcaactggttcaaaagcctcctctgggtctccattgtgtgaacacataatccctggggattcagacttaaggtcaatgactgaatcaatgattttcaggttttgccacaaggatccttgataaaaaggccacattatactttatgtctctgagccagataaagataatgattttccttctctgacctttcccagtaaactttggaaaatagctgaaagtgaccaattcaagtctaattcataggataagaatgaaacttgcatagtgactaatgaagaactcttcaagaaagaaaatttggaaataaaggctccttacagaatatttcaaactgacagtatgaaaatcttaatttgacagctcaacctttatggatttagtaaaattcaacagaattttcacagatctgcttttctagccaactttctggcagaagaaaaagaaatttctgttttaagcaagttaaagttgtattatcatccgaatttcaaacgtggctgtccccaacttttaataagaacgaaaagaagaattaagattaaaaacacttctcttgtatctacttcactgaatatttcaagaaacactttagagcaggggctaacacagataaacataattctgtcttagctgctgaaactagtgaagaaagttcattttcaacatctacaaatttaaatatgactctaacaaggaaatcttctgtcagccagggcattgctggttcacctgacccaattagaagtggtttccctcctcttccatttcaacctcagttggacaatcagaacaaattacaacaaatcaacatgctattttaaatcaattgacaaatattcatatgcactctcatagcaccgacatgtaagcaaatggccacgttgtgaattttgttacaaccacagcttctcaatactacatcatatctccctcctttggggctgatagtgaaaccacctactttttcccaccagatatcctgaggtattagccaatgaggctcctcattctaacctgctaccagcaggcaacctgtggttgtaaatgactgcgacagctgatacatcagttgcctttcgttacaggccagctcttcaaccatctttactggaaaaatatcaccctagttacaactgatcttccaccaaaagagtaccagattatgcatgacaacagagactgaaatttatgttgacaagaacattaaaaattcctgcaataatcttactgaacaataaaattacatgttgaccttt

SEQ ID NO: 246642 - DNA, 1206 bp, Artificial Sequence
  derived and/or modified sequence
atggctcacgtgtcctccgaaactcaggatgttagccccaaggatgagctcacggccagtgaagcttccacaaggtctccactgtgcgaacatacgttccctggagattcagaccttcgctccatgatcgaggagcacgccttccaagtcctgtctcagggaagccttctcgaaagcccgtcgtacactgtttgcgttagtgaaccagacaaagacgatgacttcctctcgctgaacttcccaaggaagctgtggaaaatagtcgagtccgaccagttcaaatctatatcatgggacgagaacgggacttgtatcgttatcaacgaagagctctttaaaaaggagatcttggagaccaaagctccctaccgtatcttccagactgatgcaatcaaaagcttcgtcagacagctgaacctgtatgggttctccaagattcagcaaaactttcagcgctctgcttttctggctaccttcttgtccgaggagaaagaaagctcagtgctttccaaactcaagttttattacaatccaaatttcaagcgtggatacccgcagctgctggtgagagtcaagcgacgcattggggtcaaaaatgccagccctatatcaacactgttcaatgaagattttaacaagaagcattttagagctggggcgaatatggaaaatcacaactccgcattggccgctgaggcttctgaagagtccttgttttcagcctccaagaacctaaatatgcctcttactcgtgagagcagcgtcagacagatcattgccaactcctccgtgcctatccgaagcggttttccccccccctctcccagcacgtctgtcggaccgtctgagcagatagccacagatcagcatgccattctcaaccagctaacaacaatccacatgcatagccattctacttacatgcaggctaggggtcacatcgtcaacttcatcaccaccacaacctcacagtatcacattatctcccccctacagaacggatattttgggctgaccgtggagccctctgccgttcccactcggtaccccttggtaagcgtgaatgaggctccctaccgaaacatgctgcctgccggaaatccctggttgcagatgccaactattgccgatcggtctgccgccccccattccaggctggccctgcagcctagtccactcgacaagtatcatcccaactacaattag

SEQ ID NO: 246643 - DNA, 1206 bp, Artificial Sequence
  derived and/or modified sequence
atggcgcatgtgtccagtgagactcaggatgtgtctcctaaggacgaactaacagcttctgaagccagcactcggtcacccctctgtgaacacacattccctggcgacagcgacctgaggagcatgattgaggagcacgcctttcaagtcctctcccaggggagcctcctagagtcaccatcgtacactgtgtgtgtcagcgaacctgacaaggacgatgatttcctttcgctgaactttccccgcaagctgtggaagattgtggaaagcgaccaattcaagtcaataagctgggacgagaatggtacttgtattgtcataaacgaagagctgttcaagaaggagattctcgaaactaaagcgccttatcggattttccagacagacgcaattaagtcttttgtacgccaactgaacttgtacggcttctcaaagattcagcagaattttcagagatcagccttcctggctaccttcttatccgaggagaaggaaagctcagtgttgtccaagttgaaattctactataaccccaactttaagcgtgggtacccccagctgctcgttcgtgtaaagcgtcgtataggtgttaaaaatgcctctcccatatcaactctgttcaacgaggactttaacaagaaacacttccgtgcaggggcaaacatggaaaatcataatagcgcactcgcggcagaagcatccgaagagtcgctcttctctgcttcaaaaaacttaaatatgccactgaccagagaaagctcagtgcgccagatcattgccaacagcagcgtgcctatacgtagcggtttcccaccaccaagtccctctacctcagtggggcccagcgagcagatcgccaccgatcagcatgctatattaaatcagttgactactattcatatgcacagtcacagcacttacatgcaagccaggggtcatattgtcaacttcataaccacaacaaccagccagtaccacatcatttcacctctccaaaacggctactttggcctcaccgtcgaaccgtcggcagtccctacccggtaccccctggtttcggtgaacgaggccccatatagaaatatgctcccagctggtaacccttggctacagatgcctaccatagctgatcgatcagccgctccacactctaggttggctctgcagcctagcccgctcgacaaataccacccaaactacaattag

SEQ ID NO: 246644 - DNA, 1206 bp, Artificial Sequence
  derived and/or modified sequence
atggcccacgtgagcagcgagacccaggatgtgagccccaaggatgagctgacagccagcgaggccagcaccaggagccccctgtgtgagcacaccttccctggggacagcgacctgcgctccatgattgaggagcacgccttccaggtgctgagccagggcagcctgctggagagccccagctacacagtgtgtgtgtctgagccagacaaggatgatgacttcctgagcctgaacttccccaggaagctgtggaagatcgtggagagtgaccagttcaagagcatctcctgggatgaaaatggcacctgcatcgtcatcaatgaggagctgttcaagaaggagatcctggagaccaaggccccctaccgcatcttccagacagatgccatcaagagctttgtgcggcagctgaacctgtatggcttcagcaagatccagcagaacttccagaggtctgccttcctggccaccttcctgtctgaggagaaggagagctctgtgctgagcaagctgaagttctactacaaccccaacttcaagaggggctacccccagctgctggtgcgggtgaagagaagaattggagtgaagaatgccagccccatcagcaccctcttcaatgaagacttcaacaagaagcacttccgggccggggccaacatggagaaccacaacagcgccctggccgctgaggccagcgaggagagcctcttcagcgccagcaagaacctgaacatgcccctgacccgggagagctctgtgcggcagatcatcgccaacagctctgtgcccatccgcagcggcttccccccacccagccccagcacctctgtgggccccagcgagcagatcgccacagaccagcacgccatcctgaaccagctgaccaccatccacatgcacagccacagcacctacatgcaggcccggggccacatcgtgaacttcatcaccaccaccaccagccagtaccacatcatcagccccctgcagaatggctacttcggcctgactgtggagcccagcgctgtgcccacccgctaccccctggtgtctgtgaatgaggccccctacagaaacatgctgcctgctggcaacccctggctgcagatgcccaccatcgctgacagatctgctgccccccacagccggctggccctgcagcccagccccctggacaagtaccaccccaactacaactag

SEQ ID NO: 246645 - DNA, 1206 bp, Artificial Sequence
  derived and/or modified sequence
atggcccacgtgagcagcgagacccaggacgtgagccccaaggacgagctcacagccagtgaggcttctacccggagccccctttgtgaacacacatttcctggtgatagcgatctgcgcagcatgatcgaggagcatgcttttcaggtgctctcacaggggtccctcctcgaatctccaagctatacggtttgtgtttcagaacccgacaaagatgacgatttcctgtccctgaacttcccacgcaagctatggaagatcgttgaatcagatcaattcaagagtatctcctgggacgagaatgggacatgcatcgtgattaacgaagagctgttcaagaaggaaattctggagaccaaggccccctacaggatctttcaaacagatgccatcaagagcttcgttcggcaactaaacctctacgggttttcaaagatccagcagaacttccagcggtctgcatttcttgctacttttctctcggaagagaaagaaagctctgtcctctctaagctcaagttctactacaatcccaattttaagcgaggttaccctcaattgctggttcgggtgaagcgcagaattggggtcaagaatgcaagccccatttccactctgtttaatgaggacttcaataaaaaacatttcagggctggggccaacatggagaaccataatagcgcactcgccgcagaggccagtgaagagtctttgtttagcgcaagtaaaaacctgaatatgcctcttacaagagagtcttcagtcaggcaaataatcgccaattccagtgtgccgatacgttctgggttccccccccctagcccttcgacatccgtggggcccagcgagcaaatcgcaacagaccaacacgcaatcctgaaccagctgaccacaattcacatgcacagtcacagcacatatatgcaggccagaggacacattgtgaactttatcacaactaccacgtcacagtatcacatcatctcccccctacaaaacggctactttgggctgactgtggagccatccgctgtgccaacaagataccccctggtgtcagtgaatgaagccccttaccgcaatatgttacccgccgggaacccatggctccagatgcctaccattgcggacagaagtgcagccccacattctcgcttggctctgcagccctcgcccttggacaaataccaccccaactacaattag

SEQ ID NO: 246646 - DNA, 1206 bp, Artificial Sequence
  derived and/or modified sequence
atggcccacgtgagcagcgagacccaggacgtgagccccaaggacgagctgaccgctagtgaagccagcacacgatctcctctttgcgagcacactttccctggcgattctgacctgcgctccatgatcgaggaacatgcattccaggtccttagccagggaagcctgctggaaagcccgagttacacagtgtgtgtgtccgaacccgacaaggatgacgactttcttagcctgaacttccctagaaagctatggaaaatcgtggaatcagaccagttcaagtcgatctcatgggatgagaatggcacatgtatcgtaatcaacgaggagctgtttaagaaggaaattctggagaccaaggcgccgtataggatttttcaaacagatgcgattaagagctttgtccgtcaactgaatctctacggcttttccaaaattcaacagaacttccagcgttcagcgtttttagcgaccttcctgtctgaggagaaagaatcctcggtgttgagtaaactgaagttctactataacccgaactttaaacggggataccctcaactgctggtcagagtcaaacgacgcatcggtgtcaagaacgcatcaccaataagtactctgttcaacgaggatttcaacaaaaagcactttagggcaggtgcaaatatggaaaatcataattcagcactggcggccgaagccagtgaggagtcgctgttcagcgccagcaagaacctgaatatgcctcttaccagagaatctagcgtacgccagataattgccaacagtagcgtgccaattcggagcgggtttcccccgccaagtccctcaacctctgtgggccccagcgaacaaatcgcaactgaccaacacgctattctgaaccagcttaccaccatccacatgcactcacactccacgtacatgcaggctaggggccacatcgtgaactttattactaccaccacatctcaatatcatattatttctccacttcagaatggatactttggattaacggttgagccaagtgccgtccccactcgttaccccctcgtgtctgtgaatgaggccccataccgaaacatgcttcccgcgggcaacccgtggctccagatgcccaccattgccgacaggtccgccgccccccatagcagactggcattgcagcccagtcccctcgacaagtaccaccctaactataattag

SEQ ID NO: 246647 - DNA, 1206 bp, Artificial Sequence
  derived and/or modified sequence
atggcccatgtttccagcgaaacccaagatgtaagtccaaaggatgaattaactgcaagtgaggcctctaccaggtcccccttgtgtgagcatacttttccaggcgactctgacctccgatcaatgattgaggaacatgccttccaggtgctctctcagggtagcctgctagaatcaccgagttacacagtatgtgtgtcagaacctgataaagatgatgactttctctcactgaacttccctcgcaagttgtggaagatagtggagtcagatcaattcaagtccatctcgtgggatgagaatggtacatgcattgtcatcaacgaggagctgttcaaaaaggaaatcctggaaaccaaagccccttatcggatttttcagacagacgccattaaaagctttgtcaggcagcttaacttatatggcttttccaagatacagcagaacttccaacgcagtgcttttctggctactttcctgtctgaggaaaaggagtccagcgtcctgtctaagctgaaattttactacaatcctaactttaaaagagggtacccacagttgcttgttcgagtcaagaggaggataggggtgaagaatgcttcccccatctctaccctgttcaacgaggattttaacaaaaagcacttcagggcgggtgctaatatggaaaaccacaatagcgcattggccgctgaagcaagcgaagagtcgctgttcagcgcatcaaaaaacctcaacatgccccttacacgcgaatcttccgttaggcagatcatagcaaatagtagcgtcccgattcggtctggatttccgccaccatcccccagtacaagcgttggaccttctgagcagatcgctacagaccagcacgccattctgaatcagctcaccacaatacacatgcattctcattcaacgtacatgcaggcccgagggcatatcgtaaatttcatcactaccaccacttcccagtaccatatcataagcccactccagaacggctacttcggcctcaccgtcgaacccagtgccgtgccaacacggtacccactggtcagcgtgaatgaagctccataccgaaacatgctgccggctgggaacccctggctacaaatgccgacaatagccgatcggagcgccgctcctcacagcaggcttgcactgcagcctagcccacttgataagtaccacccaaactataattag

SEQ ID NO: 246648 - DNA, 1206 bp, Artificial Sequence
  derived and/or modified sequence
atggctcacgtaagctcagaaacgcaggatgtatcccctaaagatgaactgacagcttccgaggcttcaacgagatctcctctttgcgaacatactttccctggagacagtgacttgaggagtatgatcgaggagcacgctttccaggtcctgagccagggaagtttactggagagccctagttacaccgtttgtgtgagcgaaccagacaaggatgatgactttctgtccctgaatttccccaggaagctttggaaaattgtggaaagtgatcagttcaagtcaatctcctgggatgagaacggaacctgtatcgtgatcaacgaagagctctttaagaaggaaattctagagactaaggccccttatcggatattccagaccgatgccatcaaatccttcgtgcgtcagctcaacctgtacgggttttccaaaatccagcagaattttcaaagaagtgccttcttagccaccttcctgtccgaggagaaagaatcttccgtcttaagtaagttgaagttttactacaacccaaatttcaagaggggatatcctcaactgctggtaagggtgaagagacggattggagtaaagaacgccagcccaattagcacactgttcaacgaggatttcaacaagaagcacttcagagcgggagccaacatggagaaccataatagcgctctggcagctgaagcgtctgaggagtcactgtttagtgccagtaagaacttgaatatgccgcttacaagggagtctagtgttaggcagatcattgccaattcctcagtgccaatccgctccgggttcccaccaccatcaccaagcacaagtgtcgggccttccgaacagattgcaacagaccagcacgccattttgaaccagcttacaacgatccacatgcacagtcatagtacttatatgcaagcgcgtggccacattgttaattttatcactaccacaacgagccagtaccacattatttcaccactgcagaatggctatttcggtctgacagtggaaccatcggcggtaccaacacggtaccctctggtgagcgttaatgaagccccttacagaaacatgctaccggcaggcaacccatggcttcaaatgcctacaatcgcggataggagcgccgcaccacattctcgtctagctctccaaccgtctcccctggataaataccaccccaactacaactag

SEQ ID NO: 246649 - DNA, 1444 bp, Artificial Sequence
  derived and/or modified sequence
aaccattgtgatggtctagataagtgtacatgcttaggccttctgaagcagcatttgaagctgcagtcctgaaaaccatgcaggccggaagagtagataaagaaatatttatttgagatggcacatgtttcttcagaaactcaagatgtttcccccaaagatgaattaactgcttcagaagcctccactaggtctccattgtgtgaacacaccttccctggggactcagacttacggtcaatgattgaagaacatgcttttcaggttttgtcacaaggatccttgttagaaagtccaagttacacagtttgtgtctctgagccagataaagatgatgattttctttctctgaactttcccaggaaactttggaaaatagtggaaagtgaccaattcaagtctatttcatgggatgagaatggaacttgcatagtgattaatgaagaactcttcaagaaagaaattttggaaacaaaggctccttacagaatatttcaaactgatgctatcaaaagttttgttcgacagctcaacctttatggatttagtaaaattcaacagaattttcaaagatctgcctttctagccacctttctgtcagaagagaaagaatcgtctgtcttaagcaagttaaagttctattataatccaaatttcaagcgtggctatccccaacttttagtaagagtgaagagaagaattggtgttaaaaatgcttcacctatatctactttattcaacgaagatttcaacaagaagcattttagagcaggggctaacatggagaatcataattctgccttagctgctgaagctagtgaagaaagtttattttcagcctctaaaaatttaaatatgcctctaacaagggaatcttctgtcagacagataattgcaaattcatctgtccccattagaagtggtttccctcctccttcaccttcaacctcagttggaccatcagaacaaattgcaacagatcaacatgctattttaaatcagttgaccactattcatatgcactctcatagtacctacatgcaagcaaggggccacattgtgaattttattacaaccacaacttctcaataccacatcatatctcccttacaaaatggttattttgggctgacagtggaaccatctgctgttcccacacgatatcctctggtatcagtcaatgaggctccatatcgtaacatgctaccagcaggcaacccgtggttgcaaatgcctacgatcgctgatagatcagctgcccctcattccaggctagctcttcaaccatcaccactggacaaatatcaccctaattacaactgatctgccattaaaagaggaccagattatgaatgacaacagagactaacatttacattgacaaaaaaccctaaaaatttctgcaattatcttattgaacaataaaattgcatgtttacttcta

SEQ ID NO: 246650 - DNA, 1206 bp, Artificial Sequence
  derived and/or modified sequence
atggcccacgtgagcagcgagacccaggacgtgagccccaaggacgagctgaccgccagcgaggccagcaccagaagccccctgtgcgagcacaccttccccggcgacagcgacctgagaagcatgatcgaggagcacgccttccaggtgctgagccagggcagcctgctggagagccccagctacaccgtgtgcgtgagcgagcccgacaaggacgacgacttcctgagcctgaacttccccagaaagctgtggaagatcgtggagagcgaccagttcaagagcatcagctgggacgagaacggcacctgcatcgtgatcaacgaggagctgttcaagaaggagatcctggagaccaaggccccctacagaatcttccagaccgacgccatcaagagcttcgtgagacagctgaacctgtacggcttcagcaagatccagcagaacttccagagaagcgccttcctggccaccttcctgagcgaggagaaggagagcagcgtgctgagcaagctgaagttctactacaaccccaacttcaagagaggctacccccagctgctggtgagagtgaagagaagaatcggcgtgaagaacgccagccccatcagcaccctgttcaacgaggacttcaacaagaagcacttcagagccggcgccaacatggagaaccacaacagcgccctggccgccgaggccagcgaggagagcctgttcagcgccagcaagaacctgaacatgcccctgaccagagagagcagcgtgagacagatcatcgccaacagcagcgtgcccatcagaagcggcttccccccccccagccccagcaccagcgtgggccccagcgagcagatcgccaccgaccagcacgccatcctgaaccagctgaccaccatccacatgcacagccacagcacctacatgcaggccagaggccacatcgtgaacttcatcaccaccaccaccagccagtaccacatcatcagccccctgcagaacggctacttcggcctgaccgtggagcccagcgccgtgcccaccagataccccctggtgagcgtgaacgaggccccctacagaaacatgctgcccgccggcaacccctggctgcagatgcccaccatcgccgacagaagcgccgccccccacagcagactggccctgcagcccagccccctggacaagtaccaccccaactacaactag

SEQ ID NO: 246651 - protein, 992 aa, Artificial Sequence
  derived and/or modified sequence
MARGGAACKSDARLLLGRDALRPAPALLAPAVLLGAALGLGLGLWLGCRAGRQRTRHQKDDTQNLLKNLESNAQTPSETGSPSRRRKREVQMSKDKEAVDECEPPSNSNITAFALKAKVIYPINQKFRPLADGSSNPSLHENLKQAVLPHQPVEASPSSSLGSLSQGEKDDCSSSSSVHSATSDDRFLSRTFLRVNAFPEVLACESVDVDLCIYSLHLKDLLHLDTALRQEKHMMFIQIFKMCLLDLLPKKKSDDELYQKILSKQEKDLEELEKGLQVKLSNTEMSGAGDSEYITLADVEKKEREYSEQLIDNMEAFWKQMANIQHFLVDQFKCSSSKARQLMMTLTERMIAAEGLLCDSQELQALDALERTMGRAHMAKVIEFLKLQVQEETRCRLAAISHGLELLAGEGKLSGRQKEELLTQQHKAFWQEAERFSREFVQRGKDLVTASLAHQVEGTAKLTLAQEEEQRSFLAEAQPTADPEKFLEAFHEVLERQRLMQCDLEEEENVRATEAVVALCQELYFSTVDTFQKFVDALFLQTLPGMTGLPPEECDYLRQEVQENAAWQLGKSNRFRRQQWKLFQELLEQDQQVWMEECALSSVLQTHLREDHEGTIRGVLGRLGGLTEESTRCVLQGHDLLLRSALRRLALRGNALATLTQMRLSGKKHLLQELREQRALEQGSSQCLDEHQWQLLRALEARVLEEASRLEEEAQQTRLQLQQRLLAEAQEVGQLLQQHMECAIGQALLVHARNAATKSRAKDRDDFKRTLMEAAVESVYVTSAGVSRLVQAYYQQIGRIMEDHEERKLQHLKTLQGERMENYKLRKKQELSNPSSGSRTAGGAHETSQAVHQRMLSQQKRFLAQFPVHQQMRLHAQQQQAGVMDLLEAQLETQLQEAEQNFISELAALARVPLAESKLLPAKRGLLEKPLRTKRKKPLPQERGDLGVPNNEDLASGDQTSGSLSSKRLSQQESEAGDSGNSKKMLKRRSNL

SEQ ID NO: 246652 - DNA, 2979 bp, Artificial Sequence
  derived and/or modified sequence
atggcacgggggggcgcagcatgtaaatcagacgctcgtttactgctcgggagggatgccctgcggcccgcgccagctctgctggctccagctgtcctgctgggcgccgctctgggcttgggcctggggctatggctagggtgtagagccggtagacagcgcacgcgccaccagaaagatgatacgcagaatttactcaagaacttagaatcgaatgcccagaccccaagcgagacgggatcaccatcacgtcggaggaaacgcgaagtccagatgtctaaggacaaggaggctgtagacgaatgcgaaccacctagtaactccaacataacagcgttcgctctgaaagcaaaggtgatctaccctattaatcaaaaatttcgtccgttagccgacggaagttcgaatccatcccttcacgagaatttaaagcaagcagtgcttccacatcagcccgtggaggcttcgccttcatcctctcttgggtcgctgtcacaaggcgaaaaggatgattgcagctcttcctccagtgttcactctgctacgtcagatgatcgcttcctcagccgcactttcttgcgcgtgaacgcattcccagaagtcctcgcatgcgagtctgtagacgtagatctttgtatttacagcctccacctcaaggatctgctgcacctcgacaccgccctgagacaggaaaagcatatgatgttcatccagatctttaagatgtgtctcctcgatctgctgccaaagaaaaagtcagatgatgagctctatcagaaaatcttgagcaagcaggaaaaagacttggaagaactcgaaaaggggcttcaggtgaagctttccaacacagaaatgagcggcgccggcgactctgaatacatcaccttggctgatgtagaaaagaaagaaagggagtactcagaacaactcattgacaacatggaggcattctggaaacagatggctaacattcagcacttcctggtggatcaattcaaatgtagctcttccaaagctaggcagctgatgatgacccttactgaaaggatgatagcagccgaaggcctcttgtgcgactcacaggaactgcaagccctcgacgccctggagaggaccatgggacgagctcacatggccaaggtgatcgagtttttgaagttgcaagtgcaagaagagaccaggtgccgtttagccgcaatcagtcacggtttggagctcctcgctggtgaaggaaaactaagcggtagacaaaaagaagagctgctgacccagcagcataaggccttttggcaggaggctgaacgtttctcacgtgaattcgtgcaaagagggaaagatctggtcacagcctctctggcccaccaggttgaaggaactgctaagctgacactggcacaggaagaggagcagcggagctttctggctgaagcacaacccacagccgacccggagaaattcctggaggcttttcatgaggtgctggaaagacaacgtctgatgcagtgtgatctggaagaggaggaaaacgtgcgtgcgacagaagctgtggtggctctgtgccaagaactctatttttcaacagtggacacttttcagaaatttgtagacgccttatttctgcagacgctccccggcatgacgggccttccccccgaggaatgcgactatcttcgccaggaagtccaagaaaatgccgcctggcaactcgggaagtcaaataggtttcggaggcaacagtggaagctgtttcaggagctgctcgaacaggaccagcaagtttggatggaggagtgtgcactgagcagcgtactgcaaacgcatctgagagaagaccacgaagggacgataaggggagtgttggggcggctgggcgggctcactgaggaatctacacggtgtgtgctgcagggccacgacctgctgttgcgcagcgctctccgcaggctggccttacgcggcaacgcactggccactctaactcaaatgaggctgtctggtaagaagcacctgttgcaggaattacgagagcagagggccttagaacagggatcctcacagtgcctggacgaacaccagtggcagctcctgagggcactggaggctagagttctcgaggaagccagccgacttgaggaggaggctcagcagactcgcttgcagttgcagcaacgcctgctggcggaggcacaagaggttggccagctcctccaacagcacatggagtgcgctatcgggcaggccctgttggtgcacgccagaaacgcagccaccaaatcccgggccaaggaccgcgatgacttcaaaaggactttgatggaagctgctgtcgagtcagtctacgtcacctcagccggggtatcaaggctggtgcaggcctattaccagcagatagggaggattatggaagaccatgaagagcgaaagctgcaacacctgaaaacgttacagggagagcggatggagaactacaaactccggaagaagcaggagctttctaatccgtcctcaggatcccggacagcaggtggcgcacacgaaacctcccaggcggtgcatcaacgcatgctttcacagcagaaacgattcttagcacagtttcctgttcaccagcaaatgcggttacatgcgcagcagcagcaggccggagtcatggacctcctagaggcccagttagagacgcagcttcaagaggccgaacaaaacttcatctcagaactggccgctctggcgagggtgcccctggcggaatcaaaattactgcctgccaagcgaggactgctcgaaaaaccactccgcactaagcgaaaaaagccgcttccacaggaaagaggggatctcggcgtcccgaacaatgaggacctggccagcggggaccagacctccgggtccctttcctcaaagcgcctctcacagcaggagagcgaggctggtgattccggaaactctaagaaaatgctgaagagacggtcaaatttatag

SEQ ID NO: 246653 - DNA, 2979 bp, Artificial Sequence
  derived and/or modified sequence
atggccagaggaggcgccgcttgcaagagtgatgcgcgtctgctgctggggcgcgacgccttgagacccgctccagccttgctagcccctgcagttctgttaggcgctgcactcggactcggactcggcctttggctcggctgtcgcgcagggcgtcagcgcacccgccatcagaaagatgatactcagaacttgctgaaaaatctggaatcaaatgcccagactccatccgaaactggctctccctccaggcgacggaaacgagaggttcaaatgtcgaaagataaggaggccgtagatgagtgcgagcccccctccaactctaacataaccgcattcgccctgaaagccaaggtgatctatccgattaaccagaagtttcgcccattggctgacggcagctctaacccgtcactacatgaaaacctgaagcaggcagtcctccctcatcagcctgtggaagcatctccatcttccagcttggggagcctctcacaaggtgaaaaggacgattgtagttcctcttcaagcgtgcactccgccaccagcgatgaccggttcctttcacgaacattcctgagggtcaacgccttcccagaagtgctcgcctgcgaatctgtagacgttgacctttgtatttactcattgcacctcaaggatctgctgcatctcgataccgcattgaggcaggaaaaacacatgatgttcatccagatttttaaaatgtgcctcctggacctgcttccaaagaagaagagcgacgacgagttgtatcagaagattttaagcaagcaggagaaagaccttgaggagctcgagaaagggctccaggtgaagctctcaaacactgagatgtcaggggccggcgattccgagtacataactctcgcggacgtcgaaaaaaaagaacgggaatattccgagcaacttatcgataacatggaagctttctggaaacagatggctaacatccagcacttcttggtcgaccagtttaagtgttcgtcttccaaggcgaggcagctgatgatgacgctaacagaacgtatgattgccgccgaaggtcttctctgcgactcgcaggagcttcaggcactcgatgccctcgaaagaactatgggccgggcccacatggccaaggttatcgaatttctcaagctgcaggtccaagaggaaacaagatgtagattagccgccatctcgcacggcttggagctgctcgcgggggagggtaagttgagtggcaggcagaaggaggagctccttacacagcagcataaagcgttctggcaggaggctgagcggttctctagagaatttgtacagagagggaaagatctggtcaccgctagcctggcgcaccaggtagaagggactgccaagctgactttggcacaggaagaggaacagcgttcatttttggcggaggcccagcccaccgcagacccggagaaatttctcgaagccttccacgaagttctggagagacaacgactcatgcaatgcgatctcgaggaggaggagaatgttagagcgactgaggccgtggtagcgctgtgccaggagctgtatttcagtacagtcgacactttccaaaaattcgtagatgctctgttccttcagactctgccaggaatgaccggactccctcccgaagagtgcgactatctccgccaagaagtgcaggaaaatgcagcctggcagttggggaagtctaatagatttcggcggcagcaatggaagctgtttcaggagttgctcgaacaggatcagcaagtctggatggaagagtgcgccttgtcaagcgtgttgcagacacatttgcgagaggatcacgaaggaacaatccgcggggtcttaggccgactggggggcctgactgaggaatctacgagatgtgtgcttcaggggcacgacctgctgctgaggtctgccctccgccgcttagccttaagggggaatgcactggccaccttgacacaaatgaggttgagtggcaagaagcacctgctccaggaacttagggagcaacgagctttggaacagggctcatctcagtgcctcgacgagcatcaatggcagctgctgcgggccctggaggcgagggtactggaggaagcgagtcggctagaggaagaagcccaacagactagactccagctgcagcagcgcctgttggctgaagcccaggaagtcggtcagctgctccagcagcatatggaatgtgctattgggcaggcattgctcgtccatgcccgcaatgccgctactaaaagcagagccaaggaccgagatgattttaaacggacactgatggaagccgctgtagagagcgtgtatgtgacaagtgcaggggtgagcaggctcgtgcaggcgtattatcagcagatcgggcgcatcatggaggatcacgaggaaaggaagctgcagcacctgaaaaccctgcagggcgaaaggatggagaattataagttgagaaagaagcaagaactgtccaatccaagcagcggcagcagaaccgctggaggggctcacgagacttcccaggctgtacaccagagaatgttgtcgcagcagaaacgttttctcgcacaattcccagtgcatcagcagatgcgactgcacgcccagcagcaacaggcaggtgtaatggacctgcttgaggctcaactggagacccagctccaggaggcagagcagaacttcatcagtgagctggccgcgctggcacgtgtgcctctcgctgagagcaagctcctgcccgcgaaaaggggcctactcgagaagcctctccggacaaagcgcaagaagcctctcccccaagagcggggcgatctcggagtgcctaacaacgaagatctggcatccggagatcagacaagtggctctctttccagcaagcggctgtcccagcaggagagcgaagctggcgactcaggaaatagtaagaaaatgctgaaaagacgttcgaacctgtag

SEQ ID NO: 246654 - DNA, 2979 bp, Artificial Sequence
  derived and/or modified sequence
atggcccggggcggggccgcctgcaagagtgatgcccggctgctgctgggcagagatgccctgcggcctgccccagccctgctggccccagctgtgctgctgggcgccgccctgggcctgggcctgggcctgtggctgggctgccgggccggccggcagaggaccaggcaccagaaggatgacacccagaacctgctgaagaacctggagagcaatgcccagaccccatctgaaacaggcagccccagcagaagaaggaagcgggaggtgcagatgagcaaggacaaggaggccgtggatgaatgtgagccccccagcaacagcaacatcacagcctttgccctgaaggccaaggtgatctaccccatcaaccagaagttccggcccctggctgatggcagcagcaaccccagcctgcacgagaacctgaagcaggccgtgctgccccaccagcctgtggaggccagccccagcagcagcctgggcagcctgagccagggcgagaaggatgactgcagcagcagcagctctgtgcacagcgccaccagtgatgaccgcttcctgagcaggaccttcctgcgggtgaatgccttccctgaggtgctggcctgtgagagcgtggatgtggacctgtgcatctacagcctgcacctgaaggacctgctgcacctggacacagccctgcggcaggagaagcacatgatgttcatccagatcttcaagatgtgcctgctggacctgctgcccaagaagaagagtgatgatgagctgtaccagaagatcctgagcaagcaggagaaggacctggaggagctggagaagggcctgcaggtgaagctgagcaacacagagatgtctggggccggggacagcgagtacatcaccctggctgatgtggagaagaaggagcgggagtacagcgagcagctgattgacaacatggaggccttctggaagcagatggccaacatccagcacttcctggtggaccagttcaagtgcagcagcagcaaggcccggcagctgatgatgaccctgacagagaggatgattgctgctgagggcctgctgtgtgacagccaggagctgcaggccctggatgccctggagaggaccatgggccgggcccacatggccaaggtgattgagttcctgaagctgcaggtgcaggaggagacccgctgccgcctggccgccatcagccacggcctggagctgctggccggggagggcaagctgagcggccggcagaaggaggagctgctgacccagcagcacaaggccttctggcaggaggccgagcgcttcagccgggagtttgtgcagaggggcaaggacctggtgacagccagcctggcccaccaggtggagggcacagccaagctgaccctggcccaggaggaggagcagaggagcttcctggccgaggcccagcccacagctgaccctgagaagttcctggaggccttccacgaggtgctggagcggcagaggctgatgcagtgtgacctggaggaggaggagaatgtgcgggccacagaagctgtggtggccctgtgccaggagctgtacttcagcacagtggacaccttccagaagtttgtggatgccctcttcctgcagaccctgcccggcatgacaggcctgcccccagaagaatgtgactacctgcggcaggaggtgcaggagaatgctgcctggcagctgggcaagagcaaccgcttccggcggcagcagtggaagctgttccaggagctgctggagcaggaccagcaggtgtggatggaggagtgtgccctgagctctgtgctgcagacccacctgcgggaggaccacgagggcaccatccggggcgtgctgggccgcctgggcggcctgacagaggagagcacccgctgtgtgctgcagggccatgacctgctgctgcggagcgccctgcggcggctggccctgcggggaaatgccctggccaccctgacccagatgaggctgagcggcaagaagcacctgctgcaggagctgcgggagcagagggccctggagcagggcagcagccagtgcctggatgagcaccagtggcagctgctgcgggccctggaggcccgggtgctggaggaggccagccggctggaggaggaggcccagcagacccggctgcagctgcagcagaggctgctggccgaggcccaggaggtgggccagctgctgcagcagcacatggagtgtgccatcggccaggccctgctggtgcacgccagaaatgctgccaccaagagccgggccaaggacagagatgacttcaagaggaccctgatggaggccgctgtggagagcgtgtatgtgaccagcgctggggtgtcccggctggtgcaggcctactaccagcagatcggccgcatcatggaggaccacgaggagaggaagctgcagcacctgaagaccctgcagggcgagaggatggagaactacaagctgaggaagaagcaggagctgagcaaccccagcagcggcagcaggacagctggaggagcccacgagaccagccaggccgtgcaccagaggatgctgagccagcagaagcgcttcctggcccagtttcctgtgcaccagcagatgaggctgcacgcccagcagcagcaggccggcgtgatggacctgctggaggcccagctggagacccagctgcaggaggccgagcagaacttcatcagcgagctggccgccctggcccgggtgcccctggccgagagcaagctgctgcctgccaagaggggcctgctggagaagcccctgcggaccaagaggaagaagcccctgccccaggagcggggggacctgggcgtgcccaacaatgaagacctggccagcggggaccagaccagcggcagcctgagcagcaagaggctgagccagcaggagagcgaggccggggacagcggcaacagcaagaagatgctgaagaggaggagcaacctgtag

SEQ ID NO: 246655 - DNA, 2979 bp, Artificial Sequence
  derived and/or modified sequence
atggcccggggcggcgccgcctgcaagagcgacgcccggctgctgcttggccgcgatgcactacgcccagcaccagccctccttgcccctgctgtcttgcttggcgcagctctcgggcttggacttggcttgtggctggggtgccgagccggcaggcagcggacaagacaccagaaagatgacactcagaacctattgaagaacctggagagcaatgctcagactccttccgaaacaggctccccgagccgcagaaggaagagagaagtccagatgtcaaaggacaaagaggcagtcgatgagtgtgaaccaccttccaactctaatataacggcttttgccctgaaggcaaaagtgatctacccaattaaccaaaaattccggccacttgcagatggttcaagtaacccatccctccatgagaacctaaaacaggctgttttgccccatcagcccgtggaggccagcccctctagctccctgggcagcctgtcacagggtgaaaaagatgattgctcttcatcatcatcagtccattccgctaccagcgacgaccgattcctctcaagaacattcctcagggtaaatgccttcccagaagttctggcctgtgagtccgttgatgtggacttatgtatttatagtctgcatttgaaggacttgctacatctggacaccgctctgcgacaggaaaaacacatgatgttcatacagatcttcaagatgtgcctccttgaccttctgcccaagaaaaagtctgatgatgaactgtaccagaaaattctgtcaaagcaagagaaggacctggaggaactcgagaaggggctacaggtcaagctctctaacaccgagatgtccggcgcaggagacagcgagtacataactttggctgacgttgaaaagaaagagcgtgaatattcagagcagctgattgacaacatggaggccttctggaagcagatggcaaatatccaacatttcctcgtggaccagttcaagtgctcttcctcaaaggctcggcagttaatgatgactctgaccgagaggatgatcgcagcagagggtctgctgtgtgattcccaggagttgcaagccctcgatgcattggagagaacaatggggagggcacacatggcaaaagtcattgaatttctcaagcttcaggtccaggaagaaaccaggtgtcgtttggctgcaatttcgcatggtctagagcttctcgcgggcgaaggtaagctgagcggacggcaaaaggaagagctgctcactcagcaacacaaggcgttctggcaggaggctgagcgattttctcgagagttcgttcagcgcggcaaagacctggtcactgccagtttggcccaccaggtggaaggtactgctaagctgacccttgcacaggaggaagaacagcgatcctttctggccgaggcccagccgaccgctgaccccgaaaagttccttgaggcttttcacgaggttctggaacggcagaggctgatgcagtgtgatctggaagaagaggagaacgtccgcgccaccgaagcggtggtggccctctgtcaggagctctatttttctactgtagacacatttcaaaagtttgtggacgcgctgtttctacagactctgccaggtatgaccggcctccctcctgaggagtgcgactatttgcggcaggaggtccaagagaacgccgcctggcagctcggaaaaagtaacaggttccgtagacagcaatggaaactcttccaggagttattagagcaagaccagcaggtgtggatggaggaatgtgctctctcatcggtgctgcagacccacctccgcgaagaccacgaaggtactataaggggggtgctcgggcgcttgggaggcctgaccgaggagtccacgcgctgcgtgttacaagggcacgatctgctgctcagatcggcattgaggaggttggccttgaggggaaacgctcttgcaactcttacccagatgaggctctctggcaaaaagcacctgctgcaggaattgcgggaacagagggccctggaacaaggctcctctcagtgcctcgacgagcaccagtggcagctcctgagggctcttgaggcccgagtgttagaggaggcttctcgtttagaggaggaagcacagcaaactaggttgcagctgcagcagagactacttgccgaagcccaagaagtgggacagctgctccagcagcacatggagtgtgctattgggcaggcccttctcgtgcacgcccgcaatgccgcaacaaagtcacgcgcaaaagatcgggatgatttcaaacgcacccttatggaggccgccgttgagtcggtatacgtgacatccgcgggagtgtcccgcctggtgcaggcgtattatcagcagatcggacggattatggaggaccacgaggaaaggaaacttcagcacctcaaaaccctacagggcgaaaggatggaaaattataagcttcgcaagaagcaggagttgtcaaacccatcttccggctccaggaccgcaggaggggctcacgagacgagccaggccgtgcaccagaggatgctctctcaacagaaacgatttcttgctcagtttccagtccatcaacaaatgcgcctccatgctcaacaacaacaggcgggtgtgatggatctcctggaggctcagcttgaaacgcagctacaggaagctgaacagaactttatcagcgaactggctgcgctggcccgcgtgccactggcagagagtaagctgttaccagccaaaagaggcctactggagaagccattgcggactaaacgcaagaagccactgccgcaggaacgcggagatctcggagtgcccaataacgaggatctggcttctggcgaccagacatcaggttctttgtcttctaagcgactatcccagcaggagtcagaagccggtgactccgggaattcaaaaaagatgcttaagcggcgaagcaacctgtag

SEQ ID NO: 246656 - DNA, 2979 bp, Artificial Sequence
  derived and/or modified sequence
atggcccggggcggcgccgcctgcaagagcgacgcccggctgctgctcggccgagatgccctgaggccagctcctgctttgcttgcccccgccgtgctgctgggagctgctctgggactcggcttgggtctgtggttggggtgccgggcaggcagacagaggactcgccatcagaaggacgatacgcagaatctattaaagaatctagaaagcaacgcacagactccctcagagacgggaagcccaagcagaaggaggaagcgcgaggttcagatgagcaaagacaaggaggcagtggatgaatgtgagcctccttccaactctaacataactgcgtttgctttaaaagccaaagtgatctatcccatcaatcagaagtttaggcctcttgcggatggctccagcaatccaagccttcacgagaacctaaagcaggccgtgctcccacatcagcctgtcgaggcaagcccgtcttccagcctgggctccctctctcagggagagaaagacgactgcagcagctcgtcatcagtgcactctgcaacctcggacgataggttcctttcaagaacatttctgcgcgtgaacgcattcccagaggtgttggcttgcgagagtgtagatgttgatctatgcatctatagtctgcacctaaaggacctgctgcatctggataccgcactgaggcaagagaagcatatgatgttcatccagatttttaagatgtgtctcctcgatttgcttcccaaaaaaaaaagcgatgacgaactgtaccaaaagatcttgtccaagcaggaaaaagacttagaggagttggaaaagggcttgcaggtcaaattgtcgaacaccgagatgagcggggcaggagactcagagtacattaccttagccgatgtagagaaaaaggaaagagagtacagtgaacaactgatcgacaacatggaagctttttggaaacagatggcgaacatccagcacttcctggtggaccagtttaaatgctcttccagtaaagcacggcagttaatgatgacgttgactgagagaatgatcgctgccgaaggcctactctgcgacagccaagagcttcaggctctggatgcgcttgaacgcactatgggaagagctcatatggctaaagtgattgagttccttaagctccaggtccaagaagaaaccaggtgccggctagctgcaataagccacggtttagaattgttagctggtgagggtaagttgagtggacggcaaaaagaagagctgctaactcaacaacacaaggccttttggcaggaggcggaaaggttttctagggagttcgtccaacggggtaaggacctggttactgctagtttggcacaccaagtggaaggaaccgccaagctgacactcgcccaggaggaggaacagcggtcattcctcgcggaagctcagccgacagccgaccctgaaaagttcctcgaagctttccatgaggtcctcgagagacaacgcctgatgcaatgtgacctggaagaggaagagaacgtgcgagctacagaagccgtggtggcgctgtgccaggaactgtacttttctaccgtcgatacatttcagaagtttgtagacgcactttttcttcaaacactgcccggcatgactggcttgcctccagaggaatgcgactatctccggcaggaagtgcaagagaatgctgcatggcagctgggtaaatctaaccgattcaggagacaacagtggaaattgttccaagagttgctggagcaagatcagcaggtgtggatggaggagtgtgcccttagctcagtgctccaaacacatctgcgggaggaccacgagggcaccattaggggcgtcttaggaaggctgggcggtctgactgaggagagtacacggtgcgtcctgcaaggccatgacctgcttctgaggagcgcactgcgtagactggccctgaggggtaatgctctagccactctcactcagatgaggctcagtggcaagaaacatcttctccaagagctgagggagcagcgcgccctggagcagggatcctcacagtgtctggatgagcatcagtggcagctcctgagggccctggaggctcgggtcctcgaggaagcttcgagattagaagaggaagctcagcaaacacgcctgcagttgcagcagaggctccttgccgaagcacaagaggtagggcagctactgcagcagcacatggaatgcgcaatcggccaggcactcctggtacacgcgcggaatgcagcaactaagtcgagggccaaagatagagatgatttcaagcggaccttgatggaagccgctgtggaatccgtttacgtgactagcgcgggagtcagccggctggtccaggcatactaccagcagataggacgtattatggaggatcatgaggaaagaaaactgcagcatttgaagaccctgcagggtgagcgaatggagaattacaagcttaggaagaagcaggaactctccaatccctctagcggctccaggaccgccggtggtgcacacgagacatcacaggcagtgcaccagcggatgttgtctcaacagaagcgctttttagcgcaatttccagtccatcagcagatgagactgcatgctcagcagcagcaagccggagtgatggacctccttgaagcccagctcgagacccagctccaggaggccgagcagaactttatcagcgaactcgcagcactcgcgagagtgcccctcgccgagtcaaagttactcccagccaaaaggggcttactcgaaaaacccctacgcacaaagcggaaaaagccgctacctcaggaacggggcgacttgggtgttccgaacaacgaggatctggcctccggtgaccaaacttccggcagcctaagttcgaaaagactgtctcagcaagaaagcgaggccggtgattctggcaatagtaagaagatgctcaagagacgatccaatttgtag

SEQ ID NO: 246657 - DNA, 2979 bp, Artificial Sequence
  derived and/or modified sequence
atggcgcgagggggagccgcttgtaaatcggacgcaaggctgctgctgggaagagacgccctgcgacctgctcctgcccttcttgccccagcagttctgctcggggctgctctcggactgggcttaggcctgtggctcggctgcagagcgggacggcagcgtacccgccatcagaaagacgatacgcagaacctgctgaagaatctggagagcaacgctcagaccccctctgagaccggctctccttcacgaagacgcaaaagagaggttcagatgtctaaggataaggaggccgtcgatgagtgtgaaccccctagtaactcaaatatcaccgcgttcgcactgaaggccaaagtgatctatcccatcaaccagaagttccgcccattggcagacggctcctccaacccgtccctgcatgagaatctgaagcaggcagtgctccctcaccagcccgtggaagcctcacctagtagtagcctgggttcgctgtcccagggagaaaaggatgattgttcctcaagcagtagcgtgcacagtgccaccagcgacgataggtttttgtcaaggacgtttcttagggtcaatgccttccccgaggtcctggcttgcgagtccgttgatgttgatctgtgcatttattccctacacctgaaggatctgctgcacctggacacagccctgaggcaggaaaagcacatgatgttcattcagatatttaagatgtgtctccttgatctgctccccaagaagaagtcagacgatgaactgtaccagaagatactgagcaagcaggaaaaggatctggaagaactcgagaagggcctgcaggtaaagctcagcaatacagaaatgtctggcgcaggggactccgagtatattactctcgcagatgtggaaaagaaagagagagaatactcagagcagctgattgacaatatggaggcattctggaaacagatggccaacatccagcacttcctcgtggaccaatttaaatgtagctctagtaaagccaggcagctcatgatgacactgactgaaagaatgatcgctgcggaaggactgttgtgtgattcacaagaactgcaagcgttggatgcattagagcggactatggggagagcacacatggcgaaagtaatcgaatttttgaaactccaggttcaggaggagactcgttgcaggctggctgccatctcgcacgggctggaactgctagcaggcgaaggcaagctttcggggaggcagaaggaagagctacttacccagcagcacaaggccttttggcaggaagcggaacggtttagcagagagtttgtgcagcgagggaaggaccttgttaccgcaagcctcgcgcatcaggtggagggaaccgccaaactgaccctggctcaggaggaagagcagaggtcctttcttgcggaggctcaacctacagccgaccccgagaagtttctcgaggcattccacgaagtgctcgagagacagcggctgatgcagtgtgacttggaggaagaagagaatgtgagggcaaccgaggccgtcgtggctctctgccaggagctgtatttcagtacagtagacaccttccagaaatttgtggacgccctgtttttgcagactttacccggtatgacagggctgccacctgaggaatgcgattatctcagacaggaagtgcaggagaacgcagcctggcaactggggaagtctaatcgttttcggaggcagcaatggaagctgtttcaggaactcctcgaacaagaccaacaagtgtggatggaggaatgcgcactcagttccgtgctacagacccacctccgagaagaccatgaaggcacaatccgcggtgtgcttggcaggctggggggtctgacagaggaatcgacccggtgtgtcttgcagggacatgacttattacttcggagtgccctacggaggctggcgctgcgcggaaacgccctggctaccctgactcagatgagactcagcggtaagaagcacttgctgcaggaacttagagagcaacgtgcactggagcaagggtcatcccagtgcctcgatgagcatcaatggcaactccttagggctctggaagccagagtcctggaagaggcaagtcggttagaggaagaggctcagcagacccggttacagctccaacagcggctgctggccgaggcccaggaagtgggtcaattactgcagcagcacatggaatgcgctattggtcaggctctgctggtgcacgcacgaaatgctgcaactaagtctcgagcaaaggacagggacgacttcaaacgcactttaatggaggccgcagtggagtcagtgtatgtcactagcgccggtgtgtccaggctggtgcaagcgtattatcaacagatcggcaggatcatggaagaccacgaagaacggaagctccagcatttgaaaacattgcaaggggagaggatggagaattataaactgaggaagaaacaggaactgtctaatccctcctcaggcagccggacagctggcggagcacatgagacatcacaagccgtgcaccagagaatgcttagccagcagaagagattcctggcccaatttccggtgcaccagcagatgagactccacgctcagcagcagcaagccggagtaatggatcttctcgaggcacagttagagacccagttacaggaggccgaacagaacttcatatccgagctggcagcattggccagagtgcctctggctgagtctaagctactgcccgctaaaaggggcctgctggaaaaaccgctgcgtaccaaaaggaagaagccgttaccccaggagcgaggcgaccttggggtgcctaataatgaagatctcgcgagcggagaccagacctccggatcgctgtcctctaagcggttgagccaacaggagtcagaagcgggtgattccggcaactccaagaagatgcttaagagacgcagcaacctctag

SEQ ID NO: 246658 - DNA, 2979 bp, Artificial Sequence
  derived and/or modified sequence
atggccagaggaggcgctgcttgtaaaagcgacgccaggctgctgctcgggcgagatgccttgaggcccgcacccgctctacttgctccagctgtgctgctaggagctgctctcggcctcgggctcggcctttggcttggctgtcgggctggtcgacagcgcacgaggcaccagaaggacgatacacagaatttgctcaagaacctggagagcaatgcccagacccccagtgaaactggaagcccctcccgacgccgtaaaagggaagtccagatgtccaaggacaaggaggccgttgacgagtgcgagcctccctcgaactccaacattaccgccttcgcattaaaagccaaagtcatttatccaattaatcaaaaattccggccattagctgatggctcttctaatcccagcctgcacgagaatttgaaacaggctgtgctgcctcaccagccggtggaagcttctccgtcgagctcactgggctctctcagccagggggagaaggacgattgctctagctcctcctccgtgcattcagcgacatccgacgaccgtttccttagcagaactttcttgcgcgtcaatgcattccccgaggttttagcgtgtgaatccgttgatgtggacctttgcatttatagcctgcatttgaaggacctgctacatctggatactgccttacgccaggaaaaacacatgatgttcatccagatcttcaaaatgtgcctcctggatcttctgcccaagaagaaatcagatgacgagctgtaccaaaagattctttcaaaacaggagaaagacctggaagaactcgagaaaggcctccaggttaaactgtctaataccgaaatgtcaggtgccggagacagtgagtacatcaccttagcagatgtagaaaaaaaggagcgtgagtattctgaacagctgattgataacatggaagccttctggaaacagatggcgaacatccagcactttcttgtcgaccagttcaaatgttcatcctccaaggccagacagctcatgatgactctgactgagcggatgattgcagccgaaggcctgctgtgcgatagccaggaattacaagctctggatgccctcgaacggaccatgggtcgcgcacacatggccaaggtgattgagtttctcaagctgcaggtacaggaagagacccgctgtcgcctagccgctatttcgcacgggcttgagctgctggctggagagggcaagttgagcggcaggcagaaagaggagctgctgacgcagcaacacaaggccttctggcaggaagccgagcgcttttccagagaattcgtgcagcgaggcaaggacctggtgacagcgtcattggctcaccaggtggagggcaccgctaagctaaccttggcacaagaggaagagcagagatcgttcttggcggaagctcagcccaccgctgaccctgagaagttcctggaagcatttcatgaagttctcgagcgtcaaagactgatgcagtgtgatttagaggaagaggagaacgtcagggcaaccgaggcagtggtggccctttgtcaggaactatatttctcaaccgtggataccttccagaagtttgtggacgccctgtttcttcaaactctgccagggatgactggcctgcctcctgaggagtgtgattatctccgacaggaagttcaggagaacgccgcatggcagctcggaaaatctaaccgattccgcaggcagcagtggaagctctttcaagaacttctcgaacaggatcaacaggtgtggatggaagaatgtgcactgtcgtcagttctgcaaacccatctgcgtgaagatcacgagggcacaatccggggagtgcttggtcggctaggaggtcttacggaagaatccacccgttgcgtactgcaggggcacgacctgctgctgcggagcgcactgcgaagattggcactgcggggaaatgctttagccacactcacacagatgagattgtcgggcaaaaagcatctgctgcaggagctgcgggaacaacgcgcacttgaacagggttcgtctcagtgcctcgatgaacaccaatggcagctcttgagagcgctggaggcgagagtgttagaagaagccagcagactggaagaggaagcgcagcaaacaagactacagttgcagcagcgcttgttagcagaggctcaggaggttggccagttacttcagcagcacatggaatgcgccattggccaagctctcctggtgcacgctagaaacgctgccacaaagagcagggccaaggatcgcgatgatttcaaaagaaccctgatggaagcagctgtggaaagcgtgtatgtaacgtctgccggtgtgtcaaggctagtgcaggcatattatcagcagatcggtcggattatggaagaccacgaagaaagaaaactacagcatctgaaaactttgcagggagaaaggatggaaaactataagcttaggaagaagcaagagctgagcaatccttctagtggctcccgtaccgccggtggcgctcatgagacgtcacaggcagtccaccagcgcatgctctcccagcaaaaacggtttctcgctcagttccctgtccaccagcagatgaggctgcacgcgcaacagcaacaagctggagtcatggatcttctagaagcgcagctcgaaacacagctccaggaggccgagcagaatttcatttccgagctagcagcccttgcacgtgtacccttagctgagtccaaactgctgccggctaagaggggcttgctggagaaacccctcagaaccaagagaaaaaagcccctgccccaggagcgtggcgatctcggcgttcccaacaatgaggatctagccagtggcgaccagacaagcgggagtttgtcatcgaagaggctgagccagcaagagagcgaggcgggtgactccgggaacagtaagaaaatgttgaagcggcgttccaatctatag

SEQ ID NO: 246659 - DNA, 2979 bp, Artificial Sequence
  derived and/or modified sequence
atggccagaggcggcgccgcctgcaagagcgacgccagactgctgctgggcagagacgccctgagacccgcccccgccctgctggcccccgccgtgctgctgggcgccgccctgggcctgggcctgggcctgtggctgggctgcagagccggcagacagagaaccagacaccagaaggacgacacccagaacctgctgaagaacctggagagcaacgcccagacccccagcgagaccggcagccccagcagaagaagaaagagagaggtgcagatgagcaaggacaaggaggccgtggacgagtgcgagccccccagcaacagcaacatcaccgccttcgccctgaaggccaaggtgatctaccccatcaaccagaagttcagacccctggccgacggcagcagcaaccccagcctgcacgagaacctgaagcaggccgtgctgccccaccagcccgtggaggccagccccagcagcagcctgggcagcctgagccagggcgagaaggacgactgcagcagcagcagcagcgtgcacagcgccaccagcgacgacagattcctgagcagaaccttcctgagagtgaacgccttccccgaggtgctggcctgcgagagcgtggacgtggacctgtgcatctacagcctgcacctgaaggacctgctgcacctggacaccgccctgagacaggagaagcacatgatgttcatccagatcttcaagatgtgcctgctggacctgctgcccaagaagaagagcgacgacgagctgtaccagaagatcctgagcaagcaggagaaggacctggaggagctggagaagggcctgcaggtgaagctgagcaacaccgagatgagcggcgccggcgacagcgagtacatcaccctggccgacgtggagaagaaggagagagagtacagcgagcagctgatcgacaacatggaggccttctggaagcagatggccaacatccagcacttcctggtggaccagttcaagtgcagcagcagcaaggccagacagctgatgatgaccctgaccgagagaatgatcgccgccgagggcctgctgtgcgacagccaggagctgcaggccctggacgccctggagagaaccatgggcagagcccacatggccaaggtgatcgagttcctgaagctgcaggtgcaggaggagaccagatgcagactggccgccatcagccacggcctggagctgctggccggcgagggcaagctgagcggcagacagaaggaggagctgctgacccagcagcacaaggccttctggcaggaggccgagagattcagcagagagttcgtgcagagaggcaaggacctggtgaccgccagcctggcccaccaggtggagggcaccgccaagctgaccctggcccaggaggaggagcagagaagcttcctggccgaggcccagcccaccgccgaccccgagaagttcctggaggccttccacgaggtgctggagagacagagactgatgcagtgcgacctggaggaggaggagaacgtgagagccaccgaggccgtggtggccctgtgccaggagctgtacttcagcaccgtggacaccttccagaagttcgtggacgccctgttcctgcagaccctgcccggcatgaccggcctgccccccgaggagtgcgactacctgagacaggaggtgcaggagaacgccgcctggcagctgggcaagagcaacagattcagaagacagcagtggaagctgttccaggagctgctggagcaggaccagcaggtgtggatggaggagtgcgccctgagcagcgtgctgcagacccacctgagagaggaccacgagggcaccatcagaggcgtgctgggcagactgggcggcctgaccgaggagagcaccagatgcgtgctgcagggccacgacctgctgctgagaagcgccctgagaagactggccctgagaggcaacgccctggccaccctgacccagatgagactgagcggcaagaagcacctgctgcaggagctgagagagcagagagccctggagcagggcagcagccagtgcctggacgagcaccagtggcagctgctgagagccctggaggccagagtgctggaggaggccagcagactggaggaggaggcccagcagaccagactgcagctgcagcagagactgctggccgaggcccaggaggtgggccagctgctgcagcagcacatggagtgcgccatcggccaggccctgctggtgcacgccagaaacgccgccaccaagagcagagccaaggacagagacgacttcaagagaaccctgatggaggccgccgtggagagcgtgtacgtgaccagcgccggcgtgagcagactggtgcaggcctactaccagcagatcggcagaatcatggaggaccacgaggagagaaagctgcagcacctgaagaccctgcagggcgagagaatggagaactacaagctgagaaagaagcaggagctgagcaaccccagcagcggcagcagaaccgccggcggcgcccacgagaccagccaggccgtgcaccagagaatgctgagccagcagaagagattcctggcccagttccccgtgcaccagcagatgagactgcacgcccagcagcagcaggccggcgtgatggacctgctggaggcccagctggagacccagctgcaggaggccgagcagaacttcatcagcgagctggccgccctggccagagtgcccctggccgagagcaagctgctgcccgccaagagaggcctgctggagaagcccctgagaaccaagagaaagaagcccctgccccaggagagaggcgacctgggcgtgcccaacaacgaggacctggccagcggcgaccagaccagcggcagcctgagcagcaagagactgagccagcaggagagcgaggccggcgacagcggcaacagcaagaagatgctgaagagaagaagcaacctgtag

SEQ ID NO: 246660 - DNA, 6431 bp, Artificial Sequence
  derived and/or modified sequence
ccctccggctcggcgaagcagggaaggggagagaagcaggagtcgggagactgcacaggccagaaagtctgcggagcgggccgcgcccctggcccgcccgggctccaagtcccgcgtcgccgccctggcggggacggtgcagcaggcggcgggatgcggcggggcggcagcctgagcgccccggatggcccgcggcggggcggcctgcaagagcgacgcgcggctgctgctggggcgggacgcgctgcggccggcgcccgccctgctggcccccgccgtgctgctgggcgccgcgctcggcctcggcctcggcctttggcttggctgccgcgcgggccgccagcgcacgcgacaccagaaagacgacactcaaaatctgctcaagaatttggagtctaatgcgcagaccccctcggaaactggctccccatcaaggaggaggaagagagaagtgcagatgtcgaaggacaaggaagctgttgatgaatgtgagccgccttccaacagcaatatcacagcattcgccctgaaggccaaagtcatctaccccatcaatcagaagttccggcctctggccgatggctcctccaacccgtctctgcatgaaaacttaaagcaggctgttttgccacaccagccggtagaggcctctccttccagcagtctggggagcctgagccagggtgagaaggacgactgcagctcctcatccagcgtccactcggccaccagcgatgacaggtttctcagccgcaccttcctccgggtgaacgccttccctgaagtgctggcctgcgagagtgtagacgttgacctgtgtatctacagccttcacttaaaagacctgctgcatttggacacggcactgaggcaggaaaagcatatgatgtttattcagatttttaaaatgtgcctccttgaccttcttcctaaaaagaagtcagatgatgaactataccagaagatcctttcaaaacaagaaaaagatttggaggaactagaaaagggacttcaggtcaaactgtcaaacacagaaatgtcgggggctggtgactctgagtacatcaccctggctgatgtggaaaagaaggagagagaatactctgaacagctaatcgataatatggaagctttctggaaacagatggcaaatatccagcactttcttgtggaccagtttaagtgttccagctccaaagcccgacagctgatgatgactctgacggaaagaatgattgcagccgaagggctattgtgcgattctcaggagctgcaggctctggacgccctggagaggacgatggggcgggcgcacatggcaaaagtgattgagtttctgaagctgcaagtccaggaggagaccaggtgccggctggctgccatctcccacggcctggagctgctggctggtgaggggaagctgtccgggcggcagaaggaggagctgctcacgcagcagcacaaggccttctggcaggaggcagagcgcttcagccgggagtttgtccagcgaggcaaagacctggtcacggcgtctctggctcaccaggtggagggaacggcaaaactcacgctggcccaagaggaggaacagagaagcttcctggctgaggcccagccgactgctgacccggaaaagtttctcgaggcttttcatgaggtcctggagaggcagaggctgatgcagtgtgacctggaggaagaggagaatgtcagagccaccgaggctgtggttgcactctgccaggagctgtacttcagcaccgtggacactttccagaagttcgtggatgccctgttccttcagacgctccctggcatgactggcctccccccggaagagtgtgactacttgaggcaggaagtccaggagaacgctgcctggcagctggggaagtcaaatcgcttccggaggcagcagtggaaactcttccaggagctcctagagcaagaccagcaggtgtggatggaggagtgtgcgctgtccagcgtgctgcagacacacctgcgggaggaccacgagggcaccatccgcggcgtcttgggccgactgggcggcctcactgaagagtccacgcggtgtgtcctgcaggggcatgacctgctgttgcgctcagccctccggaggctggcactccgcggcaacgccctggccaccctgacgcagatgcggctatcggggaagaagcacctcctgcaggagctgcgggaacagcgtgcactggagcaggggtcctcccagtgcctggacgagcatcagtggcagctgctcagggccctggaggcgcgtgtgctggaggaggccagccggctagaggaggaagcacagcagacacggctgcagctccagcagcggctcctggccgaggcccaggaggtggggcagcttctgcagcagcacatggagtgcgccattgggcaggcgctgctggtgcatgcacggaatgcagccaccaagagccgggccaaggacagggatgacttcaagaggacactgatggaggcggcagtggagagcgtctacgtgaccagcgctggtgtcagccgcctggtgcaggcgtattaccagcaaatcggaaggatcatggaggaccacgaggagagaaaactgcagcacctgaagaccctgcagggtgagaggatggaaaattacaaactgcggaaaaagcaagaactcagcaacccttcgtcgggcagcaggacggcaggtggcgctcatgagacctcccaggcggtccaccagaggatgctgtcccagcagaagaggttcctggcccagttcccagtgcaccagcagatgcgtctgcacgcccagcagcagcaggcaggagtcatggaccttctggaagcccagctggagacccagctacaggaagctgaacagaacttcatctccgagctggcagccttggcccgagtgccccttgctgaaagcaaactgttgcctgctaagcgtgggctgctagagaagcccctaaggactaaaaggaagaagcccctgccccaggaaagaggggacctgggggtgcccaacaatgaggaccttgcctccggggaccagacctcaggctcactcagcagcaaaaggctgagtcagcaagaaagtgaagctggggacagtgggaactcaaagaagatgctaaagagaagaagcaacttgtagtttaagaccagtcggtgggacaagacctgaagccctgggtctgggtgtgaattccaccttccctcctgcagtgctgagaggcagcgaggacggagaggacagcggcatctctaggctcttctgagagggacagagaaagaatagaaatgtgccctaaaagcataaatgagtatcacctgagaaaattaggcattcccgtcttggaaacacgtctctgtgagtttgcatttcatttggcttggagccctggctcgatgcctcatggatctttctccccaaggagggacgtcttgaggggtccgagcctcaggccaaggacccctgatgcagactctggaatccctggcccaaaggcctgtctgggcccatctggggctgaggacacacagatacataatgacacctgcagaaatgtattctctgaggacacttagaatatgaggaagagggtgtggcccaaccctcacttcacctggggaggggcttcttccggacagtagacaccctgcccgtgcagagagatgtcatgggggcacctgctctccctgatagatgctgagagcatccagaaacttccagaccagccctctcaccacacccagaagaggcctttcccatctggagagaagcttccagaccagcccttcacacaccacagccaggaggggcctttcccacctggagagaaacttccagaccagcccctcataccacagccaagaggggcctttctcacctggagagaaatttccagaccatcccctctcaccacagccaggagaggcctttcccaccggtagagaaacttccagaccagcccctcacaccacagccaagagaagcctttccagcctggagagaaacttccagaccagccctctcactacagccaggagaggcctttcccgcctggaaacttccggacaagcctctcacacaccacagccaggagaggcctttcccacctggacagaaacttccagaccagcccctctcaccacagccaggagaggcctttaccacctggagagaagcttccagaccagcccctcacaccacagccaggagaggcctttcccacctggagagaaacttccagaccagcccctcataccacagccaagaggggcctttctcacctggagagaaacttccagaccagcccctcacaccaccgccaggagaggcctttcccaccgggagagaaacttccagaccagcccctcacaccacagccaggagaggcctttcccaccgggagagaaacttccagaccagccctctcactacagccagaagaggcctttcccaccgggagaggaacttccagaccagcccctcacaccacagccaggagaggcctttcccgcctggagagaagcttcaggccagctcctcacaccacagccaggagagaccttttctgcctggagagaaactttcagaccagccccacacaccacagccaggagaggccgttcctgcctggagagaagcttccagaccagcccttcacaccacagccaggagaggcctttcccacctggagagaaacttccagaccagcccctctcaccacagccaggagaggccgttcccacctggagggaaaattgctcctttgatggaggttagggactgtcaccctcagcactgtgaacataccgggcgagatcattcttcaggggaaggagctgcccagagcatcacaggatgttccagtgtccctggtctctgcccaccagatgccagcactcccaccattcgtggcaaccaaggatgtctccagacactgccccgtgtccatggggttatcacccactgtgctgagtcaaagggtgccttgccctggtctaatccaggacatagccgtggatacgtccaaaaatccccagaacctagtgagccctctggctctgggagcccctatctcaggaattttcagggtcatttgtgacttttcatttcttaaaacctgaaatagactctcttagaaacaagtgactccttcccagtggccaaaacttaatcatcagagcgcttccttcagttcctcacccatcagccagtgggctctccaaagttaaccaacagctccctcttgtggttcactaaaaaacttggttattccatggagttgtgcaaagctatggcttccttggtgcaatattcttaaaacctgctttgcatagaaatcacttttgcccaggctggagtgcagtggcgtgatctcggctcatggcaatctccatctcccgggttcaagcgattttcctgcctcagcctccccagtagctgggactacagacgtgtgccaccacgcctggctaaatcttttttgtattttattttagtagagacggggtttcaccatactggccaggctgctctcgaactcctgacctcatcgtccacctgcctcggcctccccaaagtgctgagattaggcgttagccaccgcgcccggccagaaatcacttttatattgtcacatgggccctctgcacagagtccgatggctcctcccggggaagcctgattttgtgacgtgtgtatagtaaatgcaggccctctggcagcaccataattggtcggttaccctgagcccagagctctgaaagcatctgtggaatgatcacgggacccttctcctctgagaaggctcccggctgcctccccgccaccgagcttgtagcctgaatgcctggctgtcgcatggagcattttgcttctggggtgtcttccttagccaaagggaacgtgtcatttgctcgaccctggcccacccttgccgcccagctgttgtgctgggcacagtctggggcacaggcctccatgatgaagacgcgtgggctgtcggtgctttcatccgtcacaaactggcacctgtacctgccagcaggagcatgatggggacttccatgctggaattgctccctgattaaaatgagatatggctatttggaagacactgcattttagccagtgtacctgggcacagactcggggctgccctgaagctgatgaaggcttgaaggacggaagggctgagccacatgaaggcagcactcagggccaggggagagagaagaggatcagcagtgcagccccaggatgcctcgcaggtaccctgcctccattttggttaccatccccacttattatgggctgtgggctgttatggtgatggatggatgtggatttggaaggggaccatgagagatgatgtattatgatgaactcatgatttaattctttggtgaaaata

SEQ ID NO: 246661 - DNA, 7063 bp, Artificial Sequence
  derived and/or modified sequence
ccctccggctcggcgaagcagggaaggggagagaagcaggagtcgggagactgcacaggccagaaagtctgcggagcgggccgcgcccctggcccgcccgggctccaagtcccgcgtcgccgccctggcggggacggtgcagcaggcggcgggatgcggcggggcggcagcctgagcgccccggatggcccgcggcggggcggcctgcaagagcgacgcgcggctgctgctggggcgggacgcgctgcggccggcgcccgccctgctggcccccgccgtgctgctgggcgccgcgctcggcctcggcctcggcctttggcttggctgccgcgcgggccgccagcgcacgcgacaccagaaagacgacactcaaaatctgctcaagaatttggagtctaatgcgcagaccccctcggaaactggctccccatcaaggaggaggaagagagaagtgcagatgtcgaaggacaaggaagctgttgatgaatgtgagccgccttccaacagcaatatcacagcattcgccctgaaggccaaagtcatctaccccatcaatcagaagttccggcctctggccgatggctcctccaacccgtctctgcatgaaaacttaaagcaggctgttttgccacaccagccggtagaggcctctccttccagcagtctggggagcctgagccagggtgagaaggacgactgcagctcctcatccagcgtccactcggccaccagcgatgacaggtttctcagccgcaccttcctccgggtgaacgccttccctgaagtgctggcctgcgagagtgtagacgttgacctgtgtatctacagccttcacttaaaagacctgctgcatttggacacggcactgaggcaggaaaagcatatgatgtttattcagatttttaaaatgtgcctccttgaccttcttcctaaaaagaagtcagatgatgaactataccagaagatcctttcaaaacaagaaaaagatttggaggaactagaaaagggacttcaggtcaaactgtcaaacacagaaatgtcgggggctggtgactctgagtacatcaccctggctgatgtggaaaagaaggagagagaatactctgaacagctaatcgataatatggaagctttctggaaacagatggcaaatatccagcactttcttgtggaccagtttaagtgttccagctccaaagcccgacagctgatgatgactctgacggaaagaatgattgcagccgaagggctattgtgcgattctcaggagctgcaggctctggacgccctggagaggacgatggggcgggcgcacatggcaaaagtgattgagtttctgaagctgcaagtccaggaggagaccaggtgccggctggctgccatctcccacggcctggagctgctggctggtgaggggaagctgtccgggcggcagaaggaggagctgctcacgcagcagcacaaggccttctggcaggaggcagagcgcttcagccgggagtttgtccagcgaggcaaagacctggtcacggcgtctctggctcaccaggtggagggaacggcaaaactcacgctggcccaagaggaggaacagagaagcttcctggctgaggcccagccgactgctgacccggaaaagtttctcgaggcttttcatgaggtcctggagaggcagaggctgatgcagtgtgacctggaggaagaggagaatgtcagagccaccgaggctgtggttgcactctgccaggagctgtacttcagcaccgtggacactttccagaagttcgtggatgccctgttccttcagacgctccctggcatgactggcctccccccggaagagtgtgactacttgaggcaggaagtccaggagaacgctgcctggcagctggggaagtcaaatcgcttccggaggcagcagtggaaactcttccaggagctcctagagcaagaccagcaggtgtggatggaggagtgtgcgctgtccagcgtgctgcagacacacctgcgggaggaccacgagggcaccatccgcggcgtcttgggccgactgggcggcctcactgaagagtccacgcggtgtgtcctgcaggggcatgacctgctgttgcgctcagccctccggaggctggcactccgcggcaacgccctggccaccctgacgcagatgcggctatcggggaagaagcacctcctgcaggagctgcgggaacagcgtgcactggagcaggggtcctcccagtgcctggacgagcatcagtggcagctgctcagggccctggaggcgcgtgtgctggaggaggccagccggctagaggaggaagcacagcagacacggctgcagctccagcagcggctcctggccgaggcccaggaggtggggcagcttctgcagcagcacatggagtgcgccattgggcaggcgctgctggtgcatgcacggaatgcagccaccaagagccgggccaaggacagggatgacttcaagaggacactgatggaggcggcagtggagagcgtctacgtgaccagcgctggtgtcagccgcctggtgcaggcgtattaccagcaaatcggaaggatcatggaggaccacgaggagagaaaactgcagcacctgaagaccctgcagggtgagaggatggaaaattacaaactgcggaaaaagcaagaactcagcaacccttcgtcgggcagcaggacggcaggtggcgctcatgagacctcccaggcggtccaccagaggatgctgtcccagcagaagaggttcctggcccagttcccagtgcaccagcagatgcgtctgcacgcccagcagcagcaggcaggagtcatggaccttctggaagcccagctggagacccagctacaggaagctgaacagaacttcatctccgagctggcagccttggcccgagtgccccttgctgaaagcaaactgttgcctgctaagcgtgggctgctagagaagcccctaaggactaaaaggaagaagcccctgccccaggaaagaggggacctgggggtgcccaacaatgaggaccttgcctccggggaccagacctcaggctcactcagcagcaaaaggctgagtcagcaagaaagtgaagctggggacagtgggaactcaaagaagatgctaaagagaagaagcaacttgtagtttaagaccagtcggtgggacaagacctgaagccctgggtctgggtgtgaattccaccttccctcctgcagtgctgagaggcagcgaggacggagaggacagcggcatctctaggctcttctgagagggacagagaaagaatagaaatgtgccctaaaagcataaatgagtatcacctgagaaaattaggcattcccgtcttggaaacacgtctctgtgagtttgcatttcatttggcttggagccctggctcgatgcctcatggatctttctccccaaggagggacgtcttgaggggtccgagcctcaggccaaggacccctgatgcagactctggaatccctggcccaaaggcctgtctgggcccatctggggctgaggacacacagatacataatgacacctgcagaaatgtattctctgaggacacttagaatatgaggaagagggtgtggcccaaccctcacttcacctggggaggggcttcttccggacagtagacaccctgcccgtgcagagagatgtcatgggggcacctgctctccctgatagatgctgagagcatccagaaacttccagaccagccctctcaccacacccagaagaggcctttcccatctggagagaagcttccagaccagcccttcacacaccacagccaggaggggcctttcccacctggagagaaacttccagaccagcccctcataccacagccaagaggggcctttctcacctggagagaaatttccagaccatcccctctcaccacagccaggagaggcctttcccaccggtagagaaacttccagaccagcccctcacaccacagccaagagaagcctttccagcctggagagaaacttccagaccagccctctcactacagccaggagaggcctttcccgcctggaaacttccggacaagcctctcacacaccacagccaggagaggcctttcccacctggacagaaacttccagaccagcccctctcaccacagccaggagaggcctttaccacctggagagaagcttccagaccagcccctcacaccacagccaggagaggcctttcccacctggagagaaacttccagaccagcccctcataccacagccaagaggggcctttctcacctggagagaaacttccagaccagcccctcacaccaccgccaggagaggcctttcccaccgggagagaaacttccagaccagcccctcacaccacagccaggagaggcctttcccaccgggagagaaacttccagaccagccctctcactacagccagaagaggcctttcccaccgggagaggaacttccagaccagcccctcacaccacagccaggagaggcctttcccgcctggagagaagcttcaggccagctcctcacaccacagccaggagagaccttttctgcctggagagaaactttcagaccagccccacacaccacagccaggagaggccgttcctgcctggagagaagcttccagaccagcccttcacaccacagccaggagaggcctttcccacctggagagaaacttccagaccagcccctctcaccacagccaggagaggccgttcccacctggagggaaaattgctcctttgatggaggttagggactgtcaccctcagcactgtgaacataccgggcgagatcattcttcaggggaaggagctgcccagagcatcacaggatgttccagtgtccctggtctctgcccaccagatgccagcactcccaccattcgtggcaaccaaggatgtctccagacactgccccgtgtccatggggttatcacccactgtgctgagtcaaagggtgccttgccctggtctaatccaggacatagccgtggatacgtccaaaaatccccagaacctagtgagccctctggctctgggagcccctatctcaggaattttcagggtcatttgtgacttttcatttcttaaaacctgaaatagactctcttagaaacaagtgactccttcccagtggccaaaacttaatcatcagagcgcttccttcagttcctcacccatcagccagtgggctctccaaagttaaccaacagctccctcttgtggttcactaaaaaacttggttattccatggagttgtgcaaagctatggcttccttggtgcaatattcttaaaacctgctttgcatagaaatcacttttgcccaggctggagtgcagtggcgtgatctcggctcatggcaatctccatctcccgggttcaagcgattttcctgcctcagcctccccagtagctgggactacagacgtgtgccaccacgcctggctaaatcttttttgtattttattttagtagagacggggtttcaccatactggccaggctgctctcgaactcctgacctcatcgtccacctgcctcggcctccccaaagtgctgagattaggcgttagccaccgcgcccggccagaaatcacttttatattgtcacatgggccctctgcacagagtccgatggctcctcccggggaagcctgattttgtgacgtgtgtatagtaaatgcaggccctctggcagcaccataattggtcggttaccctgagcccagagctctgaaagcatctgtggaatgatcacgggacccttctcctctgagaaggctcccggctgcctccccgccaccgagcttgtagcctgaatgcctggctgtcgcatggagcattttgcttctggggtgtcttccttagccaaagggaacgtgtcatttgctcgaccctggcccacccttgccgcccagctgttgtgctgggcacagtctggggcacaggcctccatgatgaagacgcgtgggctgtcggtgctttcatccgtcacaaactggcacctgtacctgccagcaggagcatgatggggacttccatgctggaattgctccctgattaaaatgagatatggctatttggaagacactgcattttagccagtgtacctgggcacagactcggggctgccctgaagctgatgaaggcttgaaggacggaagggctgagccacatgaaggcagcactcagggccaggggagagagaagaggatcagcagtgcagccccaggatgcctcgcagacgtgccttctgccatgattgtgaagttctagccacgtggaactctctcggaagaactggttgttaaagagcacctctgccttcttcctctgttgccatgtgatctctgcacacgctagctctccttcgccttctgccatgctggaagtagcctgaggccctcaccagaagcagacgctggcaccgtgctgcttgtacagcctgcagagccgtgagccaagtaaacctctttaattacccagcctcaggtgctccgggaacgccttccgcggaatgaagcggcccatgcccttgttgacgttgatgtttccgtcttcaaagacgatcttgccctggctgatgaccactagtggggagccgtggcactccataccctcgaagatgttgtactccaccgcctgcaccaacagcctcagtgttacttcccaggatttgctctgccccaaacgagctgttcataacagcgattttgcctaacattatatcataagcgtgttccaatgtttttttttctctctaaaaataccttttattgactgtaatattccactgtatggtccacagtgtatataaccaacaactcaccgttgcgcatgtaggctgccggtggctttctataatcaaatcaatattgttctggggcatcacaaagaggaagggggtcccccggggttatgcaatgtggctgctttgactgtactggacataaaaataagtaaaatgttcttcattttacttaaaatgtgtctttaaataaaatttttttctctaggtt

SEQ ID NO: 246662 - DNA, 279 bp, Artificial Sequence
  derived and/or modified sequence
atgacgaagctggcccaatggttatgggggctggccatactgggatcaacttgggtagccctcacaacaggtgcattagggctcgagctacctctttcatgccaggaggttctgtggcctctccccgcttacttgctggtgtccgccggctgctatgcgcttggcaccgtggggtaccgggtcgctacatttcacgattgcgaggacgccgcccgcgaactgcagagtcaaattcaagaggcaagagcagatctggcccgccgaggcctcaggttttag

SEQ ID NO: 246663 - DNA, 279 bp, Artificial Sequence
  derived and/or modified sequence
atgactaagttagcccagtggctctggggcttagcgattctcggtagcacatgggtcgcactgaccaccggagccttgggattagagcttcccttatcgtgtcaggaggtcctgtggcctctgccggcttaccttctcgtttccgctggctgttacgcactcggtaccgtaggttacagagttgctaccttccacgattgtgaagatgccgctcgggaactccagtcgcagatacaggaagctagagcagatctggcacgaaggggtctgcgcttttag

SEQ ID NO: 246664 - DNA, 279 bp, Artificial Sequence
  derived and/or modified sequence
atgaccaagctggcccagtggctgtggggcctggccatcctgggcagcacctgggtggccctgaccactggagccctgggcctggagctgcccctgagctgccaggaggtgctgtggcccctgcctgcctacctgctggtgtctgctggctgctacgccctgggcaccgtgggctacagagtggccaccttccatgactgtgaagatgctgcccgggagctgcagagccagatccaggaggcccgggctgacctggcccggcggggcctgcgcttctag

SEQ ID NO: 246665 - DNA, 279 bp, Artificial Sequence
  derived and/or modified sequence
atgaccaagctggcccagtggctgtggggcctggccatcctgggctctacatgggtggcattaaccacaggggcccttggccttgagctccccctgtcctgccaggaggtgctgtggcccctgcctgcctatttactggttagcgccgggtgttatgctttggggacggtggggtatagggtagctacatttcacgattgtgaggacgctgccagagaactccagagtcagatccaggaggcccgcgcggatttagccaggagaggtctgcggttttag

SEQ ID NO: 246666 - DNA, 279 bp, Artificial Sequence
  derived and/or modified sequence
atgaccaagctggcccagtggctgtggggcctggccatcctgggctccacttgggtcgccttaactaccggagccctcggactggagcttcctctgtcttgccaggaagttctgtggcccctccctgcatacctgctcgtctccgcaggctgctacgcactggggacagtgggatatcgagtggccacatttcacgattgtgaggacgctgccagggagttgcagagccagattcaagaagcaagggcggatctggctcgccggggcctgcgcttttag

SEQ ID NO: 246667 - DNA, 279 bp, Artificial Sequence
  derived and/or modified sequence
atgacaaagctggcccaatggctgtggggtctggctatccttggaagcacgtgggtagcccttacaacaggggcattgggccttgaattgcctttgagctgtcaggaggtgctctggcctctccccgcttacctcctcgtgtccgcgggttgctatgccctaggtacagttggctatagggtggccacattccacgattgtgaggacgctgcgagagaacttcagtcccaaatccaagaagctagagccgatctggccaggcgcggactcagattttag

SEQ ID NO: 246668 - DNA, 279 bp, Artificial Sequence
  derived and/or modified sequence
atgacaaagctggcgcaatggctgtggggactcgccatccttgggtccacttgggtcgcactcacaactggtgccctcggattggaactgccgctctcatgccaagaagtgctctggcctctgcctgcatacctcctggtgagcgccggatgctacgccctgggaactgtgggataccgggtggctaccttccacgactgtgaagacgcagccagagagctccagagccagatacaagaggcgcgtgcggatcttgcgcgacgaggcctgaggttctag

SEQ ID NO: 246669 - DNA, 279 bp, Artificial Sequence
  derived and/or modified sequence
atgaccaagctggcccagtggctgtggggcctggccatcctgggcagcacctgggtggccctgaccaccggcgccctgggcctggagctgcccctgagctgccaggaggtgctgtggcccctgcccgcctacctgctggtgagcgccggctgctacgccctgggcaccgtgggctacagagtggccaccttccacgactgcgaggacgccgccagagagctgcagagccagatccaggaggccagagccgacctggccagaagaggcctgagattctag

SEQ ID NO: 246670 - protein, 473 aa, Artificial Sequence
  derived and/or modified sequence
MPPGGGGPMKDCEYSQISTHSSSPMESPHKKKKIAARRKWEVFPGRNKFFCNGRIMMARQTGVFYLTLVLILVTSGLFFAFDCPYLAVKITPAIPAVAGILFFFVMGTLLRTSFSDPGVLPRATPDEAADLERQIDIANGTSSGGYRPPPRTKEVIINGQTVKLKYCFTCKIFRPPRASHCSLCDNCVERFDHHCPWVGNCVGKRNYRFFYMFILSLSFLTVFIFAFVITHVILRSQQTGFLNALKDSPASVLEAVVCFFSVWSIVGLSGFHTYLISSNQTTNEDIKGSWSNKRGKENYNPYSYGNIFTNCCVALCGPISPSLIDRRGYIQPDTPQPAAPSNGITMYGATQSQSDMAAATPLLQSEPSLTSDELHLPGKPGLGTPCASLTLGPPTPPASMPNLAEATLADVMPRKDEHMGHQFLTPDEAPSPPRLLAAGSPLAHSRTMHVLGLASQDSLHEDSVRGLVKLSSV

SEQ ID NO: 246671 - DNA, 1422 bp, Artificial Sequence
  derived and/or modified sequence
atgccccccggcggcggcggccccatgaaggactgcgagtacagccagatcagcacccacagcagcagccccatggagagcccccacaagaagaagaagatcgccgccagaagaaagtgggaggtgttccccggcagaaacaagttcttctgcaacggcagaatcatgatggccagacagaccggcgtgttctacctgaccctggtgctgatcctggtgaccagcggcctgttcttcgccttcgactgcccctacctggccgtgaagatcacccccgccatccccgccgtggccggcatcctgttcttcttcgtgatgggcaccctgctgagaaccagcttcagcgaccccggcgtgctgcccagagccacccccgacgaggccgccgacctggagagacagatcgacatcgccaacggcaccagcagcggcggctacagacccccccccagaaccaaggaggtgatcatcaacggccagaccgtgaagctgaagtactgcttcacctgcaagatcttcagaccccccagagccagccactgcagcctgtgcgacaactgcgtggagagattcgaccaccactgcccctgggtgggcaactgcgtgggcaagagaaactacagattcttctacatgttcatcctgagcctgagcttcctgaccgtgttcatcttcgccttcgtgatcacccacgtgatcctgagaagccagcagaccggcttcctgaacgccctgaaggacagccccgccagcgtgctggaggccgtggtgtgcttcttcagcgtgtggagcatcgtgggcctgagcggcttccacacctacctgatcagcagcaaccagaccaccaacgaggacatcaagggcagctggagcaacaagagaggcaaggagaactacaacccctacagctacggcaacatcttcaccaactgctgcgtggccctgtgcggccccatcagccccagcctgatcgacagaagaggctacatccagcccgacaccccccagcccgccgcccccagcaacggcatcaccatgtacggcgccacccagagccagagcgacatggccgccgccacccccctgctgcagagcgagcccagcctgaccagcgacgagctgcacctgcccggcaagcccggcctgggcaccccctgcgccagcctgaccctgggcccccccaccccccccgccagcatgcccaacctggccgaggccaccctggccgacgtgatgcccagaaaggacgagcacatgggccaccagttcctgacccccgacgaggcccccagcccccccagactgctggccgccggcagccccctggcccacagcagaaccatgcacgtgctgggcctggccagccaggacagcctgcacgaggacagcgtgagaggcctggtgaagctgagcagcgtgtag

SEQ ID NO: 246672 - DNA, 1422 bp, Artificial Sequence
  derived and/or modified sequence
atgccccctggtggcgggggccctatgaaagattgcgagtacagccaaattagcacccattcttcatccccaatggagtctcctcacaagaaaaaaaaaatagcggcccgaagaaaatgggaggtcttccctggcagaaacaaatttttttgcaacggccgaattatgatggcacgacaaactggagtcttctacctgacactggttctgattctggtcacttccggcctatttttcgcctttgattgtccctatttggctgtgaagataactcccgcaatccccgccgtggccgggattctatttttcttcgtcatggggacgctactgagaacatcattctcggatcccggagtcctacctcgcgcgacccccgatgaagccgcagatctcgaaaggcagatcgatattgcgaacggtacaagttcaggaggctataggccaccacctcgaaccaaagaagttattattaacgggcagacagtgaaactgaagtattgctttacatgcaagatctttagacctccgcgagcttcacattgtagtctgtgcgataattgcgtagaaaggtttgaccatcactgtccttgggttggcaactgcgtggggaaacgtaactataggtttttctacatgttcatactctcgctcagctttctgacggtctttatttttgcctttgttataacccatgtcattctcaggtcccagcagactgggttcctgaatgctttaaaagactcacctgcatctgtgctcgaggccgttgtctgctttttctccgtgtggtctatcgttggtctatcgggctttcatacctacctgatcagctccaatcagacaacaaatgaagatatcaagggatcttggagtaacaagagaggcaaagaaaactacaatccctactcatatggcaacatattcaccaattgttgcgtcgcattgtgtggcccaatatcaccgtctcttattgatagacggggctacattcagccagacactcctcaacccgccgccccgtccaacggaattacaatgtatggagccacccagtcacagagtgacatggccgcagctacccctttactgcagagtgagccttctctgacgagcgatgagttacacctaccagggaagccaggactgggtacaccatgcgcttctcttacactagggccacccaccccccctgcttctatgcccaatctggccgaagccacacttgcggacgtgatgcccaggaaggacgagcacatgggtcaccagtttcttacgccggacgaagcgccctccccccctcggttactggccgccggttctcccctggcacacagccgcacaatgcacgtcctgggcttggcttcccaggactccctccacgaggatagtgtgagaggactggtcaagttatcctcagtatag

SEQ ID NO: 246673 - DNA, 1422 bp, Artificial Sequence
  derived and/or modified sequence
atgcctcctgggggcggcggccccatgaaggactgtgagtacagccagatcagcacccacagcagcagccccatggagagcccccacaagaagaagaagattgctgcccggaggaagtgggaggtgtttcctggcaggaacaagttcttctgcaatggccgcatcatgatggcccggcagacaggagtcttctacctgaccctggtgctgatcctggtgaccagcggcctcttctttgcctttgactgcccctacctggccgtgaagatcaccccagccatcccagctgtggccggcatcctcttcttctttgtgatgggcaccctgctgcggaccagcttcagtgaccccggggtgctgccccgggccaccccagatgaggccgctgacctggagcggcagattgatattgccaacggcaccagcagcggcggctaccggcccccacccaggaccaaggaggtgatcatcaatggccagacagtgaagctgaagtactgcttcacctgcaagatcttccggcccccccgggccagccactgcagcctgtgtgacaactgtgtggagagatttgaccaccactgcccctgggtgggcaactgtgtgggcaagaggaactaccgcttcttctacatgttcatcctgagcctgtccttcctgactgtgttcatctttgcctttgtgatcacccacgtgatcctgcggagccagcagacaggcttcctgaatgccctgaaggacagccctgcctctgtgctggaggccgtggtgtgcttcttctctgtgtggagcatcgtgggcctgagcggcttccacacctacctgatcagcagcaaccagaccaccaatgaagacatcaagggctcctggagcaacaagaggggcaaggagaactacaacccctacagctatggcaacatcttcaccaactgctgcgtggccctgtgtggccccatcagccccagcctgattgaccggcggggctacatccagcctgacaccccccagcctgctgcccccagcaatggcatcaccatgtatggagccacccagagccagagcgacatggccgccgccacccccctgctgcagagcgagcccagcctgaccagtgatgagctgcacctgcccgggaagccaggcctgggcaccccctgtgccagcctgaccctgggcccccccaccccaccagcctccatgcccaacctggccgaggccaccctggctgatgtgatgcccaggaaggatgagcacatgggccaccagttcctgaccccagatgaggcccccagccccccccggctgctggccgccggcagccccctggcccacagcaggaccatgcacgtgctgggcctggccagccaggacagcctgcatgaagattctgtgcggggcctggtgaagctgagctctgtgtag

SEQ ID NO: 246674 - DNA, 1422 bp, Artificial Sequence
  derived and/or modified sequence
atgccccccggcggcggcggccccatgaaggactgcgagtacagccagatctcgacacatagctccagtcctatggaatcgccacacaaaaagaaaaagattgctgctcggcggaaatgggaggtcttccctggcaggaataaattcttctgcaatggtcgaataatgatggctcgccagacaggagtattttatcttactctagtcctcattcttgtaaccagcggccttttctttgcctttgactgcccttatctagccgtgaagataacaccagccatccccgcggtggccgggattttatttttcttcgtgatggggaccctgctccggacatccttctccgatcctggcgtgcttccaagagcaacccccgacgaagctgccgacctcgagcgccagatcgacatcgccaatggtacttcttccggcggctatcgaccacccccccgaacaaaggaagttattatcaatggccagaccgtaaagctgaagtactgtttcacttgtaagatctttcggccgccccgtgcaagccactgttctttgtgcgataactgcgttgaacgcttcgatcaccattgcccctgggtgggcaattgtgttggcaagcggaactaccgtttcttctatatgtttatcctttcactgtcttttctgactgtgttcatctttgccttcgtaattactcatgtgattctgcgtagccaacagactggattcttaaatgcattaaaggactcccctgcaagcgttctagaggcggttgtgtgttttttctcggtgtggtcaattgttggcttgtctggattccacacctacttgatatcttccaaccagaccacaaacgaggacatcaagggaagttggagtaataagagaggcaaagagaactataatccctattcctacggcaatatttttacgaactgctgtgtggcattgtgcgggcctatctctcctagtttgatcgatcgaagaggctatattcaaccggacaccccacagcctgcggccccatctaacggcatcaccatgtatggcgccacccagagtcagtcggacatggcggccgctactcctctgctccaaagtgagccctcactcaccagtgatgagctgcacctccctggcaagcctgggctgggaaccccgtgtgcctcactaacattgggacctcccaccccacccgcatctatgcctaacttggccgaggcaacccttgcggacgttatgcctagaaaggatgagcacatggggcaccagtttctgactccagacgaagctcctagcccacctagactgctcgcagctggctcccccttggcccacagtaggacgatgcatgtacttggtctggctagtcaggacagcctgcatgaggactcggtacggggtttggtcaaactcagctccgtttag

SEQ ID NO: 246675 - DNA, 1422 bp, Artificial Sequence
  derived and/or modified sequence
atgcccccaggaggaggaggccctatgaaagactgcgagtactcccagattagtacacattcttcctccccaatggaatcacctcacaagaagaagaaaatcgctgcccgacgcaagtgggaggtctttcctggacgtaacaaatttttttgtaacggtcgtattatgatggcccgtcagaccggcgtcttctatctgaccctggtgctaattctcgtgacttctgggctgttcttcgcctttgactgcccctatttggctgtgaaaatcacacctgccatccccgcagtggccggtatccttttttttttcgtcatgggtactctcttgaggacttccttttcagacccgggtgtgctccctagagccacacccgacgaagctgccgacctggagcgtcagatagacattgccaatgggaccagttccgggggatatagaccaccaccaaggacgaaagaggtaattataaatggtcagacagtgaaactgaagtattgctttacatgcaaaatctttaggccgccaagggccagccattgcagtttatgcgacaattgcgttgaaaggttcgaccatcactgcccctgggtgggaaactgtgtaggaaaacgaaattaccgcttcttttatatgtttatattgtctctgagtttccttacggtcttcattttcgcttttgttataacccatgtgatcctgcggtcacagcagactggctttctgaacgccctgaaagacagtccagccagcgtcctggaggctgtcgtctgcttttttagtgtgtggtctatcgtgggtcttagtggatttcacacatacttgatttcaagcaaccagactactaatgaagacataaaaggctcgtggagcaataaaagaggtaaagagaattataatccttatagctacggaaatatattcacgaattgttgcgtggcactgtgtgggccaatatctccaagcctgatagaccgacgcggttatatccagcccgacaccccacagcctgctgcccctagtaacggaattacgatgtacggagccacacagtcacagtcagatatggcagccgctactcccctgcttcagtctgagccatccttaacgtccgacgagctgcatctgccgggaaaacctggccttggcacaccctgcgcatcactcactttgggaccaccgacaccccctgcttccatgcctaaccttgccgaggctaccctagccgacgtcatgccccgaaaggacgagcatatgggacaccagtttctgactcccgacgaagcaccctctccccctagattgttagcggctgggagtcctctggctcattctcgcaccatgcatgtgctgggtcttgcatctcaggacagtttgcatgaagactctgttaggggcctggtcaagctttcttctgtatag

SEQ ID NO: 246676 - DNA, 3134 bp, Artificial Sequence
  derived and/or modified sequence
cgcccacccggcccggaggaggcggacccactcggagcgccgcgcgcgcgccgggctgagccttgcaaacaagtgtctgtgctgtgtccccgcggccctcctcgcgccggggccgcttcctccgggtaggagggagcaagggagccctcgccgcgcggcccgcgagccgccgccgccctcggcccgcgcatccccgcgcgggggccgcggattcgactaggctgccaggcgcagcgacaccgggtcgcggtgcgagcggcgccccggctctcgccgagaggctcctgacagaaaaacgtgcgtggttgtccccacccctgggaggggttgccggtgccgcgcgcggccgcccagtcgccagcgctctctcctgggaggatccgctgccggaggaaggagtggacccaacctggccgcgccgcagaagtggctcccgaggaagccggcgccggggccgccgcctcgtgtcccctcggggcgcagtgctcgggggtcggcgggccagagccgaggcgcggccggggagccgggggctgcggggccgagcgggcagccgcgcgagggggcgggcgctcggcgacccgggggccggccgggctgagccccgcgccccgggacgcgggctggaagcgacggaggagtgctgccgcgggctgcggaccagcgccgtcccctcacggagcggggattctgctatgacagttgggctccccggagggttaacctgggtgtcctcggcaaagttgtcgccgagccgggagcccgtgtaggggccgcggcgccgcggctcggggggcggccgggcggccggcggcggtcgtggctcggcggggcccgcgcggccggggggctcctgggggtgtgcgcccccagccggctgccctcgtggatgcctcccggcggcggcgggcccatgaaagactgcgagtacagccagatcagcacccacagctcctcccccatggagtcgccccacaagaagaagaaaatcgcggcccggaggaaatgggaggtgttcccgggaagaaacaagttcttctgtaacgggaggatcatgatggcccggcagacgggcgtcttctacctgacgctcgtcctcatcctggtcactagcggactcttcttcgccttcgactgtccgtacctggcggtgaaaatcacccctgccatccctgcagtcgctggcatcctgttcttctttgtgatggggaccctgctccgcaccagcttcagcgaccccggagtcctcccacgagccacgcctgatgaagccgccgatctggaaaggcaaatagatatcgcaaacggcaccagttcaggggggtaccgcccgcctcccagaaccaaagaagtcatcatcaatggccagaccgtgaaacttaaatactgtttcacctgcaagattttccggccccctcgcgcctcccattgcagcctttgtgataactgcgtagaacggtttgatcaccactgtccctgggtaggcaactgtgtggggaaaagaaactacagatttttttatatgtttattttatctctgtcttttctgacagtctttatatttgcattcgttatcacccacgtcattcttcgttcacagcaaacaggattcctaaatgcccttaaggacagtcctgcaagcgtcctggaggctgtggtgtgcttcttctctgtctggtccatcgttggcctctcaggattccacacctacttgatcagctccaaccagacaacaaatgaggacattaaaggatcctggtcaaataaaagaggtaaagaaaattacaatccctacagctacggaaatatctttaccaactgctgtgttgccctgtgtgggcccatctcaccaagcctgatcgacagaagagggtacatccagcccgacacgccgcagccagcagcaccctccaatggcatcaccatgtacggggccacgcagtcacagagtgacatggctgcagccacgcccctgctgcagagcgagcccagcctcaccagcgacgagctgcacctgcccgggaagcctggcctgggcacgccctgcgccagcctcacactgggcccgcccacaccgcccgcctccatgcccaacctcgccgaggccacgctcgcggacgtgatgccccggaaagatgagcacatgggccaccagttcctgacgcccgatgaggcgccctcgccccccaggctactggcggcgggcagccccctggcgcacagccgcaccatgcacgtgctgggcctggccagccaggactccctgcatgaggactctgtgcgcggcctggtgaagctcagctccgtgtgacccacatggccccaggccgggggacaccagaggctcctccatgggcagcaggagtgagcggaggggtgtgtcccacagcgactttcccagccaatgccacggtggagatgacagccccaggtctggggtacagagaccacttaggatggcacagggtggctggccccggatgctgagagcttggtttcatttgaattttcttccccaacctgagtgctttgacaacaatggaaatagagaagtggctgctttcttttggtgaccctccaggggtggaatcggagtgtgtctgcccgcccttgtgacagacacacggaaggcttctgacgcttgtggccagactgcaattgcacttatgtgttatgctactaatatttgaaacagacctgccattccatttgttaattaaaaaaaaaaaaaatcctaaagggaaaaaaccgaccaggtgtggatctgcatgccacgctgccgtctgtgttacagtggtgttgctatttccaaggaagtgctgctttctttttctttttttaattttgtgaattttcaagtgctgttttgttggaagacagtgcaacgaactgagactaatggacagtgtcatcactcagcttactgggctgaggcgtctgtggagaggtggcaccggggctgcagagggcggctggggttccgtcgtgtcgggtgtcacttcaccttctgtttggccgctcgatgaggtctcgtgttgagatattgtgtgccacaacccccacagtcttcacctccgtgtgtgatgaaacttcccgtggacagccaataaaatgacgtcctctgttattttgga

SEQ ID NO: 246677 - protein, 558 aa, Artificial Sequence
  derived and/or modified sequence
MGKIENNERVILNVGGTRHETYRSTLKTLPGTRLALLASSEPPGDCLTTAGDKLQPSPPPLSPPPRAPPLSPGPGGCFEGGAGNCSSRGGRASDHPGGGREFFFDRHPGVFAYVLNYYRTGKLHCPADVCGPLFEEELAFWGIDETDVEPCCWMTYRQHRDAEEALDIFETPDLIGGDPGDDEDLAAKRLGIEDAAGLGGPDGKSGRWRRLQPRMWALFEDPYSSRAARFIAFASLFFILVSITTFCLETHEAFNIVKNKTEPVINGTSVVLQYEIETDPALTYVEGVCVVWFTFEFLVRIVFSPNKLEFIKNLLNIIDFVAILPFYLEVGLSGLSSKAAKDVLGFLRVVRFVRILRIFKLTRHFVGLRVLGHTLRASTNEFLLLIIFLALGVLIFATMIYYAERVGAQPNDPSASEHTQFKNIPIGFWWAVVTMTTLGYGDMYPQTWSGMLVGALCALAGVLTIAMPVPVIVNNFGMYYSLAMAKQKLPRKRKKHIPPAPQASSPTFCKTELNMACNSTQSDTCLGKDNRLLEHNRSDNCKEVVITGYTQAEARSLT

SEQ ID NO: 246678 - DNA, 1677 bp, Artificial Sequence
  derived and/or modified sequence
atggggaaaatcgaaaataatgagagagtgatactgaacgtaggagggaccagacatgagacttatcggagtacgctgaagacactgcccggaacgagactcgcattgttggcatcttctgagcctcctggcgattgcctgaccaccgccggtgacaagcttcagccgagtcctccgcccctgagccctcccccacgagctccgcctctcagccctgggcccggggggtgttttgaggggggagccggcaactgcagtagccgggggggcagagcgtcagaccatccgggcggaggacgggagttcttcttcgaccggcaccccggggtcttcgcatatgtactgaattactatcgtacaggaaaactccattgccctgcagatgtctgcggaccccttttcgaggaagagctcgctttttggggtatcgacgaaacagacgtcgaaccttgttgctggatgacttataggcaacacagagacgccgaagaggcattggatatctttgaaactccggatctgattggcggcgatcctggcgacgatgaggacctcgccgccaaacgcttgggaatagaggacgcagccggactgggagggccagacggcaagtctgggaggtggagaaggctgcagccccgaatgtgggcccttttcgaagacccttacagctctcgcgctgctaggtttatcgcatttgcatctttattttttatcctggtttctattacaaccttctgcctggagactcacgaagcattcaacattgtcaagaacaagaccgagcccgtaataaacggcacgtcagtcgttctccagtacgagattgaaaccgatcctgccttgacttacgtggaaggagtctgtgtcgtttggttcacctttgaatttttagtgagaatcgtgttttcgcctaataagctggagttcataaagaatttacttaacattatcgatttcgtggccattctacccttctatctcgaggtggggctttcagggctgagcagcaaagccgcgaaggacgttctgggctttctcagagtagttcgtttcgtgagaatcctgcgtattttcaagctcaccagacactttgtaggcctgcgggtgctaggccacactctacgggcctcaaccaacgagtttctactccttattatcttccttgctctcggcgtgctgatatttgccactatgatctactatgccgagcgggtgggggcacagccaaacgacccttcggcgtctgaacatacccagttcaagaatatcccgatcggcttttggtgggcagtggtcactatgacaacccttgggtatggcgatatgtacccccagacatggtctggcatgcttgtgggcgctttgtgcgcacttgcaggggtgctgacaatcgccatgccagttccagttatcgtgaacaacttcggaatgtactattccctggctatggctaagcagaaactgcccagaaaacggaagaagcacataccacctgcgcctcaggcctccagtcctacattttgtaagacagagctaaacatggcatgcaattctactcaatctgacacctgtctgggcaaagataaccgcctgctggagcacaatcgctcagataattgtaaagaagtggttattacaggctatacccaagccgaggcccgcagcctcacatag

SEQ ID NO: 246679 - DNA, 1677 bp, Artificial Sequence
  derived and/or modified sequence
atgggcaagattgaaaataatgaaagagtcatcctgaatgtgggcggcaccaggcatgagacctaccgcagcaccctgaagaccctgcccggcacccggctggccctgctggccagcagcgagcccccaggggactgcctgaccacagctggggacaagctgcagcccagccccccacccctgagccccccaccccgggccccacccctgagccctggccctgggggctgctttgagggcggggccggcaactgcagcagcagaggaggccgggccagtgaccaccctgggggcggccgggagttcttctttgacagacaccctggggtgtttgcctacgtgctgaactactacagaacaggcaagctgcactgcccagcagatgtgtgtggccccctgtttgaggaggagctggccttctggggcattgatgaaacagatgtggagccctgctgctggatgacctaccggcagcacagagatgctgaggaggccctggacatctttgagaccccagacctgattggaggagaccctggagatgatgaggacctggccgccaagaggctgggcattgaagatgctgctggcctgggcggcccagatggcaagagcggccgctggaggcggctgcagcccaggatgtgggccctgtttgaggacccctacagcagcagagctgcccgcttcatcgcctttgccagcctcttcttcatcctggtgtccatcaccaccttctgcctggagacccatgaggccttcaacatcgtgaagaacaagacagagcctgtgatcaatggcacctctgtggtgctgcagtatgaaattgaaacagatcctgccctgacctacgtggagggcgtgtgtgtggtgtggttcacctttgagttcctggtgagaattgtgttcagccccaacaagctggagttcatcaagaacctgctgaacatcatcgactttgtggccatcctgcccttctacctggaggtgggcctgagcggcctgagcagcaaggccgccaaggatgtgctgggcttcctgcgggtggtgcgctttgtgcgcatcctgcgcatcttcaagctgaccaggcactttgtgggcctgcgggtgctgggccacaccctgcgggccagcaccaatgagttcctgctgctgatcatcttcctggccctgggcgtgctgatctttgccaccatgatctactatgcagagcgggtgggcgcccagcccaatgaccccagcgccagcgagcacacccagttcaagaacatccccatcggcttctggtgggccgtggtgaccatgaccaccctgggctacggggacatgtacccccagacctggagcggcatgctggtgggcgccctgtgtgccctggccggcgtgctgaccatcgccatgcctgtgcctgtgattgtgaacaactttggcatgtactacagcctggccatggccaagcagaagctgcccaggaagaggaagaagcacatccccccagccccccaggccagcagccccaccttctgcaagacagagctgaacatggcctgcaacagcacccagagcgacacctgcctgggcaaggacaaccggctgctggagcacaacagaagtgacaactgcaaggaggtggtgatcaccggctacacccaggccgaggcccggagcctgacctag

SEQ ID NO: 246680 - DNA, 1677 bp, Artificial Sequence
  derived and/or modified sequence
atgggcaagatcgagaacaacgagcgggtgatcctgaacgtgggcgggacaaggcatgagacttacaggtccactctgaagacgctgcccggcacccgtctcgccctgctggccagtagcgagccacctggcgactgcttgacaacagctggggacaagcttcagccctccccacccccgcttagccctcctccgcgggctccgcctctgtcacccgggccaggtggctgctttgagggcggtgctggaaattgtagtagtcgggggggaagggcgtctgatcaccctggaggcggcagagagtttttctttgaccgtcacccaggggtctttgcatacgttcttaattattaccggacagggaagctgcactgccctgcagatgtctgcggaccgctctttgaagaagagctggccttctggggaatagacgaaacagacgtggaaccttgctgctggatgacctaccgccaacatcgtgatgcagaagaagccctggacatcttcgagacccctgacttaatcggcggagatcctggcgatgacgaagatctagcggcaaagcggttggggatagaggatgccgctggcttgggcggccctgacgggaagtccggtcgatggagaaggttgcagcctcggatgtgggccttattcgaagatccatattcgtcgcgggcagcacgcttcatcgcatttgccagcttgtttttcatcttagtcagcatcactacattttgtctggaaacgcacgaggctttcaatattgtaaaaaacaagacggagcctgttatcaatggaacctcggtggtgctgcagtacgaaattgagaccgaccccgccctgacctacgttgaaggggtctgtgttgtttggtttaccttcgagttcctagttaggatagttttcagtccaaataagctggaattcataaagaacctgctcaacatcatcgatttcgtcgctattctgcccttctacctcgaagtcgggttgagtggccttagttcaaaggccgccaaagatgttctgggattcctgcgggttgttcgttttgtcagaatcttgagaatctttaagctgacacgacacttcgtgggcctacgggttctcggccacaccttaagagcctcgacgaacgagttcctattactgataatttttctcgccctgggagttctgatctttgctactatgatctactacgcggaaagagttggagctcaacccaacgacccaagcgcctctgagcacacacagtttaagaacataccgataggcttctggtgggcagttgtgactatgacaaccctgggatatggtgacatgtatccacagacctggagcggcatgttggtaggagcactgtgcgcgttagcaggcgtgctcaccatcgccatgcctgtcccagtcattgtaaacaattttggtatgtactactcgctcgctatggccaaacaaaagttaccgaggaagagaaagaagcacattcctcccgctccccaggcctctagtccaactttctgcaaaacagagctgaatatggcttgcaatagcacccagagcgacacatgccttggaaaggataatcgacttctcgaacataatcgaagcgacaattgcaaggaggtcgtcatcaccggatatacccaagcggaagctcggtcactgacttag

SEQ ID NO: 246681 - DNA, 3344 bp, Artificial Sequence
  derived and/or modified sequence
gtgcttcggatggcggcgggaggttgatggcgagtggtgctgaagggacagctccagcagtggctgatttgggggagaaacaaaatctgcagatggaatccgagcagggcgacttcaccttcaagtggtgagctctcctgacctgcggccagtctccactccattcacggccagccgatctgcccgctcccggaggggtcgggcagtgccggctggacccgccccgagctccatggtttgcccaaccctgcgcgatggtgactctgggcgcggaggttggcgactggcaaatccgcagatcacagaatgaaggcggggagcgcggccggcggccggcgggggctttctcccccaccccagcgcccagggaagcggctcaaccacctgaatccggaaaacgccaacaagtagtttctcgtcggagaagggcggctcacctgggcgccaagactcagtcccgctgcccagagaacctcgtccactcggaaaccaaagcagaaccacttttctctcggtctcgttaagtcatgtctgagtcacagagatgggcaagatcgagaacaacgagagggtgatcctcaatgtcgggggcacccggcacgaaacctaccgcagcaccctcaagaccctgcctggaacacgcctggcccttcttgcctcctccgagcccccaggcgactgcttgaccacggcgggcgacaagctgcagccgtcgccgcctccactgtcgccgccgccgagagcgcccccgctgtcccccgggccaggcggctgcttcgagggcggcgcgggcaactgcagttcccgcggcggcagggccagcgaccatcccggtggcggccgcgagttcttcttcgaccggcacccgggcgtcttcgcctatgtgctcaattactaccgcaccggcaagctgcactgccccgcagacgtgtgcgggccgctcttcgaggaggagctggccttctggggcatcgacgagaccgacgtggagccctgctgctggatgacctaccggcagcaccgcgacgccgaggaggcgctggacatcttcgagacccccgacctcattggcggcgaccccggcgacgacgaggacctggcggccaagaggctgggcatcgaggacgcggcggggctcgggggccccgacggcaaatctggccgctggaggaggctgcagccccgcatgtgggccctcttcgaagacccctactcgtccagagccgccaggtttattgcttttgcttctttattcttcatcctggtttcaattacaactttttgcctggaaacacatgaagctttcaatattgttaaaaacaagacagaaccagtcatcaatggcacaagtgttgttctacagtatgaaattgaaacggatcctgccttgacgtatgtagaaggagtgtgtgtggtgtggtttacttttgaatttttagtccgtattgttttttcacccaataaacttgaattcatcaaaaatctcttgaatatcattgactttgtggccatcctacctttctacttagaggtgggactcagtgggctgtcatccaaagctgctaaagatgtgcttggcttcctcagggtggtaaggtttgtgaggatcctgagaattttcaagctcacccgccattttgtaggtctgagggtgcttggacatactcttcgagctagtactaatgaatttttgctgctgataattttcctggctctaggagttttgatatttgctaccatgatctactatgccgagagagtgggagctcaacctaacgacccttcagctagtgagcacacacagttcaaaaacattcccattgggttctggtgggctgtagtgaccatgactaccctgggttatggggatatgtacccccaaacatggtcaggcatgctggtgggagccctgtgtgctctggctggagtgctgacaatagccatgccagtgcctgtcattgtcaataattttggaatgtactactccttggcaatggcaaagcagaaacttccaaggaaaagaaagaagcacatccctcctgctcctcaggcaagctcacctactttttgcaagacagaattaaatatggcctgcaatagtacacagagtgacacatgtctgggcaaagacaatcgacttctggaacataacagatcagataactgcaaagaggttgtcattactggttacacgcaagccgaggccagatctcttacttaatgacttggggaaggcacaaaacatgagagaaagtgttgtacagaatttatcatggattattgactgctgagaaagggacagtggaatttagccataccaaggactatactggaaacagacttctgctgctgaatgtgccctgatgtgaccaggttgcacttggaagagatcctcgcgtcttcatgaggcacttaaagcttataaaagaactgcggctggaactcatctggtgctccccatgagagtgctctgcttgtagactggccagtgtccatgaaacaactgtaaataccaacatgtgtgcatgggtcaacagtcttggccatttctcatcaaaagaagccaaattcatgatcaacatctctgaagtttcaagtaaggcccacacttctttgaattactcttcatgggcccacattaggttgtgctgtgaattacttaaggcagtgatactgatgtagtatagttttgtcttaatttcccttatttctacttctttggttgaatctatgaacttgattgtataattttcttataaattactgatgtaatcagcttgtcaattatgttgtgaaattgttagtattcatttatcaaaaatgacctatgtttagtcacatatttgtttagttctgggaaattgttatagcttaaatggaactcaccaacattattcatagtttaagtcttttatcattattacctcaattataaatattacaaaaacataattctggcaatgagagtatttttttattcaatgatcaaggagcaatgtcagtatatagtagaatatcaattaaattatatcctaaaatgtatattttgcataaaagagatattctttaatcaattacttttttgtgagttttgtggcaaatgaagcttgtacgtgtctttaaaactgttgtagatgaaactgtataagatttttacatcttgcttaatcaatattttcagagtctattagttcccctgggattctgaatataacatatagcctattataaatccctgtatcgtggaccttttgtgaacatttcaaggcgcatgcacaaccttgatgataaccagtggaaatgtaactaactgaaatgaagaataaaaggcaaatgagctgggg

SEQ ID NO: 246682 - DNA, 1677 bp, Artificial Sequence
  derived and/or modified sequence
atgggcaagattgagaataacgagcgtgtgattttgaatgtcggcggaacaaggcacgaaacctatagatcgaccctgaaaacgctccctggtacgcgactggcactgcttgctagctcggagccacctggagattgcctgactactgccggagacaagctgcagccttctccccctcctttatctccgccaccccgagcacccccactgagtccgggacctggtggttgcttcgaggggggagctgggaattgtagctcgagaggtggccgagcttccgatcaccctggagggggaagagagtttttctttgacaggcatcccggtgttttcgcctacgtgctcaattactacaggactggtaagctccactgccccgcagatgtttgcggaccactgtttgaggaggagcttgcattttgggggatcgatgagaccgacgtggaaccttgttgttggatgacataccgccagcatcgggacgcagaagaggcacttgatatcttcgagacaccggatcttattggaggagacccgggagacgacgaggatttagctgcaaaaagactcggcatcgaggatgccgctgggctcggtggaccagacgggaagagcggtcgctggcgccgtctccagccgagaatgtgggccctgtttgaggacccatactcctccagagccgcaagatttatagctttcgcaagcctcttttttatcttagtgagcatcacaaccttctgtcttgagacccatgaagcctttaacattgtgaaaaataagacagagcctgttatcaacggcacttcagtggtgttacagtatgagatcgagacggatccagccctgacttatgtcgaaggcgtctgtgtggtttggtttactttcgaattcctcgtcaggatcgtcttttcacctaataagctggaattcatcaagaacctcttgaacattatagatttcgttgccattttacctttctacttggaggtgggcctgtccgggttatcatccaaagcagctaaagacgtgttggggttcttaagagtcgtccgattcgtgaggatcttaagaatttttaaactgacccgccactttgtggggctccgggtactcggccatacactcagagcctccaccaacgagtttctgttacttattatctttctggccctgggggtccttatcttcgcgacaatgatatactacgctgagcgcgtcggagctcaacccaacgatccatcagcttctgagcacacccagttcaagaacatcccaattggcttctggtgggccgtagtgacaatgacaaccctcggatatggggacatgtatcctcagacatggagcggtatgcttgtcggtgccctatgtgctctggccggagtgctgacgatcgctatgcccgttcccgtgattgtcaacaatttcgggatgtactactctctggcaatggcaaagcagaagttgcctaggaaaaggaagaaacacattccaccagcccctcaggcgtcctctcctaccttttgcaagaccgagcttaacatggcctgtaatagcacacagagcgatacctgtcttggaaaagataacaggcttctggagcataaccggagcgataactgcaaggaagtggtcattaccggctacactcaggcagaggcgcgatccttaacatag

SEQ ID NO: 246683 - DNA, 1677 bp, Artificial Sequence
  derived and/or modified sequence
atgggcaagatcgagaacaacgagagagtgatcctgaacgtgggcggcaccagacacgagacctacagaagcaccctgaagaccctgcccggcaccagactggccctgctggccagcagcgagccccccggcgactgcctgaccaccgccggcgacaagctgcagcccagccccccccccctgagccccccccccagagccccccccctgagccccggccccggcggctgcttcgagggcggcgccggcaactgcagcagcagaggcggcagagccagcgaccaccccggcggcggcagagagttcttcttcgacagacaccccggcgtgttcgcctacgtgctgaactactacagaaccggcaagctgcactgccccgccgacgtgtgcggccccctgttcgaggaggagctggccttctggggcatcgacgagaccgacgtggagccctgctgctggatgacctacagacagcacagagacgccgaggaggccctggacatcttcgagacccccgacctgatcggcggcgaccccggcgacgacgaggacctggccgccaagagactgggcatcgaggacgccgccggcctgggcggccccgacggcaagagcggcagatggagaagactgcagcccagaatgtgggccctgttcgaggacccctacagcagcagagccgccagattcatcgccttcgccagcctgttcttcatcctggtgagcatcaccaccttctgcctggagacccacgaggccttcaacatcgtgaagaacaagaccgagcccgtgatcaacggcaccagcgtggtgctgcagtacgagatcgagaccgaccccgccctgacctacgtggagggcgtgtgcgtggtgtggttcaccttcgagttcctggtgagaatcgtgttcagccccaacaagctggagttcatcaagaacctgctgaacatcatcgacttcgtggccatcctgcccttctacctggaggtgggcctgagcggcctgagcagcaaggccgccaaggacgtgctgggcttcctgagagtggtgagattcgtgagaatcctgagaatcttcaagctgaccagacacttcgtgggcctgagagtgctgggccacaccctgagagccagcaccaacgagttcctgctgctgatcatcttcctggccctgggcgtgctgatcttcgccaccatgatctactacgccgagagagtgggcgcccagcccaacgaccccagcgccagcgagcacacccagttcaagaacatccccatcggcttctggtgggccgtggtgaccatgaccaccctgggctacggcgacatgtacccccagacctggagcggcatgctggtgggcgccctgtgcgccctggccggcgtgctgaccatcgccatgcccgtgcccgtgatcgtgaacaacttcggcatgtactacagcctggccatggccaagcagaagctgcccagaaagagaaagaagcacatcccccccgccccccaggccagcagccccaccttctgcaagaccgagctgaacatggcctgcaacagcacccagagcgacacctgcctgggcaaggacaacagactgctggagcacaacagaagcgacaactgcaaggaggtggtgatcaccggctacacccaggccgaggccagaagcctgacctag

SEQ ID NO: 246684 - protein, 182 aa, Artificial Sequence
  derived and/or modified sequence
MADSENQGPAEPSQAAAAAEAAAEEVMAEGGAQGGDCDSAAGDPDSAAGQMAEEPQTPAENAPKPKNDFIESLPNSVKCRVLALKKLQKRCDKIEAKFDKEFQALEKKYNDIYKPLLAKIQELTGEMEGCAWTLEGEEEEEEEYEDDEEEGEDEEEEEAAAEAAAGAKHDDAHAEMPDDAKK

SEQ ID NO: 246685 - protein, 145 aa, Artificial Sequence
  derived and/or modified sequence
MADSENQGPAEPSQAAAAAEAAAEEVMAEGGAQGGDCDSAAGDPDSAAGQMAEEPQTPAENAPKPKNDFIESLPNSVKCRVLALKKLQKRCDKIEAKFDKEFQALEKKYNDIYKPLLAKIQELTGEMEGCAWTLEGEERRKRVRG

SEQ ID NO: 246686 - DNA, 549 bp, Artificial Sequence
  derived and/or modified sequence
atggcagattcagagaatcaagggccggcagaaccttctcaggcggccgcagccgccgaggcagctgccgaggaagtgatggctgaaggcggtgcacagggtggtgactgcgacagtgctgctggagatcccgattctgctgccggccagatggccgaggaaccccaaaccccagctgagaacgctcctaaacccaaaaacgatttcatagagagtctgcccaacagcgtgaaatgtcgggtgctggcgctgaaaaaacttcagaagcggtgtgacaagattgaggccaagtttgataaagaattccaagcacttgagaagaagtacaatgatatctacaagcctttgctagcaaaaattcaggaactcacaggagagatggaggggtgtgcctggacgctggaaggcgaagaagaagaggaagaggaatatgaggacgatgaagaggagggggaggacgaggaggaggaggaggccgccgccgaggctgcagcgggggctaagcacgacgacgctcacgctgagatgcctgacgatgccaagaagtag

SEQ ID NO: 246687 - DNA, 438 bp, Artificial Sequence
  derived and/or modified sequence
atggctgattcagagaatcagggccctgccgaaccaagccaggcggcggcagcagctgaggccgcagccgaggaggtgatggcagagggtggggcccaaggaggggactgtgacagcgccgccggcgaccctgactcagccgccgggcagatggccgaggagcctcagaccccagcggaaaatgcgcccaagcctaagaatgatttcattgaatcactccctaattccgttaaatgtcgcgtattagccttgaagaagctacagaaacggtgcgataaaattgaggctaagtttgataaagaattccaagctctggagaaaaaatacaatgacatctacaaacccttactggcaaagatccaggagctgacaggggagatggaaggctgcgcctggactttggaaggcgaggagagacgtaagcgagtaaggggctag

SEQ ID NO: 246688 - DNA, 549 bp, Artificial Sequence
  derived and/or modified sequence
atggctgacagcgagaaccagggccctgctgagcccagccaggccgctgctgctgctgaggccgctgctgaggaggtgatggccgagggcggggcccagggcggggactgtgacagcgctgctggggaccctgacagcgctgctggccagatggccgaggagccccagaccccagcagaaaatgcccccaagcccaagaatgacttcatcgagagcctgcccaacagcgtgaagtgccgggtgctggccctgaagaagctgcagaagagatgtgacaagattgaggccaagtttgacaaggagttccaggccctggagaagaagtacaatgacatctacaagcccctgctggccaagatccaggagctgaccggggagatggagggctgtgcctggaccctggagggggaggaggaggaggaggaggagtatgaagatgatgaggaggagggggaggatgaggaggaggaggaggccgctgctgaggccgctgctggggccaagcatgatgatgcccacgccgagatgccagatgatgccaagaagtag

SEQ ID NO: 246689 - DNA, 438 bp, Artificial Sequence
  derived and/or modified sequence
atggctgacagcgagaaccagggccctgctgagcccagccaggccgctgctgctgctgaggccgctgctgaggaggtgatggccgagggcggggcccagggcggggactgtgacagcgctgctggggaccctgacagcgctgctggccagatggccgaggagccccagaccccagcagaaaatgcccccaagcccaagaatgacttcatcgagagcctgcccaacagcgtgaagtgccgggtgctggccctgaagaagctgcagaagagatgtgacaagattgaggccaagtttgacaaggagttccaggccctggagaagaagtacaatgacatctacaagcccctgctggccaagatccaggagctgaccggggagatggagggctgtgcctggaccctggagggggaggagaggaggaagagggtgcggggctag

SEQ ID NO: 246690 - DNA, 549 bp, Artificial Sequence
  derived and/or modified sequence
atggccgacagcgagaaccagggccccgccgagcccagccaggccgcggcagcggctgaggccgccgccgaagaagtgatggccgaggggggcgcccaaggtggagattgcgatagcgctgccggtgacccagactctgctgctggccaaatggccgaggagccccagacgcccgccgagaacgcccccaaacccaaaaacgactttatcgagtccttaccgaactccgtcaagtgtcgcgtacttgccctgaaaaagctccagaagcgttgcgacaaaatcgaagccaagttcgacaaggagttccaggcactcgaaaaaaaatataatgacatctacaagcctctgctggctaagatccaagagctcactggagaaatggaaggctgtgcttggacgctggaaggagaggaagaggaggaagaagaatatgaggacgacgaggaggaaggcgaagacgaggaagaggaggaagctgcagctgaggcagctgctggggcaaagcatgatgacgcccacgcggagatgccagatgatgctaagaagtag

SEQ ID NO: 246691 - DNA, 438 bp, Artificial Sequence
  derived and/or modified sequence
atggccgacagcgagaaccagggccccgccgagcccagccaggccgcggccgccgccgaagccgccgcagaagaggtcatggccgaaggtggtgctcagggaggcgattgtgactccgcagctggggaccctgacagcgccgctggccagatggccgaggaaccgcagaccccagctgagaacgcccccaagcctaaaaatgactttatcgaatcgctgcccaactcagtgaagtgtagagtgctggccctgaagaaactgcaaaagcggtgcgataaaattgaagcgaagttcgataaggagttccaggccttagaaaaaaagtataacgatatctataaacctctcctcgcaaaaatccaggagcttacaggggaaatggagggatgtgcttggaccttggagggggaggagcgacggaagcgcgtacgaggatag

SEQ ID NO: 246692 - DNA, 2321 bp, Artificial Sequence
  derived and/or modified sequence
tctaagaggtgatcaaacgccagctatggagagagatgcagaggaaagcgaagacatatgcactggcatttgtagaagggcctggatgggggtgaggagcacacggaaaatggtctgaggccatctatgcagttcctgaagaagcacctcgggcagctactgacactcccagcccagctctacaggggtgggtacatgggtgggctgggaacagggtgtctgtccaacaggcgggtgttgagggcccagaagatgtcagggtagcaacaggaggaatctggtgcagtatgagcacacggccgtcagctgatagtgggaagccagtcaagtgccgcgaaagcaggaggcggggccgcggccaacgtcattcccgcggccgcacgtcaccgccacttgccgcatccgcaagatctctctggaccagctcgggtgcagggcctctgcgggagccctcctagacctctgcggcttctcctctaacatggccgactcggaaaaccaggggcctgcggagcctagccaggcggcggcagcggcggaggcagcggcagaggaggtaatggcggaaggcggtgcgcagggtggagactgtgacagcgcggctggtgaccctgacagcgcggctggtcagatggctgaggagccccagacccctgcagagaatgccccaaagccgaaaaatgactttatcgagagcctgcctaattcggtgaaatgccgagtcctggccctcaaaaagctgcagaagcgatgcgataagatagaagccaaatttgataaggaatttcaggctctggaaaaaaagtataatgacatctataagcccctactcgccaagatccaagagctcaccggcgagatggaggggtgtgcatggaccttggagggggaggaggaggaggaagaggagtacgaggatgacgaggaggagggggaagacgaggaggaggaggaggctgcggcagaggctgccgcgggggccaaacatgacgatgcccacgccgagatgcctgatgacgccaagaagtaaggggggcagagatggatgaagagaaagcccacgaagaaaaaagcctggttttgtttttcccagaatatcgatggacttaaaaaggctcaggtttttgaccaaaatacaatgtgaatttattctgacattcctaaaatagattaaattaaagcaattagatcctggccagctcgattcaaatttgactttcattttgaacataataaatatatcaaaaggtgttaaagaaaactgaattaaacccaaaattatgttttcatggtctcttctctgaggattgaggtttacaaagggtgttagcagatgcgaagtaaagaacgtcactttgaaacccattcatcacacagcatacgctacacatggaacacccaagccatgactgaacacgttctcagtgcttaattcttaaatttctttactcatgacatttcgcagtgcagagaaggcagaacccaagaaaaacgtcatctttgagactttgcttttgtaacgcagacatcagctttacacttcacaggagattgatggcattgaggaagattgcaatggagatcatgacactactgttaataaggccaggaaaactgccatttcaagttctgaaaaatgttttgagtatttgaatttagagaaacaacatggttccaagaaggagggtgtaaaacctgtaaaatactgtcaacatatgtattcattagttacaatctcatgtttgtgttttcttagtactgtctatttacaaacacgtaaaaaataccccaaatatgtttaagtattaaatcactttacctagcgttttagaaatattaatttacttgaagagatgtagaatgtagcaaattatgtaaagcatgtgtatccagcgttatgtactttgcgccttgtgacgtctttctgtcatgtagcttttagggtgtagctgtgaaaatcatcagaactcttcactgaagctaatgtttggaaaaaatatatacttgaagaaccaatccaagtgtgtgcccctacccccagctcagaagtagaaagggtttaagtttgcttgtattagctgtgccttcattattttgctatgtaaatgtgacatattaattataaaatggtgcataatcaaattttactgcttgaggacagatgcatacagtaaggatttttaggaagaatatatttaatgtaaagactcttagcttctgtgtgggttttgaattatgtgtgagccagtgatctataaagaaacataagcttaaagttgtttatcactgtggtgttaataaaacagtattttcaaaaaata

SEQ ID NO: 246693 - DNA, 1889 bp, Artificial Sequence
  derived and/or modified sequence
agctcgggtgcagggcctctgcgggagccctcctagacctctgcggcttctcctctaacatggccgactcggaaaaccaggggcctgcggagcctagccaggcggcggcagcggcggaggcagcggcagaggaggtaatggcggaaggcggtgcgcagggtggagactgtgacagcgcggctggtgaccctgacagcgcggctggtcagatggctgaggagccccagacccctgcagagaatgccccaaagccgaaaaatgactttatcgagagcctgcctaattcggtgaaatgccgagtcctggccctcaaaaagctgcagaagcgatgcgataagatagaagccaaatttgataaggaatttcaggctctggaaaaaaagtataatgacatctataagcccctactcgccaagatccaagagctcaccggcgagatggaggggtgtgcatggaccttggagggggaggagaggaggaagagggtacgaggatgacgaggaggagggggaagacgaggaggaggaggaggctgcggcagaggctgccgcgggggccaaacatgacgatgcccacgccgagatgcctgatgacgccaagaagtaaggggggcagagatggatgaagagaaagcccacgaagaaaaaagcctggttttgtttttcccagaatatcgatggacttaaaaaggctcaggtttttgaccaaaatacaatgtgaatttattctgacattcctaaaatagattaaattaaagcaattagatcctggccagctcgattcaaatttgactttcattttgaacataataaatatatcaaaaggtgttaaagaaaactgaattaaacccaaaattatgttttcatggtctcttctctgaggattgaggtttacaaagggtgttagcagatgcgaagtaaagaacgtcactttgaaacccattcatcacacagcatacgctacacatggaacacccaagccatgactgaacacgttctcagtgcttaattcttaaatttctttactcatgacatttcgcagtgcagagaaggcagaacccaagaaaaacgtcatctttgagactttgcttttgtaacgcagacatcagctttacacttcacaggagattgatggcattgaggaagattgcaatggagatcatgacactactgttaataaggccaggaaaactgccatttcaagttctgaaaaatgttttgagtatttgaatttagagaaacaacatggttccaagaaggagggtgtaaaacctgtaaaatactgtcaacatatgtattcattagttacaatctcatgtttgtgttttcttagtactgtctatttacaaacacgtaaaaaataccccaaatatgtttaagtattaaatcactttacctagcgttttagaaatattaatttacttgaagagatgtagaatgtagcaaattatgtaaagcatgtgtatccagcgttatgtactttgcgccttgtgacgtctttctgtcatgtagcttttagggtgtagctgtgaaaatcatcagaactcttcactgaagctaatgtttggaaaaaatatatacttgaagaaccaatccaagtgtgtgcccctacccccagctcagaagtagaaagggtttaagtttgcttgtattagctgtgccttcattattttgctatgtaaatgtgacatattaattataaaatggtgcataatcaaattttactgcttgaggacagatgcatacagtaaggatttttaggaagaatatatttaatgtaaagactcttagcttctgtgtgggttttgaattatgtgtgagccagtgatctataaagaaacataagcttaaagttgtttatcactgtggtgttaataaaacagtattttc

SEQ ID NO: 246694 - DNA, 549 bp, Artificial Sequence
  derived and/or modified sequence
atggctgattccgaaaaccagggacccgcagaacctagtcaagccgctgccgctgcagaggccgcagctgaagaagttatggccgagggaggagcccaaggcggtgactgcgattcagctgcaggggaccccgattccgccgctggacagatggccgaagagccacagacgcctgccgaaaatgcaccaaagcccaaaaatgattttattgaaagccttcccaattctgtcaagtgtagggtactcgctctgaagaaactgcagaagaggtgtgataagatcgaggctaaattcgacaaagaattccaagccctggagaaaaagtacaacgacatctacaaaccactcctggcaaagatacaggagcttaccggcgagatggagggctgcgcatggaccctcgagggtgaagaggaagaggaagaagaatacgaggacgacgaagaagagggggaggatgaagaggaggaagaagcagccgcagaagcggcagcaggagcgaagcacgatgatgcccatgcggagatgcctgacgacgccaaaaagtag

SEQ ID NO: 246695 - DNA, 438 bp, Artificial Sequence
  derived and/or modified sequence
atggctgattccgaaaaccaagggccagccgaacctagccaggccgcagccgcagcagaggccgcagccgaagaagtaatggccgaaggaggagctcaaggtggagattgcgattcagccgctggcgaccctgatagcgctgccggacaaatggccgaggaaccccagaccccagcagagaacgcccctaagccaaaaaacgactttatcgagtccctgcctaactctgttaaatgcagggtcctcgctctgaagaaactccagaagcggtgtgataagatcgaggccaagttcgacaaggaattccaggcactcgagaagaaatacaatgacatttacaagccccttctggctaagattcaagagttgacaggggagatggagggatgcgcatggacgctggagggtgaagagcgacggaagagagtgcggggttag

SEQ ID NO: 246696 - DNA, 549 bp, Artificial Sequence
  derived and/or modified sequence
atggccgacagcgagaaccagggccccgccgagcccagccaggccgccgccgccgccgaggccgccgccgaggaggtgatggccgagggcggcgcccagggcggcgactgcgacagcgccgccggcgaccccgacagcgccgccggccagatggccgaggagccccagacccccgccgagaacgcccccaagcccaagaacgacttcatcgagagcctgcccaacagcgtgaagtgcagagtgctggccctgaagaagctgcagaagagatgcgacaagatcgaggccaagttcgacaaggagttccaggccctggagaagaagtacaacgacatctacaagcccctgctggccaagatccaggagctgaccggcgagatggagggctgcgcctggaccctggagggcgaggaggaggaggaggaggagtacgaggacgacgaggaggagggcgaggacgaggaggaggaggaggccgccgccgaggccgccgccggcgccaagcacgacgacgcccacgccgagatgcccgacgacgccaagaagtag

SEQ ID NO: 246697 - DNA, 438 bp, Artificial Sequence
  derived and/or modified sequence
atggccgacagcgagaaccagggccccgccgagcccagccaggccgccgccgccgccgaggccgccgccgaggaggtgatggccgagggcggcgcccagggcggcgactgcgacagcgccgccggcgaccccgacagcgccgccggccagatggccgaggagccccagacccccgccgagaacgcccccaagcccaagaacgacttcatcgagagcctgcccaacagcgtgaagtgcagagtgctggccctgaagaagctgcagaagagatgcgacaagatcgaggccaagttcgacaaggagttccaggccctggagaagaagtacaacgacatctacaagcccctgctggccaagatccaggagctgaccggcgagatggagggctgcgcctggaccctggagggcgaggagagaagaaagagagtgagaggctag

SEQ ID NO: 246698 - protein, 215 aa, Artificial Sequence
  derived and/or modified sequence
MCTEGAFPHRSACSLPLTHVHTHIHVCVPVLWGSVPRGMKLQCVSLWLLGTILILCSVDNHGLRRCLISTDMHHIEESFQEIKRAIQAKDTFPNVTILSTLETLQIIKPLDVCCVTKNLLAFYVDRVFKDHQEPNPKILRKISSIANSFLYMQKTLRQCQEQRQCHCRQEATNATRVIHDNYDQLEVHAAAIKSLGELDVFLAWINKNHEVMFSA

SEQ ID NO: 246699 - DNA, 648 bp, Artificial Sequence
  derived and/or modified sequence
atgtgcactgaaggggcctttccccatcgtagtgcgtgctctctgcctcttacccatgtgcatactcacatccatgtttgcgtgcctgtgctttggggctcagtcccaagggggatgaaactgcagtgtgtgagcctttggcttctaggcacgatcctcatcctgtgcagtgtagataatcacggtctcagacggtgtctgattagcactgatatgcatcacattgaggaaagtttccaggaaataaagcgggcgatccaggccaaagatactttcccaaacgtcaccatcctctcaacattggagacattgcagattataaaaccactcgacgtgtgctgcgtgacgaagaacctacttgctttctatgtcgaccgggtcttcaaagaccatcaggagcctaaccccaagatactcagaaaaattagttccatagcaaattccttcctgtacatgcaaaagactcttagacagtgccaagaacagcgtcagtgtcactgcaggcaggaggccacaaacgccaccagagtgattcacgataactacgaccagctggaggtgcacgctgctgcaatcaagagtttgggagaactggatgtctttctggcatggatcaataagaaccatgaagtcatgttctccgcgtag

SEQ ID NO: 246700 - DNA, 1473 bp, Artificial Sequence
  derived and/or modified sequence
gctggagtgcaatggtgaaattatagcagactgcagtcttcaactcctgacctcaagcaattgtcctgcctcctcaacttcctgactacaggtgtgcatgaggactacaggcaggcatgtgccaacacatgcagctttttttttttttttttttcagagatgtggtctcgctttgttgcctacactggtctcaaactcttggcctcaagggatcctcccacctcggcttcccaaagtgcagagattacagtctcattttctctctctctgcattaatcaagaatgagagaaccctccaggggacaagatgaaggggaaatagatgatgtgcaaagaaatccttgctttatgaggggaaaaagtgttcctcatgaagttcaacaaaatgatgcaggtaaagcagttagctagcacctggcacatggcagacactcatagctgcctaaggcattggagaactggatcgtgctgcagccagaggcacctgcagagcctcatgggctggctgctgcagggtgtggctgattgagagtgcttttgtgagttggcctgcagggtacacttggtaacgtgccacagctctcaggaaagtgacctaagttggatttttctgcatggacatagaattgcaaaaaattctcatttgcatggagatggggagtttatttttcctagaagctgcatgtcaagacccagaagaaagaggcatttcataataatgattaatcagctatatcttaaagaagaaagaaaacaattaaggaaatacaatactaagaaaacaaggggaaaaaacaatctccccaaggtggatccacccagcaaaccttgacagcatttcctcttatccacctgaataaaaatgaccagccctttccaaatggcagagagcactgagaggagacacaaggagcagcccgcaagcaccaagtgagaggcatgaagttacagtgtgtttccctttggctcctgggtacaatactgatattgtgctcagtagacaaccacggtctcaggagatgtctgatttccacagacatgcaccatatagaagagagtttccaagaaatcaaaagagccatccaagctaaggacaccttcccaaatgtcactatcctgtccacattggagactctgcagatcattaagcccttagatgtgtgctgcgtgaccaagaacctcctggcgttctacgtggacagggtgttcaaggatcatcaggagccaaaccccaaaatcttgagaaaaatcagcagcattgccaactctttcctctacatgcagaaaactctgcggcaatgtcaggaacagaggcagtgtcactgcaggcaggaagccaccaatgccaccagagtcatccatgacaactatgatcagctggaggtccacgctgctgccattaaatccctgggagagctcgacgtctttctagcctggattaataagaatcatgaagtaatgttctcagcttga

SEQ ID NO: 246701 - DNA, 1030 bp, Artificial Sequence
  derived and/or modified sequence
tgcacacactgacaggagtccaagaatgtgcactgagggagcgtttccgcacagatctgcgtgttccttaccactcacacatgtgcacacacatatccatgtgtgtgtgccagtgctttggggctctgttccacggggcatgaagttacagtgtgtttccctttggctcctgggtacaatactgatattgtgctcagtagacaaccacggtctcaggagatgtctgatttccacagacatgcaccatatagaagagagtttccaagaaatcaaaagagccatccaagctaaggacaccttcccaaatgtcactatcctgtccacattggagactctgcagatcattaagcccttagatgtgtgctgcgtgaccaagaacctcctggcgttctacgtggacagggtgttcaaggatcatcaggagccaaaccccaaaatcttgagaaaaatcagcagcattgccaactctttcctctacatgcagaaaactctgcggcaatgtcaggaacagaggcagtgtcactgcaggcaggaagccaccaatgccaccagagtcatccatgacaactatgatcagctggaggtccacgctgctgccattaaatccctgggagagctcgacgtctttctagcctggattaataagaatcatgaagtaatgttctcagcttgatgacaaggaacctgtatagtgatccagggatgaacaccccctgtgcggtttactgtgggagacagcccaccttgaaggggaaggagatggggaaggccccttgcagctgaaagtcccactggctggcctcaggctgtcttattccgcttgaaaatagccaaaaagtctactgtggtatttgtaataaactctatctgctgaaagggcctgcaggccatcctgggagtaaagggctgccttcccatctaatttattgtaaagtcatatagtccatgtctgtgatgtgagccaagtgatatcctgtagtacacattgtactgagtggtttttctgaataaattccatattttacctatg

SEQ ID NO: 246702 - DNA, 648 bp, Artificial Sequence
  derived and/or modified sequence
atgtgcacagaaggagccttcccccacaggtctgcctgcagcctgcccctgacccacgtgcacacccacatccacgtgtgtgtgcctgtgctgtggggctctgtgccccggggcatgaagctgcagtgtgtgtccctgtggctgctgggcaccatcctgatcctgtgcagcgtggacaaccacggcctgcggcgctgcctgatcagcacagacatgcaccacatcgaggagagcttccaggagatcaagagggccatccaggccaaggacaccttccccaacgtgaccatcctgagcaccctggagaccctgcagatcatcaagcccctggatgtgtgctgcgtgaccaagaacctgctggccttctacgtggacagagtcttcaaggaccaccaggagcccaaccccaagatcctgaggaagatcagcagcatcgccaacagcttcctgtacatgcagaagaccctgcggcagtgccaggagcagaggcagtgccactgccggcaggaggccaccaatgccaccagggtcatccatgacaactatgaccagctggaggtgcatgctgctgccatcaagagcctgggggagctggatgtgttcctggcctggatcaacaagaaccacgaggtgatgttcagcgcctag

SEQ ID NO: 246703 - DNA, 648 bp, Artificial Sequence
  derived and/or modified sequence
atgtgcaccgagggcgccttcccccaccggagcgcctgcagcctgccactgacccacgttcatacacacatccacgtgtgcgtccctgtcctgtgggggagtgttccacgcggcatgaaattgcagtgcgtctcgctgtggctccttgggaccatcctcattttgtgttccgttgataaccacggcctgagacgttgcttgatctctaccgacatgcaccacatagaagagtcatttcaagagattaaaagggctattcaggcgaaagatacgttcccaaacgtaacaatactaagtaccttggaaaccctacaaatcattaaaccactggatgtctgttgtgtgacaaagaatcttctcgcattttacgttgatagagtctttaaggaccaccaggagccgaaccctaaaattctccgtaagatcagcagcattgccaattcattcctgtacatgcagaaaactctccgccagtgtcaggagcagcgccaatgtcattgccgacaggaggccacaaacgcgactagggtgattcatgacaattacgaccaattagaagttcatgctgccgctatcaagagtctcggggagctggatgtctttctcgcctggattaacaaaaatcacgaggtgatgttcagtgcttag

SEQ ID NO: 246704 - DNA, 648 bp, Artificial Sequence
  derived and/or modified sequence
atgtgtactgagggcgcttttccacaccgtagtgcctgtagtctgccactaacccacgtccatacgcacattcacgtttgcgtgcccgtgctgtggggctctgtccctcggggaatgaaactgcagtgtgttagcctatggcttttaggcactatactgatactttgtagtgttgataaccacggacttaggcgatgtctcataagtaccgacatgcatcatatagaggagtcttttcaggaaataaaacgcgcaatccaggcgaaggacaccttccctaatgtcaccattctgtcaacactggaaaccctgcaaatcatcaagcctctggacgtgtgctgtgtaactaaaaacctgttggccttctatgtggaccgcgtgtttaaagaccaccaggaacctaacccaaaaatccttaggaagatcagttccatcgctaactctttcctgtatatgcagaaaactcttcgtcaatgtcaggaacaaagacaatgtcactgcaggcaagaagcaaccaatgcaacacgggttatacacgacaactacgatcagctggaggttcatgcagcggcaatcaaaagtttgggtgagctggatgtgttcctggcttggatcaataaaaatcacgaggtgatgttttcagcgtag

SEQ ID NO: 246705 - DNA, 648 bp, Artificial Sequence
  derived and/or modified sequence
atgtgcaccgagggcgccttcccccacagaagcgcctgcagcctgcccctgacccacgtgcacacccacatccacgtgtgcgtgcccgtgctgtggggcagcgtgcccagaggcatgaagctgcagtgcgtgagcctgtggctgctgggcaccatcctgatcctgtgcagcgtggacaaccacggcctgagaagatgcctgatcagcaccgacatgcaccacatcgaggagagcttccaggagatcaagagagccatccaggccaaggacaccttccccaacgtgaccatcctgagcaccctggagaccctgcagatcatcaagcccctggacgtgtgctgcgtgaccaagaacctgctggccttctacgtggacagagtgttcaaggaccaccaggagcccaaccccaagatcctgagaaagatcagcagcatcgccaacagcttcctgtacatgcagaagaccctgagacagtgccaggagcagagacagtgccactgcagacaggaggccaccaacgccaccagagtgatccacgacaactacgaccagctggaggtgcacgccgccgccatcaagagcctgggcgagctggacgtgttcctggcctggatcaacaagaaccacgaggtgatgttcagcgcctag

SEQ ID NO: 246706 - protein, 723 aa, Artificial Sequence
  derived and/or modified sequence
MGILERVVRRNGRVDRSLKDECDTAEKKAKVIAGMNAVEENQGPGESQKVEEASPPAVQQPTDPASPTVATTPEPVGSDAGDKNATKAGDDEPEYEDGRGFGIGELVWGKLRGFSWWPGRIVSWWMTGRSRAAEGTRWVMWFGDGKFSVVCVEKLMPLSSFCSAFHQATYNKQPMYRKAIYEVLQVASSRAGKLFPVCHDSDESDTAKAVEVQNKPMIEWALGGFQPSGPKGLEPPEEEKNPYKEVYTDMWVEPEAAAYAPPPPAKKPRKSTAEKPKVKEIIDERTRERLVYEVRQKCRNIEDICISCGSLNVTLEHPLFVGGMCQNCKNCFLECAYQYDDDGYQSYCTICCGGREVLMCGNNNCCRCFCVECVDLLVGPGAAQAAIKEDPWNCYMCGHKGTYGLLRRREDWPSRLQMFFANNHDQEFDPPKVYPPVPAEKRKPIRVLSLFDGIATGLLVLKDLGIQVDRYIASEVCEDSITVGMVRHQGKIMYVGDVRSVTQKHIQEWGPFDLVIGGSPCNDLSIVNPARKGLYEGTGRLFFEFYRLLHDARPKEGDDRPFFWLFENVVAMGVSDKRDISRFLESNPVMIDAKEVSAAHRARYFWGNLPGMNRPLASTVNDKLELQECLEHGRIAKFSKVRTITTRSNSIKQGKDQHFPVFMNEKEDILWCTEMERVFGFPVHYTDVSNMSRLARQRLLGRSWSVPVIRHLFAPLKEYFACV

SEQ ID NO: 246707 - DNA, 2172 bp, Artificial Sequence
  derived and/or modified sequence
atgggcattttggagcgagtggtgaggcgcaacggacgcgtggacaggtcactgaaggatgagtgcgacacggcagaaaaaaaggccaaagtcattgccggcatgaatgccgtggaggaaaaccagggccccggagaatctcagaaagttgaagaggcctcaccccccgccgttcagcagcctactgaccctgcatctcccactgtcgctactacacctgagcccgtggggagcgatgcaggagacaagaatgcaacgaaggccggggacgacgaaccagagtacgaggacggaaggggctttggcatcggggaactcgtgtggggcaagcttcgtgggtttagctggtggccgggccgcatcgtttcttggtggatgaccggacgcagccgggctgccgaaggaacccgttgggtcatgtggtttggagatggtaagttctccgttgtttgtgttgagaagctaatgcctttaagctctttctgcagtgccttccatcaggctacctacaataagcagcccatgtacaggaaggcgatctacgaggtgttacaggtggcgtctagtcgagccggcaagcttttcccagtgtgccacgacagtgacgagtccgatactgccaaagcggtcgaagtccaaaacaaacctatgatagagtgggccctgggcggcttccaaccgagtggtccgaagggattggagccacccgaggaagagaaaaacccttataaggaggtctatactgatatgtgggttgaacccgaggccgctgcttacgcgcctccgccacccgctaaaaaaccccggaagagcaccgcagagaaacccaaggtcaaggagatcatcgacgagcggacgagggaaaggctggtgtacgaagtccggcagaaatgtagaaacatcgaagacatctgtattagctgcggatcactaaacgtgaccctggagcatccactcttcgtcggaggaatgtgccaaaactgtaagaactgtttcctcgagtgcgcatatcagtacgatgatgacggataccaaagctactgcactatttgctgcggcggccgggaggtacttatgtgtggcaataacaactgttgtcgatgcttttgcgtcgaatgtgtggacctgctcgttggccccggggccgcacaggcagcaatcaaagaggatccatggaattgttatatgtgcggacataaggggacgtacggtctgctccgccgccgagaagactggcccagtcgccttcaaatgttcttcgcaaacaatcatgatcaggagttcgacccacctaaagtctacccccctgtgcctgccgagaagcgcaaaccgattagagtgctgtccctgttcgacggcatagccacaggacttctggtcctgaaggatttgggaattcaggtagatagatacatagcctccgaggtttgcgaggacagtatcactgtcggcatggtgcggcatcagggcaaaattatgtacgttggagatgtgaggtccgtgacccagaagcacatccaggaatgggggcctttcgatcttgttatcgggggctctccatgcaacgatctgtctatagtgaatcctgccaggaaaggcctgtacgaaggcacaggcaggttgttctttgaattctaccggttgctacatgatgcaaggcctaaagagggcgacgatagacctttcttttggctgtttgagaacgtggtggccatgggcgtgtccgataagcgggacatcagtcggtttcttgagagcaacccagtgatgattgacgctaaagaagtgtccgctgctcacagggccaggtatttctgggggaatctccccggcatgaaccggcctctggcatccacagtgaacgacaagctggagctgcaggagtgcctggagcacggcagaatcgccaaattttcaaaagttcgaacaattacaacccgaagtaattctatcaagcagggcaaggatcagcattttcccgttttcatgaacgagaaagaggatatcctgtggtgcaccgaaatggagagggttttcggattccccgttcattacactgatgtgtcaaatatgagcaggctggcccgtcagagattactggggcgtagttggagcgtccctgtcattaggcatttgtttgccccactcaaggaatatttcgcctgtgtctag

SEQ ID NO: 246708 - DNA, 2172 bp, Artificial Sequence
  derived and/or modified sequence
atgggcatcctggagcgggtggtgagaagaaatggccgggtggacaggagcctgaaggatgaatgtgacacagctgagaagaaggccaaggtgattgctggcatgaatgctgtggaggagaaccagggccctggagagagccagaaggtggaggaggccagccccccagctgtgcagcagcccacagatcctgccagccccaccgtggccaccaccccagagcctgtgggcagtgatgctggggacaagaatgccaccaaggctggagatgatgagccagaatatgaagatggccggggctttggaattggagagctggtgtggggcaagctgcggggcttctcctggtggccaggaagaattgtgtcctggtggatgacaggccgcagcagagctgctgagggcacccgctgggtgatgtggtttggagatggcaagttctctgtggtgtgtgtggagaagctgatgcccctgagcagcttctgcagcgccttccaccaggccacctacaacaagcagcccatgtacaggaaggccatctatgaggtgctgcaggtggccagcagcagagctgggaagctgtttcctgtgtgccacgacagtgatgaaagtgacacagccaaggctgtggaggtgcagaacaagcccatgattgagtgggccctgggcggcttccagcccagcggccccaagggcctggagcccccagaggaggagaagaacccctacaaggaggtgtacacagacatgtgggtggagcctgaggccgccgcctatgcccctcctcctccagccaagaagcccaggaagagcacagctgagaagcccaaggtgaaggagatcattgatgagaggacccgggagcggctggtgtatgaggtgcggcagaagtgcagaaatattgaggacatctgcatcagctgtggcagcctgaatgtgaccctggagcaccccctgtttgtgggcggcatgtgccagaactgcaagaactgcttcctggagtgtgcctaccagtatgatgatgatggctaccagagctactgcaccatctgctgcggcggccgggaggtgctgatgtgtggcaacaacaactgctgccgctgcttctgtgtggagtgtgtggacctgctggtgggccctggggccgcccaggccgccatcaaggaggacccctggaactgctacatgtgtggccacaagggcacctacggcctgctgcggcggcgggaggactggcccagccggctgcagatgttctttgccaacaaccacgaccaggagtttgacccccccaaggtgtacccacctgtgcctgctgagaagaggaagcccatccgggtgctgagcctgtttgatggcatcgccaccggcctgctggtgctgaaggacctgggcatccaggtggaccgctacatcgccagcgaggtgtgtgaggacagcatcaccgtgggcatggtgcgccaccagggcaagatcatgtatgtgggagatgtgcgctctgtgacccagaagcacatccaggagtggggcccctttgacctggtgattggaggcagcccctgcaatgacctgagcatcgtgaacccagccaggaagggcctgtatgagggcaccggccgcctcttctttgagttctaccgcctgctgcatgatgcccggcccaaggagggagatgaccggcccttcttctggctgtttgaaaatgtggtggccatgggcgtgtctgacaagagggacatcagccgcttcctggagagcaaccctgtgatgattgatgccaaggaggtgtctgctgcccaccgggcccgctacttctggggcaacctgcccggcatgaaccggcccctggccagcacagtgaatgacaagctggagctgcaggagtgcctggagcacggcagaattgccaagttcagcaaggtgaggaccatcaccaccaggagcaacagcatcaagcagggcaaggaccagcacttccctgtgttcatgaatgagaaggaggacatcctgtggtgcacagagatggagcgggtgtttggcttccctgtgcactacacagatgtgagcaacatgagccggctggcccggcagaggctgctgggccgctcctggagcgtgcctgtgatccgccacctgtttgcccccctgaaggagtactttgcctgtgtgtag

SEQ ID NO: 246709 - DNA, 2172 bp, Artificial Sequence
  derived and/or modified sequence
atgggcatcctggagcgggtggtgcggcggaacggccgggtggaccgctctttaaaggacgaatgcgacaccgccgaaaagaaggctaaagtgatagcagggatgaacgccgtagaggaaaaccagggccccggcgaatcacagaaggtggaagaggcctccccccccgcagtgcagcagcctactgaccccgccagtcccaccgtggccactaccccagagcctgtcgggagcgatgcaggggataagaacgctaccaaggccggtgatgatgaaccagagtacgaggacggccgaggattcggtataggcgagctggtgtgggggaagctgcgtggattctcctggtggccaggccgcatcgtctcctggtggatgaccggtcgatcgcgagctgctgaaggcacaagatgggtcatgtggttcggagatggcaagttctcggtagtgtgtgttgagaaactgatgcctctgagttccttttgcagcgcatttcatcaggccacttataataaacagccaatgtacagaaaggcgatctatgaagtactgcaggtcgccagtagtcgagcaggtaaacttttccccgtgtgccacgactcggacgagagtgacaccgctaaagctgtagaggttcagaataaaccgatgatcgagtgggccctgggggggttccagccctcggggcccaaaggtctcgagccgcccgaggaggagaaaaacccctacaaggaggtgtatactgacatgtgggtagaacctgaggcggccgcctatgcgcctccccccccagccaagaaaccaagaaagtccacagctgaaaagcctaaggttaaagaaattattgatgagcggacaagggagagactcgtgtatgaagtcaggcaaaaatgccggaacattgaagacatctgcatcagttgcggcagccttaacgtgacgctggagcaccctctgtttgtcgggggtatgtgccagaattgcaagaactgctttctggagtgtgcttaccagtacgatgacgacgggtatcagtcgtactgtacaatttgttgtggagggcgagaggtgctcatgtgtggtaataacaactgttgtcgctgtttctgcgtggagtgcgtagacttgctggttggtcccggtgcagctcaggccgccatcaaggaggatccatggaattgttatatgtgcgggcacaaaggaacctatgggttactaaggcggcgtgaagactggcctagccggctccagatgttcttcgctaataaccacgaccaagagtttgaccctcccaaggtgtatcccccagtacccgccgagaaaaggaagcctattcgggtactgagtctttttgacgggatagccactggactgcttgttttgaaagatcttggtatccaggtcgatcgctacattgcgtcagaggtatgcgaggactctataaccgtcgggatggtcaggcaccagggaaagatcatgtacgtgggtgacgtgagatctgtgacacaaaagcacattcaagagtggggaccgttcgacttggtgatcggggggagtccgtgtaacgatctctcaatcgtaaatccagctcgcaagggcctgtatgaaggcaccggcagactgttctttgaattctacaggttgttacatgacgccaggccgaaggagggcgacgaccggcccttcttttggctgtttgagaatgtggtagccatgggcgtgagcgataaaagagatataagcaggtttttggagagtaacccagtcatgattgatgccaaagaggtcagcgcggcacatcgggctaggtatttctggggaaatcttccaggaatgaacaggccactggccagcaccgtgaatgataagctcgagcttcaggaatgtctagaacatggcagaatcgccaaatttagcaaggttagaacaatcacaactaggtccaacagtatcaagcagggaaaggatcaacatttccctgtttttatgaacgagaaggaagatatactttggtgtacagagatggagcgcgtgttcggttttccagttcactatacggatgtgtctaacatgtcacgactcgctaggcagcgtctgctgggacgcagttggagcgtgcctgtgatccgccatttgttcgcccccctgaaggaatattttgcttgcgtgtag

SEQ ID NO: 246710 - DNA, 2172 bp, Artificial Sequence
  derived and/or modified sequence
atgggtattttggagcgtgtggtccggcgaaatggtagagtcgatcgctcactcaaggatgaatgtgatacagcagaaaagaaagccaaagtgattgccggaatgaacgccgtcgaagagaaccaggggcctggagaatctcaaaaagtggaggaggcttcacccccagcagtgcagcagccgacagaccctgcctcccccactgtggcaaccacgcctgagcctgtggggtccgatgccggagataagaatgctacgaaggccggagatgacgaaccagagtacgaggacggcagaggatttggtatcggtgagctggtgtggggaaaactgagggggtttagttggtggcccggacggattgtgtcttggtggatgactggcagaagtcgggcagctgagggcacaaggtgggtcatgtggtttggcgacgggaaattttccgtggtgtgcgtggagaagcttatgccccttagctctttttgctccgcctttcaccaggcaacctacaataagcagcctatgtatcggaaagccatatacgaagtgctccaagtggcgtccagtagagccggaaaactgtttcccgtgtgccatgacagtgacgagagtgataccgccaaggccgtggaggtccagaataaaccgatgattgaatgggcactggggggtttccagcccagcggtccaaaaggcctggagcccccagaggaggaaaagaacccgtacaaagaggtttacacagacatgtgggtcgaacctgaggcggcagcctatgccccaccgccaccagccaaaaagcccaggaaatccactgccgagaagccaaaggtaaaggagattattgacgaacgaactcgggaaaggctcgtgtatgaggtacgtcaaaagtgccggaacatcgaggatatctgtatttcttgcggctcgttgaatgtaaccctggagcacccattattcgttgggggaatgtgtcagaactgtaaaaactgcttccttgaatgcgcttatcagtatgacgacgacgggtaccagtcttattgcactatctgttgtgggggtagggaggtactcatgtgtggtaacaataattgttgtagatgcttctgtgttgaatgcgtggatttactggtcggaccaggagccgctcaggccgctataaaggaggacccttggaattgttacatgtgtgggcacaaaggaacatacggtctactgcggagacgggaggactggccttcacgattacaaatgttttttgctaataatcacgaccaggagtttgaccctccaaaagtgtatcctccagtccccgctgaaaaacggaaaccaataagagtgctcagcttatttgacgggatcgcgacaggtctgctggtcctgaaagacctcggaatccaggtggatagatatattgccagcgaggtatgtgaggatagcataacagttggaatggtgcgacatcagggtaagatcatgtatgtcggcgatgtgcgcagtgtcactcagaaacatatccaggagtggggaccattcgacctcgttatcggtggctctccatgcaacgacctcagcatcgtcaatccagcgagaaaagggctctatgagggcacgggacgcttattcttcgagttttacaggctgctccatgacgcaagaccaaaagagggagatgaccgcccattcttttggttgttcgagaatgtggtggcaatgggcgtatccgacaagcgggacatctcccgctttcttgaatcaaacccggttatgatcgatgccaaggaggtgtccgctgcgcaccgagctcggtatttttggggtaaccttccaggtatgaacagacctctcgccagtaccgtgaacgataagcttgaactccaggagtgtctcgaacacggacgaattgctaaattcagtaaggtcaggaccattacaacccgcagcaactcaataaagcagggaaaagaccagcattttccagtgttcatgaatgagaaggaggatatcctctggtgcaccgagatggaacgggtctttggctttccagtacattataccgatgtgagcaatatgtcccgcctcgccaggcaacgtcttttagggcgatcatggtcggtgcccgtgattcgccacctattcgccccactaaaagagtatttcgcttgcgtttag

SEQ ID NO: 246711 - DNA, 2172 bp, Artificial Sequence
  derived and/or modified sequence
atgggcatcctggagagagtggtgagaagaaacggcagagtggacagaagcctgaaggacgagtgcgacaccgccgagaagaaggccaaggtgatcgccggcatgaacgccgtggaggagaaccagggccccggcgagagccagaaggtggaggaggccagcccccccgccgtgcagcagcccaccgaccccgccagccccaccgtggccaccacccccgagcccgtgggcagcgacgccggcgacaagaacgccaccaaggccggcgacgacgagcccgagtacgaggacggcagaggcttcggcatcggcgagctggtgtggggcaagctgagaggcttcagctggtggcccggcagaatcgtgagctggtggatgaccggcagaagcagagccgccgagggcaccagatgggtgatgtggttcggcgacggcaagttcagcgtggtgtgcgtggagaagctgatgcccctgagcagcttctgcagcgccttccaccaggccacctacaacaagcagcccatgtacagaaaggccatctacgaggtgctgcaggtggccagcagcagagccggcaagctgttccccgtgtgccacgacagcgacgagagcgacaccgccaaggccgtggaggtgcagaacaagcccatgatcgagtgggccctgggcggcttccagcccagcggccccaagggcctggagccccccgaggaggagaagaacccctacaaggaggtgtacaccgacatgtgggtggagcccgaggccgccgcctacgccccccccccccccgccaagaagcccagaaagagcaccgccgagaagcccaaggtgaaggagatcatcgacgagagaaccagagagagactggtgtacgaggtgagacagaagtgcagaaacatcgaggacatctgcatcagctgcggcagcctgaacgtgaccctggagcaccccctgttcgtgggcggcatgtgccagaactgcaagaactgcttcctggagtgcgcctaccagtacgacgacgacggctaccagagctactgcaccatctgctgcggcggcagagaggtgctgatgtgcggcaacaacaactgctgcagatgcttctgcgtggagtgcgtggacctgctggtgggccccggcgccgcccaggccgccatcaaggaggacccctggaactgctacatgtgcggccacaagggcacctacggcctgctgagaagaagagaggactggcccagcagactgcagatgttcttcgccaacaaccacgaccaggagttcgacccccccaaggtgtacccccccgtgcccgccgagaagagaaagcccatcagagtgctgagcctgttcgacggcatcgccaccggcctgctggtgctgaaggacctgggcatccaggtggacagatacatcgccagcgaggtgtgcgaggacagcatcaccgtgggcatggtgagacaccagggcaagatcatgtacgtgggcgacgtgagaagcgtgacccagaagcacatccaggagtggggccccttcgacctggtgatcggcggcagcccctgcaacgacctgagcatcgtgaaccccgccagaaagggcctgtacgagggcaccggcagactgttcttcgagttctacagactgctgcacgacgccagacccaaggagggcgacgacagacccttcttctggctgttcgagaacgtggtggccatgggcgtgagcgacaagagagacatcagcagattcctggagagcaaccccgtgatgatcgacgccaaggaggtgagcgccgcccacagagccagatacttctggggcaacctgcccggcatgaacagacccctggccagcaccgtgaacgacaagctggagctgcaggagtgcctggagcacggcagaatcgccaagttcagcaaggtgagaaccatcaccaccagaagcaacagcatcaagcagggcaaggaccagcacttccccgtgttcatgaacgagaaggaggacatcctgtggtgcaccgagatggagagagtgttcggcttccccgtgcactacaccgacgtgagcaacatgagcagactggccagacagagactgctgggcagaagctggagcgtgcccgtgatcagacacctgttcgcccccctgaaggagtacttcgcctgcgtgtag

SEQ ID NO: 246712 - DNA, 3589 bp, Artificial Sequence
  derived and/or modified sequence
ccgcccccagccccatcgcccccttcccctcccccaagacgggcagctacttccagagcttcagggccgcggctcacacctgagcgcgactgcagaggggctgcacctggccttatggggatcctggagcgggttgtgagaaggaatgggcgcgtggatcgtagcctgaaagacgagtgtgatacggctgagaagaaagccaaggtcattgcaggaatgaatgctgtggaagaaaaccaggggcccggggagtctcagaaggtggaggaggccagccctcctgctgtgcagcagcccactgaccccgcatcccccactgtggctaccacgcctgagcccgtggggtccgatgctggggacaagaatgccaccaaagcaggcgatgacgagccagagtacgaggacggccggggctttggcattggggagctggtgtgggggaaactgcggggcttctcctggtggccaggccgcattgtgtcttggtggatgacgggccggagccgagcagctgaaggcacccgctgggtcatgtggttcggagacggcaaattctcagtggtgtgtgttgagaagctgatgccgctgagctcgttttgcagtgcgttccaccaggccacgtacaacaagcagcccatgtaccgcaaagccatctacgaggtcctgcaggtggccagcagccgcgcggggaagctgttcccggtgtgccacgacagcgatgagagtgacactgccaaggccgtggaggtgcagaacaagcccatgattgaatgggccctggggggcttccagccttctggccctaagggcctggagccaccagaagaagagaagaatccctacaaagaagtgtacacggacatgtgggtggaacctgaggcagctgcctacgcaccacctccaccagccaaaaagccccggaagagcacagcggagaagcccaaggtcaaggagattattgatgagcgcacaagagagcggctggtgtacgaggtgcggcagaagtgccggaacattgaggacatctgcatctcctgtgggagcctcaatgttaccctggaacaccccctcttcgttggaggaatgtgccaaaactgcaagaactgctttctggagtgtgcgtaccagtacgacgacgacggctaccagtcctactgcaccatctgctgtgggggccgtgaggtgctcatgtgcggaaacaacaactgctgcaggtgcttttgcgtggagtgtgtggacctcttggtggggccgggggctgcccaggcagccattaaggaagacccctggaactgctacatgtgcgggcacaagggtacctacgggctgctgcggcggcgagaggactggccctcccggctccagatgttcttcgctaataaccacgaccaggaatttgaccctccaaaggtttacccacctgtcccagctgagaagaggaagcccatccgggtgctgtctctctttgatggaatcgctacagggctcctggtgctgaaggacttgggcattcaggtggaccgctacattgcctcggaggtgtgtgaggactccatcacggtgggcatggtgcggcaccaggggaagatcatgtacgtcggggacgtccgcagcgtcacacagaagcatatccaggagtggggcccattcgatctggtgattgggggcagtccctgcaatgacctctccatcgtcaaccctgctcgcaagggcctctacgagggcactggccggctcttctttgagttctaccgcctcctgcatgatgcgcggcccaaggagggagatgatcgccccttcttctggctctttgagaatgtggtggccatgggcgttagtgacaagagggacatctcgcgatttctcgagtccaaccctgtgatgattgatgccaaagaagtgtcagctgcacacagggcccgctacttctggggtaaccttcccggtatgaacaggccgttggcatccactgtgaatgataagctggagctgcaggagtgtctggagcatggcaggatagccaagttcagcaaagtgaggaccattactacgaggtcaaactccataaagcagggcaaagaccagcattttcctgtcttcatgaatgagaaagaggacatcttatggtgcactgaaatggaaagggtatttggtttcccagtccactatactgacgtctccaacatgagccgcttggcgaggcagagactgctgggccggtcatggagcgtgccagtcatccgccacctcttcgctccgctgaaggagtattttgcgtgtgtgtaagggacatgggggcaaactgaggtagcgacacaaagttaaacaaacaaacaaaaaacacaaaacataataaaacaccaagaacatgaggatggagagaagtatcagcacccagaagagaaaaaggaatttaaaacaaaaaccacagaggcggaaataccggagggctttgccttgcgaaaagggttggacatcatctcctgatttttcaatgttattcttcagtcctatttaaaaacaaaaccaagctcccttcccttcctcccccttcccttttttttcggtcagaccttttattttctactcttttcagaggggttttctgtttgtttgggttttgtttcttgctgtgactgaaacaagaaggttattgcagcaaaaatcagtaacaaaaaatagtaacaataccttgcagaggaaaggtgggagagaggaaaaaaggaaattctatagaaatctatatattgggttgtttttttttttgttttttgttttttttttttgggtttttttttttactatatatcttttttttgttgtctctagcctgatcagataggagcacaagcaggggacggaaagagagagacactcaggcggcagcattccctcccagccactgagctgtcgtgccagcaccattcctggtcacgcaaaacagaacccagttagcagcagggagacgagaacaccacacaagacatttttctacagtatttcaggtgcctaccacacaggaaaccttgaagaaaatcagtttctagaagccgctgttacctcttgtttacagtttatatatatatgatagatatgagatatatatataaaaggtactgttaactactgtacaacccgacttcataatggtgctttcaaacagcgagatgagtaaaaacatcagcttccacgttgccttctgcgcaaagggtttcaccaaggatggagaaagggagacagcttgcagatggcgcgttctcacggtgggctcttccccttggtttgtaacgaagtgaaggaggagaacttgggagccaggttctccctgccaaaaagggggctagatgaggtggtcgggcccgtggacagctgagagtgggattcatccagactcatgcaataaccctttgattgttttctaaaaggagactccctcggcaagatggcagagggtacggagtcttcaggcccagtttctcactttagccaattcgagggctccttgtggtgggatcagaactaatccagagtgtgggaaagtgacagtcaaaaccccacctggagcaaataaaaaaacatacaaaacgta

SEQ ID NO: 246713 - DNA, 4074 bp, Artificial Sequence
  derived and/or modified sequence
acctagcatatccaaactcttgcatcaaaggtgcagggacttgctcacatcgagaatctggttgctttcttggagaccaagaaaatgagtttttgtttctacatttactccagcaatccatgagatcagggtgttgacagaaagtatgttcaaacatcttcggaaatgggtcgtcactcgcttttttgggcattctcggcaaagagcaaggctagtctccaaagatggaaggtgcaacatagaatttggcaatgtggaggcacagtcaaggtttatattctttgtggacatctggacaacggtacttgacctcaagtggagatacaaaatgaccattttcatcacagccttcttggggagttggtttttctttggtctcctgtggtatgcagtagcgtacattcacaaagacctcccggaattccatccttctgccaatcacactccctgtgtggagaatattaatggcttgacctcagcttttctgttttctctggagactcaagtgaccattggatatggattcaggtgtgtgacagaacagtgtgccactgccatttttctgcttatctttcagtctatacttggagttataatcaattctttcatgtgtggggccatcttagccaagatctccaggcccaaaaaacgtgccaagaccattacgttcagcaagaacgcagtgatcagcaaacggggagggaagctttgcctcctaatccgagtggctaatctcaggaagagccttcttattggcagtcacatttatggaaagcttctgaagaccacagtcactcctgaaggagagaccattattttggaccagatcaatatcaactttgtagttgacgctgggaatgaaaatttattcttcatctccccattgacaatttaccatgtcattgatcacaacagccctttcttccacatggcagcggagacccttctccagcaggactttgaattagtggtgtttttagatggcacagtggagtccaccagtgctacctgccaagtccggacatcctatgtcccagaggaggtgctttggggctaccgttttgctcccatagtatccaagacaaaggaagggaaataccgagtggatttccataactttagcaagacagtggaagtggagacccctcactgtgccatgtgcctttataatgagaaagatgttagagccaggatgaagagaggctatgacaaccccaacttcatcttgtcagaagtcaatgaaacagatgacaccaaaatgtaacagtggcttttcaacgggagtaaagcaaagtctctaaagctcctagtacctagaagcattatgaagcagtcaacaatttaggggtacgaaagtaggatgagagccttcaaagtctaccagcacaaagacccctgagccccgcaattgtgatcccacaagacatgcatctccacaaggctactgtattagaacgtgcaatgcatttatatgaaactggtgtatggaagacataggtgctctcttgaaatcttaaatatgattatttgagctcatataaggtggattggagcagataaaattatcaaaagtttcatgaacaggccaaacaaaatattttttaaagtttccttaaagaagttatgaactttagaaaggatcaggggacaataataatctcattttgattctactgataagaatgactccacttttaatgtggacttttactcatggaaaaattgtctcctaatttggggagatgaaccaaccaatcaatgacaagaaaacgcttacacaaagaacaatttgaggctctaagcttctcatgtggtacgtttagacagaggctaaatctgcacactagaatcttgatgataccttcctgcaagacagaatgctttagttaaaagtggtgatgatatttctttcaatctgtattggatggcttaaagggctataaatctgtttataaagagcatttcctgctcttcgaagacagcaatgaggagttggaaggtgcaaagtcagtagagaagggaatgtatcattaatgcacctgagaagaaacagtttcatgtgttcctccacctagagtttgtactggaatgctatttctaaagaagaagtgggaaagagagaggaatgggatggagccccacagtcagaatgttactatgtctttctttccctgacagcccatcttcctaaaagggaccagcttatggaaggctcgaccttgaggggaaagttttactgtgaaagtcttcttcagatccccacctgcatcattccgaatgtgtcctggaaaaaaactggtactcaaagctgcttaggaatcaaaatgttttcagtgtgttgattaatatagtaaatttctgaaactgtgcatgcactttgattattattattactatgcattaactgagtcaggttccaggtgaaaatcctcttgcagagaggaccctctcctggaaggggcgggaggagtggagaggaagcagataggacacatttgttgtctggagtcctcaggaggaaatgaccctggccacagacacaccccttccggtacagctccatcacgcctctccagtgtgagtcttggcacataaaacggcagctgcccacagttgttgggagggatggcttatgtttttccatgcctgggctgtatttgtacagatccatgcaccactctggtccttctgactaagaacagtgggaagtctgatggttttagggttgcacaccttgtcagtggccataacagtggccatagctggcccatgtggaactctcactctgtacctgtgagtgctttggcaccacaatttaatgtgctgacaggaaaaagaaatcaggtatcacaagcttgagggagctggaattctctgctggcccactgtcatgatgtagccccttcataaactggagggaaactgtgttgacacttgttcccatcagcatgcactcttcctggtgtattctcctgctggctggcagcatgcatgtagatggctggaagtgagatggtcataagcaatccattccctttgattgtttagggaggtgaacaacatacatctttctgattggtatttacttctgggttatttggtggaggcccatctgcttctaaatatccctttgctaggatcaagacactctgcacctggagtctcttttttaatggaaattcccattgaccctctagcaaccattaacacaggtacatccaattaagcccctaggaaaagaggcctggaacaggtaacttttgataggtctaaggagtggctggaaccccaaagcgcataacactcctgtgcattttaagaaagggggtaacaagggaatgggtgctcaagtagtaaagagaaatgaaaaatagcctgagaaggccaaactgcttgtaggttaacaccactgctaaaggcagcctttttattacaatgcagtgacatttttcccggtggaatctgactacatcagtactgctatttgctacagatgctgggttattctatttgctgatttcaaaagcatgtcaactgttctaatttccttcgtgaaaaactgcatcccatgatgcattattatattcaaaattttccttgagactgattctctttgaattgcccagttcatctctgttgctatggggattttgactaagagcgtttgatcctggttgaatcttcctggacttaggttggctcaagctccaatatttaagagttaagatttgggaggttgtctttaatggaaagcactaaatgtttaaaaattatttattccttaagagagaaaaggtagaagggaaagatccttttgtgttgccatgcctttttaagacatgggctgataggtgactgtccttctctatccatcactaaggggatgtgcaactggaccttccagaagaactccctgggcggattgcagagacggttgaggaagtgtcttccttggggatttttcatgaaacagaatatgggtcctcaacaggatgcttctgtgaatagcacggggatctttccctgtctagaacaaacgttaggacagcttctgatggaaagaatgcaaatgaa

SEQ ID NO: 246714 - DNA, 2539 bp, Artificial Sequence
  derived and/or modified sequence
gcatacagatgagttggcagccggtctgagctggcccacagactcataaaatcaacagggcctcgggtaccctcacctagcatatccaaactcttgcatcaaaggtgcagggacttgctcacatcgagaatctggttgctttcttggagaccaagaaaatgagtttttgtttctacatttactccagcaatccatgaggactttataggaattttgcaccattctgaatggatacatttggatttctcaacatttgttcagcttcctaatgactgttgtgacaattgctctataccagtgaatgccaactgtttatctctgctctgaacagatcagggtgttgacagaaagtatgttcaaacatcttcggaaatgggtcgtcactcgcttttttgggcattctcggcaaagagcaaggctagtctccaaagatggaaggtgcaacatagaatttggcaatgtggaggcacagtcaaggtttatattctttgtggacatctggacaacggtacttgacctcaagtggagatacaaaatgaccattttcatcacagccttcttggggagttggtttttctttggtctcctgtggtatgcagtagcgtacattcacaaagacctcccggaattccatccttctgccaatcacactccctgtgtggagaatattaatggcttgacctcagcttttctgttttctctggagactcaagtgaccattggatatggattcaggtgtgtgacagaacagtgtgccactgccatttttctgcttatctttcagtctatacttggagttataatcaattctttcatgtgtggggccatcttagccaagatctccaggcccaaaaaacgtgccaagaccattacgttcagcaagaacgcagtgatcagcaaacggggagggaagctttgcctcctaatccgagtggctaatctcaggaagagccttcttattggcagtcacatttatggaaagcttctgaagaccacagtcactcctgaaggagagaccattattttggaccagatcaatatcaactttgtagttgacgctgggaatgaaaatttattcttcatctccccattgacaatttaccatgtcattgatcacaacagccctttcttccacatggcagcggagacccttctccagcaggactttgaattagtggtgtttttagatggcacagtggagtccaccagtgctacctgccaagtccggacatcctatgtcccagaggaggtgctttggggctaccgttttgctcccatagtatccaagacaaaggaagggaaataccgagtggatttccataactttagcaagacagtggaagtggagacccctcactgtgccatgtgcctttataatgagaaagatgttagagccaggatgaagagaggctatgacaaccccaacttcatcttgtcagaagtcaatgaaacagatgacaccaaaatgtaacagtggcttttcaacgggagtaaagcaaagtctctaaagctcctagtacctagaagcattatgaagcagtcaacaatttaggggtacgaaagtaggatgagagccttcaaagtctaccagcacaaagacccctgagccccgcaattgtgatcccacaagacatgcatctccacaaggctactgtattagaacgtgcaatgcatttatatgaaactggtgtatggaagacataggtgctctcttgaaatcttaaatatgattatttgagctcatataaggtggattggagcagataaaattatcaaaagtttcatgaacaggccaaacaaaatattttttaaagtttccttaaagaagttatgaactttagaaaggatcaggggacaataataatctcattttgattctactgataagaatgactccacttttaatgtggacttttactcatggaaaaattgtctcctaatttggggagatgaaccaaccaatcaatgacaagaaaacgcttacacaaagaacaatttgaggctctaagcttctcatgtggtacgtttagacagaggctaaatctgcacactagaatcttgatgataccttcctgcaagacagaatgctttagttaaaagtggtgatgatatttctttcaatctgtattggatggcttaaagggctataaatctgtttataaagagcatttcctgctcttcgaagacagcaatgaggagttggaaggtgcaaagtcagtagagaagggaatgtatcattaatgcacctgagaagaaacagtttcatgtgttcctccacctagagtttgtactggaatgctatttctaaagaagaagtgggaaagagagaggaatgggatggagccccacagtcagaatgttactatgtctttctttccctgacagcccatcttcctaaaagggaccagcttatggaaggctcgaccttgaggggaaagttttactgtgaaagtcttcttcagatccccacctgcatcattccgaatgtgtcctggaaaaaaactggtactcaaagctgcttaggaatcaaaatgttttc

SEQ ID NO: 246715 - DNA, 2614 bp, Artificial Sequence
  derived and/or modified sequence
gttgcatacagatgagttggcagccggtctgagctggcccacagactcataaaatcaacagggcctcgggtaccctcacctagcatatccaaactcttgcatcaaaggtgcagggacttgctcacatcgagaatctggttgctttcttggagaccaagaaaatgagtttttgtttctacatttactccagcaatccatgaggactttataggaattttgcaccattctgaatggatacatttggatttctcaacatttgttcagcttcctaatgactgttgtgacaattgctctataccagtgaatgccaactgtttatctctgctctgaacaggtttcttctctactgtgccttcatccccatcctgggccctgacaaagacagtgtgacaagttctgagccccacaggtggaatcccaaaccaagcagctcttgctggtcaccccaagatctacttatacatgaagttttgaaaatcatctcctgaacctcttctgacagagatcagggtgttgacagaaagtatgttcaaacatcttcggaaatgggtcgtcactcgcttttttgggcattctcggcaaagagcaaggctagtctccaaagatggaaggtgcaacatagaatttggcaatgtggaggcacagtcaaggtttatattctttgtggacatctggacaacggtacttgacctcaagtggagatacaaaatgaccattttcatcacagccttcttggggagttggtttttctttggtctcctgtggtatgcagtagcgtacattcacaaagacctcccggaattccatccttctgccaatcacactccctgtgtggagaatattaatggcttgacctcagcttttctgttttctctggagactcaagtgaccattggatatggattcaggtgtgtgacagaacagtgtgccactgccatttttctgcttatctttcagtctatacttggagttataatcaattctttcatgtgtggggccatcttagccaagatctccaggcccaaaaaacgtgccaagaccattacgttcagcaagaacgcagtgatcagcaaacggggagggaagctttgcctcctaatccgagtggctaatctcaggaagagccttcttattggcagtcacatttatggaaagcttctgaagaccacagtcactcctgaaggagagaccattattttggaccagatcaatatcaactttgtagttgacgctgggaatgaaaatttattcttcatctccccattgacaatttaccatgtcattgatcacaacagccctttcttccacatggcagcggagacccttctccagcaggactttgaattagtggtgtttttagatggcacagtggagtccaccagtgctacctgccaagtccggacatcctatgtcccagaggaggtgctttggggctaccgttttgctcccatagtatccaagacaaaggaagggaaataccgagtggatttccataactttagcaagacagtggaagtggagacccctcactgtgccatgtgcctttataatgagaaagatgttagagccaggatgaagagaggctatgacaaccccaacttcatcttgtcagaagtcaatgaaacagatgacaccaaaatgtaacagtggcttttcaacgggagtaaagcaaagtctctaaagctcctagtacctagaagcattatgaagcagtcaacaatttaggggtacgaaagtaggatgagagccttcaaagtctaccagcacaaagacccctgagccccgcaattgtgatcccacaagacatgcatctccacaaggctactgtattagaacgtgcaatgcatttatatgaaactggtgtatggaagacataggtgctctcttgaaatcttaaatatgattatttgagctcatataaggtggattggagcagataaaattatcaaaagtttcatgaacaggccaaacaaaatattttttaaagtttccttaaagaagttatgaactttagaaaggatcaggggacaataataatctcattttgattctactgataagaatgactccacttttaatgtggacttttactcatggaaaaattgtctcctaatttggggagatgaaccaaccaatcaatgacaagaaaacgcttacacaaagaacaatttgaggctctaagcttctcatgtggtacgtttagacagaggctaaatctgcacactagaatcttgatgataccttcctgcaagacagaatgctttagttaaaagtggtgatgatatttctttcaatctgtattggatggcttaaagggctataaatctgtttataaagagcatttcctgctcttcgaagacagcaatgaggagttggaaggtgcaaagtcagtagagaagggaatgtatcattaatgcacctgagaagaaacagtttcatgtgttcctccacctagagtttgtactggaatgctatttctaaagaagaagtgggaaagagagaggaatgggatggagccccacagtcagaatgttactatgtctttctttccctgacagcccatcttcctaaaagggaccagcttatggaaggctcgaccttgaggggaaagttt

SEQ ID NO: 246716 - DNA, 2616 bp, Artificial Sequence
  derived and/or modified sequence
gttgcatacagatgagttggcagccggtctgagctggcccacagactcataaaatcaacagggcctcgggtaccctcacctagcatatccaaactcttgcatcaaaggtgcagggacttgctcacatcgagaatctggttgctttcttggagaccaagaaaatgagtttttgtttctacatttactccagcaatccatgaggtttcttctctactgtgccttcatccccatcctgggccctgacaaagacagtgtgacaagttctgagccccacaggtggaatcccaaaccaagcagctcttgctggtcaccccaagatctacttatacatgaagttttgaaaatcatctcctgaacctcttctgacagagatcagggtgttgacagaaagtatgttcaaacatcttcggaaatgggtcgtcactcgcttttttgggcattctcggcaaagagcaaggctagtctccaaagatggaaggtgcaacatagaatttggcaatgtggaggcacagtcaaggtttatattctttgtggacatctggacaacggtacttgacctcaagtggagatacaaaatgaccattttcatcacagccttcttggggagttggtttttctttggtctcctgtggtatgcagtagcgtacattcacaaagacctcccggaattccatccttctgccaatcacactccctgtgtggagaatattaatggcttgacctcagcttttctgttttctctggagactcaagtgaccattggatatggattcaggtgtgtgacagaacagtgtgccactgccatttttctgcttatctttcagtctatacttggagttataatcaattctttcatgtgtggggccatcttagccaagatctccaggcccaaaaaacgtgccaagaccattacgttcagcaagaacgcagtgatcagcaaacggggagggaagctttgcctcctaatccgagtggctaatctcaggaagagccttcttattggcagtcacatttatggaaagcttctgaagaccacagtcactcctgaaggagagaccattattttggaccagatcaatatcaactttgtagttgacgctgggaatgaaaatttattcttcatctccccattgacaatttaccatgtcattgatcacaacagccctttcttccacatggcagcggagacccttctccagcaggactttgaattagtggtgtttttagatggcacagtggagtccaccagtgctacctgccaagtccggacatcctatgtcccagaggaggtgctttggggctaccgttttgctcccatagtatccaagacaaaggaagggaaataccgagtggatttccataactttagcaagacagtggaagtggagacccctcactgtgccatgtgcctttataatgagaaagatgttagagccaggatgaagagaggctatgacaaccccaacttcatcttgtcagaagtcaatgaaacagatgacaccaaaatgtaacagtggcttttcaacgggagtaaagcaaagtctctaaagctcctagtacctagaagcattatgaagcagtcaacaatttaggggtacgaaagtaggatgagagccttcaaagtctaccagcacaaagacccctgagccccgcaattgtgatcccacaagacatgcatctccacaaggctactgtattagaacgtgcaatgcatttatatgaaactggtgtatggaagacataggtgctctcttgaaatcttaaatatgattatttgagctcatataaggtggattggagcagataaaattatcaaaagtttcatgaacaggccaaacaaaatattttttaaagtttccttaaagaagttatgaactttagaaaggatcaggggacaataataatctcattttgattctactgataagaatgactccacttttaatgtggacttttactcatggaaaaattgtctcctaatttggggagatgaaccaaccaatcaatgacaagaaaacgcttacacaaagaacaatttgaggctctaagcttctcatgtggtacgtttagacagaggctaaatctgcacactagaatcttgatgataccttcctgcaagacagaatgctttagttaaaagtggtgatgatatttctttcaatctgtattggatggcttaaagggctataaatctgtttataaagagcatttcctgctcttcgaagacagcaatgaggagttggaaggtgcaaagtcagtagagaagggaatgtatcattaatgcacctgagaagaaacagtttcatgtgttcctccacctagagtttgtactggaatgctatttctaaagaagaagtgggaaagagagaggaatgggatggagccccacagtcagaatgttactatgtctttctttccctgacagcccatcttcctaaaagggaccagcttatggaaggctcgaccttgaggggaaagttttactgtgaaagtcttcttcagatccccacctgcatcattccgaatgtgtcctggaaaaaaactggtactcaaagctgcttaggaatcaaaatgttttcagtgtgttgattaatatagtaaatttctgaaactgtg

SEQ ID NO: 246717 - DNA, 1119 bp, Artificial Sequence
  derived and/or modified sequence
atgttcaagcacctgcggaagtgggtagtgacaagattctttgggcactctcgccagagggctcgcttagtgtccaaggatgggagatgcaatattgaattcgggaatgtggaggcccagtccaggttcatattctttgtggatatctggaccacggtgctggaccttaaatggcgttataagatgacgatctttattactgcttttctcggctcttggttcttctttggtctcctctggtacgccgtcgcctacatccataaagatttaccagagtttcacccttctgctaaccacaccccatgcgttgagaacatcaatgggctcacctccgcctttcttttctcgctcgagacccaagtgacgataggttacgggttcaggtgcgttaccgagcagtgcgcaacagccatttttctccttatatttcagtcgatcctgggcgttatcataaacagttttatgtgcggagcgatcctggctaagatctctcggcccaaaaagagagccaaaactatcactttcagtaagaacgccgtcattagcaagagagggggtaagttgtgtcttctgatcagagtggccaatctgaggaagagtctgttgataggatcacatatatacggcaaactcttgaagacaaccgtcacgcccgaaggggagaccattatcctggaccagataaatatcaacttcgtagtagacgccggtaacgaaaatttgttttttatttccccactaactatttaccacgtaatcgatcacaattcacccttttttcacatggcggcggaaaccctccttcagcaagattttgagctcgtcgtgtttttagatggcacagtggaaagtacgtctgctacgtgtcaggtgcgcacaagctatgtaccagaagaggtgctgtggggctaccggttcgcacctattgtaagtaaaactaaagaaggtaagtaccgcgtcgatttccacaatttctctaaaacagttgaggttgagacccctcattgcgcaatgtgcctatataacgagaaggatgtgcgagctcggatgaagcggggttatgataacccaaactttatcttaagcgaggtgaacgagaccgatgacacgaaaatgtag

SEQ ID NO: 246718 - DNA, 1119 bp, Artificial Sequence
  derived and/or modified sequence
atgtttaaacatctacggaaatgggtcgtgactcggtttttcggacattcacgtcaacgggcccgactcgtgagcaaggatggtagatgtaatattgaatttggaaatgtcgaggcacaatcccgcttcattttcttcgtcgacatttggacaactgtccttgacttaaagtggcgatacaaaatgacaatcttcattactgcattccttggttcatggttttttttcgggctactatggtatgcagtcgcttatattcataaggacctgcctgagttccatccatccgcgaaccatactccttgcgtggaaaatatcaacggcctgacatcagcattcttgttcagtttagaaactcaggtaactatcggatatggcttccgttgcgttaccgaacagtgtgccactgctatctttcttctgatctttcagtctatccttggtgtgatcatcaacagctttatgtgtggagctatcctggctaaaatatctagaccaaagaaacgagcgaaaactatcacctttagcaagaatgctgtgatctctaagcggggaggaaagctgtgcctgctgataagagttgcgaacctgcggaagtccctgctgatcggctctcatatatatggcaaactgttgaagaccactgtcacacccgaaggggagactatcatactcgatcagatcaacataaatttcgtggttgatgctggcaatgaaaatttgttttttatcagcccactaaccatatatcacgtaatagaccataattcgcctttcttccacatggccgctgagaccctgctccaacaggactttgaactcgtggtctttctggatggcaccgtcgaatctacctctgccacatgccaagtgcggacttcttacgttcccgaggaggtgctgtggggctacagatttgcacctatcgtgtcaaagaccaaagaaggcaagtatagggtggacttccataacttcagcaagaccgtggaggtggaaacccctcactgtgctatgtgtctgtacaacgagaaagacgtcagagctagaatgaaacgcggctatgacaacccaaattttattctgtccgaagtcaacgaaacagacgacaccaaaatgtag

SEQ ID NO: 246719 - DNA, 1119 bp, Artificial Sequence
  derived and/or modified sequence
atgttcaagcacctgagaaagtgggtcgtcacacgattcttcggtcactctcggcaacgcgctcgccttgtgagtaaagacggcagatgcaacatcgaatttggcaacgtggaagcgcagtctaggttcatctttttcgttgacatttggaccacagttctcgatctcaaatggcggtataaaatgacaatcttcatcaccgccttcctgggatcctggttcttctttggcctgttgtggtacgccgtcgcctatatccacaaagacttgccagagtttcacccctcggctaatcacacaccttgcgttgaaaacattaatgggctgacaagcgcatttctgtttagtttagagacacaagtcacgatcgggtatgggttcagatgcgtgacagaacagtgtgcaacagccatatttctcctgatcttccagtctattctcggagtgatcattaacagctttatgtgtggagccattcttgccaagatcagcagaccaaagaagcgtgcgaaaacaatcacgttttctaagaatgccgtcatcagtaaacgcggaggaaagctatgcctcctcatacgagtagccaatctgagaaagtcccttctgattggatcccacatatatggcaagctccttaagacaaccgtgacacccgaaggtgagactatcattctcgaccaaattaacatcaacttcgtggtagatgctggcaatgaaaatttgttcttcatctcccccttgacaatctatcacgttatagatcataattcgccttttttccatatggctgccgaaaccctgctgcagcaggacttcgaactcgtagtttttctggacgggacagtagaatccacctccgccacctgtcaagtaagaacaagttacgtccctgaagaagtcttatgggggtatcggttcgccccaattgtgtctaagaccaaggagggcaagtaccgggtggacttccacaatttttcaaagaccgttgaggtggaaaccccgcactgcgccatgtgtctttacaacgaaaaggacgtgagagctagaatgaagaggggatatgataacccgaactttatactgtccgaagttaatgagactgacgataccaagatgtag

SEQ ID NO: 246720 - DNA, 1119 bp, Artificial Sequence
  derived and/or modified sequence
atgttcaagcatctcagaaagtgggtcgtgacacgttttttcgggcacagccgacagagggcccggctggtctctaaagacgggcgctgtaacatcgagtttggcaacgtggaggcacaatctagattcatctttttcgtcgacatctggacaactgtgctggatttgaaatggcggtacaagatgacgatctttattaccgcttttctgggatcatggtttttctttggtttactgtggtacgctgttgcctacatacataaggaccttcctgaatttcatccctctgctaaccatacaccgtgcgtggaaaacattaacgggctcacatccgctttccttttttccctggagactcaagttactatcggctatggattcaggtgcgttactgaacagtgtgcgaccgcaatttttttgttgatatttcagagcatactgggagtcatcatcaactcttttatgtgtggggccatcctggcgaagattagcagacctaagaaacgggcaaaaacgatcactttcagcaagaacgccgttataagtaaacgtggagggaagctgtgtcttcttattcgcgtcgccaaccttcgcaaatccctgctgataggctcccacatatatggtaagttactcaagaccacggttacaccggagggggagaccataatcttggatcagataaacatcaactttgtggttgatgcaggtaatgagaaccttttttttatatccccgttgaccatttaccatgtcatcgatcataattccccgtttttccatatggccgcggagactctgctgcagcaggatttcgagctagtagtgtttttagacggaaccgtggagtctacctcagcaacctgccaggtgcggacctcctacgtgcctgaggaggtgttgtggggctatcggttcgcaccgatcgtgtccaagaccaaggaagggaaatacagggtggactttcacaatttctcaaagacagtggaagttgagaccccgcactgcgctatgtgtttatataatgagaaagacgtacgagcccggatgaagaggggatatgacaacccaaattttattctgagcgaggtaaacgaaactgacgacacgaagatgtag

SEQ ID NO: 246721 - DNA, 1119 bp, Artificial Sequence
  derived and/or modified sequence
atgttcaagcacctgaggaagtgggtggtgacccgcttcttcggccacagccggcagagggcccggctggtgtccaaggatggccgctgcaacatcgagtttggaaatgtggaggcccagagccgcttcatcttctttgtggacatctggaccaccgtgctggacctgaagtggagatacaagatgaccatcttcatcacagccttcctgggctcctggttcttcttcggcctgctgtggtatgctgtggcctacatccacaaggacctgcctgagttccaccccagcgccaaccacaccccctgtgtggagaacatcaatggcctgaccagcgccttcctgttcagcctggagacccaggtgaccatcggctacggcttccgctgtgtgacagagcagtgtgccacagccatcttcctgctgatcttccagagcatcctgggcgtcatcatcaacagcttcatgtgtggggccatcctggccaagatcagccggcccaagaagagggccaagaccatcaccttcagcaagaatgctgtgatcagcaagagaggaggcaagctgtgcctgctgatccgggtggccaacctgaggaagagcctgctgattggcagccacatctacggcaagctgctgaagaccaccgtgaccccagagggggagaccatcatcctggaccagatcaacatcaactttgtggtggatgctggaaatgaaaatctcttcttcatcagccccctgaccatctaccacgtgattgaccacaacagccccttcttccacatggctgctgagaccctgctgcagcaggactttgagctggtggtgttcctggatggcaccgtggagagcaccagcgccacctgccaggtgaggaccagctatgtgcctgaggaggtgctgtggggctacagatttgcccccatcgtgtccaagaccaaggagggcaagtacagagtggacttccacaacttcagcaagacagtggaggtggagaccccccactgtgccatgtgcctgtacaatgagaaggatgtgcgggccaggatgaagaggggctatgacaaccccaacttcatcctgtctgaggtgaatgaaacagatgacaccaagatgtag

SEQ ID NO: 246722 - DNA, 1119 bp, Artificial Sequence
  derived and/or modified sequence
atgttcaagcacctgcggaagtgggtggtgacccggttcttcggccactcccgccagagagcccgcctggtctcaaaagatggtagatgcaatatcgaatttggtaacgtcgaagcacagtctcgcttcatattcttcgttgatatttggacaaccgtgctggacctgaagtggcggtataagatgacaattttcataaccgcctttctgggcagctggttcttctttggtctgctctggtacgctgtagcctacatacacaaggatttgcccgagtttcatccttccgctaaccatactccctgcgtggaaaacatcaacggcctcacctcagcgttcctgttcagcctagagacacaagtgaccattggatatggcttcaggtgcgtcacagagcagtgcgcaactgccattttcctactgatttttcaatctattctcggagtcatcatcaatagttttatgtgcggcgcaatcctggccaaaatttcccggcccaaaaagcgggccaagacaattacttttagcaaaaatgccgtgatctccaaacgaggcggtaaactctgcctgcttattagagtggcaaatttaagaaaatcgctgcttataggcagccacatctacggaaaacttctgaagactacggtgacaccggaaggcgagaccattattttggatcagattaacattaactttgtggtggatgcaggcaacgagaatctcttttttatctccccactgacaatttaccacgtgattgaccataactctccttttttccatatggccgcagaaaccctgctccagcaggacttcgaactggtcgtgttcctcgacggcaccgtggagtccacgtctgccacatgtcaagtccggaccagctacgtgcctgaggaagtgttgtggggataccggtttgctccaattgtttctaaaacaaaggaaggaaaatacagagtggactttcataattttagtaaaaccgtcgaagtggagactcctcactgtgccatgtgcttgtacaacgagaaggacgtgcgcgcccggatgaagaggggatacgacaatcccaattttatactgtctgaggtcaatgagaccgacgatacaaagatgtag

SEQ ID NO: 246723 - DNA, 1119 bp, Artificial Sequence
  derived and/or modified sequence
atgttcaagcacctgcggaagtgggtggtgacccggttcttcggccactcccgtcagcgtgccagacttgtcagcaaagatggacgctgcaacatcgagtttggaaacgtagaagcccagagccgatttatcttttttgtggatatatggactacggtcctcgacttaaagtggcgatacaagatgactatcttcattactgccttcctcgggtcttggttcttctttggactgctctggtatgctgttgcatatatccacaaagatctgccggaatttcacccaagtgctaaccatacaccatgtgttgagaacattaatggcttgacgtcggctttcctgttcagtctggagacacaggtgaccataggctacggattccggtgcgtgacagaacagtgtgccaccgccatctttctgctcatcttccaatcaatcctcggcgtaatcatcaactcttttatgtgtggcgcgattctggccaagattagtaggcccaagaagcgcgccaaaaccataaccttttcaaagaacgccgtaatctccaaaagaggagggaagctgtgtctgctcatccgggtggccaatttgaggaaaagcttgctcatcggtagccacatctatggtaaattgctgaaaaccacagttacgccagagggcgagaccataatcctggatcagataaacattaacttcgtggtggacgccggaaatgagaatttatttttcatcagtcccctcaccatctatcatgtcatcgatcataattcccctttcttccacatggccgccgaaacactgttgcagcaggatttcgagcttgttgtctttctagatggcaccgtcgagtcaacgagtgcgacctgccaagtcaggacatcatatgttccagaggaggtgttgtggggctatagatttgctccaattgtgagcaagacaaaggagggtaagtaccgggtggattttcataacttttcaaagaccgtggaggtggaaaccccccactgtgccatgtgcctttataacgagaaagacgttcgggcccgcatgaagcgcggctacgacaaccccaatttcatccttagtgaagtcaacgaaacagacgacactaagatgtag

SEQ ID NO: 246724 - DNA, 1119 bp, Artificial Sequence
  derived and/or modified sequence
atgttcaagcacctgcggaagtgggtggtgacccggttcttcggccattcccgccagcgagctaggttggtctcaaaagacggcaggtgtaacatagagttcggaaatgtcgaagctcagagccgattcatattctttgttgacatatggactacagtgctggacctgaagtggaggtataaaatgaccatattcattaccgcattcctcgggtcctggttctttttcgggttgctgtggtatgctgtggcgtatattcataaggatctaccggaatttcaccccagcgcaaaccatacaccttgtgtcgagaatataaatggcctcactagcgcgtttctcttctccctcgagacccaggtgacaattggctatgggttccgctgcgttaccgagcagtgcgcgactgctatttttctactgatttttcagtctatacttggtgtgataattaattctttcatgtgtggcgcaatactcgccaagatttcacgtcctaagaagcgggctaagacgatcacttttagcaagaacgcagtgatttccaagaggggggggaagctgtgcttgctcatccgcgttgctaatctgcgaaagtcccttctgattgggtcacatatttacggcaaattattgaaaacaaccgtcacacctgaaggggagaccattatcttggaccagattaacatcaactttgtggtggacgcaggcaatgaaaatctgttcttcatatccccacttactatttatcacgtcatcgatcacaactcgccgttcttccatatggccgcagaaacccttcttcagcaagacttcgagctggtagtctttctcgatggcacagttgagtccacttctgctacatgtcaggtcagaacttcctatgtgcccgaggaggtgctgtggggttatcgctttgcaccaattgtgtctaaaactaaggagggcaagtatagagttgatttccataatttttccaaaactgtggaggtagaaactcctcactgtgctatgtgcttatacaatgagaaggacgtgcgggcccgtatgaagcgtggttacgataatccaaacttcatcctgtctgaggttaacgagacagatgacacaaaaatgtag

SEQ ID NO: 246725 - DNA, 1119 bp, Artificial Sequence
  derived and/or modified sequence
atgttcaagcacctgcggaagtgggtggtgacccggttcttcggccattcacgccagcgggcacgactcgtgtccaaagacggccgatgtaacattgaatttgggaatgtggaggcccagtccaggttcatcttcttcgtggatatctggaccacagtgctggatcttaagtggcgctataagatgactatctttattacagcattccttggttcatggtttttctttgggctcctgtggtatgcagtggcatacatccataaagaccttcctgagttccaccctagcgcaaatcataccccatgtgtggaaaacattaacggcctcacctccgccttcctgttctcactggagacccaggtgaccataggctacggatttaggtgtgtgaccgagcagtgcgccacggctatcttcctactgatttttcagtccatcttgggagttattataaatagcttcatgtgcggagcgatcctggccaaaatctcaagaccaaaaaagcgcgcgaagaccatcacatttagtaaaaatgctgtgatttcaaagcggggcggaaaactgtgcctgttgatcagggttgctaacttaagaaagtcactgcttatcggaagccacatctacggtaaactgctgaagactaccgtgacaccagaaggagagacgatcatcctggatcaaattaatatcaactttgtggtagacgccggaaacgaaaaccttttttttatctccccgttgacaatatatcacgtcatcgatcacaactcaccgttcttccacatggccgccgagaccctgctgcagcaggacttcgagcttgtggtttttttggatgggacagttgagagcacaagcgctacctgtcaggtgcgcacaagctacgtacctgaagaggtgctttggggctaccgttttgcaccaatcgtcagcaaaacaaaagaaggtaaatacagagtggattttcataacttttcaaagactgtggaagtggaaacgccacactgtgccatgtgcctctacaatgagaaggatgtccgagctcgtatgaaacgggggtatgacaatccaaactttattctctccgaggttaacgaaactgacgatactaagatgtag

SEQ ID NO: 246726 - DNA, 1119 bp, Artificial Sequence
  derived and/or modified sequence
atgtttaagcatcttaggaaatgggtcgtgactcgcttttttgggcactccagacagcgcgctaggctggtttcaaaggacggcagatgtaacatagaattcggcaatgtggaggcgcaatccaggtttatcttctttgtggatatatggacaacggtcctggatctgaagtggcgatataaaatgaccattttcattactgcattcctcggtagctggtttttcttcgggctactatggtatgccgttgcatatatccacaaggacctgccagagttccacccatccgccaaccacaccccttgtgttgagaacatcaacggattgactagcgcatttctctttagccttgagactcaagtcaccattggttacggatttcgctgtgttacagagcagtgtgctacagccatcttcctactcatcttccagtccattctgggggtgataatcaacagtttcatgtgcggtgccattctggcgaaaattagccgtcctaaaaagcgtgccaagaccattaccttctcgaagaatgccgtgatttcaaaaagaggtggtaagctgtgccttctcatccgcgttgcaaatctgagaaagtctctgctgattgggagccatatttatggcaagctgctgaagactacggtcaccccagagggggaaactataattctggatcagatcaatatcaactttgtggtagacgccggaaatgagaacctgttctttatatcaccactgacaatttatcacgtaattgatcataatagcccattcttccacatggctgcggagaccctgctccagcaggattttgaattggtcgtgttcttggatggaacggtagagtccacttctgctacatgtcaggtgcgcacgtcgtacgttccagaggaagtactgtgggggtatagatttgccccaatcgtctcaaaaacaaaggaaggcaaatacagggtggattttcataatttctccaaaacagtcgaggtggagactccacactgcgccatgtgcttatataacgaaaaagacgtgagagccaggatgaagcgcggttatgataaccccaacttcatcctcagtgaagtgaacgaaaccgacgacacaaagatgtag

SEQ ID NO: 246727 - DNA, 1119 bp, Artificial Sequence
  derived and/or modified sequence
atgttcaagcaccttaggaagtgggtggtgacacgcttttttgggcactctcgccagagggcacgactggtgtccaaggacggcaggtgcaacatagaatttggaaatgttgaggcgcagagccggttcattttttttgtcgacatttggactacagtcctagatctgaagtggcgctacaagatgaccatcttcatcaccgctttcttagggagttggtttttttttggcctgctgtggtatgccgtggcctacatccacaaagatctgccagaatttcacccatcagctaaccatactccctgcgttgagaatatcaatggcctgaccagtgcattcttattctccctcgagacccaggtaaccattggttacggcttcaggtgcgtgacagagcaatgtgcgacagctattttcttactgattttccagtcaatcctaggggtgatcatcaactcttttatgtgcggcgcaatattggcaaagattagtcgtcctaaaaagagagcaaaaactatcaccttcagcaagaacgccgttatttccaaacggggtggaaaactgtgtcttctgattagagtagccaacctgcgcaagagcctgctgattggtagtcacatttacggcaagttgctcaagaccaccgtcacacctgaaggagagaccattatcctggaccagatcaacattaatttcgtggtagacgccggaaatgaaaatctcttcttcatctctccgctgacaatatatcacgtgatagatcacaattcccctttttttcacatggccgctgagacccttctgcagcaggacttcgaactagtggtgtttctggacggaacagtagagtcaacctcggcaacctgccaagtgcgcacaagttatgttcccgaagaggtcctgtggggataccgttttgcaccaattgtgagtaagactaaagaggggaagtaccgggtagatttccacaatttctctaagacggtcgaggtcgaaacaccccactgtgctatgtgtctgtataatgagaaggacgtccgagccagaatgaagaggggatacgataaccccaactttattctgagtgaagtgaacgagaccgacgataccaaaatgtag

SEQ ID NO: 246728 - DNA, 1119 bp, Artificial Sequence
  derived and/or modified sequence
atgtttaaacacctccgaaaatgggtcgtaactcgtttttttggacatagcaggcagcgcgcacggctggtgagcaaagacggtcgatgcaacatcgagttcggaaacgtggaggctcagtcaaggtttatcttcttcgtcgatatatggaccaccgtgcttgatctcaagtggaggtacaaaatgaccatctttatcacagcgtttctgggctcctggttcttcttcggactgctgtggtacgctgtagcgtatatccacaaggatctcccagagttccaccccagcgctaaccacaccccttgcgttgagaacattaatggattaacttccgccttcctcttctccctggaaacgcaagttacgattggatatggttttcgctgtgtcaccgagcagtgtgccacagctatctttttattgattttccagtctatcctgggagtgattattaactctttcatgtgtggggctatccttgctaagatatcccgtccgaaaaaacgtgctaagaccataaccttctcgaaaaatgccgtgatttctaaacgaggaggtaaattatgccttttgatcagagtggccaacctgcgaaagagcctgctgataggaagtcatatctacgggaaactgctgaagaccacagtcacccctgagggtgaaactattattttggatcagatcaatattaattttgtggttgatgcaggtaatgagaacttgtttttcatttctcctcttactatataccacgtgattgatcataacagtccattctttcacatggctgctgagactctgctacaacaggacttcgagctggtcgtgttcttagacgggaccgtcgaatcaacctcggctacttgccaggtccgaaccagttatgtgcccgaggaagtcctatggggctaccggttcgctcctattgtaagcaagactaaggaaggcaagtaccgggtggatttccataatttcagtaaaactgtggaggtggagacaccccactgtgccatgtgtttgtacaacgaaaaggacgtgcgtgccagaatgaagcgaggatatgacaacccaaattttatcctgtccgaggtgaacgaaaccgacgacacaaagatgtag

SEQ ID NO: 246729 - DNA, 1119 bp, Artificial Sequence
  derived and/or modified sequence
atgttcaaacaccttcgtaaatgggtagtgacacggttctttggtcactcaagacagcgcgctcgtttggtttcaaaagacgggcgatgcaatattgagtttggcaacgtcgaggcccagagccggttcatttttttcgtcgacatttggactactgtcctcgatctcaagtggagatacaagatgaccattttcataactgctttcctgggcagttggttctttttcggtctgctctggtatgctgtcgcctacatccacaaagatttgcccgaattccatccatcagctaaccacaccccatgtgtcgagaatatcaatggcctcactagcgcattcctcttctccctggaaacacaagtaactattggttacggatttaggtgtgtcaccgaacaatgcgccacagccatatttctcctgatatttcaaagcatcctgggtgtgatcattaattcctttatgtgtggagcaatcctagccaaaatttctagacccaagaaaagggctaaaacaattacatttagcaagaatgccgtcatcagcaaaaggggcggaaagctatgcctccttattagggtggcgaacctgcggaagagcctgctaataggatcccatatttacgggaagctgctcaagacaactgttactccagagggtgagaccatcattctcgatcagattaatattaattttgtagtggatgccggaaatgagaatctgttcttcatctcccccctgaccatatatcacgtcatcgaccacaacagtccttttttccatatggccgctgaaactctgctccagcaagatttcgagctggtggtgttcctggatggaacggtggagagcacgtccgccacctgccaggtgagaacaagctatgtgccagaagaggtattgtgggggtatcgtttcgccccaattgtgtccaagacaaaagagggaaaataccgggtcgacttccacaacttttccaagacagtggaggtggaaactccccattgcgcaatgtgcctctataacgagaaggatgtgcgggcaagaatgaagcgaggatatgacaatcccaattttatcctctctgaggtgaatgaaaccgatgacacgaagatgtag

SEQ ID NO: 246730 - DNA, 1119 bp, Artificial Sequence
  derived and/or modified sequence
atgttcaagcacctgagaaagtgggtggtgaccagattcttcggccacagcagacagagagccagactggtgagcaaggacggcagatgcaacatcgagttcggcaacgtggaggcccagagcagattcatcttcttcgtggacatctggaccaccgtgctggacctgaagtggagatacaagatgaccatcttcatcaccgccttcctgggcagctggttcttcttcggcctgctgtggtacgccgtggcctacatccacaaggacctgcccgagttccaccccagcgccaaccacaccccctgcgtggagaacatcaacggcctgaccagcgccttcctgttcagcctggagacccaggtgaccatcggctacggcttcagatgcgtgaccgagcagtgcgccaccgccatcttcctgctgatcttccagagcatcctgggcgtgatcatcaacagcttcatgtgcggcgccatcctggccaagatcagcagacccaagaagagagccaagaccatcaccttcagcaagaacgccgtgatcagcaagagaggcggcaagctgtgcctgctgatcagagtggccaacctgagaaagagcctgctgatcggcagccacatctacggcaagctgctgaagaccaccgtgacccccgagggcgagaccatcatcctggaccagatcaacatcaacttcgtggtggacgccggcaacgagaacctgttcttcatcagccccctgaccatctaccacgtgatcgaccacaacagccccttcttccacatggccgccgagaccctgctgcagcaggacttcgagctggtggtgttcctggacggcaccgtggagagcaccagcgccacctgccaggtgagaaccagctacgtgcccgaggaggtgctgtggggctacagattcgcccccatcgtgagcaagaccaaggagggcaagtacagagtggacttccacaacttcagcaagaccgtggaggtggagaccccccactgcgccatgtgcctgtacaacgagaaggacgtgagagccagaatgaagagaggctacgacaaccccaacttcatcctgagcgaggtgaacgagaccgacgacaccaagatgtag

SEQ ID NO: 246731 - protein, 475 aa, Artificial Sequence
  derived and/or modified sequence
MISSKPRLVVPYGLKTLLEGISRAVLKTNPSNINQFAAAYFQELTMYRVEKWSEGTTPQKKLECLKEPGKTSVESKVPTQMEKSTDTDEDNVTRTEYSDKTTQFPSVYAVPGTEQTEAVGGLSSKPATPKTTTPPSSPPPTAVSPEFAYVPADPAQLAAQMLGKVSSIHSDQSDVLMVDVATSMPVVIKEVPSSEAAEDVMVAAPLVCSGKVLEVQVVNQTSVHVDLGSQPKENEAEPSTASSVPLQDEQEPPAYDQAPEVTLQADIEVMSTVHISSVYNDVPVTEGVVYIEQLPEQIVIPFTDQVACLKENEQSKENEQSPRVSPKSVVEKTTSGMSKKSVESVKLAQLEENAKYSSVYMEAEATALLSDTSLKGQPEVPAQLLDAEGAIKIGSEKSLHLEVEITSIVSDNTGQEESGENSVPQEMEGKPVLSGEAAEAVHSGTSVKSSSGPFPPAPEGLTAPEIEPEGESTAE

SEQ ID NO: 246732 - DNA, 1428 bp, Artificial Sequence
  derived and/or modified sequence
atgatatctagcaagcctcggcttgtggtcccttacggcctgaagaccctgctggaaggtattagccgggctgtgctcaagacaaacccttccaacattaatcagttcgccgccgcttatttccaagagcttactatgtaccgagtcgagaaatggtcggaggggaccactccacagaaaaagctggaatgcctgaaagaaccaggcaaaacgtctgtagagtctaaagtacccacacaaatggagaagtcaacagacactgacgaagataatgtgacaaggaccgagtactcagacaaaacaacccaatttccctccgtttatgctgttcctggtaccgagcagaccgaagcagtcggcggcttatcttctaagcccgccaccccaaaaacaacaacacctccgtcttcaccaccaccaaccgctgtctcccccgagttcgcctacgtgcccgctgatccggcacaattggccgcgcagatgttagggaaggtgagcagcatacattctgaccagtccgacgtgctaatggtggacgtggccaccagtatgcccgttgtgatcaaagaggtgccttcttccgaagccgcggaagacgtgatggtagctgctccactcgtgtgcagcggtaaagtgctggaggtgcaggtcgtcaaccagacgtcggtacacgtggatctggggtcccagcctaaggagaacgaagcggaaccgtctacagcttcctctgtgccccttcaggacgagcaggaacccccggcttacgatcaggccccagaggtcactctccaagcagacatagaggtgatgagcaccgtacatatttcttctgtctataacgacgttccagtaaccgagggtgtcgtgtacattgagcagctgccggagcaaattgtgataccattcactgaccaggtggcttgtctaaaggaaaatgaacagtcaaaggagaatgagcagtctccgcgagtgagtccaaaatcggtcgtggagaaaactacaagcggcatgtccaagaagtccgtcgaatcggtaaagttggcgcaattagaagagaatgccaaatactcctctgtgtatatggaagcggaagctaccgccctgcttagtgacacaagtctgaaggggcagccagaggttcccgcacagttactggacgctgagggcgctatcaaaattgggtctgagaaatctttacaccttgaggtcgagatcacctccatcgtgtcggataatactgggcaggaagaaagtggcgagaacagcgtcccacaggagatggagggaaagcctgtcctatctggcgaggctgcagaggcagtacacagcggtacatctgtgaagtcgagctccggccccttccctcctgcccctgagggactcaccgctcctgaaattgagcccgaaggcgaaagcacagccgagtag

SEQ ID NO: 246733 - DNA, 1428 bp, Artificial Sequence
  derived and/or modified sequence
atgatcagcagcaagccccggctggtggtgccctacggcctgaagaccctgctggagggcatcagcagagctgtgctgaagaccaaccccagcaacatcaaccagtttgctgctgcctacttccaggagctgaccatgtacagagtggagaagtggagcgagggcaccaccccccagaagaagctggagtgcctgaaggagcccgggaagacctctgtggagagcaaggtgcccacccagatggagaagagcacagacacagatgaagataatgtgaccaggacagagtacagcgacaagaccacccagttccccagcgtgtatgctgtgcctggaacagagcagacagaggccgtgggcggcctgagcagcaagccagccacccccaagaccaccaccccacccagcagccccccacccacagctgtgtccccagagtttgcctacgtgcctgctgaccctgcccagctggccgcccagatgctgggcaaggtgagcagcatccacagcgaccagagtgatgtgctgatggtggatgtggccacctccatgcctgtggtgatcaaggaggtgcccagcagcgaggccgcagaagatgtgatggtggccgcccccctggtgtgcagcggcaaggtgctggaggtgcaggtggtgaaccagacctctgtgcacgtggacctgggcagccagcccaaggaaaatgaggccgagcccagcacagccagctctgtgcccctgcaggatgagcaggagcccccagcctatgaccaggcccctgaggtgaccctgcaggccgacatcgaggtgatgagcacagtgcacatcagctctgtgtacaatgatgtgcctgtgacagaaggagtggtgtacatcgagcagctgcctgagcagatcgtcatccccttcacagaccaggtggcctgcctgaaggaaaatgagcagagcaaagaaaatgagcagagcccccgggtgagccccaagtctgtggtggagaagaccaccagcggcatgagcaagaagtctgtggagagcgtgaagctggcccagctggaggagaatgccaagtacagctctgtgtacatggaggccgaggccacagccctgctgagtgacaccagcctgaagggccagcctgaggtgcctgcccagctgctggatgctgagggcgccatcaagattggcagcgagaagagcctgcacctggaggtggagatcaccagcatcgtgtctgacaacacaggccaggaggagagcggggagaacagcgtgccccaggagatggagggcaagcctgtgctgagcggggaggccgctgaggccgtgcacagcggcacctctgtgaagagcagcagcggccccttccccccagcccctgagggcctgacagcccctgagattgagcctgagggggagagcacagctgagtag

SEQ ID NO: 246734 - DNA, 1428 bp, Artificial Sequence
  derived and/or modified sequence
atgatcagcagcaagccccggctggtggtgccctacggcctgaagactctccttgagggaatctcacgggcagttctgaagacaaacccctcgaatattaatcagttcgctgcagcatacttccaggagttaactatgtacagagtagagaagtggagcgaaggcaccacacctcagaaaaagctcgaatgtctgaaagaacctggcaaaacaagcgttgagtcaaaggtacctactcagatggaaaagtcaactgacacagacgaggacaacgtcactaggaccgaatatagcgacaagacaacacaatttccctctgtctacgccgtccctggaactgagcagaccgaggccgttgggggcctgtccagcaaacctgccactcccaagaccactacccctccttcctctccccctccaacggcggtgtccccagaatttgcttatgtcccagccgatccagcccaactggccgcccagatgctgggtaaggtatccagtatccacagcgatcaatctgatgtcctgatggtcgacgtggcaacaagcatgcctgtcgtgattaaggaggtcccatcaagtgaggctgcagaggatgtgatggtggctgccccattagtatgttccggtaaggttcttgaggtgcaagtcgtgaaccaaactagtgtccatgtagacttgggatcccaacccaaggaaaatgaggctgagcctagcacggcttcgagtgttcccctccaggacgaacaggagcctcccgcctacgatcaggcacccgaggttacacttcaggccgatatcgaagtcatgtccacagtgcacatcagctccgtgtataacgacgtcccggtgactgagggcgttgtatacatagaacagttgcccgaacagatcgtaataccgttcaccgatcaggtcgcgtgcctgaaagaaaacgagcagtccaaggagaacgaacagtctcctagagtatccccaaagtccgttgtggagaaaacaacctcaggcatgtccaaaaaatccgtagaaagcgtgaaactggcacagctggaggaaaatgccaagtatagttcggtgtacatggaggccgaggctactgctctactgagcgatacctccctgaaagggcagcctgaggtccctgcacagctgcttgatgcggaaggcgccatcaagattggtagcgagaagagtctccatctggaggtagaaatcacgtcaatagtgagcgacaacacaggtcaggaagagagcggcgaaaatagcgtgccccaggagatggaagggaagccagtgttaagcggtgaagctgccgaagctgttcacagcgggactagtgttaagagcagttctggcccctttccccctgcccccgagggacttacagcacccgaaatcgagcctgagggtgaatctacagcagagtag

SEQ ID NO: 246735 - DNA, 1428 bp, Artificial Sequence
  derived and/or modified sequence
atgataagttccaagcccagactggtcgttccctacgggttgaagacactgctggagggaatttcgagggccgtcctgaaaacaaacccgagcaacatcaaccagtttgctgccgcatattttcaggaacttacgatgtacagagtggagaagtggtcagaggggacgacaccacagaagaaactcgagtgccttaaagagcctggaaagacttctgtggagagcaaggtacccacacagatggaaaagtccactgacacggacgaggacaatgtgacacggacagaatatagcgacaagaccactcagtttcctagtgtgtatgctgtccctggtactgagcaaaccgaggctgtgggcggattgagtagcaagcccgctacacccaagactaccacaccgccatcatccccacctcccacagctgtttcccccgaattcgcatacgtgcctgctgatcccgcacagctggccgctcaaatgctgggcaaggtgagcagcattcacagtgaccagtctgacgtgcttatggtggacgtcgcgacgagcatgccagttgttatcaaagaggtgccttcgtcagaggcggcagaggatgttatggtagctgcaccactggtctgttcaggcaaggtactggaagtccaagtggtgaatcagacttccgttcacgtagatctgggcagccaaccaaaagagaatgaagccgagccttcgaccgcgtctagtgttccccttcaggacgagcaggagccacctgcgtacgaccaggctcccgaggttacactgcaggccgatattgaagtaatgagcactgtacatatctcctccgtgtacaacgatgtgcccgtaactgagggcgttgtttacattgaacagctccctgaacagatagtgatccccttcacggaccaagtggcttgccttaaggaaaacgagcaatcaaaggagaacgagcaatcgccacgagtgtctcctaagagcgtggtggagaagacaacctcaggaatgagcaagaaaagcgtagagtccgttaagctggcccagcttgaagaaaatgctaaatactcttctgtgtatatggaggctgaggcgaccgctctgttgagtgacacctccttgaaggggcagcctgaagtgcctgcccaactgctggatgctgaaggggcaattaagatcgggtccgagaaaagccttcaccttgaggttgagatcacgtcaatagtgagtgataacactggacaggaggagtccggcgagaactctgtgccccaggagatggagggcaagccagtcctgtccggggaagcagcagaagctgtgcacagcggaacttctgtgaaaagctcaagtggcccatttccccctgcccctgagggtctcacggccccagaaatagaaccagaaggcgagtcaaccgcggagtag

SEQ ID NO: 246736 - DNA, 1547 bp, Artificial Sequence
  derived and/or modified sequence
aggagccgccggcaagggggcaacgaggaagctcttaagagcgcggccggaaagcagtagagaaatggtcagaaggaacgacaccacagaagaaattagaatgtttaaaagaaccaggaaaaacatctgtagaatctaaagtacctacccagatggaaaaatctacagacacagacgaggacaatgtaaccagaacagaatatagtgacaaaaccacccagtttccatcagtttatgctgtgccaggcactgagcaaacggaagcagttggtggtctttcttccaaaccagccacccctaagactactaccccaccctcatcaccacctccaacagctgtctcaccagagtttgcctacgtcccagctgacccagctcagcttgctgctcagatgttaggtaaagtttcatctattcattctgatcaatctgatgtgttaatggtggatgtggcaaccagtatgcctgttgttatcaaggaggtgccaagctcagaggctgctgaagatgtcatggtggctgctcctcttgtgtgttctggaaaggtgctagaagtgcaggttgtgaaccaaacatctgtccatgtagatttgggttctcaacctaaagaaaatgaggctgaaccatcaacggcttcctcagtccccttgcaggatgaacaagaacctcctgcttatgatcaagctcctgaggtcactttgcaggctgatattgaggttatgtcaactgttcatatatcatctgtctataacgatgtgcctgtgactgaaggagttgtttatatcgagcaactgccagaacaaatagttatcccttttactgatcaagttgcttgtcttaaagaaaatgagcagtcaaaagaaaatgagcagtcaccacgagttagtcccaaatctgtagtagaaaagaccacctctggcatgtctaaaaaatctgtagagtctgtaaaacttgcacagttggaggagaatgcaaaatattcctcagtatatatggaggcagaagcaacagctctgctctctgacacatctttgaaaggtcagcctgaggtacctgcacaactcctggatgcagaaggtgctatcaaaataggctctgaaaaatctctgcaccttgaagtggagatcacttcaatagtctctgacaatactgggcaggaggagtctggggaaaactctgtaccccaggagatggaaggcaaacctgtgctctctggggaagctgcagaagcagtgcactcaggtacatctgtaaagtcatctagtggccccttccctcctgctccagaaggccttactgcaccagaaattgaaccagaaggggaatcaacagctgaataaggtttgatgaagccagcaatggcaacaagtgaacgaggacaaccaccaccatgttctaacatgtggaccctttattgtctaactgataagaatcaacaaggtcacccatcaccgccacctgcacctgggccttttccccaagcaaccctctatttacctaatcctaaggatccacagtttcagcagcatccaccaaaagtcactttt

SEQ ID NO: 246737 - DNA, 2250 bp, Artificial Sequence
  derived and/or modified sequence
atgcctgcggggctataaaaacgctcgcaagcgccaagtctcctcaggagccgccggcaagggggcaacgaggaagctcttaagagcgcggccggaaagcagttgagttacagacatcctgccaaaatgatttcttcaaagcccagacttgtcgtaccctatggcctcaagactctgctcgagggaattagcagagctgttctcaaaaccaacccatcaaacatcaaccagtttgcagcagcttattttcaagaacttactatgtatagagtagagaaatggtcagaaggaacgacaccacagaagaaattagaatgtttaaaagaaccaggaaaaacatctgtagaatctaaagtacctacccagatggaaaaatctacagacacagacgaggacaatgtaaccagaacagaatatagtgacaaaaccacccagtttccatcagtttatgctgtgccaggcactgagcaaacggaagcagttggtggtctttcttccaaaccagccacccctaagactactaccccaccctcatcaccacctccaacagctgtctcaccagagtttgcctacgtcccagctgacccagctcagcttgctgctcagatgttaggtaaagtttcatctattcattctgatcaatctgatgtgttaatggtggatgtggcaaccagtatgcctgttgttatcaaggaggtgccaagctcagaggctgctgaagatgtcatggtggctgctcctcttgtgtgttctggaaaggtgctagaagtgcaggttgtgaaccaaacatctgtccatgtagatttgggttctcaacctaaagaaaatgaggctgaaccatcaacggcttcctcagtccccttgcaggatgaacaagaacctcctgcttatgatcaagctcctgaggtcactttgcaggctgatattgaggttatgtcaactgttcatatatcatctgtctataacgatgtgcctgtgactgaaggagttgtttatatcgagcaactgccagaacaaatagttatcccttttactgatcaagttgcttgtcttaaagaaaatgagcagtcaaaagaaaatgagcagtcaccacgagttagtcccaaatctgtagtagaaaagaccacctctggcatgtctaaaaaatctgtagagtctgtaaaacttgcacagttggaggagaatgcaaaatattcctcagtatatatggaggcagaagcaacagctctgctctctgacacatctttgaaaggtcagcctgaggtacctgcacaactcctggatgcagaaggtgctatcaaaataggctctgaaaaatctctgcaccttgaagtggagatcacttcaatagtctctgacaatactgggcaggaggagtctggggaaaactctgtaccccaggagatggaaggcaaacctgtgctctctggggaagctgcagaagcagtgcactcaggtacatctgtaaagtcatctagtggccccttccctcctgctccagaaggccttactgcaccagaaattgaaccagaaggggaatcaacagctgaataaggtttgatgaagccagcaatggcaacaagtgaacgaggacaaccaccaccatgttctaacatgtggaccctttattgtctaactgataagaatcaacaaggtcacccatcaccgccacctgcacctgggccttttccccaagcaaccctctatttacctaatcctaaggatccacagtttcagcagcatccaccaaaagtcacttttccaacttatgtgatgggcgacaccaagaagaccagtgccccaccttttatcttagtaggctcaaatgttcaggaagcacagggatggaaacctcttcctggacatgctgtcgtttcacagtcagatgtcttgagatatgttgcaatgcaagtgcccattgctgttcctgcagatgagaaataccagaaacataccctaagtccccagaatgctaatcctccaagtggacaagatgtccccaggccaaaaagccctgttttcctttctgttgctttcccagtagaagatgtagctaaaaaaagttcaggatctggtgacaaatgtgctccctttggaagttacggtattgctggggaggtaaccgtgactactgctcacaaacgtcgcaaagcagaaactgaaaactgatccagaaatgacgctgtctgggtcaacatttcagggaggagtctgccaccagtgtaatgtatcaataaacttcatgcaagc

SEQ ID NO: 246738 - DNA, 1428 bp, Artificial Sequence
  derived and/or modified sequence
atgatcagcagcaagcccagactggtggtgccctacggcctgaagaccctgctggagggcatcagcagagccgtgctgaagaccaaccccagcaacatcaaccagttcgccgccgcctacttccaggagctgaccatgtacagagtggagaagtggagcgagggcaccaccccccagaagaagctggagtgcctgaaggagcccggcaagaccagcgtggagagcaaggtgcccacccagatggagaagagcaccgacaccgacgaggacaacgtgaccagaaccgagtacagcgacaagaccacccagttccccagcgtgtacgccgtgcccggcaccgagcagaccgaggccgtgggcggcctgagcagcaagcccgccacccccaagaccaccaccccccccagcagccccccccccaccgccgtgagccccgagttcgcctacgtgcccgccgaccccgcccagctggccgcccagatgctgggcaaggtgagcagcatccacagcgaccagagcgacgtgctgatggtggacgtggccaccagcatgcccgtggtgatcaaggaggtgcccagcagcgaggccgccgaggacgtgatggtggccgcccccctggtgtgcagcggcaaggtgctggaggtgcaggtggtgaaccagaccagcgtgcacgtggacctgggcagccagcccaaggagaacgaggccgagcccagcaccgccagcagcgtgcccctgcaggacgagcaggagccccccgcctacgaccaggcccccgaggtgaccctgcaggccgacatcgaggtgatgagcaccgtgcacatcagcagcgtgtacaacgacgtgcccgtgaccgagggcgtggtgtacatcgagcagctgcccgagcagatcgtgatccccttcaccgaccaggtggcctgcctgaaggagaacgagcagagcaaggagaacgagcagagccccagagtgagccccaagagcgtggtggagaagaccaccagcggcatgagcaagaagagcgtggagagcgtgaagctggcccagctggaggagaacgccaagtacagcagcgtgtacatggaggccgaggccaccgccctgctgagcgacaccagcctgaagggccagcccgaggtgcccgcccagctgctggacgccgagggcgccatcaagatcggcagcgagaagagcctgcacctggaggtggagatcaccagcatcgtgagcgacaacaccggccaggaggagagcggcgagaacagcgtgccccaggagatggagggcaagcccgtgctgagcggcgaggccgccgaggccgtgcacagcggcaccagcgtgaagagcagcagcggccccttcccccccgcccccgagggcctgaccgcccccgagatcgagcccgagggcgagagcaccgccgagtag

SEQ ID NO: 246739 - protein, 281 aa, Artificial Sequence
  derived and/or modified sequence
MEKSTDTDEDNVTRTEYSDKTTQFPSVYAVPGTEQTEAVGGLSSKPATPKTTTPPSSPPPTAVSPEFAYVPADPAQLAAQMLAMATSERGQPPPCSNMWTLYCLTDKNQQGHPSPPPAPGPFPQATLYLPNPKDPQFQQHPPKVTFPTYVMGDTKKTSAPPFILVGSNVQEAQGWKPLPGHAVVSQSDVLRYVAMQVPIAVPADEKYQKHTLSPQNANPPSGQDVPRPKSPVFLSVAFPVEDVAKKSSGSGDKCAPFGSYGIAGEVTVTTAHKRRKAETEN

SEQ ID NO: 246740 - protein, 379 aa, Artificial Sequence
  derived and/or modified sequence
MISSKPRLVVPYGLKTLLEGISRAVLKTNPSNINQFAAAYFQELTMYRGNTTMDIKDLVKQFHQIKVEKWSEGTTPQKKLECLKEPGKTSVESKVPTQMEKSTDTDEDNVTRTEYSDKTTQFPSVYAVPGTEQTEAVGGLSSKPATPKTTTPPSSPPPTAVSPEFAYVPADPAQLAAQMLAMATSERGQPPPCSNMWTLYCLTDKNQQGHPSPPPAPGPFPQATLYLPNPKDPQFQQHPPKVTFPTYVMGDTKKTSAPPFILVGSNVQEAQGWKPLPGHAVVSQSDVLRYVAMQVPIAVPADEKYQKHTLSPQNANPPSGQDVPRPKSPVFLSVAFPVEDVAKKSSGSGDKCAPFGSYGIAGEVTVTTAHKRRKAETEN

SEQ ID NO: 246741 - DNA, 1140 bp, Artificial Sequence
  derived and/or modified sequence
atgatcagttctaagccccgcttagttgttccctacgggttgaaaactctactggagggtatctccagagctgttctgaagacaaatcccagtaacattaatcagtttgctgcagcctactttcaagagctgacaatgtaccgtggaaacaccaccatggacatcaaggatctggtgaagcagttccatcaaatcaaggtggagaaatggtctgagggtacaacgccccaaaagaagttggagtgtctcaaggaacccggcaaaaccagcgttgagtccaaagtccctactcaaatggagaagtcgaccgacaccgatgaagacaatgttacaaggacggaatactctgacaagaccacccagtttccttctgtttatgccgttcctggcaccgaacaaactgaagcagtagggggcctttcctcaaagccagccacgcccaaaaccaccacacccccctcatcccctccacctacagctgtctctccagagtttgcctacgtgccagccgatccagcccagctagcagcacaaatgcttgccatggctacttccgagagggggcagccccctccatgcagcaacatgtggacactatactgcttgacggacaaaaatcagcaggggcatccatctccccccccagccccagggcccttccctcaggctacgctctacctccccaaccccaaggacccccagtttcagcagcaccccccaaaggtaaccttccccacctacgtcatgggagacaccaagaaaacttcggcccccccatttattctggttggtagcaacgtacaggaggctcagggctggaagccactgcccggtcacgcagtggttagccagagtgacgtgctcagatacgttgcaatgcaagtgcccattgccgtcccggccgacgagaagtaccagaagcacactctctcgccgcagaacgcgaaccctccatcgggccaggacgttccaaggccgaaatctcctgtgtttctttctgtggctttcccggtggaggacgtcgccaagaagtcaagcgggtccggcgacaaatgcgcccccttcggctcgtacggtatcgcgggtgaggtaactgtaaccacggctcacaaacgaagaaaggcggaaaccgagaactag

SEQ ID NO: 246742 - DNA, 1140 bp, Artificial Sequence
  derived and/or modified sequence
atgatttctagtaagccaagactggtcgtcccttacggactaaaaaccctgctagaggggatcagcagagccgtcctgaaaaccaacccctctaacatcaaccagtttgccgctgcttattttcaggaactcacaatgtaccgcggaaatacaaccatggacattaaagaccttgtcaaacagttccaccagatcaaggtagagaagtggtccgaaggcaccactccgcagaagaagttagagtgcctgaaagagccaggtaagacctcagtggagtccaaagtgccaacacagatggagaaaagcaccgatacagatgaggataatgttactcgaacagaatactctgacaagaccacgcagttcccaagcgtttacgcagtgccaggtacggagcagaccgaggcagtgggcgggctttcctccaaaccagcaactccaaaaaccactacgcctccttcttctcctccccctacggccgttagccccgagtttgcctatgtgcccgccgaccccgcccaacttgctgcgcagatgctggcaatggctactagcgaaagaggtcaacctcccccatgttccaatatgtggacactgtactgtctgactgacaaaaaccagcagggccatccaagtccaccccccgctccaggcccattcccacaggcgaccctctatctgcccaaccccaaagatccacagttccagcagcaccccccaaaggttacttttcctacatacgtgatgggggatactaagaaaacatccgctccgccatttatccttgtcggatcaaacgtgcaagaagcacagggttggaagcctctcccagggcatgccgtcgtcagtcagagtgatgtgctgcggtacgtggccatgcaggtcccaatcgccgttccagcggacgagaagtatcaaaagcacactctgtccccgcagaacgccaatccaccctccgggcaggatgtaccccggccaaaatcccccgtcttcctctctgttgcattcccagtggaggacgtggcaaagaagagtagtggaagcggggataagtgcgctccctttggctcctacggtatcgcaggagaagtcaccgtgacgactgcgcacaagcggcggaaggcagagacagaaaattag

SEQ ID NO: 246743 - DNA, 1140 bp, Artificial Sequence
  derived and/or modified sequence
atgatcagcagcaagccccggctggtggtgccctacggcctgaagaccctgctggagggcatcagcagagctgtgctgaagaccaaccccagcaacatcaaccagtttgctgctgcctacttccaggagctgaccatgtaccggggcaacaccaccatggacatcaaggacctggtgaagcagttccaccagatcaaggtggagaagtggagcgagggcaccaccccccagaagaagctggagtgcctgaaggagcccgggaagacctctgtggagagcaaggtgcccacccagatggagaagagcacagacacagatgaagataatgtgaccaggacagagtacagcgacaagaccacccagttccccagcgtgtatgctgtgcctggaacagagcagacagaggccgtgggcggcctgagcagcaagccagccacccccaagaccaccaccccacccagcagccccccacccacagctgtgtccccagagtttgcctacgtgcctgctgaccctgcccagctggccgcccagatgctggccatggccaccagcgagcggggccagcccccaccctgcagcaacatgtggaccctgtactgcctgacagacaagaaccagcagggccaccccagccccccaccagcccctggccccttcccccaggccaccctgtacctgcccaaccccaaggacccccagttccagcagcacccccccaaggtgaccttccccacctacgtgatgggagacaccaagaagaccagcgccccacccttcatcctggtgggcagcaatgtgcaggaggcccagggctggaagcccctgcccggccatgctgtggtgtcccagagtgatgtgctgcgctacgtggccatgcaggtgcccatcgctgtgcctgcagatgagaagtaccagaagcacaccctgagcccccagaatgccaaccccccatctggccaggatgtgccccggcccaagagccctgtgttcctgtctgtggccttccctgtggaggatgtggccaagaagagcagcggcagcggggacaagtgtgcccccttcggcagctatggaattgctggggaggtgacagtgaccacagcccacaagaggaggaaggccgagacagagaactag

SEQ ID NO: 246744 - DNA, 1140 bp, Artificial Sequence
  derived and/or modified sequence
atgatcagcagcaagccccggctggtggtgccctacggcctgaagaccctgctcgaaggcatctctcgagcagtgctgaaaacaaatccctcaaatatcaatcagttcgctgccgcttatttccaggagcttactatgtacaggggtaatactacaatggacataaaagacctggtaaaacagtttcaccagattaaagtggagaagtggtccgaagggactacacctcagaaaaagttggagtgtctaaaggagcctgggaagacctcggtagaatcaaaagtgccaacacagatggagaaaagtaccgatactgacgaagacaacgtaacacgcactgagtactcagataaaaccacgcagttcccaagcgtttacgccgtccccggcaccgaacagaccgaagctgttggtggactctcttcaaaacccgccaccccaaaaacaaccacgcctccatccagtccccccccgactgcagtctcacctgaatttgcctacgttcccgctgaccctgctcagctcgctgcccaaatgcttgccatggcaacgagtgagcggggacagccgcctccctgctctaacatgtggactctctactgcttaactgataagaaccaacagggccatccaagtcctccccccgcccccggacctttcccccaggccaccctttatcttcccaatcctaaagaccctcagtttcagcagcacccccccaaagtgacgttcccaacctatgtgatgggcgatacaaagaagactagcgcccccccctttatcttagtcggaagcaatgttcaggaggcccaggggtggaagcctctgccgggacatgctgttgtcagccagagcgatgtcttgcgctatgttgctatgcaggtgcccattgctgttcccgccgacgaaaaataccaaaagcacacactctctcctcagaacgccaatcctccaagtggccaagacgtccctcggcccaagtcacccgtattcctgagtgtggctttcccagtggaggacgttgcaaagaagtccagcggcagtggcgacaaatgcgcccctttcggctcatacggtatcgcaggagaagtcaccgtaactactgcccacaagaggcgtaaagcagagacagaaaattag

SEQ ID NO: 246745 - DNA, 1140 bp, Artificial Sequence
  derived and/or modified sequence
atgatcagcagcaagccccggctggtggtgccctacggcctgaagaccctcctggaagggatttcccgggcagtactcaagaccaacccttcaaatatcaatcaattcgcggctgcttatttccaagaactcacgatgtaccgcggcaatactaccatggatatcaaagatctagtgaaacagttccaccaaataaaagtggagaaatggagcgaggggacaacgccccagaaaaaacttgaatgcctgaaagaacctgggaaaacttctgtggaatccaaggtgccgacacaaatggaaaagagtaccgatacagatgaggacaacgtgacaaggactgagtacagcgataagacgacacaattcccgtcggtgtacgctgtgccaggcacagaacagaccgaggcagtaggcggcctgagcagcaagcccgccacgccaaaaacaacaacaccaccgtccagtcctcccccgactgccgtctctccagaatttgcctacgtgccagccgaccccgctcaacttgctgctcaaatgctggcgatggcaacttcagagcgaggacaacctcccccttgtagcaatatgtggacactgtactgcttgaccgataaaaaccagcagggacaccccagtcctcccccggcccctgggccctttccacaggctacgctgtacctcccgaaccccaaagacccacagtttcagcaacatccgcctaaagtaacgttcccgacttatgttatgggcgacacaaaaaagacctccgcacctcctttcattttggtggggtctaacgtccaagaagcacaaggctggaaaccactgcccgggcacgctgtagtgtcccagagtgacgtcctgcgctacgtagccatgcaggtgcccattgctgtccctgcggacgagaagtatcaaaaacacacactaagcccgcaaaacgcaaatcctccttccggccaggacgtgcccagaccaaagagtcctgtctttctctccgtcgcctttccagtcgaagacgtggctaaaaagagcagcggctccggagataagtgtgcacccttcggctcctacggcatagccggcgaagtgactgtcactacagcacacaagagaaggaaggcagagactgagaactag

SEQ ID NO: 246746 - DNA, 1140 bp, Artificial Sequence
  derived and/or modified sequence
atgatcagcagcaagccgagactggtagtcccctacgggctgaaaacccttctggaagggatctctcgggcagtactgaaaacaaatccaagcaacatcaatcagttcgccgctgcctatttccaggagctcacaatgtatcgcggaaataccaccatggacatcaaggacttagtgaaacagtttcaccagataaaagtcgagaagtggagtgaggggacgaccccacagaagaagctggagtgcttaaaagaacctggcaaaacaagcgtggagagcaaggtgcccacccaaatggaaaaaagcacggatacggatgaggacaacgtcactagaactgagtatagtgataagacgacccagttcccgtccgtctacgccgttcctgggactgagcagaccgaagcggtgggcggtctctcaagcaagccggctacccctaaaactacaacccctcctagcagcccaccccctacagcggtgtcccccgaattcgcatatgtgcccgcagatcctgcccaactcgctgcccagatgctcgctatggccacatctgagagagggcagcctcccccatgcagcaacatgtggaccctgtactgtttgacggataagaatcaacagggtcacccatccccgcctccggcacccggtccattcccccaggcaacactttacctgccaaacccaaaagatccgcaatttcaacaacaccctccaaaggtgacctttccgacctatgtgatgggtgacaccaaaaaaacttccgcgccacctttcatattagttggcagtaatgtgcaggaggctcagggttggaagcccttaccgggtcacgcggtggttagtcaatccgacgtgctcagatatgtggccatgcaggtgccaatcgctgtacccgctgacgagaaatatcagaagcacaccctgagcccccaaaacgccaatccaccaagcggtcaggacgtgccacgcccaaagtcacccgttttcttaagtgttgcttttccggtcgaagacgtggccaaaaaatccagcggatctggggataagtgcgctccatttggcagctacggaatagccggagaagtcacagtgaccacagcccacaagagacgaaaagctgaaacagagaattag

SEQ ID NO: 246747 - DNA, 1140 bp, Artificial Sequence
  derived and/or modified sequence
atgatctccagcaagccacgcttggtggtgccttacggcctgaagacgctcctggaaggcatcagcagagccgttcttaagacaaacccatcgaatataaaccagttcgcagcagcgtatttccaggaacttaccatgtacaggggaaacactaccatggatataaaagatttggtaaagcagttccaccagatcaaggtcgagaagtggtctgagggaaccactcctcagaaaaagctggagtgtttaaaagaaccagggaaaaccagcgtggagagtaaggttcctacccagatggagaagtcaaccgacaccgacgaagataatgtaacccggaccgagtattccgacaaaaccacacagttcccgtcagtgtatgccgtgccgggaacagagcagaccgaagctgtgggaggtctgagctccaaacctgcaactcccaagactactaccccccctagctcgccgccacccaccgccgtctctcctgaattcgcgtacgtgcccgctgatcccgcacagctggctgctcagatgcttgccatggctacctcagaacggggacagcccccaccatgcagtaacatgtggaccttatactgtcttacagacaaaaaccagcaaggacatccctctccaccaccggcacctggacctttcccacaggcaaccctgtatctgcctaacccaaaagacccccaattccaacaacatccccctaaagtaacttttcccacgtacgtcatgggtgacaccaagaaaacatctgctcctccgtttatactggtgggctcgaacgtgcaagaggctcagggatggaagcccctgcccggtcacgcagttgtgtcccagtctgatgttctacggtatgtggccatgcaggtcccgatcgccgtgcctgcagatgagaaatatcaaaaacacactttatctcctcaaaatgctaatccgccatctgggcaggatgtgccgagaccgaagtcaccagtctttctttccgtggctttccctgtggaagatgttgcaaagaagagctccgggagcggagataaatgtgctccatttggctcatatggcattgccggtgaagtgacggtgactactgctcataagagacgcaaggctgaaacagagaattag

SEQ ID NO: 246748 - DNA, 1389 bp, Artificial Sequence
  derived and/or modified sequence
cggagctttgtgatgcggagcttcgtgatgcacgccccgatgcctgcggggctataaaaacgctcgcaagcgccaagtctcctcaggagccgccggcaagggggcaacgaggaagctcttaagagcgcggccggaaagcagttgagttacagacatcctgccaaaatgatttcttcaaagcccagacttgtcgtaccctatggcctcaagactctgctcgagggaattagcagagctgttctcaaaaccaacccatcaaacatcaaccagtttgcagcagcttattttcaagaacttactatgtatagagggaatactactatggatataaaagatctggttaaacaatttcatcagattaaagtagagaaatggtcagaaggaacgacaccacagaagaaattagaatgtttaaaagaaccaggaaaaacatctgtagaatctaaagtacctacccagatggaaaaatctacagacacagacgaggacaatgtaaccagaacagaatatagtgacaaaaccacccagtttccatcagtttatgctgtgccaggcactgagcaaacggaagcagttggtggtctttcttccaaaccagccacccctaagactactaccccaccctcatcaccacctccaacagctgtctcaccagagtttgcctacgtcccagctgacccagctcagcttgctgctcagatgttagcaatggcaacaagtgaacgaggacaaccaccaccatgttctaacatgtggaccctttattgtctaactgataagaatcaacaaggtcacccatcaccgccacctgcacctgggccttttccccaagcaaccctctatttacctaatcctaaggatccacagtttcagcagcatccaccaaaagtcacttttccaacttatgtgatgggcgacaccaagaagaccagtgccccaccttttatcttagtaggctcaaatgttcaggaagcacagggatggaaacctcttcctggacatgctgtcgtttcacagtcagatgtcttgagatatgttgcaatgcaagtgcccattgctgttcctgcagatgagaaataccagaaacataccctaagtccccagaatgctaatcctccaagtggacaagatgtccccaggccaaaaagccctgttttcctttctgttgctttcccagtagaagatgtagctaaaaaaagttcaggatctggtgacaaatgtgctccctttggaagttacggtattgctggggaggtaaccgtgactactgctcacaaacgtcgcaaagcagaaactgaaaactgatccagaaatgacgctgtctgggtcaacatttcagggaggagtctgccaccagtgtaatgtatcaataaacttcatgcaagcata

SEQ ID NO: 246749 - DNA, 1284 bp, Artificial Sequence
  derived and/or modified sequence
cctatggctccgaagtccccgctggcatcctgaaagttgagttacagacatcctgccaaaatgatttcttcaaagcccagacttgtcgtaccctatggcctcaagactctgctcgagggaattagcagagctgttctcaaaaccaacccatcaaacatcaaccagtttgcagcagcttattttcaagaacttactatgtatagagggaatactactatggatataaaagatctggttaaacaatttcatcagattaaagtagagaaatggtcagaaggaacgacaccacagaagaaattagaatgtttaaaagaaccaggaaaaacatctgtagaatctaaagtacctacccagatggaaaaatctacagacacagacgaggacaatgtaaccagaacagaatatagtgacaaaaccacccagtttccatcagtttatgctgtgccaggcactgagcaaacggaagcagttggtggtctttcttccaaaccagccacccctaagactactaccccaccctcatcaccacctccaacagctgtctcaccagagtttgcctacgtcccagctgacccagctcagcttgctgctcagatgttagcaatggcaacaagtgaacgaggacaaccaccaccatgttctaacatgtggaccctttattgtctaactgataagaatcaacaaggtcacccatcaccgccacctgcacctgggccttttccccaagcaaccctctatttacctaatcctaaggatccacagtttcagcagcatccaccaaaagtcacttttccaacttatgtgatgggcgacaccaagaagaccagtgccccaccttttatcttagtaggctcaaatgttcaggaagcacagggatggaaacctcttcctggacatgctgtcgtttcacagtcagatgtcttgagatatgttgcaatgcaagtgcccattgctgttcctgcagatgagaaataccagaaacataccctaagtccccagaatgctaatcctccaagtggacaagatgtccccaggccaaaaagccctgttttcctttctgttgctttcccagtagaagatgtagctaaaaaaagttcaggatctggtgacaaatgtgctccctttggaagttacggtattgctggggaggtaaccgtgactactgctcacaaacgtcgcaaagcagaaactgaaaactgatccagaaatgacgctgtctgggtcaacatttcagggaggagtctgccaccagtgtaatgtatcaataaacttcatgcaagcata

SEQ ID NO: 246750 - DNA, 1140 bp, Artificial Sequence
  derived and/or modified sequence
atgatcagcagcaagcccagactggtggtgccctacggcctgaagaccctgctggagggcatcagcagagccgtgctgaagaccaaccccagcaacatcaaccagttcgccgccgcctacttccaggagctgaccatgtacagaggcaacaccaccatggacatcaaggacctggtgaagcagttccaccagatcaaggtggagaagtggagcgagggcaccaccccccagaagaagctggagtgcctgaaggagcccggcaagaccagcgtggagagcaaggtgcccacccagatggagaagagcaccgacaccgacgaggacaacgtgaccagaaccgagtacagcgacaagaccacccagttccccagcgtgtacgccgtgcccggcaccgagcagaccgaggccgtgggcggcctgagcagcaagcccgccacccccaagaccaccaccccccccagcagccccccccccaccgccgtgagccccgagttcgcctacgtgcccgccgaccccgcccagctggccgcccagatgctggccatggccaccagcgagagaggccagccccccccctgcagcaacatgtggaccctgtactgcctgaccgacaagaaccagcagggccaccccagccccccccccgcccccggccccttcccccaggccaccctgtacctgcccaaccccaaggacccccagttccagcagcacccccccaaggtgaccttccccacctacgtgatgggcgacaccaagaagaccagcgccccccccttcatcctggtgggcagcaacgtgcaggaggcccagggctggaagcccctgcccggccacgccgtggtgagccagagcgacgtgctgagatacgtggccatgcaggtgcccatcgccgtgcccgccgacgagaagtaccagaagcacaccctgagcccccagaacgccaacccccccagcggccaggacgtgcccagacccaagagccccgtgttcctgagcgtggccttccccgtggaggacgtggccaagaagagcagcggcagcggcgacaagtgcgcccccttcggcagctacggcatcgccggcgaggtgaccgtgaccaccgcccacaagagaagaaaggccgagaccgagaactag

SEQ ID NO: 246751 - protein, 221 aa, Artificial Sequence
  derived and/or modified sequence
MISSKPRLVVPYGLKTLLEGISRAVLKTNPSNINQFAAAYFQELTMYRGNTTMDIKDLVKQFHQIKVEKWSEGTTPQKKLECLKEPGKTSVESKVPTQMEKSTDTDEDNVTRTEYSDKTTQFPSVYAVPGTEQTEAVGGLSSKPATPKTTTPPSSPPPTAVSPEFAYVPADPAQLAAQMLEDVAKKSSGSGDKCAPFGSYGIAGEVTVTTAHKRRKAETEN

SEQ ID NO: 246752 - DNA, 666 bp, Artificial Sequence
  derived and/or modified sequence
atgatttcctcaaaaccacggctagtagtgccttacggattgaagaccctcctggaaggcatcagccgagcagtgctcaaaaccaacccatccaacatcaatcagtttgccgcagcgtacttccaggagctcaccatgtacagaggaaacactactatggatattaaagacctggtgaaacaattccaccagatcaaggtggagaagtggtccgaaggaaccactcctcaaaagaagctggaatgtctgaaagaacccggtaaaacgagcgtagagtccaaggttcccactcagatggagaaatctactgacacggatgaggacaacgtgaccaggacggagtactctgataaaacaactcaattccccagcgtgtacgccgtacctgggaccgaacagaccgaggcggtgggcggcctgagctccaagcccgccacgccaaaaacaactactcctccttcctccccaccccccaccgccgtctctccagagtttgcctacgtgccagcggaccccgctcagctagccgctcagatgctagaagatgtggccaagaaatcatctggatctggcgacaagtgcgctcctttcggttcttatggaatagcgggagaagtcacagtcaccactgcacacaaacggcgcaaggcagaaacggagaactag

SEQ ID NO: 246753 - DNA, 666 bp, Artificial Sequence
  derived and/or modified sequence
atgatcagcagcaagccccggctggtggtgccctacggcctgaagaccctgctggagggcatcagcagagctgtgctgaagaccaaccccagcaacatcaaccagtttgctgctgcctacttccaggagctgaccatgtaccggggcaacaccaccatggacatcaaggacctggtgaagcagttccaccagatcaaggtggagaagtggagcgagggcaccaccccccagaagaagctggagtgcctgaaggagcccgggaagacctctgtggagagcaaggtgcccacccagatggagaagagcacagacacagatgaagataatgtgaccaggacagagtacagcgacaagaccacccagttccccagcgtgtatgctgtgcctggaacagagcagacagaggccgtgggcggcctgagcagcaagccagccacccccaagaccaccaccccacccagcagccccccacccacagctgtgtccccagagtttgcctacgtgcctgctgaccctgcccagctggccgcccagatgctggaggatgtggccaagaagagcagcggcagcggggacaagtgtgcccccttcggcagctatggaattgctggggaggtgacagtgaccacagcccacaagaggaggaaggccgagacagagaactag

SEQ ID NO: 246754 - DNA, 666 bp, Artificial Sequence
  derived and/or modified sequence
atgatcagcagcaagccccggctggtggtgccctacggcctgaagacccttttggaagggattagccgggccgttctgaagaccaatccatcgaatatcaatcagttcgccgcagcctacttccaggagctgactatgtaccgagggaacacgacaatggacatcaaggatctagttaagcagttccaccagatcaaggtggagaagtggtccgaaggcaccacaccacaaaagaaactggagtgtttgaaagaacccgggaaaacaagtgtggaaagtaaagttcctacccagatggagaagtcaacggataccgacgaagacaacgtgacgcggaccgagtacagcgacaaaaccacgcaattcccaagcgtgtacgccgtaccagggacagagcagacggaagcagtgggggggttatcaagcaagcctgccaccccaaaaacaacaacccccccctcctcccctcccccaacagctgtgagccctgaattcgcctacgtccctgccgatcctgcccagctcgcagcccagatgctggaggacgtcgcaaaaaaaagcagtgggtccggcgataagtgcgccccctttggctcctacggtatcgccggtgaggttaccgtcacgacagcccataagcggcgcaaagccgagaccgagaactag

SEQ ID NO: 246755 - DNA, 666 bp, Artificial Sequence
  derived and/or modified sequence
atgatctcaagtaagcctcgcctggtggtgccgtacgggctcaagactctgctggaaggtatatcacgcgctgtgcttaaaaccaacccttcgaatatcaaccagtttgccgctgcttactttcaggaactgacgatgtaccgaggcaacaccaccatggatattaaggatctggtgaaacagtttcaccagatcaaggtagagaaatggtctgaaggcaccacaccacaaaaaaagctggagtgcctgaaggagcccggaaagaccagtgtagagtcaaaagtccctacacagatggagaaatctaccgacaccgatgaagataacgtgactcgaaccgagtactctgacaagaccacacaattcccttctgtctatgcagtgccaggcactgaacaaaccgaggccgtcggaggattgagtagcaagccggctacacccaaaactactacgccacctagcagtccaccgccaacagctgttagtccagagtttgcatatgtgccagccgatcctgctcagttagccgctcagatgctggaagacgttgcaaagaagtcctcgggatcaggcgacaaatgcgctcccttcggcagttatggtatagctggggaagtgacggtaactactgctcacaagagaagaaaggctgagacagaaaactag

SEQ ID NO: 246756 - DNA, 902 bp, Artificial Sequence
  derived and/or modified sequence
tgcggagcttcgtgatgcacgccccgatgcctgcggggctataaaaacgctcgcaagcgccaagtctcctcaggagccgccggcaagggggcaacgaggaagctcttaagagcgcggccggaaagcagttgagttacagacatcctgccaaaatgatttcttcaaagcccagacttgtcgtaccctatggcctcaagactctgctcgagggaattagcagagctgttctcaaaaccaacccatcaaacatcaaccagtttgcagcagcttattttcaagaacttactatgtatagagggaatactactatggatataaaagatctggttaaacaatttcatcagattaaagtagagaaatggtcagaaggaacgacaccacagaagaaattagaatgtttaaaagaaccaggaaaaacatctgtagaatctaaagtacctacccagatggaaaaatctacagacacagacgaggacaatgtaaccagaacagaatatagtgacaaaaccacccagtttccatcagtttatgctgtgccaggcactgagcaaacggaagcagttggtggtctttcttccaaaccagccacccctaagactactaccccaccctcatcaccacctccaacagctgtctcaccagagtttgcctacgtcccagctgacccagctcagcttgctgctcagatgttagaagatgtagctaaaaaaagttcaggatctggtgacaaatgtgctccctttggaagttacggtattgctggggaggtaaccgtgactactgctcacaaacgtcgcaaagcagaaactgaaaactgatccagaaatgacgctgtctgggtcaacatttcagggaggagtctgccaccagtgtaatgtatcaataaacttcatgcaagcata

SEQ ID NO: 246757 - DNA, 666 bp, Artificial Sequence
  derived and/or modified sequence
atgatcagcagcaagcccagactggtggtgccctacggcctgaagaccctgctggagggcatcagcagagccgtgctgaagaccaaccccagcaacatcaaccagttcgccgccgcctacttccaggagctgaccatgtacagaggcaacaccaccatggacatcaaggacctggtgaagcagttccaccagatcaaggtggagaagtggagcgagggcaccaccccccagaagaagctggagtgcctgaaggagcccggcaagaccagcgtggagagcaaggtgcccacccagatggagaagagcaccgacaccgacgaggacaacgtgaccagaaccgagtacagcgacaagaccacccagttccccagcgtgtacgccgtgcccggcaccgagcagaccgaggccgtgggcggcctgagcagcaagcccgccacccccaagaccaccaccccccccagcagccccccccccaccgccgtgagccccgagttcgcctacgtgcccgccgaccccgcccagctggccgcccagatgctggaggacgtggccaagaagagcagcggcagcggcgacaagtgcgcccccttcggcagctacggcatcgccggcgaggtgaccgtgaccaccgcccacaagagaagaaaggccgagaccgagaactag

SEQ ID NO: 246758 - protein, 369 aa, Artificial Sequence
  derived and/or modified sequence
MEESMEEEEGGSYEAMMDDQNHNNWEAAVDGFRQPLPPPPPPSSIPAPAREPPGGQLLAVPAVSVDRKGPKEGLPMGPQPPPEANGVIMMLKSCDAAAAVAKAAPAPTASSTININTSTSKFLMNVITIEDYKSTYWPKLDGAIDQLLTQSPGDYIPISYEQIYSCVYKCVCQQHSEQMYSDLIKKITNHLERVSKELQASPPDLYIERFNIALGQYMGALQSIVPLFIYMNKFYIETKLNRDLKDDLIKLFTEHVAEKHIYSLMPLLLEAQSTPFQVTPSTMANIVKGLYTLRPEWVQMAPTLFSKFIPNILPPAVESELSEYAAQDQKFQRELIQNGFTRGDQSRKRAGDELAYNSSSACASSRGYR

SEQ ID NO: 246759 - protein, 246 aa, Artificial Sequence
  derived and/or modified sequence
MNVITIEDYKSTYWPKLDGAIDQLLTQSPGDYIPISYEQIYSCVYKCVCQQHSEQMYSDLIKKITNHLERVSKELQASPPDLYIERFNIALGQYMGALQSIVPLFIYMNKFYIETKLNRDLKDDLIKLFTEHVAEKHIYSLMPLLLEAQSTPFQVTPSTMANIVKGLYTLRPEWVQMAPTLFSKFIPNILPPAVESELSEYAAQDQKFQRELIQNGFTRGDQSRKRAGDELAYNSSSACASSRGYR

SEQ ID NO: 246760 - protein, 180 aa, Artificial Sequence
  derived and/or modified sequence
MTTTPVLSRFASPPDLYIERFNIALGQYMGALQSIVPLFIYMNKFYIETKLNRDLKDDLIKLFTEHVAEKHIYSLMPLLLEAQSTPFQVTPSTMANIVKGLYTLRPEWVQMAPTLFSKFIPNILPPAVESELSEYAAQDQKFQRELIQNGFTRGDQSRKRAGDELAYNSSSACASSRGYR

SEQ ID NO: 246761 - DNA, 6740 bp, Artificial Sequence
  derived and/or modified sequence
gaggccgggcagggggcggggccggcgaatgcccgtcccgacccgtcgcgcctcccctgttagctccctgccagccgaggcggggcgaacctctgccctgttgcgtgggagtgactcacagctcccgccccttttggctccgctttctcgcggccagtccctcgcaccacgtgccctcctggccgcgcccccagctgccctttccaactgcctgttggaagccgctgtaaaacgtcgtgaggagcgccgctgctttacggctgcctctcccagactagagccccggagcgcccaccgccgtcagccgcgtcttcaagctagtcggccccgcggagagcgagagaccctgcgcaccgcagccctctccgctgcgcccattcctgccgccggcgatgtaactcggggaggcagcggtgcccgctggcccggggttgagacaggcggcaggtgcctgtgaggcgggcgggtgccgggggccagcaggatggaggaaagcatggaagaggaggaggggggcagctacgaggcgatgatggacgaccagaaccacaacaactgggaggctgcggtggacggcttccggcagcccctgccacctccgccgcccccctcgtcgatcccggcccctgcccgagagcctccgggggggcagctgctggcggtgcccgcggtctccgtggacaggaaaggccccaaggaggggctcccgatggggccgcagccaccgccggaggctaatggggtgatcatgatgttgaagagctgcgacgcggccgccgccgtggccaaggcggcccccgcccccaccgccagctccaccatcaacatcaacacctccacctccaagttcttaatgaatgttataactattgaagattataagagcacatactggccaaaattggatggtgccatagatcaacttttaactcagagtcctggtgactatatccccatatcctatgaacagatatacagttgtgtgtataaatgtgtatgccagcagcactcggaacagatgtatagtgatctgattaaaaagataactaatcacttagagagagtctcaaaggagctgcaggccagccctccagatctctatattgaaagatttaatatagctcttggacaatatatgggagcattgcagagcattgtgcctcttttcatatatatgaataagttttacatcgaaaccaagcttaacagagacttaaaagatgaccttataaagctgtttacggaacatgttgcagaaaagcacatttacagcctaatgcctttacttttagaagcccagtcaacaccatttcaggtcacaccttcaactatggcaaatattgtgaaaggcctgtataccctcagaccagagtgggttcagatggctccaactctattttctaaatttattccaaacattctccctccggcggtggaatctgaactttctgaatatgctgctcaagatcagaaatttcaaagagaacttatacagaatggttttacaaggggtgaccagtcccggaagagagctggggatgagttggcttataatagctcgtcagcatgtgcaagttccagggggtacagatagtgaatgtattgaatatgctttccttcctgaaaagaggacacactggagctgcagagactgtattcagagcacagtgggggctgcacacactcaggagctctgtcacaaagctgttcatggaagaggatgttggacttcttacttggtttgtaattttaaaacaaaaactaaaaaaaaaaaaaacgttgctgctagacttgggggtgattttgaaatgggacaatcttttaatgagtttatctacagattctgtgaggaaaaagcatctcagaaagtgaccatttctaagtgaaatctgacagccaaaatcagcagcttcctccaaaaatataagagcagaagaattttttttttaagcacttgttttgttcatttgtggacttggcattttggtgtattggtttcacatgtcaggatctcttttgctttaaaaccaagcagatcattacagtacagtatttttcacccacaaccaaaacaaccccttttaaaagagttggtctttgtttagcattagaaagtcttgttaaaggaaaatgctaactctgcttttgctagaactttcccccatcagttcacaactttcttctactctgtgccttgagctttgtgcactttgcaactgtgtgaccatgttgtcaaactcctcctggagaagtgtatggtatctaaactcacccaccaagatggcaggtgtggccctgtagcaggatgctaattaagtgggaaaatagaaaccttttgcacatgggtcggattttcccctggttcaccagagcatattcatattaatgttggggaccaactctcctagagcatttccattccctgtgccacttaacacgatgtctgtcaccagctgctatagtattggcagtactctagtttagggatgggcggtactttagcacggaagcttcccttagtattattgagagctacttcctgcgatgctctaggaagcagatacagttattaagtccaaatacacagtggtgtggggttcctgatcacttcattttaaatgaatgagataattacttaaaaaaagtctgtcatttgaacattatatttgagtgtgatagggaagaagtagcactgctgtcctaaggctcccttccagctgtggcaaagctatatttctgtttctccacatccacagtgctttttagtccatcataaaagtttctgaagcttattctagctgttgttgaaagcccaagaaaaatagatgtggcaagagaaaaatacttttcttctcaattttgcttgaatcttaattgagcataggcttctctactaggcaacatcagactaatagtatttacctcttcagagaacttgaggggaaaagaaacatcccagggatgctgtcgcatgtctgctctgcaggttcttcatacagctgcctctgccaattcagtttattttttggggggagtggtgtgggtgggagagttagaagtgggatattgggagcaagtaagtcacccaataattgaagtccttgatttgtaaaactgttatacagagaagtaaagataaaggttgtcagatttattttttaaagtacttaaccagagttcgtggattttgtggactttaattggactcaattcactctgtgagcatcctggattgcatcgatgaacactgaattactgtaagaacatagacaggctctcactatgacctggacagtttaagttgctacactggtaacattctagtatcaaggagaattccattcatcatgacattcacattttacttttctcaatggaatgcttgcttcaggcttaccaatcacacctagaactgaagtctgagtgagtggtattaataatttttctgaaaggaataaaattggaatgtttctaaatgtggagaaattcttcagtatcctaataatatacccaaatgctttttctgggagagagcattcttttacaaaagaactttccctataaaagcatcacagtataatgtgaattggcattaaaatctttggatgcttttgcattattaagttcatggagaaatatattctttttactatgtatgtattaataaaaagtgggcaaagtaaagtttgcaaaatttagtttctctaaatttttgcacagtgactgcagctggctatgggtcagctcttaatacaacaaaaccttgactggaagtcactatagaaaggttgtacatagtctcccagtctacatgtcctggctgttaatcatcttggccccttgaggcacatcacagtttgaaggacctgtttaagttgaaatagactttgcttatttattgggattctaaaaaattctgagtgagtttgcagtatgagaggaaataagatttcctcctccttcctctcattttatattgactgtttgccagaaactgttttcttctgttttcttatattttgtttttgagatggagtctcactctctcacccaggctggagtgcagtggtgcaatctcagctcactgcaacctctgcctcctgggttcaagtgattctcctgcctcggcctcctgagtagctggaattacaggcacgtgccactacgcccggctactttttgtattttgtttttagtagagacggggtttcaccatgttggtcaggctggtcttgaactcctgacctcaagtgatccacccacctcggcctcccaaagtgctgggattataggtgtgagccactgcacctggccttttttttttttttttttgtattcttgccagtacagtatatggtttttctaccccaattacatactgggttttgtaccacatcactaaaggcccaaatcattgaagatacaaaaccgtacatgcaggctggttgtctggttagtcaatggctgatttgcttcaactgtctagtatgtatgtgcagcctgaaactggctccttaaaaggaaagccgggtcagtcatcttgaaaaaatgacatgtaaaagtaaatcgataattgttttgagagacggtacatgttttaaaggttggccttaagcttcagtaacattgtcattttgtgaccttttgttgtcacacctgtaccctaacctgacaggaattaactactgtttttttgtggggcagaaagcaaaacctggtgttgtgacttttatcctaatggttcttaggcaaggttagtgagaagaaacacaaacccagatgcatgcattgtgcattattttgtagacaagctactttttcttctgtccctttaacaaatttgcagcaattaccctccctttggggtctagagtgaaagctaatttgtgggtagatgagattgcagaagaatggatgtccatggctgtgaacactgcacactgcacatccatctccagtgctcacactgtgcagctaccactccctggctgcgtgccatgctgtcgggttgcagatttgcacacataaattcctcaggaagagtttgcatgagcatcacctcgcaatattctgtactgaccaaacaagggatttgaacgtttttcagcacaaaaggataacttccgagtggtggtctgtacgcatactagcaaaggtaatggtgatctagcaaacaaaattggtttctgcagttagaagtgagcaggagcacttgtattatagtatttaaataatcctggttaatctctttttaagccgagtaacccctccagattttgcctttttattattgaggctggctttattttcttctactttttttcccgttttatagcagttaattatttttgtgattattatgcaagaagcattgcccttgagttaaactgttattgtttcataagcagctattaaaataactgagcattgttttatgaacatacactaatctgagatactgaaaagctttgcaactaaaaagcaaaacaacctacattagtcatctagccattgtttggatgttttgagttgattttttatggtgcctcttttagcttggaatattacgtttactttaatccaagtctaggccttttaaagggtccttaaaattaaagttcagaatgtgaatccctttgacatctattacaggtttataggacctttttggttgtgattactgttttcaatacgattgtataaatgaagttaactttgtcagaagttaaaatggaggtcataggagttcctggagaaatggctctcctgtttctttcattaccccactgaagttcaccccagtttctggccacaagaatatgagaaaggaaccctgttgttttccaagggaaatcattcctctctgtccccactgttgattaactaaagtcctggacaccttccttcctccactggccaagacccaccttgacccaccttgaacctcttttcagagccgagtggcatgaatatgtgtactgtttctgcttctgttgatggagtggctgtgggagaattaaaggaaatgctaatttgagcttcattcataggggaacctactatatattgcatccctgctggttggaaattatcttcatctctggactgcattgtttagaaaaatgttaatggcttacaattctgagaactttattgtgtggctctggggttaagaattctgtggtttgaaaaaaaataaatattttgtattgattctcacgtcatttcaatgttgtgactatgtactaaatgcactaagactgggtattctcttagaagagtgcgttttgttaaacagatggcagttcactctcattagttctatttgtcaatattacagccacacacttcaggataacttactcaaatgtgaagtcatgggaagctatggctagtaacaggaatgcttatgaaaaatttggagggcaagcacgagcaagaggcttttgccactcactagcacagccagagcaaggatgaagcaatgaagtcttgttcctagtggtgcttgtatgtcagaagccatagtgagctcagcacagggcgttctgcacatcatctctttaatccaagaaaaacaaaatggcggatgaaactcctattgacctgggatacaaagccactgactttggctcttgatcttttggtgggttctgaatcactccttctgtattagggcatatactttcactctaaaacattgtggtaaatgaaataaatcttgtacagatgtcgttggc

SEQ ID NO: 246762 - DNA, 6460 bp, Artificial Sequence
  derived and/or modified sequence
cctttccaactgcctgttggaagccgctgtaaaacgtcgtgaggagcgccgctgctttacggctgcctctcccagactagagccccggagcgcccaccgccgtcagccgcgtcttcaagctagtcggccccgcggagagcgagagaccctgcgcaccgcagccctctccgctgcgcccattcctgccgccggcgatgtaactcggggaggcagcggtgcccgctggcccggggttgagacaggcggcaggtgcctgtgaggcgggcgggtgccgggggccagcaggatggaggaaagcatggaagaggaggaggggggcagctacgaggcgatgatggacgaccagaaccacaacaactgggaggctgcggtggacggcttccggcagcccctgccacctccgccgcccccctcgtcgatcccggcccctgcccgagagcctccgggggggcagctgctggcggtgcccgcggtctccgtggacaggaaaggccccaaggaggggctcccgatggggccgcacccaccgccagctccaccatcaacatcaacacctccacctccaagttcttaatgaatgttataactattgaagattataagagcacatactggccaaaattggatggtgccatagatcaacttttaactcagagtcctggtgactatatccccatatcctatgaacagatatacagttgtgtgtataaatgtgtatgccagcagcactcggaacagatgtatagtgatctgattaaaaagataactaatcacttagagagagtctcaaaggagctgcaggccagccctccagatctctatattgaaagatttaatatagctcttggacaatatatgggagcattgcagagcattgtgcctcttttcatatatatgaataagttttacatcgaaaccaagcttaacagagacttaaaagatgaccttataaagctgtttacggaacatgttgcagaaaagcacatttacagcctaatgcctttacttttagaagcccagtcaacaccatttcaggtcacaccttcaactatggcaaatattgtgaaaggcctgtataccctcagaccagagtgggttcagatggctccaactctattttctaaatttattccaaacattctccctccggcggtggaatctgaactttctgaatatgctgctcaagatcagaaatttcaaagagaacttatacagaatggttttacaaggggtgaccagtcccggaagagagctggggatgagttggcttataatagctcgtcagcatgtgcaagttccagggggtacagatagtgaatgtattgaatatgctttccttcctgaaaagaggacacactggagctgcagagactgtattcagagcacagtgggggctgcacacactcaggagctctgtcacaaagctgttcatggaagaggatgttggacttcttacttggtttgtaattttaaaacaaaaactaaaaaaaaaaaaaacgttgctgctagacttgggggtgattttgaaatgggacaatcttttaatgagtttatctacagattctgtgaggaaaaagcatctcagaaagtgaccatttctaagtgaaatctgacagccaaaatcagcagcttcctccaaaaatataagagcagaagaattttttttttaagcacttgttttgttcatttgtggacttggcattttggtgtattggtttcacatgtcaggatctcttttgctttaaaaccaagcagatcattacagtacagtatttttcacccacaaccaaaacaaccccttttaaaagagttggtctttgtttagcattagaaagtcttgttaaaggaaaatgctaactctgcttttgctagaactttcccccatcagttcacaactttcttctactctgtgccttgagctttgtgcactttgcaactgtgtgaccatgttgtcaaactcctcctggagaagtgtatggtatctaaactcacccaccaagatggcaggtgtggccctgtagcaggatgctaattaagtgggaaaatagaaaccttttgcacatgggtcggattttcccctggttcaccagagcatattcatattaatgttggggaccaactctcctagagcatttccattccctgtgccacttaacacgatgtctgtcaccagctgctatagtattggcagtactctagtttagggatgggcggtactttagcacggaagcttcccttagtattattgagagctacttcctgcgatgctctaggaagcagatacagttattaagtccaaatacacagtggtgtggggttcctgatcacttcattttaaatgaatgagataattacttaaaaaaagtctgtcatttgaacattatatttgagtgtgatagggaagaagtagcactgctgtcctaaggctcccttccagctgtggcaaagctatatttctgtttctccacatccacagtgctttttagtccatcataaaagtttctgaagcttattctagctgttgttgaaagcccaagaaaaatagatgtggcaagagaaaaatacttttcttctcaattttgcttgaatcttaattgagcataggcttctctactaggcaacatcagactaatagtatttacctcttcagagaacttgaggggaaaagaaacatcccagggatgctgtcgcatgtctgctctgcaggttcttcatacagctgcctctgccaattcagtttattttttggggggagtggtgtgggtgggagagttagaagtgggatattgggagcaagtaagtcacccaataattgaagtccttgatttgtaaaactgttatacagagaagtaaagataaaggttgtcagatttattttttaaagtacttaaccagagttcgtggattttgtggactttaattggactcaattcactctgtgagcatcctggattgcatcgatgaacactgaattactgtaagaacatagacaggctctcactatgacctggacagtttaagttgctacactggtaacattctagtatcaaggagaattccattcatcatgacattcacattttacttttctcaatggaatgcttgcttcaggcttaccaatcacacctagaactgaagtctgagtgagtggtattaataatttttctgaaaggaataaaattggaatgtttctaaatgtggagaaattcttcagtatcctaataatatacccaaatgctttttctgggagagagcattcttttacaaaagaactttccctataaaagcatcacagtataatgtgaattggcattaaaatctttggatgcttttgcattattaagttcatggagaaatatattctttttactatgtatgtattaataaaaagtgggcaaagtaaagtttgcaaaatttagtttctctaaatttttgcacagtgactgcagctggctatgggtcagctcttaatacaacaaaaccttgactggaagtcactatagaaaggttgtacatagtctcccagtctacatgtcctggctgttaatcatcttggccccttgaggcacatcacagtttgaaggacctgtttaagttgaaatagactttgcttatttattgggattctaaaaaattctgagtgagtttgcagtatgagaggaaataagatttcctcctccttcctctcattttatattgactgtttgccagaaactgttttcttctgttttcttatattttgtttttgagatggagtctcactctctcacccaggctggagtgcagtggtgcaatctcagctcactgcaacctctgcctcctgggttcaagtgattctcctgcctcggcctcctgagtagctggaattacaggcacgtgccactacgcccggctactttttgtattttgtttttagtagagacggggtttcaccatgttggtcaggctggtcttgaactcctgacctcaagtgatccacccacctcggcctcccaaagtgctgggattataggtgtgagccactgcacctggccttttttttttttttttttgtattcttgccagtacagtatatggtttttctaccccaattacatactgggttttgtaccacatcactaaaggcccaaatcattgaagatacaaaaccgtacatgcaggctggttgtctggttagtcaatggctgatttgcttcaactgtctagtatgtatgtgcagcctgaaactggctccttaaaaggaaagccgggtcagtcatcttgaaaaaatgacatgtaaaagtaaatcgataattgttttgagagacggtacatgttttaaaggttggccttaagcttcagtaacattgtcattttgtgaccttttgttgtcacacctgtaccctaacctgacaggaattaactactgtttttttgtggggcagaaagcaaaacctggtgttgtgacttttatcctaatggttcttaggcaaggttagtgagaagaaacacaaacccagatgcatgcattgtgcattattttgtagacaagctactttttcttctgtccctttaacaaatttgcagcaattaccctccctttggggtctagagtgaaagctaatttgtgggtagatgagattgcagaagaatggatgtccatggctgtgaacactgcacactgcacatccatctccagtgctcacactgtgcagctaccactccctggctgcgtgccatgctgtcgggttgcagatttgcacacataaattcctcaggaagagtttgcatgagcatcacctcgcaatattctgtactgaccaaacaagggatttgaacgtttttcagcacaaaaggataacttccgagtggtggtctgtacgcatactagcaaaggtaatggtgatctagcaaacaaaattggtttctgcagttagaagtgagcaggagcacttgtattatagtatttaaataatcctggttaatctctttttaagccgagtaacccctccagattttgcctttttattattgaggctggctttattttcttctactttttttcccgttttatagcagttaattatttttgtgattattatgcaagaagcattgcccttgagttaaactgttattgtttcataagcagctattaaaataactgagcattgttttatgaacatacactaatctgagatactgaaaagctttgcaactaaaaagcaaaacaacctacattagtcatctagccattgtttggatgttttgagttgattttttatggtgcctcttttagcttggaatattacgtttactttaatccaagtctaggccttttaaagggtccttaaaattaaagttcagaatgtgaatccctttgacatctattacaggtttataggacctttttggttgtgattactgttttcaatacgattgtataaatgaagttaactttgtcagaagttaaaatggaggtcataggagttcctggagaaatggctctcctgtttctttcattaccccactgaagttcaccccagtttctggccacaagaatatgagaaaggaaccctgttgttttccaagggaaatcattcctctctgtccccactgttgattaactaaagtcctggacaccttccttcctccactggccaagacccaccttgacccaccttgaacctcttttcagagccgagtggcatgaatatgtgtactgtttctgcttctgttgatggagtggctgtgggagaattaaaggaaatgctaatttgagcttcattcataggggaacctactatatattgcatccctgctggttggaaattatcttcatctctggactgcattgtttagaaaaatgttaatggcttacaattctgagaactttattgtgtggctctggggttaagaattctgtggtttgaaaaaaaataaatattttgtattgattctcacgtcatttcaatgttgtgactatgtactaaatgcactaagactgggtattctcttagaagagtgcgttttgttaaacagatggcagttcactctcattagttctatttgtcaatattacagccacacacttcaggataacttactcaaatgtgaagtcatgggaagctatggctagtaacaggaatgcttatgaaaaatttggagggcaagcacgagcaagaggcttttgccactcactagcacagccagagcaaggatgaagcaatgaagtcttgttcctagtggtgcttgtatgtcagaagccatagtgagctcagcacagggcgttctgcacatcatctctttaatccaagaaaaacaaaatggcggatgaaactcctattgacctgggatacaaagccactgactttggctcttgatcttttggtgggttctgaatcactccttctgtattagggcatatactttcactctaaaacattgtggtaaatgaaataaatcttgtacagatgtcgttggc

SEQ ID NO: 246763 - DNA, 1060 bp, Artificial Sequence
  derived and/or modified sequence
agcagatgtgttctggctgaatgctgagtaactaaatgtgacctgtactaatggaaagagtagcataattagcttcagatgaccactactcctgtgctctctagatttgccagccctccagatctctatattgaaagatttaatatagctcttggacaatatatgggagcattgcagagcattgtgcctcttttcatatatatgaataagttttacatcgaaaccaagcttaacagagacttaaaagatgaccttataaagctgtttacggaacatgttgcagaaaagcacatttacagcctaatgcctttacttttagaagcccagtcaacaccatttcaggtcacaccttcaactatggcaaatattgtgaaaggcctgtataccctcagaccagagtgggttcagatggctccaactctattttctaaatttattccaaacattctccctccggcggtggaatctgaactttctgaatatgctgctcaagatcagaaatttcaaagagaacttatacagaatggttttacaaggggtgaccagtcccggaagagagctggggatgagttggcttataatagctcgtcagcatgtgcaagttccagggggtacagatagtgaatgtattgaatatgctttccttcctgaaaagaggacacactggagctgcagagactgtattcagagcacagtgggggctgcacacactcaggagctctgtcacaaagctgttcatggaagaggatgttggacttcttacttgctttcacttgacagggccactgggcaaggaactgagggtggcatccagccaacagctaccaaggaactgaggccttcaatctaatagcccgaggggctgtaaatcctgctgacggtccgagtgaacttggaatggatgttggtccagttgaatcttgagatgactgtggccctggctgacaccttgatcacagcctagcggcaaagcctgagacagagaattcagctaagctgtgcccagactcctgacccagggaaactctggaataaccgtgtgctggtttaagccactaaa

SEQ ID NO: 246764 - DNA, 1110 bp, Artificial Sequence
  derived and/or modified sequence
atggaggagagcatggaggaggaggagggcggcagctacgaggccatgatggacgaccagaaccacaacaactgggaggccgccgtggacggcttcagacagcccctgccccccccccccccccccagcagcatccccgcccccgccagagagccccccggcggccagctgctggccgtgcccgccgtgagcgtggacagaaagggccccaaggagggcctgcccatgggcccccagcccccccccgaggccaacggcgtgatcatgatgctgaagagctgcgacgccgccgccgccgtggccaaggccgcccccgcccccaccgccagcagcaccatcaacatcaacaccagcaccagcaagttcctgatgaacgtgatcaccatcgaggactacaagagcacctactggcccaagctggacggcgccatcgaccagctgctgacccagagccccggcgactacatccccatcagctacgagcagatctacagctgcgtgtacaagtgcgtgtgccagcagcacagcgagcagatgtacagcgacctgatcaagaagatcaccaaccacctggagagagtgagcaaggagctgcaggccagcccccccgacctgtacatcgagagattcaacatcgccctgggccagtacatgggcgccctgcagagcatcgtgcccctgttcatctacatgaacaagttctacatcgagaccaagctgaacagagacctgaaggacgacctgatcaagctgttcaccgagcacgtggccgagaagcacatctacagcctgatgcccctgctgctggaggcccagagcacccccttccaggtgacccccagcaccatggccaacatcgtgaagggcctgtacaccctgagacccgagtgggtgcagatggcccccaccctgttcagcaagttcatccccaacatcctgccccccgccgtggagagcgagctgagcgagtacgccgcccaggaccagaagttccagagagagctgatccagaacggcttcaccagaggcgaccagagcagaaagagagccggcgacgagctggcctacaacagcagcagcgcctgcgccagcagcagaggctacagatag

SEQ ID NO: 246765 - DNA, 741 bp, Artificial Sequence
  derived and/or modified sequence
atgaacgtgatcaccatcgaggactacaagagcacctactggcccaagctggacggcgccatcgaccagctgctgacccagagccccggcgactacatccccatcagctacgagcagatctacagctgcgtgtacaagtgcgtgtgccagcagcacagcgagcagatgtacagcgacctgatcaagaagatcaccaaccacctggagagagtgagcaaggagctgcaggccagcccccccgacctgtacatcgagagattcaacatcgccctgggccagtacatgggcgccctgcagagcatcgtgcccctgttcatctacatgaacaagttctacatcgagaccaagctgaacagagacctgaaggacgacctgatcaagctgttcaccgagcacgtggccgagaagcacatctacagcctgatgcccctgctgctggaggcccagagcacccccttccaggtgacccccagcaccatggccaacatcgtgaagggcctgtacaccctgagacccgagtgggtgcagatggcccccaccctgttcagcaagttcatccccaacatcctgccccccgccgtggagagcgagctgagcgagtacgccgcccaggaccagaagttccagagagagctgatccagaacggcttcaccagaggcgaccagagcagaaagagagccggcgacgagctggcctacaacagcagcagcgcctgcgccagcagcagaggctacagatag

SEQ ID NO: 246766 - DNA, 543 bp, Artificial Sequence
  derived and/or modified sequence
atgaccaccacccccgtgctgagcagattcgccagcccccccgacctgtacatcgagagattcaacatcgccctgggccagtacatgggcgccctgcagagcatcgtgcccctgttcatctacatgaacaagttctacatcgagaccaagctgaacagagacctgaaggacgacctgatcaagctgttcaccgagcacgtggccgagaagcacatctacagcctgatgcccctgctgctggaggcccagagcacccccttccaggtgacccccagcaccatggccaacatcgtgaagggcctgtacaccctgagacccgagtgggtgcagatggcccccaccctgttcagcaagttcatccccaacatcctgccccccgccgtggagagcgagctgagcgagtacgccgcccaggaccagaagttccagagagagctgatccagaacggcttcaccagaggcgaccagagcagaaagagagccggcgacgagctggcctacaacagcagcagcgcctgcgccagcagcagaggctacagatag

SEQ ID NO: 246767 - DNA, 1110 bp, Artificial Sequence
  derived and/or modified sequence
atggaagaaagcatggaggaggaagagggcggttcctacgaggccatgatggacgaccagaaccacaataactgggaagcagccgtagacggatttcgccaaccactgcctccgccaccccctcccagcagcatcccagcccccgccagagagcctcccgggggtcagctgttagcagtcccggctgtgagcgtggatcggaaggggcctaaggaaggcctgccaatggggccccagccccccccagaagctaatggggtcatcatgatgctcaagtcttgcgatgccgcggccgctgtggccaaagccgctcccgcgcctaccgctagcagcacaattaacatcaatacttctactagcaagttcctgatgaacgtaatcacgatcgaagactacaaaagtacttactggcctaagttggacggtgcaatagaccaactactgacgcagagcccaggggactacatccctatcagttacgaacagatctactcctgcgtgtacaagtgtgtttgccagcagcatagtgaacagatgtattccgatctgattaagaaaatcaccaaccatttggaacgggttagcaaggagctccaggccagtccacctgatctgtacatagagcggtttaatatcgcgctcggccagtacatgggggcactgcagtcgattgtgcccctgtttatttacatgaataagttttacattgagactaaactcaatagggacttaaaggatgaccttatcaagttgtttaccgagcatgtggcagaaaagcacatttacagcctgatgcctttactccttgaggcgcagagcactcctttccaggtgactccctctactatggctaacatcgtaaaggggctgtataccctgcgtccggaatgggtgcagatggcacccacactgttttctaaatttatccccaacatcttgccccccgctgtcgagtccgagctgtccgagtatgccgcacaggaccagaagttccagagggagctcatccagaacgggttcacacggggggaccagtccagaaagcgcgctggggatgaactcgcgtataatagcagctccgcctgtgcctcttcccgaggatacagatag

SEQ ID NO: 246768 - DNA, 741 bp, Artificial Sequence
  derived and/or modified sequence
atgaacgtgattactattgaagactacaaatccacttattggccaaaactggacggtgctatcgatcagcttttgactcagtctcctggcgactacatccccatttcctatgaacagatctatagctgtgtttataaatgcgtatgccagcagcattccgaacagatgtactcagatttaatcaagaaaataactaaccatctggaacgcgtgagtaaggaacttcaggcttctcccccagacctatacatcgagagattcaatatcgctttaggacagtacatgggagccctccaatccatcgtcccactgttcatctacatgaacaagttttatatcgaaacaaaattgaatcgagacttaaaggacgaccttatcaagctcttcaccgagcacgtggcggaaaaacatatttacagtctcatgcccctgctccttgaggcccagtctaccccttttcaagtgaccccatctacaatggctaacatcgtcaaaggattgtatacattgcgacccgaatgggtacagatggctccgacactgtttagtaagtttatcccaaacatcttgccacccgctgtcgagagtgaactctccgagtacgccgctcaggatcagaaatttcagagggagctaatccagaatggctttacaaggggggatcagtcccgtaagagggctggcgacgaactcgcttataattcctcctccgcctgcgcctcctcaaggggttatcgctag

SEQ ID NO: 246769 - DNA, 543 bp, Artificial Sequence
  derived and/or modified sequence
atgaccaccaccccagtgctatccagatttgctagcccccctgacctgtatatcgaacgcttcaacatagcactcggccagtatatgggtgcacttcagagcattgtgcctctctttatttacatgaataagttctatatcgaaacaaaactgaaccgcgatctgaaggacgatctgatcaaactgttcacagagcacgttgccgagaaacacatatacagcctcatgcctttgttgctggaagctcagagtactccttttcaggtcaccccaagcactatggcgaacattgtgaaaggcctgtacactcttcgccctgagtgggttcagatggctcctacactgttcagcaaattcatccctaatatccttccacccgcggtcgagtccgagctgtcagagtacgctgcccaggatcaaaagttccagagggagctaatccagaatggctttactaggggcgatcagagccgaaaacgcgccggggacgagctggcatacaatagcagttcagcatgcgcttctagtcgcggctatagatag

SEQ ID NO: 246770 - DNA, 1110 bp, Artificial Sequence
  derived and/or modified sequence
atggaggagagcatggaggaggaggagggcggcagctatgaggccatgatggatgaccagaaccacaacaactgggaggccgctgtggatggcttccggcagcccctgcccccacctcctccacccagcagcatcccagccccagcccgggagcccccaggcggccagctgctggccgtgcctgctgtgtctgtggacaggaagggccccaaggagggcctgcccatgggcccccagcccccacctgaggccaatggagtcatcatgatgctgaagagctgtgatgctgctgctgctgtggccaaggccgccccagcccccacagccagcagcaccatcaacatcaacaccagcaccagcaagttcctgatgaatgtcatcaccatcgaggactacaagagcacctactggcccaagctggatggagccatcgaccagctgctgacccagagccctggggactacatccccatctcctatgagcagatctacagctgtgtgtacaagtgtgtgtgccagcagcacagcgagcagatgtacagcgacctgatcaagaagatcaccaaccacctggagcgggtgtccaaggagctgcaggccagccccccagacctgtacatcgagcgcttcaacatcgccctgggccagtacatgggcgccctgcagagcatcgtgcccctcttcatctacatgaacaagttctacatcgagaccaagctgaacagagacctgaaggatgacctgatcaagctgttcacagaacatgtggccgagaagcacatctacagcctgatgcccctgctgctggaggcccagagcacccccttccaggtgacccccagcaccatggccaacatcgtgaagggcctgtacaccctgcggcctgagtgggtgcagatggcccccaccctcttcagcaagttcatccccaacatcctgcccccagctgtggagagcgagctgtctgaatatgctgcccaggaccagaagttccagcgggagctgatccagaatggcttcaccaggggggaccagagcaggaagagagctggagatgagctggcctacaacagcagcagcgcctgtgccagcagccggggctacagatag

SEQ ID NO: 246771 - DNA, 741 bp, Artificial Sequence
  derived and/or modified sequence
atgaatgtcatcaccatcgaggactacaagagcacctactggcccaagctggatggagccatcgaccagctgctgacccagagccctggggactacatccccatctcctatgagcagatctacagctgtgtgtacaagtgtgtgtgccagcagcacagcgagcagatgtacagcgacctgatcaagaagatcaccaaccacctggagcgggtgtccaaggagctgcaggccagccccccagacctgtacatcgagcgcttcaacatcgccctgggccagtacatgggcgccctgcagagcatcgtgcccctcttcatctacatgaacaagttctacatcgagaccaagctgaacagagacctgaaggatgacctgatcaagctgttcacagagcacgtggccgagaagcacatctacagcctgatgcccctgctgctggaggcccagagcacccccttccaggtgacccccagcaccatggccaacatcgtgaagggcctgtacaccctgcggcctgagtgggtgcagatggcccccaccctcttcagcaagttcatccccaacatcctgcccccagctgtggagagcgagctgtctgaatatgctgcccaggaccagaagttccagcgggagctgatccagaatggcttcaccaggggggaccagagcaggaagagagctggagatgagctggcctacaacagcagcagcgcctgtgccagcagccggggctacagatag

SEQ ID NO: 246772 - DNA, 543 bp, Artificial Sequence
  derived and/or modified sequence
atgaccaccacccctgtgctgagcagatttgccagccccccagacctgtacatcgagcgcttcaacatcgccctgggccagtacatgggcgccctgcagagcatcgtgcccctcttcatctacatgaacaagttctacatcgagaccaagctgaacagagacctgaaggatgacctgatcaagctgttcacagagcacgtggccgagaagcacatctacagcctgatgcccctgctgctggaggcccagagcacccccttccaggtgacccccagcaccatggccaacatcgtgaagggcctgtacaccctgcggcctgagtgggtgcagatggcccccaccctcttcagcaagttcatccccaacatcctgcccccagctgtggagagcgagctgtctgaatatgctgcccaggaccagaagttccagcgggagctgatccagaatggcttcaccaggggggaccagagcaggaagagagctggagatgagctggcctacaacagcagcagcgcctgtgccagcagccggggctacagatag

SEQ ID NO: 246773 - DNA, 1110 bp, Artificial Sequence
  derived and/or modified sequence
atggaggagagcatggaggaggaggagggcggcagctacgaggccatgatggacgaccagaatcataataattgggaggccgcggttgatggattccggcagccactgccacctcctccccctcccagcagtattcctgctcctgccagagagcccccgggaggtcaactcctcgccgtgcccgccgtcagtgttgacaggaaggggcctaaagagggcctgcccatgggcccccagcccccacccgaggccaatggcgtgattatgatgttgaagagctgtgacgcagctgctgccgtcgccaaagccgccccagcaccaaccgcctccagcacaatcaacatcaacacgagcacctctaaatttttaatgaacgttataacaattgaggactataagtctacatattggccaaagcttgatggtgccatcgaccaattactgacacaatcaccaggcgactatattcccatctcatacgagcagatctatagctgtgtctataagtgcgtgtgtcagcagcattcagaacagatgtacagcgatctcatcaagaagatcaccaaccacctggaacgggtttctaaggaacttcaagccagcccccccgacctttatattgaacgcttcaatattgcgctcggacagtacatgggcgctctccagagcattgtccctctattcatatatatgaataaattttacattgaaaccaagttaaacagagacctcaaggatgaccttatcaaactcttcactgagcatgtggctgagaagcatatctatagccttatgccattgctgctggaggctcagtcgactccgttccaagtcaccccatccaccatggctaacatcgtgaagggtctctatactctgcgtccagaatgggttcagatggcgcccaccttattctccaaatttattcctaacatcctgccccccgcagttgaatctgagctgagcgagtatgccgctcaggatcagaaattccagagggagctgattcagaatggattcacgcgaggggaccaatcccggaagcgggcaggcgacgaattggcctacaactcaagttctgcatgcgcttcatcgcgaggatatcgttag

SEQ ID NO: 246774 - DNA, 741 bp, Artificial Sequence
  derived and/or modified sequence
atgaacgtgatcaccatcgaggactacaagagcacctactggcccaaacttgacggagccatcgaccaattgttgacccaatctccgggcgattacatccctatctcgtacgaacaaatctactcatgcgtgtacaaatgcgtgtgccagcagcatagtgagcagatgtactcggacctgatcaaaaagattactaaccatctggaaagagtgtctaaggagttgcaggcttccccacctgatttatatattgagagattcaacattgccctcggccagtacatgggggccctgcaatctattgtgccactttttatctatatgaataaattctatatcgagactaaattaaatagggatttgaaagatgaccttatcaaactgttcactgaacatgtggccgagaaacacatttactcgctgatgccactgttgctggaggcccagagcacgccgttccaggtgacgccctctacaatggccaatatagtgaaggggttgtatactctgcggccagaatgggtgcaaatggctcccaccctgttctccaagttcattccaaacatccttccacccgccgtggaaagtgaattgtcagagtacgcggctcaggatcagaaattccagcgagagttgattcagaatggttttaccagaggggatcaaagtcggaagcgagctggcgatgagttggcgtacaattcctcttcagcatgtgcatctagtagaggctacaggtag

SEQ ID NO: 246775 - DNA, 543 bp, Artificial Sequence
  derived and/or modified sequence
atgaccaccacccccgtgctgagccggttcgccagcccccccgacctctatatcgaacggttcaatatcgcactcggccagtatatgggagcgttacagagcattgtacccctgtttatttacatgaataagttctatatcgaaaccaaactgaacagggatttgaaagacgacctcattaaactgtttactgagcatgtggcagaaaaacacatctattcgctgatgcctcttctactagaagcgcagagtacaccatttcaggtgacccctagcacaatggcaaatattgttaaaggcctgtacacattgcgaccggaatgggtccaaatggctccaacgctcttctccaaattcatccctaatattctgccgcctgctgtcgaatccgagctgtcagaatacgctgctcaggaccagaaatttcagcgtgaactgatacaaaacggcttcacacgaggtgatcaaagcagaaaaagagccggagacgagctggcttataacagctccagtgcctgcgcgtcatcgcgcggataccgctag

SEQ ID NO: 246776 - DNA, 1110 bp, Artificial Sequence
  derived and/or modified sequence
atggaggaaagcatggaggaggaagagggcggaagctatgaagccatgatggatgatcagaatcacaacaactgggaggctgccgttgatggctttagacagccactcccccctcccccaccaccatcctctatcccagcccctgccagggaacccccaggtggacagctcctggccgttcccgcagtgtccgttgataggaaaggacccaaagaggggcttcccatgggcccacaacctcctcctgaggctaacggtgttattatgatgctaaaatcttgtgatgctgccgcagccgttgctaaggctgctcctgcacctactgccagttctacaattaatattaatacaagcacttccaaatttttaatgaacgtgattaccatcgaggactataaaagcacttattggcccaaactggatggcgctattgaccagctcctgactcaatcacctggagactacatccctatttcatacgaacagatttactcgtgcgtgtacaaatgcgtctgtcagcaacactctgaacagatgtactctgatctaatcaaaaagatcaccaaccacctggagagggtgagcaaggagctacaggcctctccacctgacctgtatattgagcgattcaatattgccctcggacaatacatgggagctctgcagtctattgtgcccctcttcatctatatgaataaattctacatcgaaaccaaactgaacagggacctgaaggatgacttaatcaaattgttcactgagcatgttgcggaaaagcacatatatagcctgatgccactcttactggaggcacagagcaccccttttcaagtcactccctcaactatggcgaatatcgtgaaaggcctctacacacttaggccagagtgggtccagatggctcccactctcttttccaaattcattccaaatattctgccacctgcagtcgaatcagagctcagcgaatacgccgctcaagatcagaaattccagagagagttgatccagaatggctttacacgaggcgaccaatcacggaagcgcgcaggcgatgagctggcttacaactcctcctccgcctgcgcaagctctcggggttatcgctag

SEQ ID NO: 246777 - DNA, 741 bp, Artificial Sequence
  derived and/or modified sequence
atgaatgtgatcacaatcgaggactacaaatcaacttactggcccaaacttgatggcgctatcgaccaacttctgacacagagccctggtgactatatccctatctcctatgagcaaatttactcgtgtgtttacaaatgcgtctgtcagcagcactccgaacagatgtactccgatcttatcaagaagataacaaaccacctggagagagtgagtaaggagctgcaagcaagccccccagacttgtacatcgagagattcaacattgcactcggccaatacatgggagcattgcagtcaatagtccccctgtttatctatatgaacaaattctatatcgagacaaaattgaatcgtgatctgaaggatgacctcatcaagctctttaccgaacacgtcgccgagaaacacatctactccctaatgcccctcctgctggaggctcaatccacaccttttcaagtgacaccgagcacgatggccaacatcgttaaaggcctttatactctgcgcccagagtgggtccagatggctccaactttgttctccaagtttatccctaatatacttcctcccgctgtggagtctgaactgtccgaatatgcagcgcaagatcagaagtttcagagagagctgatccaaaatggcttcaccaggggtgaccagtcccgaaagcgcgctggcgacgagcttgcttacaacagcagctcagcctgcgcctcatctcgcggatataggtag

SEQ ID NO: 246778 - DNA, 543 bp, Artificial Sequence
  derived and/or modified sequence
atgacaaccacgcctgtcctgtctcggttcgcctctcctccagacctgtacattgagcgcttcaacatagcccttgggcagtatatgggggcactgcagagtattgtgcccctttttatttatatgaataagttctacattgagaccaaactgaacagagacctgaaagatgacctaattaagctcttcaccgagcatgtcgcagagaagcatatctatagcctgatgcccctgctgctggaagcccagagcaccccatttcaggtgactcccagtaccatggcgaatattgtgaagggcctgtatacactgagaccggagtgggttcagatggcacctaccttatttagcaagttcattcctaatatattaccccctgctgttgaatctgaactcagtgagtacgccgcacaggaccagaagtttcagcgcgaattaatccaaaatgggttcacccggggtgatcagtcgcggaagagagccggagacgaactcgcctacaatagcagctctgcctgtgcctcctcacgcggatacagatag

SEQ ID NO: 246779 - protein, 456 aa, Artificial Sequence
  derived and/or modified sequence
MEASWGSFNAERGWYVSVQQPEEAEAEELSPLLSNELHRQRSPGVSFGLSVFNLMNAIMGSGILGLAYVLANTGVFGFSFLLLTVALLASYSVHLLLSMCIQTAVTSYEDLGLFAFGLPGKLVVAGTIIIQNIGAMSSYLLIIKTELPAAIAEFLTGDYSRYWYLDGQTLLIIICVGIVFPLALLPKIGFLGYTSSLSFFFMMFFALVVIIKKWSIPCPLTLNYVEKGFQISNVTDDCKPKLFHFSKESAYALPTMAFSFLCHTSILPIYCELQSPSKKRMQNVTNTAIALSFLIYFISALFGYLTFYDKVESELLKGYSKYLSHDVVVMTVKLCILFAVLLTVPLIHFPARKAVTMMFFSNFPFSWIRHFLITLALNIIIVLLAIYVPDIRNVFGVVGASTSTCLIFIFPGLFYLKLSREDFLSWKKLGAFVLLIFGILVGNFSLALIIFDWINK

SEQ ID NO: 246780 - DNA, 1371 bp, Artificial Sequence
  derived and/or modified sequence
atggaggccagctggggcagcttcaacgccgagagaggctggtacgtgagcgtgcagcagcccgaggaggccgaggccgaggagctgagccccctgctgagcaacgagctgcacagacagagaagccccggcgtgagcttcggcctgagcgtgttcaacctgatgaacgccatcatgggcagcggcatcctgggcctggcctacgtgctggccaacaccggcgtgttcggcttcagcttcctgctgctgaccgtggccctgctggccagctacagcgtgcacctgctgctgagcatgtgcatccagaccgccgtgaccagctacgaggacctgggcctgttcgccttcggcctgcccggcaagctggtggtggccggcaccatcatcatccagaacatcggcgccatgagcagctacctgctgatcatcaagaccgagctgcccgccgccatcgccgagttcctgaccggcgactacagcagatactggtacctggacggccagaccctgctgatcatcatctgcgtgggcatcgtgttccccctggccctgctgcccaagatcggcttcctgggctacaccagcagcctgagcttcttcttcatgatgttcttcgccctggtggtgatcatcaagaagtggagcatcccctgccccctgaccctgaactacgtggagaagggcttccagatcagcaacgtgaccgacgactgcaagcccaagctgttccacttcagcaaggagagcgcctacgccctgcccaccatggccttcagcttcctgtgccacaccagcatcctgcccatctactgcgagctgcagagccccagcaagaagagaatgcagaacgtgaccaacaccgccatcgccctgagcttcctgatctacttcatcagcgccctgttcggctacctgaccttctacgacaaggtggagagcgagctgctgaagggctacagcaagtacctgagccacgacgtggtggtgatgaccgtgaagctgtgcatcctgttcgccgtgctgctgaccgtgcccctgatccacttccccgccagaaaggccgtgaccatgatgttcttcagcaacttccccttcagctggatcagacacttcctgatcaccctggccctgaacatcatcatcgtgctgctggccatctacgtgcccgacatcagaaacgtgttcggcgtggtgggcgccagcaccagcacctgcctgatcttcatcttccccggcctgttctacctgaagctgagcagagaggacttcctgagctggaagaagctgggcgccttcgtgctgctgatcttcggcatcctggtgggcaacttcagcctggccctgatcatcttcgactggatcaacaagtag

SEQ ID NO: 246781 - DNA, 1371 bp, Artificial Sequence
  derived and/or modified sequence
atggaagctagttggggcagttttaacgcagaacgcggctggtacgtctccgttcaacagccggaagaggccgaggcggaagaactttcaccgctgctgtctaacgaacttcataggcagcgtagtcccggcgtgtccttcggcctgagcgtgttcaatcttatgaacgcaatcatgggttccggaatcttgggtctggcatatgtgctagccaacacaggagtctttgggttttcttttttactgctgaccgtggccttgctggcctcctatagcgtacatctgttgctcagcatgtgcattcagacagccgtgacctcttatgaggaccttggccttttcgcctttggacttcccggaaaactcgtcgttgccgggacaatcatcatccagaatatcggggccatgtcttcataccttctgataattaagacggaacttccagccgccattgcagagtttctgaccggtgattatagtaggtattggtacttagacggacagacacttcttatcataatttgcgtggggattgtatttcccctcgctctcttacccaagataggatttcttggatacacgagcagcttaagtttcttctttatgatgtttttcgccctggtcgtaattatcaaaaaatggtccattccatgtcccctcactcttaattacgtggagaagggcttccagattagtaacgtcactgatgattgcaagccaaagctgtttcatttcagcaaagaatcagcatatgcacttcccaccatggctttttcattcctgtgtcacacttccatactgcccatttattgcgagctgcagagcccatcaaagaagcgcatgcaaaatgtcaccaacactgctattgccctgagtttcctgatctatttcatctccgctctctttgggtacttgaccttttacgacaaagtggagagcgaactccttaaagggtacagcaaatacctgtctcacgatgttgtcgtcatgacagttaaattatgtatcctgtttgccgttctacttactgtacccctgattcatttccctgcacgcaaagcagtcactatgatgttcttctccaactttcccttttcatggatccgccatttcttgatcaccctcgccctgaacattatcatagtgttgctggccatttatgtcccggatattcgaaatgtcttcggagtggttggggcctctacttcgacttgtctcatattcatctttcccggtctattttacctgaagcttagtagggaggacttcttgagttggaagaaactgggcgccttcgtgttgttgatcttcggaattctcgtcgggaactttagcttagcactgatcatttttgactggataaacaaatag

SEQ ID NO: 246782 - DNA, 1371 bp, Artificial Sequence
  derived and/or modified sequence
atggaggcctcctggggcagcttcaatgctgagcggggctggtacgtgtctgtgcagcagcctgaggaggccgaggccgaggagctgagccccctgctgagcaatgagctgcaccggcagaggagccctggggtgtcctttggcctgagcgtcttcaacctgatgaatgccatcatgggcagcggcatcctgggcctggcctacgtgctggccaacacaggagtgtttggcttctccttcctgctgctgactgtggccctgctggccagctacagcgtgcacctgctgctgtccatgtgcatccagacagctgtgaccagctatgaggacctgggcctgtttgccttcggcctgcccgggaagctggtggtggccggcaccatcatcatccagaacattggagccatgagcagctacctgctgatcatcaagacagagctgcctgctgccatcgccgagttcctgaccggggactacagccgctactggtacctggatggccagaccctgctgatcatcatctgtgtgggcatcgtgttccccctggccctgctgcccaagattggcttcctgggctacaccagcagcctgtccttcttcttcatgatgttctttgccctggtggtgatcatcaagaagtggagcatcccctgccccctgaccctgaactacgtggagaagggcttccagatcagcaatgtgacagatgactgcaagcccaagctgttccacttcagcaaggagagcgcctatgccctgcccaccatggccttctccttcctgtgccacaccagcatcctgcccatctactgtgagctgcagagccccagcaagaagaggatgcagaatgtgaccaacacagccatcgccctgtccttcctgatctacttcatcagcgccctgtttggctacctgaccttctatgacaaggtggagagcgagctgctgaagggctacagcaagtacctgagccatgatgtggtggtgatgacagtgaagctgtgcatcctgtttgctgtgctgctgactgtgcccctcatccacttccctgccaggaaggctgtgaccatgatgttcttcagcaacttccccttctcctggatccgccacttcctgatcaccctggccctgaacatcatcatcgtgctgctggccatctacgtgcctgacatcagaaatgtgtttggagtggtgggcgccagcaccagcacctgcctgatcttcatcttccctggcctcttctacctgaagctgagccgggaggacttcctgtcctggaagaagctgggcgcctttgtgctgctgatcttcggcatcctggtgggcaacttcagcctggccctgatcatctttgactggatcaacaagtag

SEQ ID NO: 246783 - DNA, 1371 bp, Artificial Sequence
  derived and/or modified sequence
atggaggccagctggggcagcttcaacgccgagcggggctggtacgtcagcgtgcagcagcctgaagaggcagaggcagaagagctgagtcccttacttagcaacgagctacacagacagcgaagccccggcgtgagctttggactgagcgtgttcaaccttatgaatgcaattatggggtccggtatccttgggttggcgtacgtgctggccaacacaggtgttttcggctttagtttcttattgctgacggtggctcttttggcttcttattccgtgcacctcttgttaagcatgtgcattcagactgccgtgacgagctacgaggacctggggctgtttgcgttcggtctgcctggaaagttggtggtggccggcactatcatcatacagaatatcggcgctatgagcagttatctgctaattataaaaaccgaactaccggctgcaatcgcggagtttctgaccggggattactctcgctactggtatctggacggacagacactactcattattatctgtgtagggatcgtgtttccacttgcattactcccgaaaataggttttctggggtatacaagtagcctgtccttcttttttatgatgttcttcgccttggtggtcatcatcaaaaagtggtccatcccttgtcccctcacgctgaactatgtggaaaagggcttccagatatccaatgtgacagatgattgtaagcccaaactgtttcacttcagtaaagaaagcgcttacgccctacccacgatggccttcagctttctttgtcatacctcaatcctgcccatctactgcgagctgcagtccccttcaaaaaagaggatgcaaaatgtcaccaatactgctatcgccctgagcttcctgatttacttcataagcgcacttttcgggtatctgacattttacgataaagtggagagcgaactcctgaagggttactcaaagtacctatctcatgatgtagtggtgatgactgtgaaactttgtattttgtttgcagtgttgctgaccgtgcctttaattcactttccggctagaaaggcagtcacaatgatgtttttcagcaattttcctttttcttggatccggcattttctgataactcttgcactcaacattatcattgtgctgcttgccatctacgtcccagatatccgcaacgtgtttggagtagttggcgcttcaacatctacctgcctcatcttcatttttccgggactgttttaccttaagttgtctcgcgaagattttctgtcctggaaaaaattaggggcatttgtcttgctgattttcggcatcttggtaggaaacttttcgttggcactcattattttcgattggataaacaagtag

SEQ ID NO: 246784 - DNA, 1371 bp, Artificial Sequence
  derived and/or modified sequence
atggaagctagctggggaagctttaatgcagaaagaggatggtatgtgtccgtccagcagccagaagaagcggaagccgaagaattatctccactgctttccaatgagctgcatcggcagagatctccaggggtcagcttcggactgtccgtttttaatctcatgaacgcaattatggggagcggcatcctcgggctggcctacgtgttagccaacaccggggtgtttgggttctcgttcctgctcctcacagtggcacttctggctagctattcagtgcacctcttgctgagcatgtgcatccagaccgctgtgacgagctatgaggaccttggactcttcgctttcggtttgccgggtaagctggtggtggctgggacaataatcattcaaaatatcggggctatgagttcctatctactcattataaagacagagctgcctgccgctatagccgaattcctcaccggggactacagtagatactggtatcttgacggccagaccttgttaattatcatctgtgtgggcatcgtatttcctcttgccctgctgcctaaaataggctttttgggctacactagcagcttgtcttttttttttatgatgtttttcgcactggtcgtaatcataaagaaatggagcatcccttgtccccttacactcaactacgtagaaaaaggctttcagatcagcaatgttactgacgactgtaagccgaagcttttccatttttctaaagagtccgcctacgcattgcccacaatggcctttagcttcctttgccacacatccatcctgccgatttattgtgaactgcaatccccaagtaaaaaaaggatgcaaaacgtcaccaataccgccattgcattgtcattcctcatctatttcatctcagctttgtttgggtacctgacgttctacgacaaggtggaaagtgagcttctgaagggttattctaaatatctatctcacgatgtggtcgtgatgaccgttaaattatgcatcctattcgcagtcttactcaccgtccctctgatccatttcccagcgaggaaagcagtgaccatgatgtttttcagcaatttcccgttttcttggattcgacactttctcatcaccctggccctcaacattataatagtcctcctcgccatctatgtgccagatatccgaaacgtgttcggcgtggtgggcgcatcgacttctacctgcctgatttttatttttcctggcttgttctaccttaagcttagcagggaagacttcctgtcctggaaaaaattgggggctttcgtgctactcatttttggaatccttgtgggtaacttctcccttgccttaatcatcttcgactggattaataagtag

SEQ ID NO: 246785 - DNA, 1688 bp, Artificial Sequence
  derived and/or modified sequence
gtacggaatgccggaagggccgggctcaaagctccgcctctggcgcgaccgacgactggagcgcagggcaggggtagaggctcgtagatggaactggtagtcagctggagagcagcatggaggcgtcctgggggagcttcaacgctgagcggggctggtatgtctctgtccagcagcctgaagaagcggaggccgaagagttgagtccgttgctaagcaacgaacttcacagacagcgatccccaggtgtttcatttggtttatcagtgtttaatttgatgaatgccatcatgggaagtggcatccttggcttagcttatgttttggctaataccggtgtctttggatttagcttcttgctgctgacagttgctctcctggcttcttactcagtccatcttctgcttagtatgtgtattcagacagctgtaacatcttatgaagatcttggactctttgcatttggattacctggaaagttggtggtggcaggcaccataataattcagaatattggagctatgtcatcttatcttttaattattaaaacagagcttcctgctgctattgcagaatttttgactggagactatagtagatattggtatcttgatggacaaacactactaataatcatatgtgttggcattgtgttccctcttgcacttcttcccaaaataggctttcttggctacacaagtagtttatcatttttctttatgatgttctttgctcttgtggtaataattaaaaaatggtccatcccttgtcctctgacattaaattatgtagagaaaggtttccagatttcaaatgttacagatgattgtaagccaaagctctttcatttctccaaagagagtgcttatgccttaccaaccatggctttttcatttctctgccatacctcaatattgcccatatactgtgaacttcaaagtccttcaaagaaaagaatgcagaatgttaccaatacagcaattgctttaagttttctcatttattttatatctgcactctttgggtacctcactttttatgacaaagtggagtcagaattactaaaaggttatagtaaatacttatcacatgatgttgttgtcatgactgtgaagttatgcatactatttgctgtgcttttgacagtccctctaatccacttccctgccagaaaagctgtaacaatgatgtttttctccaattttccattctcatggattcgccattttttgatcactctagcactcaatattatcatcgttttacttgcaatatatgttcctgacattagaaatgtatttggtgtagttggtgccagtacatcaacatgtttgatttttatattcccaggactattttatcttaaacttagcagagaggattttctgtcatggaaaaagcttggggcattcgttttgctcatctttggaattttggttgggaattttagtttagcactcatcatttttgattggattaataaataaaagaaatattttcctacttcttacaagaataatatacccctagttgcaagaatgaattattccggaagacaccctggatgaaaaataacattttaataaaaattattaacagaaaagcagaacaaaatggcagtgggtatggggaagtaagagtgtggcagttttaatcaaaaaaagaaacaaactcgaaatgctcttaaa

SEQ ID NO: 246786 - protein, 1006 aa, Artificial Sequence
  derived and/or modified sequence
MSRRKQSNPRQIKRSLGDMEAREEVQLVGASHMEQKATAPEAPSPPSADVNSPPPLPPPTSPGGPKELEGQEPEPRPTEEEPGSPWSGPDELEPVVQDGQRRIRARLSLATGLSWGPFHGSVQTRASSPRQAEPSPALTLLLVDEACWLRTLPQALTEAEANTEIHRKDDALWCRVTKPVPAGGLLSVLLTAEPHSTPGHPVKKEPAEPTCPAPAHDLQLLPQQAGMASILATAVINKDVFPCKDCGIWYRSERNLQAHLLYYCASRQGTGSPAAAATDEKPKETYPNERVCPFPQCRKSCPSASSLEIHMRSHSGERPFVCLICLSAFTTKANCERHLKVHTDTLSGVCHSCGFISTTRDILYSHLVTNHMVCQPGSKGEIYSPGAGHPATKLPPDSLGSFQQQHTALQGPLASADLGLAPTPSPGLDRKALAEATNGEARAEPLAQNGGSSEPPAAPRSIKVEAVEEPEAAPILGPGEPGPQAPSRTPSPRSPAPARVKAELSSPTPGSSPVPGELGLAGALFLPQYVFGPDAAPPASEILAKMSELVHSRLQQGAGAGAGGAQTGLFPGAPKGATCFECEITFSNVNNYYVHKRLYCSGRRAPEDAPAARRPKAPPGPARAPPGQPAEPDAPRSSPGPGAREEGAGGAATPEDGAGGRGSEGSQSPGSSVDDAEDDPSRTLCEACNIRFSRHETYTVHKRYYCASRHDPPPRRPAAPPGPPGPAAPPAPSPAAPVRTRRRRKLYELHAAGAPPPPPPGHAPAPESPRPGSGSGSGPGLAPARSPGPAADGPIDLSKKPRRPLPGAPAPALADYHECTACRVSFHSLEAYLAHKKYSCPAAPPPGALGLPAAACPYCPPNGPVRGDLLEHFRLAHGLLLGAPLAGPGVEARTPADRGPSPAPAPAASPQPGSRGPRDGLGPEPQEPPPGPPPSPAAAPEAVPPPPAPPSYSDKGVQTPSKGTPAPLPNGNHRYCRLCNIKFSSLSTFIAHKKYYCSSHAAEHVK

SEQ ID NO: 246787 - DNA, 3241 bp, Artificial Sequence
  derived and/or modified sequence
gcggccgccgggagggcgcgcggcgccggagacatgtccaggcggaaacagagcaacccccggcagatcaagcgttccctcggagacatggaggccagagaggaggtgcagttggtgggtgccagccacatggagcaaaaggccacggcacctgaagccccgagccctcccagcgcagatgttaactcacccccaccgctgccgccccccacatccccaggaggccccaaggagctggaaggacaggaaccagaacccaggcccacggaggaagagccgggcagtccctggagcgggccagacgagctggagccggtggtgcaggatgggcagaggcgcatacgggcccgactcagcctcgccacgggcctgtcctggggcccgttccatgggagtgtccagaccagagcctcatcccccaggcaggcggagccgagcccagccctgaccctgctgctggtggacgaggcctgctggctgaggacgctgccccaggccctgactgaggccgaggccaacacagagatccacaggaaggatgacgcactctggtgcagggtcaccaagccggtgcctgcggggggactcctgagcgtgctcctcacggccgagccccacagcacccccggccaccctgtgaagaaggagccagcagagcccacgtgcccggcccctgcacacgacctccagctcctgccccagcaggccgggatggcctccatccttgccaccgcagtgatcaacaaagacgtcttcccctgcaaggactgtggcatctggtaccgcagcgagcgcaacctgcaggcgcacctgctctactactgcgccagccgccagggcaccggctccccggccgcagccgccacagacgagaagcccaaagagacctaccccaacgagcgcgtctgccccttcccccagtgccgcaagagctgccccagcgccagctccctggagatccacatgcgcagccacagcggagagcggcccttcgtgtgcctgatctgcctgtcggccttcaccaccaaggccaactgcgagcggcacctcaaggtgcacacggacacgctgagcggtgtctgccacagctgtggcttcatctccaccacaagggacatcctctacagccacttggtcaccaaccacatggtctgccagcctggctccaagggtgagatctactcgccaggggccggacacccagcaaccaagctgcccccagacagtctgggcagcttccagcagcagcacacggccctgcaaggccccctggcctccgcggacctgggcctggcgcccaccccatcgccaggactggacagaaaggccctggccgaggccaccaacggagaggccagagcggagcctctggcccagaatggaggcagcagcgagcccccggcggcccccaggagcatcaaggtggaggcggtggaggagccggaggcggcccccatcctgggccccggagagcctgggccccaggccccgtcgcggacgccgtcgccgcgcagccccgccccggccagggtcaaggccgagctgtccagccccacgccgggctccagcccggtgcccggcgagctgggcctggccggggccctgttccttccgcagtacgtgttcgggcccgacgcggcgccccccgcctcggagatcctggccaagatgtccgagctggtgcacagccggctgcagcagggcgcgggcgcgggcgccggcggcgcgcagaccgggctcttccccggggcccccaagggcgctacgtgcttcgagtgcgagatcaccttcagcaacgtcaacaactactacgtgcacaagcgcctctactgttcaggccgccgtgcgcccgaggacgcgcctgccgcgcgcaggcccaaggcgccccccggcccggcccgcgcgccccccggccagcccgccgaacccgacgcgccgcgctcgtccccgggccccggagcgcgcgaggagggggctgggggcgcggccacgcccgaggacggcgcgggcggccggggcagcgagggcagccagagcccgggtagctccgtggacgacgcggaggacgaccccagccgcacgctgtgcgaggcctgcaacatccgcttcagccgccacgagacctacaccgtgcacaagcggtactactgcgcctcgcgccacgacccgccgccgcgccgaccggccgcgcccccgggaccccctgggccggccgcgcccccggccccctctcccgccgcgcctgtgcgcacgcgcagacgccgcaagctctacgagctgcacgcggccggcgccccgccccccccgccgcccggccacgcccccgcgcccgagtcgccgcggcccggaagcggaagcggaagcggccccggcctcgcccctgcgcgctcgcccggccccgcggccgacggccccatcgacctgagcaagaagccgcggcgcccgctccccggagccccggcaccggcgctggccgactaccacgagtgcacggcctgccgcgtgagcttccacagcctcgaggcctacctggcgcacaagaagtactcgtgccccgctgcgccaccgcccggcgcgctcggcctgcccgccgccgcctgcccctactgccccccgaacggcccggtgcgcggggacctgctggagcatttccgcctggcgcacggcctgctgctcggcgcgcccctggccggcccgggggtcgaggcccggacgccggccgaccgcggcccctcgcccgctcccgcccccgccgcctccccgcagcccgggtcccgtggcccccgggacggcctcggcccggagccccaggagccgccgcccggcccgcccccgtccccggccgccgcgcccgaggccgtgccgcccccgccggcgcccccctcctactcggacaagggcgtccagactcccagcaagggcacgccggcgccgctgcccaacggcaaccaccggtactgccgtctttgcaacatcaagttcagcagcctgtccaccttcatcgcccacaagaagtattactgctcctcgcacgccgccgagcacgtgaagtgagcgcccacactacagccgcagacgctttgcacgccccgctgcgatgcggggagggggccgcccccaggccgcacggactgccgctcctgggaaccccgccacgcacaggcctcggcggagggggccgcagggggcagcgcccgcctggacccttggcacttaataaagaagttcagtttgatgagca

SEQ ID NO: 246788 - DNA, 3021 bp, Artificial Sequence
  derived and/or modified sequence
atgagcagaagaaagcagagcaaccccagacagatcaagagaagcctgggcgacatggaggccagagaggaggtgcagctggtgggcgccagccacatggagcagaaggccaccgcccccgaggcccccagcccccccagcgccgacgtgaacagccccccccccctgcccccccccaccagccccggcggccccaaggagctggagggccaggagcccgagcccagacccaccgaggaggagcccggcagcccctggagcggccccgacgagctggagcccgtggtgcaggacggccagagaagaatcagagccagactgagcctggccaccggcctgagctggggccccttccacggcagcgtgcagaccagagccagcagccccagacaggccgagcccagccccgccctgaccctgctgctggtggacgaggcctgctggctgagaaccctgccccaggccctgaccgaggccgaggccaacaccgagatccacagaaaggacgacgccctgtggtgcagagtgaccaagcccgtgcccgccggcggcctgctgagcgtgctgctgaccgccgagccccacagcacccccggccaccccgtgaagaaggagcccgccgagcccacctgccccgcccccgcccacgacctgcagctgctgccccagcaggccggcatggccagcatcctggccaccgccgtgatcaacaaggacgtgttcccctgcaaggactgcggcatctggtacagaagcgagagaaacctgcaggcccacctgctgtactactgcgccagcagacagggcaccggcagccccgccgccgccgccaccgacgagaagcccaaggagacctaccccaacgagagagtgtgccccttcccccagtgcagaaagagctgccccagcgccagcagcctggagatccacatgagaagccacagcggcgagagacccttcgtgtgcctgatctgcctgagcgccttcaccaccaaggccaactgcgagagacacctgaaggtgcacaccgacaccctgagcggcgtgtgccacagctgcggcttcatcagcaccaccagagacatcctgtacagccacctggtgaccaaccacatggtgtgccagcccggcagcaagggcgagatctacagccccggcgccggccaccccgccaccaagctgccccccgacagcctgggcagcttccagcagcagcacaccgccctgcagggccccctggccagcgccgacctgggcctggcccccacccccagccccggcctggacagaaaggccctggccgaggccaccaacggcgaggccagagccgagcccctggcccagaacggcggcagcagcgagccccccgccgcccccagaagcatcaaggtggaggccgtggaggagcccgaggccgcccccatcctgggccccggcgagcccggcccccaggcccccagcagaacccccagccccagaagccccgcccccgccagagtgaaggccgagctgagcagccccacccccggcagcagccccgtgcccggcgagctgggcctggccggcgccctgttcctgccccagtacgtgttcggccccgacgccgccccccccgccagcgagatcctggccaagatgagcgagctggtgcacagcagactgcagcagggcgccggcgccggcgccggcggcgcccagaccggcctgttccccggcgcccccaagggcgccacctgcttcgagtgcgagatcaccttcagcaacgtgaacaactactacgtgcacaagagactgtactgcagcggcagaagagcccccgaggacgcccccgccgccagaagacccaaggccccccccggccccgccagagccccccccggccagcccgccgagcccgacgcccccagaagcagccccggccccggcgccagagaggagggcgccggcggcgccgccacccccgaggacggcgccggcggcagaggcagcgagggcagccagagccccggcagcagcgtggacgacgccgaggacgaccccagcagaaccctgtgcgaggcctgcaacatcagattcagcagacacgagacctacaccgtgcacaagagatactactgcgccagcagacacgaccccccccccagaagacccgccgccccccccggcccccccggccccgccgccccccccgcccccagccccgccgcccccgtgagaaccagaagaagaagaaagctgtacgagctgcacgccgccggcgccccccccccccccccccccggccacgcccccgcccccgagagccccagacccggcagcggcagcggcagcggccccggcctggcccccgccagaagccccggccccgccgccgacggccccatcgacctgagcaagaagcccagaagacccctgcccggcgcccccgcccccgccctggccgactaccacgagtgcaccgcctgcagagtgagcttccacagcctggaggcctacctggcccacaagaagtacagctgccccgccgcccccccccccggcgccctgggcctgcccgccgccgcctgcccctactgcccccccaacggccccgtgagaggcgacctgctggagcacttcagactggcccacggcctgctgctgggcgcccccctggccggccccggcgtggaggccagaacccccgccgacagaggccccagccccgcccccgcccccgccgccagcccccagcccggcagcagaggccccagagacggcctgggccccgagccccaggagcccccccccggccccccccccagccccgccgccgcccccgaggccgtgccccccccccccgccccccccagctacagcgacaagggcgtgcagacccccagcaagggcacccccgcccccctgcccaacggcaaccacagatactgcagactgtgcaacatcaagttcagcagcctgagcaccttcatcgcccacaagaagtactactgcagcagccacgccgccgagcacgtgaagtag

SEQ ID NO: 246789 - DNA, 3021 bp, Artificial Sequence
  derived and/or modified sequence
atgtctcggaggaaacagtcaaaccctcgacagataaaacgttccttaggggatatggaggctagagaggaggttcagctggttggggcctcacatatggagcagaaagccacagcgccagaagctccttctcctccttcggctgacgtgaattctccccctccgctgcctcccccaacatcccccggcggccccaaggaactggaggggcaggaaccagagcctcgcccgactgaggaggagcctggatcgccatggtccggtcctgacgagttggaacctgtggttcaggatggacagcggcgcattagagcccggctttcccttgccactgggttgtcgtggggaccgtttcacggatccgtgcagactcgtgcctcttctccgagacaggctgagcctagccctgcactgaccctgctactagttgatgaagcttgctggttgcgcaccctacctcaggccctaactgaagccgaagcaaatacggaaatccacaggaaagacgatgccctgtggtgcagagtgacgaagcccgtgcccgccggagggctactgtcagtgctgctcaccgctgagccgcatagtactcccggccacccagttaaaaaagaaccggcagagcccacctgtccagcccccgcgcatgacttgcagctcttaccgcagcaagctgggatggcgtctattctggcaaccgccgtaattaataaagatgtgttcccatgcaaggactgcggcatttggtataggagtgagcggaatctacaggcacacctcctttattactgtgcctcccggcagggtaccggcagcccggccgccgccgcaaccgatgagaaacccaaagaaacatacccgaacgagagagtgtgtccctttccccagtgtaggaaatcttgtccaagcgcctcatccctggagatacatatgcgatctcattccggcgagcgtccttttgtgtgcctgatatgtctttcagcctttacaacaaaggcaaactgcgagaggcacttaaaagtccacacagatacactgtctggcgtgtgccactcttgtgggttcatctcaaccacaagggacattctttattctcatttggtgaccaaccatatggtgtgccagcccggttcaaagggtgaaatctactctccaggcgctggccatcctgccacgaagctgcctcctgatagcctaggctcctttcagcagcagcacacagcactccagggaccactcgcatcggcagaccttggtctggctcctacccctagtcccgggctggatcggaaagcgctggccgaagccacaaatggagaggctagggcggagccgttggcacagaacggcggatcgtccgaacccccagccgcgcctaggagtataaaagtggaggcagtagaggagccagaagccgctcccatattggggcccggtgagccaggcccccaagctccttcaaggacccccagccctcgcagccccgcgcccgcacgagtgaaggctgaactgagctctcctaccccgggtagctccccagtgccaggtgaactgggtctagccggcgccctgttcctcccacagtacgtgtttggtccagacgcagcacccccagctagtgagatcttagcaaaaatgtccgaactggtgcattcccgacttcaacaaggcgccggagccggggcaggaggcgcacagaccggcttgtttccaggggcgccgaagggggccacttgctttgagtgcgaaattaccttctctaacgtcaataactattatgtccacaagcggctctattgcagtggacgcagggcaccagaggacgcaccagccgctaggcggccgaaggcacctccaggcccagctagggcccctcccggtcagccagccgaacctgatgcccccagatcctctcccggacctggggctagggaagaaggggctggcggagccgcaacacctgaggacggggcggggggacgagggtctgaaggatctcagtcgcccgggagctctgtagatgacgcggaggatgacccctcacgaacactgtgcgaagcctgcaatatccgcttcagtcgccacgagacatatacagtgcacaaaagatattattgcgcctccagacacgatcccccgcccaggcgtcccgccgccccacctggcccccctggtcccgctgctcctcccgcgccatccccggctgccccagtgagaacaagacggaggcggaagctgtatgagcttcacgcagcaggagcccccccccctcctcctcccggccacgctccagcgccggaaagccctcgacccggctccggcagcggttctggacccggactggcaccagcgagatctcctggccccgcggcagacggtcccatcgatctgtccaagaaacccagaaggccattaccgggagctcctgcaccagcactcgctgactatcacgagtgtactgcatgcagagtaagttttcatagcttagaagcttacctagctcataagaaatactcatgtcccgccgcgccgcctccaggggccctggggctgcctgccgcggcctgcccttactgcccacccaacggccccgtgaggggggatctgttggaacactttcgcctcgcacatggactactgctaggtgcacccctggccggccccggagtggaagccagaacccccgccgacagagggccatcccccgccccagctcccgccgcgagtcctcagccgggctccaggggacctagggacggtctgggtcctgaaccgcaggagcccccacctggaccccctccgagcccggcggctgcacctgaggccgtgcccccgccgcccgctccgccttcatactctgacaagggggtgcagactccatcaaagggaactccagctccattaccgaacggtaatcatagatattgccggctctgcaacataaaatttagcagtttgtcaacttttattgcacataaaaagtactactgctcgtcacacgctgcagaacacgtcaaatag

SEQ ID NO: 246790 - DNA, 3021 bp, Artificial Sequence
  derived and/or modified sequence
atgagcaggaggaagcagagcaacccccggcagatcaagaggagcctgggggacatggaggcccgggaggaggtgcagctggtgggcgccagccacatggagcagaaggccacagcccctgaggcccccagccccccatctgcagatgtgaacagccccccacccctgcccccacccaccagccctgggggccccaaggagctggagggccaggagcctgagccccggcccacagaggaggagcccggcagcccctggagcggcccagatgagctggagcctgtggtgcaggacggccagaggcgcatccgggcccggctgagcctggccaccggcctgtcctggggccccttccacggctctgtgcagacccgggccagcagcccccggcaggccgagcccagccctgccctgaccctgctgctggtggatgaggcctgctggctgcggaccctgccccaggccctgacagaagctgaggccaacacagagatccacaggaaggatgatgccctgtggtgccgggtgaccaagcctgtgcctgctgggggcctgctgtctgtgctgctgacagctgagccccacagcaccccaggccaccctgtgaagaaggagcctgctgagcccacctgcccagccccagcccatgacctgcagctgctgccccagcaggccggcatggccagcatcctggccacagctgtgatcaacaaggatgtgttcccctgcaaggactgtggcatctggtacagaagtgagaggaacctgcaggcccacctgctgtactactgtgccagccggcagggcaccggcagccctgctgctgctgccacagatgagaagcccaaggagacctacccaaatgaaagagtgtgccccttcccccagtgcaggaagagctgccccagcgccagcagcctggagatccacatgaggagccacagcggggagcggccctttgtgtgcctgatctgcctgagcgccttcaccaccaaggccaactgtgagcggcacctgaaggtgcacacagacaccctgtctggagtgtgccacagctgtggcttcatcagcaccacccgggacatcctgtacagccacctggtgaccaaccacatggtgtgccagcccggcagcaaaggagagatctacagccctggagctggccacccagccaccaagctgcccccagacagcctgggcagcttccagcagcagcacacagccctgcagggccccctggccagcgctgacctgggcctggcccccacccccagccctggcctggacaggaaggccctggccgaggccaccaacggggaggcccgggcagagcccctggcccagaatggaggcagcagcgagcccccagctgcccccaggagcatcaaggtggaggccgtggaggagcctgaggccgcccccatcctgggccctggagagcccggcccccaggcccccagcaggacccccagccccaggagccctgccccagcccgggtgaaggccgagctgagcagccccaccccaggcagcagccctgtgcctggagagctgggcctggccggggccctcttcctgccccagtatgtgtttggaccagatgctgcccccccagccagcgagatcctggccaagatgtctgagctggtgcacagccggctgcagcagggcgctggggccggggccggcggggcccagacaggcctcttccctggggcccccaagggggccacctgctttgaatgtgagatcaccttcagcaatgtgaacaactactacgtgcacaagaggctgtactgcagcggcagaagagccccagaagatgccccagctgcccggcggcccaaggcccctcctggccctgcccgggcccctcctggccagcctgctgagccagatgcccccaggagcagccctggccctggggcccgggaggagggcgctgggggcgccgccaccccagaagatggagctgggggccggggcagcgagggcagccagagccctggcagctctgtggatgatgctgaagatgaccccagcaggaccctgtgtgaggcctgcaacatccgcttcagcagacatgagacctacacagtgcacaagcgctactactgtgccagcagacatgaccccccaccaagaagacctgctgcccctcctggccccccaggccctgctgcccccccagcccccagccctgctgcccctgtgaggaccaggagaagaaggaagctgtatgagctgcatgctgctggggcccctcctcctcctcctcctggccacgccccagcccctgagagccccaggcctggcagcggcagcggcagcggccctggcctggccccagcccggagccctggccctgctgctgatggccccatcgacctgagcaagaagccccggcggcccctgcccggggccccagccccagccctggccgactaccacgagtgcacagcctgccgggtgtccttccacagcctggaggcctacctggcccacaagaagtacagctgcccagctgcccctcctcctggggccctgggcctgcctgctgctgcctgcccctactgcccccccaacggccctgtgcggggggacctgctggagcacttccggctggcccacggcctgctgctgggcgcccccctggccggccctggggtggaggcccggaccccagctgaccggggccccagccctgccccagccccagctgccagcccccagcccggcagccggggccccagagatggcctgggccctgagccccaggagcccccacctggccccccacccagccctgctgctgcccctgaggccgtgcccccacctccagcccctccttcctacagcgacaagggcgtgcagacccccagcaagggcaccccagcccccctgcccaacggcaaccaccgctactgccgcctgtgcaacatcaagttcagcagcctgagcaccttcatcgcccacaagaagtactactgcagcagccatgctgctgagcacgtgaagtag

SEQ ID NO: 246791 - DNA, 3021 bp, Artificial Sequence
  derived and/or modified sequence
atgagccggcggaagcagagcaacccccggcagatcaagcggagcttaggggatatggaggctcgcgaggaggttcagctggtcggagccagccacatggagcagaaggctaccgcacctgaggcaccaagtcccccttccgccgatgtcaacagcccccctccactcccacctcccaccagcccaggcgggccaaaggagctggaaggtcaggagcctgaacccaggccgaccgaggaggagcctggatctccatggtctgggcctgacgagctggagcctgttgtgcaggacggccagcgcaggattcgcgctcggctgagcttggctacaggtctgtcctgggggcccttccatggctctgtccagacacgggccagcagtcctagacaggccgagccctctcccgctcttacgctgctgttggtggacgaagcctgctggttgaggaccctgccccaagcacttacagaagcggaggcaaatacggaaatccaccggaaggatgatgctctttggtgccgcgtcactaaaccggtgcctgctggggggttactctcagtgcttctgactgctgagcctcactctacgccaggacaccccgtgaaaaaagagccagccgaacctacctgtccagccccagcgcacgacctacaactcctgccccagcaggccggaatggccagcattttagccaccgccgtaattaataaagatgtattcccttgtaaggattgcggtatctggtacagatctgagagaaatcttcaagcgcacctgctgtactattgcgcctcaaggcagggcacaggcagccccgcagccgcagctaccgacgagaaacccaaagaaacttatcccaatgaaagagtctgtccctttccacagtgtcgtaaaagctgcccgtccgcatcctcactcgagattcacatgcgcagccatagcggcgaacgaccctttgtttgtctgatatgtctgtctgcatttaccaccaaagcgaactgtgagagacaccttaaagtacacaccgataccctcagtggagtctgccactcatgtgggttcatcagcacaacccgcgacatactctattcccatttggtgactaatcatatggtatgtcagccaggtagcaaaggcgaaatttactcaccaggagctgggcacccagccaccaagctcccaccggactcacttggaagcttccagcagcaacatactgcattgcaggggcctctcgcaagtgcggatttggggttggcccctacccccagtcctgggctagaccgaaaagcactcgccgaagccaccaacggagaggctcgggcagaaccgctggcgcagaacggtgggtcctcagagccgccggcagccccccgcagcattaaggtcgaagccgtggaggagcctgaggcagcccctattttaggtcctggagaacctggaccacaagccccctctagaactccttcccctcgttctcccgcgccagcgcgtgtgaaggctgagctctctagtcctacccccggcagttctcctgttcccggcgagttgggactggcaggggccttgttcttgcctcagtatgtctttggccccgatgcagctccgcccgctagcgagattctcgctaagatgtccgaactggtacatagtaggctacagcaaggggccggcgccggtgccggtggggcccagacaggactgtttccaggggctccaaagggggctacgtgcttcgagtgcgagattaccttttccaatgtcaataattactacgtccataaacggctgtattgctcaggccgccgggcgccggaagacgcgccagcagcgagacgtccgaaagcgcctccgggcccggccagagcacctcctgggcagcccgcggagccagacgccccacgatccagtccaggccccggcgccagggaggagggggccgggggtgcagccacccctgaggatggggccggcggccgcggaagcgagggatcccagagtcctggctcaagcgtggacgatgcagaagatgacccctctcggacattgtgcgaagcctgtaacattcgcttttcacgacatgagacctacacagttcataaacggtattattgtgcctctcggcatgacccaccgcctcgacgccccgccgctccccccggacccccaggtccagccgcccccccagcccccagccctgcagcccccgtgcgtacacggcgaaggagaaagctttatgagctacacgccgccggtgcacccccgcccccaccccctggccacgctccagctccagaatcgccaaggccgggttctggctctggatcaggcccaggactggcacccgcaagaagccccggaccagcagccgatgggcccattgatctgtcaaagaaacctcgcaggcctctcccaggcgcacccgcccctgccctagcagattaccacgagtgcactgcctgtcgcgtgagctttcacagcctggaggcatacctcgcccacaagaaatacagctgtcccgctgcccccccccctggagcgctggggctccctgccgcggcctgcccttattgccctccaaatggccctgtgaggggggacctcctggagcatttccggctggcacacggcttactgttgggagctccccttgctggccctggtgtggaggcgcgaacacctgcagatcggggtccatctccggcaccagctcccgcggcaagtccccagcccgggtcgagaggaccacgggatggcctaggacccgaaccgcaggagcctccccccggaccacccccctctccagctgccgccccagaagcagtgcccccacctcccgccccgccatcgtattctgataagggtgtgcagacgccgtccaaaggcaccccagccccactcccaaacgggaatcaccgttactgtagactctgtaacattaaattttcctccctgtccacattcattgctcacaagaagtattattgcagctctcacgccgcggaacacgtcaagtag

SEQ ID NO: 246792 - DNA, 3021 bp, Artificial Sequence
  derived and/or modified sequence
atgagccgtcgcaagcagtccaatccgcgtcagattaagagaagcctgggggacatggaggcccgagaagaagtgcagctcgtgggtgccagtcacatggaacagaaggccaccgccccagaggcaccctcaccgccatctgccgatgtgaactcacctcccccactgccccctcctacctcccctggtgggcctaaggagttggaaggacaggagcctgagccaaggccaactgaagaggagccgggaagtccctggtctggaccagatgagctcgaacctgtagtgcaggatggccaaagacggatcagggcccgactgagtttagctaccggactgtcttggggccctttccacgggagcgtccagacaagggcctctagcccaagacaggcagagcctagccccgctctgaccctactccttgtggacgaggcttgctggctccgaactctcccccaggcccttactgaggccgaggctaatacagagatccacagaaaggatgatgccctgtggtgccgggtaaccaaaccagtccccgctgggggactcttgagtgtgttactgacagcggagccgcatagtacaccagggcatccagtaaaaaaggaacccgcagagcccacatgtcccgcaccagcgcatgatcttcaactcctgccgcagcaggccggaatggcttctatcctcgcaacagccgtgattaacaaggacgtgttcccctgtaaagactgcggaatctggtatcggtcagagcgcaacctacaagcccatctgctctactactgtgccagccgacagggaactggatctccagccgctgccgcaaccgacgagaaacctaaggagacatacccaaacgaacgcgtctgcccttttcctcaatgtcgtaagagctgtccctctgcttcatcccttgaaatccacatgcgctcacattccggcgagcgtccattcgtatgtctgatctgcctctccgcctttacgaccaaggcaaattgtgagagacacctgaaggtgcacacagatacgttatcaggcgtgtgccacagctgtggattcattagcacaacgagagatatcctgtactctcaccttgtgacaaatcatatggtttgtcagccgggttccaaaggcgagatttactctccaggagcgggtcaccccgcaacgaagttaccgcctgattcattgggctcctttcaacagcagcacaccgctctccaggggccactcgcatccgcagacttgggactggccccaaccccatcccctggtctcgaccgaaaagcacttgccgaggctacaaacggtgaagcccgagctgaaccgctggctcagaatggcggatcctcagagccgcctgcggctccaagaagcattaaggtggaagcggtggaggaacccgaagcagcccctatcctgggcccaggcgagcccggtccacaggctccatctcgtacaccgtcccctagatcacccgctcctgccagggtgaaggctgaactctccagccccactcctggcagcagcccggtgcctggcgagctgggccttgccggagccctcttcctgccgcagtatgtttttggacccgatgcggctcctcctgcaagcgagattctcgctaaaatgagcgagctcgttcattcgcgcctgcagcagggggcaggcgcaggcgcaggcggagcccagactggcctgtttcctggggcacccaagggcgctacttgcttcgagtgtgagatcaccttttcgaatgtcaataactactacgtccataagagactctactgttccgggaggagagcccctgaagatgcacctgcggctcgtaggccaaaggcccctcccggacccgctcgtgcccctcctgggcaacccgcagaacctgatgccccacggagcagcccaggtcctggtgcaagagaagagggcgctggtggggctgctactcctgaagatggcgcaggaggacggggatctgagggaagccagagcccgggttcatctgtcgatgacgcagaggatgatcctagtcggacactgtgcgaggcgtgtaatattagattctcccgtcacgagacatacacagtacacaaaaggtattactgtgcgtcaagacacgatcctcccccaagaagacccgcagctcccccaggacccccagggccagcagcacctcctgcaccgtctcccgctgcgccagtgcgaactcgtaggagaaggaaactctacgaactgcatgccgctggggctcctcctcctccccctcctgggcatgcccctgcccctgaatcccctagaccaggttccggttcgggatccggccctggcctagcacccgcaagatccccgggaccagctgctgatgggccaattgatctgtctaaaaagcctcggcgtcccctgcctggggctcctgctccggctctcgccgactaccatgaatgtactgcctgccgtgtgtccttccattcactggaggcataccttgcacacaaaaaatatagctgcccagcagccccacctccaggcgctctgggcctacctgccgctgcgtgcccttattgccctccaaacggcccagtgagaggcgatctgcttgagcattttcgcctggctcatgggctgctgctgggagcaccattagccggaccaggggtggaggcccgtacaccagccgatcgtggcccatcacctgccccagctcctgccgcaagtcctcagcccggatcacgcggtccacgggacgggttgggaccggagccacaggagcctccccctggacccccaccaagtcccgcagctgcaccagaagcggtgcctccgccacccgctccaccaagctatagcgataagggcgttcaaacacccagcaagggtacccctgccccactgcccaacggaaatcataggtattgcaggctctgtaatattaagtttagcagtctgtctactttcattgcccataagaaatattactgctcaagtcatgctgccgagcatgtcaaatag

SEQ ID NO: 246793 - DNA, 3345 bp, Artificial Sequence
  derived and/or modified sequence
cgccgctcgccgcccgcgggttccattgagaaaagccgagcggccgcggcggcggcggcgagtgcgcgggagcggaggagccggcacccgcccgtcgggcagtccgcgcgcccgcaacgcaggaccgtggcctctcgggcctccgcggcagctccagcggctccggggctgggcgcgcgggctgggggcgcgggccggggcggccgcggagaccgggggccgggggcatgagcggccccgcggccccgccgcgcccccgccgcccgccgccgcccgcccggggctagaggcggccgccgggagggcgcgcggcgccggagacatgtccaggcggaaacagagcaacccccggcagatcaagcgttccctcggagacatggaggccagagaggaggtgcagttggtgggtgccagccacatggagcaaaaggccacggcacctgaagccccgagccctcccagcgcagatgttaactcacccccaccgctgccgccccccacatccccaggaggccccaaggagctggaaggacaggaaccagaacccaggcccacggaggaagagccgggcagtccctggagcgggccagacgagctggagccggtggtgcaggatgggcagaggcgcatacgggcccgactcagcctcgccacgggcctgtcctggggcccgttccatgggagtgtccagaccagagcctcatcccccaggcaggcggagccgagcccagccctgaccctgctgctggtggacgaggcctgctggctgaggacgctgccccaggccctgactgaggccgaggccaacacagagatccacaggaaggatgacgcactctggtgcagggtcaccaagccggtgcctgcggggggactcctgagcgtgctcctcacggccgagccccacagcacccccggccaccctgtgaagaaggagccagcagagcccacgtgcccggcccctgcacacgacctccagctcctgccccagcaggccgggatggcctccatccttgccaccgcagtgatcaacaaagacgtcttcccctgcaaggactgtggcatctggtaccgcagcgagcgcaacctgcaggcgcacctgctctactactgcgccagccgccagggcaccggctccccggccgcagccgccacagacgagaagcccaaagagacctaccccaacgagcgcgtctgccccttcccccagtgccgcaagagctgccccagcgccagctccctggagatccacatgcgcagccacagcggagagcggcccttcgtgtgcctgatctgcctgtcggccttcaccaccaaggccaactgcgagcggcacctcaaggtgcacacggacacgctgagcggtgtctgccacagctgtggcttcatctccaccacaagggacatcctctacagccacttggtcaccaaccacatggtctgccagcctggctccaagggtgagatctactcgccaggggccggacacccagcaaccaagctgcccccagacagtctgggcagcttccagcagcagcacacggccctgcaaggccccctggcctccgcggacctgggcctggcgcccaccccatcgccaggactggacagaaaggccctggccgaggccaccaacggagaggccagagcggagcctctggcccagaatggaggcagcagcgagcccccggcggcccccaggagcatcaaggtggaggcggtggaggagccggaggcggcccccatcctgggccccggagagcctgggccccaggccccgtcgcggacgccgtcgccgcgcagccccgccccggccagggtcaaggccgagctgtccagccccacgccgggctccagcccggtgcccggcgagctgggcctggccggggccctgttccttccgcagtacgtgttcgggcccgacgcggcgccccccgcctcggagatcctggccaagatgtccgagctggtgcacagccggctgcagcagggcgcgggcgcgggcgccggcggcgcgcagaccgggctcttccccggggcccccaagggcgctacgtgcttcgagtgcgagatcaccttcagcaacgtcaacaactactacgtgcacaagcgcctctactgttcaggccgccgtgcgcccgaggacgcgcctgccgcgcgcaggcccaaggcgccccccggcccggcccgcgcgccccccggccagcccgccgaacccgacgcgccgcgctcgtccccgggccccggagcgcgcgaggagggggctgggggcgcggccacgcccgaggacggcgcgggcggccggggcagcgagggcagccagagcccgggtagctccgtggacgacgcggaggacgaccccagccgcacgctgtgcgaggcctgcaacatccgcttcagccgccacgagacctacaccgtgcacaagcggtactactgcgcctcgcgccacgacccgccgccgcgccgaccggccgcgcccccgggaccccctgggccggccgcgcccccggccccctctcccgccgcgcctgtgcgcacgcgcagacgccgcaagctctacgagctgcacgcggccggcgccccgccccccccgccgcccggccacgcccccgcgcccgagtcgccgcggcccggaagcggaagcggaagcggccccggcctcgcccctgcgcgctcgcccggccccgcggccgacggccccatcgacctgagcaagaagccgcggcgcccgctccccggagccccggcaccggcgctggccgactaccacgagtgcacggcctgccgcgtgagcttccacagcctcgaggcctacctggcgcacaagaagtactcgtgccccgctgcgccaccgcccggcgcgctcggcctgcccgccgccgcctgcccctactgccccccgaacggcccggtgcgcggggacctgctggagcatttccgcctggcgcacggcctgctgctcggcgcgcccctggccggcccgggggtcgaggcccggacgccggccgaccgcggcccctcgcccgctcccgcccccgccgcctccccgcagcccgggtcccgtggcccccgggacggcctcggcccggagccccaggagccgccgcccggcccgcccccgtccccggccgccgcgcccgaggccgtgccgcccccgccggcgcccccctcctactcggacaagggcgtccagactcccagcaagggcacgccggcgccgctgcccaacggcaaccaccggtactgccgtctttgcaacatcaagttcagcagcctgtccaccttcatcgcccacaagaagtattactgctcctcgcacgccgccgagcacgtgaagtgagc

SEQ ID NO: 246794 - protein, 489 aa, Artificial Sequence
  derived and/or modified sequence
MYSAMSPFSKATLDTSKLYVSSSFTNKIPDEGDTTPEKPEDPSALSKQSSEVSMREESDIDQNQSDDGDTETSPTKSPTTPKSVKNKNSSEFPLFSYNNGVVMTSCRELDNNRSALSAASAFAIATAGANEGTPNKEKYRRMSLASAGFPPDQRNGDKEFVIRRAATNRVLNVLRHWVSKHSQDFETNDELKCKVIGFLEEVMHDPELLTQERKAAANIIRTLTQEDPGDNQITLEEITQMAEGVKAEPFENHSALEIAEQLTLLDHLVFKKIPYEEFFGQGWMKLEKNERTPYIMKTTKHFNDISNLIASEIIRNEDINARVSAIEKWVAVADICRCLHNYNAVLEITSSMNRSAIFRLKKTWLKVSKQTKALIDKLQKLVSSEGRFKNLREALKNCDPPCVPYLGMYLTDLAFIEEGTPNYTEDGLVNFSKMRMISHIIREIRQFQQTAYKIEHQAKVTQYLLDQSFVMDEESLYESSLRIEPKLPT

SEQ ID NO: 246795 - DNA, 1470 bp, Artificial Sequence
  derived and/or modified sequence
atgtacagcgccatgagccccttcagcaaggccaccctggacaccagcaagctgtacgtgagcagcagcttcaccaacaagatccccgacgagggcgacaccacccccgagaagcccgaggaccccagcgccctgagcaagcagagcagcgaggtgagcatgagagaggagagcgacatcgaccagaaccagagcgacgacggcgacaccgagaccagccccaccaagagccccaccacccccaagagcgtgaagaacaagaacagcagcgagttccccctgttcagctacaacaacggcgtggtgatgaccagctgcagagagctggacaacaacagaagcgccctgagcgccgccagcgccttcgccatcgccaccgccggcgccaacgagggcacccccaacaaggagaagtacagaagaatgagcctggccagcgccggcttcccccccgaccagagaaacggcgacaaggagttcgtgatcagaagagccgccaccaacagagtgctgaacgtgctgagacactgggtgagcaagcacagccaggacttcgagaccaacgacgagctgaagtgcaaggtgatcggcttcctggaggaggtgatgcacgaccccgagctgctgacccaggagagaaaggccgccgccaacatcatcagaaccctgacccaggaggaccccggcgacaaccagatcaccctggaggagatcacccagatggccgagggcgtgaaggccgagcccttcgagaaccacagcgccctggagatcgccgagcagctgaccctgctggaccacctggtgttcaagaagatcccctacgaggagttcttcggccagggctggatgaagctggagaagaacgagagaaccccctacatcatgaagaccaccaagcacttcaacgacatcagcaacctgatcgccagcgagatcatcagaaacgaggacatcaacgccagagtgagcgccatcgagaagtgggtggccgtggccgacatctgcagatgcctgcacaactacaacgccgtgctggagatcaccagcagcatgaacagaagcgccatcttcagactgaagaagacctggctgaaggtgagcaagcagaccaaggccctgatcgacaagctgcagaagctggtgagcagcgagggcagattcaagaacctgagagaggccctgaagaactgcgaccccccctgcgtgccctacctgggcatgtacctgaccgacctggccttcatcgaggagggcacccccaactacaccgaggacggcctggtgaacttcagcaagatgagaatgatcagccacatcatcagagagatcagacagttccagcagaccgcctacaagatcgagcaccaggccaaggtgacccagtacctgctggaccagagcttcgtgatggacgaggagagcctgtacgagagcagcctgagaatcgagcccaagctgcccacctag

SEQ ID NO: 246796 - DNA, 1470 bp, Artificial Sequence
  derived and/or modified sequence
atgtattcagccatgtctcctttttctaaggccaccttagacacctccaagctatatgtgtcttcctctttcactaataagatccccgatgagggggacacaacacccgaaaaacccgaggatccttcagccctttctaagcagagcagcgaggtgtcgatgagggaagagtctgatatcgatcagaatcagagcgatgacggggacacggaaacctccccaacaaagtctcccaccacgcctaaatccgtgaagaataagaattctagcgaatttccgctgttcagttataataatggggtcgtcatgacctcatgccgtgaactggataacaacagatccgccctttcagccgcgtcagctttcgccattgctactgctggagctaacgaaggcacaccaaataaagagaagtatagacgaatgtctttagcttccgccggattccccccagatcagaggaacggtgataaggaatttgtgatacgcagggcagccacaaatcgtgtcctgaacgttctccggcactgggttagtaagcactcccaggacttcgagaccaacgacgaactcaaatgcaaagtgatagggttcttggaagaagtgatgcatgaccctgagctcctgacccaagagaggaaagcggccgccaatattatcagaaccctgacccaagaggaccccggcgacaatcagattactttagaagagatcacacaaatggccgagggggtcaaggcagaaccatttgaaaatcacagcgcattagaaattgcagaacagctcacactcctggatcatcttgtattcaaaaagattccctatgaagagttttttgggcagggttggatgaaactggagaagaacgagcgcactccctatatcatgaagaccaccaaacacttcaatgacattagtaacttgattgcctccgagatcataagaaacgaagacattaatgctcgggttagcgcgattgagaagtgggtggccgtggcagatatttgcaggtgcctgcacaactacaacgccgtgctggagatcacctcctccatgaacagatcggctatcttcagattgaagaagacttggctgaaggtgtctaagcagacaaaggcattaatcgacaagttgcagaagcttgtgtcttcagagggcagattcaaaaaccttcgcgaggccctaaaaaactgtgatccaccttgcgtgccttaccttggaatgtatctgacggaccttgccttcatcgaagagggaacacccaactacaccgaagacgggcttgtgaacttttccaagatgcgtatgattagccacatcatcagggagatccggcagttccagcagactgcttacaagattgagcatcaagccaaagttacccagtatcttcttgaccaatcatttgtgatggatgaagagtccctttatgagagcagcctgcgcatcgagccgaagctgccaacctag

SEQ ID NO: 246797 - DNA, 1470 bp, Artificial Sequence
  derived and/or modified sequence
atgtacagcgccatgagccccttcagcaaggccaccctggacaccagcaagctgtatgtgagcagcagcttcaccaacaagatcccagatgaaggagacaccaccccagagaagccagaggaccccagcgccctgagcaagcagagcagcgaggtgtccatgagggaggagagtgacatcgaccagaaccagagtgatgatggagacacagagaccagccccaccaagagccccaccacccccaagtctgtgaagaacaagaacagcagcgagttccccctcttctcctacaacaatggagtggtgatgaccagctgccgggagctggacaacaacagaagtgccctgtctgctgccagcgcctttgccatcgccacagctggggccaatgaaggcacccccaacaaggagaagtacagaaggatgagcctggccagcgctggcttccccccagaccagagaaatggagacaaggagtttgtgatcagaagagctgccaccaacagagtgctgaatgtgctgcggcactgggtgtccaagcacagccaggactttgagaccaatgatgagctgaagtgcaaggtgattggcttcctggaggaggtgatgcatgaccctgagctgctgacccaggagaggaaggccgccgccaacatcatccgcaccctgacccaggaggaccccggggacaaccagatcaccctggaggagatcacccagatggccgagggcgtgaaggccgagccctttgagaaccacagcgccctggagattgctgagcagctgaccctgctggaccacctggtgttcaagaagatcccctatgaggagttcttcggccagggctggatgaagctggagaagaatgaaagaacaccctacatcatgaagaccaccaagcacttcaatgacatcagcaacctgattgccagcgagatcatcagaaatgaagacatcaatgcccgggtgtctgccatcgagaagtgggtggccgtggccgacatctgccgctgcctgcacaactacaatgctgtgctggagatcaccagctccatgaacagaagtgccatcttccggctgaagaagacctggctgaaggtgtccaagcagaccaaggccctgattgacaagctgcagaagctggtgagcagcgagggccgcttcaagaacctgcgggaggccctgaagaactgtgaccccccctgtgtgccctacctgggcatgtacctgacagacctggccttcatcgaggagggcacccccaactacacagaagatggcctggtgaacttcagcaagatgaggatgatcagccacatcatccgggagatccggcagttccagcagacagcctacaagattgagcaccaggccaaggtgacccagtacctgctggaccagagctttgtgatggatgaggagagcctgtatgagagcagcctgagaattgagcccaagctgcccacctag

SEQ ID NO: 246798 - DNA, 1470 bp, Artificial Sequence
  derived and/or modified sequence
atgtacagcgccatgagccccttcagcaaggccaccctggacacctccaaattgtacgtatctagttcgttcaccaacaaaattccagatgaaggcgacacaacgcctgagaagccggaagaccccagcgcattatccaaacagtccagcgaggtgagcatgagagaagagtccgacatagaccagaaccagtctgacgacggggacaccgaaacatcccccacgaagagtccaaccaccccgaaatccgtgaaaaataagaatagcagcgagtttccactctttagctataacaacggggtcgtgatgacgagttgtcgagaattagataataaccgctctgctctgagcgcagccagcgctttcgccatcgctactgcgggagccaacgaggggacacccaacaaggagaagtataggcgcatgtcactagcctcagctggcttcccacccgatcagagaaacggcgataaggagttcgtgatccgcagagccgctaccaacagagtcctgaatgttctgcgccactgggtgtcgaagcactcccaagactttgaaaccaatgacgagctgaagtgtaaggtgataggattcttggaggaagtaatgcacgatcctgagctgttaacccaggagcgaaaagccgccgcaaacattattaggactctgacacaggaggatcctggagataatcagatcacattggaggaaattactcagatggccgaaggagttaaggccgaaccattcgagaatcacagtgccctcgagattgcggaacagctgacactgctggatcatctggtgttcaagaaaattccctacgaagaattcttcggacaggggtggatgaaattggagaagaatgaaaggactccctacattatgaaaaccaccaaacactttaatgacatctctaatctgatcgcatctgagatcattagaaacgaggacataaatgcacgggtgtccgccatcgagaagtgggtggccgtggctgacatctgtcgctgtttgcacaattataacgctgtgcttgagatcactagctctatgaatcggagcgccatcttccgcctgaaaaagacttggcttaaggtttcgaagcaaacgaaggccctgattgataagctgcagaagctggtgagttcagaagggaggtttaaaaatctccgtgaagctctcaaaaattgcgatccaccttgtgtgccttacctgggtatgtatttgacggacctggcgttcattgaggagggtacaccaaactacactgaagacggactagtcaacttttcgaagatgagaatgatcagtcacatcattagggaaattcgtcagttccaacagactgcttacaaaattgaacaccaggccaaggtcacacagtatctcctagatcagagtttcgtgatggatgaagaatctctgtacgagtcctccctgcgcatcgagcccaaactacccacatag

SEQ ID NO: 246799 - DNA, 1470 bp, Artificial Sequence
  derived and/or modified sequence
atgtacagcgctatgtcccccttctccaaagctaccctggacacgtccaaactctacgtcagctctagcttcaccaacaaaatccctgacgaaggcgatacaacacccgagaaaccggaggatccatcggcgttgtcaaaacagagttctgaggtttccatgagagaggaaagcgatatcgaccaaaaccaatctgacgacggcgacactgagacctcccccaccaagtctcctactacccctaaatccgtgaagaataaaaatagttcagagttccccctgttttcatacaacaacggggtggtgatgacctcgtgtcgggagttagataataaccgtagcgccctgtcggcagcctctgcattcgccattgccactgccggtgcgaatgaggggaccccgaataaagagaagtatagacggatgtctctggcctccgctgggtttccacctgaccagcgcaatggggataaggagttcgtaatcagaagggccgcaacaaatagagtcctgaatgtccttcggcattgggtgagtaagcatagccaagactttgagaccaatgatgaactgaaatgcaaggttattggatttctggaggaggtgatgcatgaccccgagcttctgacccaagagcgcaaagccgcagctaatattatccggactctcactcaagaggatcctggagacaatcagatcaccctcgaggagattactcagatggcagagggggtgaaggctgagcctttcgagaatcacagtgccctggagatcgcagagcaactgaccttgcttgaccacctggtattcaaaaagatcccttatgaggaattcttcggccagggctggatgaaactcgaaaagaatgagaggacaccgtacataatgaaaactaccaaacactttaatgacataagcaacttaatcgcatccgaaataattaggaatgaggacataaacgcccgtgtgagcgctatcgaaaagtgggttgccgttgcagacatctgccgctgtctgcacaattacaatgcagtcctggagatcacgtcgtcgatgaataggagtgctatatttcgcctgaagaaaacgtggctcaaggtgtcaaaacagaccaaagctctaattgataagcttcagaagttagtttcctcagagggacgtttcaagaacttgagagaagctcttaagaactgtgatcccccatgtgtcccctacctggggatgtacctcacggacctcgcattcatcgaagagggcactcccaactatacagaggatggcctggttaacttcagcaagatgcggatgatctctcacattatcagagaaatccgccagttccaacagactgcatacaagatcgagcatcaggctaaagtgacacagtacctgctggaccaatcttttgtaatggacgaagagtctctgtatgaaagtagcttgcggattgaaccgaagcttcccacgtag

SEQ ID NO: 246800 - protein, 946 aa, Artificial Sequence
  derived and/or modified sequence
MVPWVRTMGQKLKQRLRLDVGREICRQYPLFCFLLLCLSAASLLLNRYIHILMIFWSFVAGVVTFYCSLGPDSLLPNIFFTIKYKPKQLGLQELFPQGHSCAVCGKVKCKRHRPSLLLENYQPWLDLKISSKVDASLSEVLELVLENFVYPWYRDVTDDESFVDELRITLRFFASVLIRRIHKVDIPSIITKKLLKAAMKHIEVIVKARQKVKNTEFLQQAALEEYGPELHVALRSRRDELHYLRKLTELLFPYILPPKATDCRSLTLLIREILSGSVFLPSLDFLADPDTVNHLLIIFIDDSPPEKATEPASPLVPFLQKFAEPRNKKPSVLKLELKQIREQQDLLFRFMNFLKQEGAVHVLQFCLTVEEFNDRILRPELSNDEMLSLHEELQKIYKTYCLDESIDKIRFDPFIVEEIQRIAEGPYIDVVKLQTMRCLFEAYEHVLSLLENVFTPMFCHSDEYFRQLLRGAESPTRNSKLNRGSLSLDDFRNTQKRGESFGISRIGSKIKGVFKSTTMEGAMLPNYGVAEGEDDFIEEGIVVMEDDSPVEAVSTPNTPRNLAAWKISIPYVDFFEDPSSERKEKKERIPVFCIDVERNDRRAVGHEPEHWSVYRRYLEFYVLESKLTEFHGAFPDAQLPSKRIIGPKNYEFLKSKREEFQEYLQKLLQHPELSNSQLLADFLSPNGGETQFLDKILPDVNLGKIIKSVPGKLMKEKGQHLEPFIMNFINSCESPKPKPSRPELTILSPTSENNKKLFNDLFKNNANRAENTERKQNQNYFMEVMTVEGVYDYLMYVGRVVFQVPDWLHHLLMGTRILFKNTLEMYTDYYLQCKLEQLFQEHRLVSLITLLRDAIFCENTEPRSLQDKQKGAKQTFEEMMNYIPDLLVKCIGEETKYESIRLLFDGLQQPVLNKQLTYVLLDIVIQELFPELNKVQKEVTSVTSWM

SEQ ID NO: 246801 - DNA, 2841 bp, Artificial Sequence
  derived and/or modified sequence
atggtgccctgggtgagaaccatgggccagaagctgaagcagagactgagactggacgtgggcagagagatctgcagacagtaccccctgttctgcttcctgctgctgtgcctgagcgccgccagcctgctgctgaacagatacatccacatcctgatgatcttctggagcttcgtggccggcgtggtgaccttctactgcagcctgggccccgacagcctgctgcccaacatcttcttcaccatcaagtacaagcccaagcagctgggcctgcaggagctgttcccccagggccacagctgcgccgtgtgcggcaaggtgaagtgcaagagacacagacccagcctgctgctggagaactaccagccctggctggacctgaagatcagcagcaaggtggacgccagcctgagcgaggtgctggagctggtgctggagaacttcgtgtacccctggtacagagacgtgaccgacgacgagagcttcgtggacgagctgagaatcaccctgagattcttcgccagcgtgctgatcagaagaatccacaaggtggacatccccagcatcatcaccaagaagctgctgaaggccgccatgaagcacatcgaggtgatcgtgaaggccagacagaaggtgaagaacaccgagttcctgcagcaggccgccctggaggagtacggccccgagctgcacgtggccctgagaagcagaagagacgagctgcactacctgagaaagctgaccgagctgctgttcccctacatcctgccccccaaggccaccgactgcagaagcctgaccctgctgatcagagagatcctgagcggcagcgtgttcctgcccagcctggacttcctggccgaccccgacaccgtgaaccacctgctgatcatcttcatcgacgacagcccccccgagaaggccaccgagcccgccagccccctggtgcccttcctgcagaagttcgccgagcccagaaacaagaagcccagcgtgctgaagctggagctgaagcagatcagagagcagcaggacctgctgttcagattcatgaacttcctgaagcaggagggcgccgtgcacgtgctgcagttctgcctgaccgtggaggagttcaacgacagaatcctgagacccgagctgagcaacgacgagatgctgagcctgcacgaggagctgcagaagatctacaagacctactgcctggacgagagcatcgacaagatcagattcgaccccttcatcgtggaggagatccagagaatcgccgagggcccctacatcgacgtggtgaagctgcagaccatgagatgcctgttcgaggcctacgagcacgtgctgagcctgctggagaacgtgttcacccccatgttctgccacagcgacgagtacttcagacagctgctgagaggcgccgagagccccaccagaaacagcaagctgaacagaggcagcctgagcctggacgacttcagaaacacccagaagagaggcgagagcttcggcatcagcagaatcggcagcaagatcaagggcgtgttcaagagcaccaccatggagggcgccatgctgcccaactacggcgtggccgagggcgaggacgacttcatcgaggagggcatcgtggtgatggaggacgacagccccgtggaggccgtgagcacccccaacacccccagaaacctggccgcctggaagatcagcatcccctacgtggacttcttcgaggaccccagcagcgagagaaaggagaagaaggagagaatccccgtgttctgcatcgacgtggagagaaacgacagaagagccgtgggccacgagcccgagcactggagcgtgtacagaagatacctggagttctacgtgctggagagcaagctgaccgagttccacggcgccttccccgacgcccagctgcccagcaagagaatcatcggccccaagaactacgagttcctgaagagcaagagagaggagttccaggagtacctgcagaagctgctgcagcaccccgagctgagcaacagccagctgctggccgacttcctgagccccaacggcggcgagacccagttcctggacaagatcctgcccgacgtgaacctgggcaagatcatcaagagcgtgcccggcaagctgatgaaggagaagggccagcacctggagcccttcatcatgaacttcatcaacagctgcgagagccccaagcccaagcccagcagacccgagctgaccatcctgagccccaccagcgagaacaacaagaagctgttcaacgacctgttcaagaacaacgccaacagagccgagaacaccgagagaaagcagaaccagaactacttcatggaggtgatgaccgtggagggcgtgtacgactacctgatgtacgtgggcagagtggtgttccaggtgcccgactggctgcaccacctgctgatgggcaccagaatcctgttcaagaacaccctggagatgtacaccgactactacctgcagtgcaagctggagcagctgttccaggagcacagactggtgagcctgatcaccctgctgagagacgccatcttctgcgagaacaccgagcccagaagcctgcaggacaagcagaagggcgccaagcagaccttcgaggagatgatgaactacatccccgacctgctggtgaagtgcatcggcgaggagaccaagtacgagagcatcagactgctgttcgacggcctgcagcagcccgtgctgaacaagcagctgacctacgtgctgctggacatcgtgatccaggagctgttccccgagctgaacaaggtgcagaaggaggtgaccagcgtgaccagctggatgtag

SEQ ID NO: 246802 - DNA, 2685 bp, Artificial Sequence
  derived and/or modified sequence
atgatcttctggagcttcgtggccggcgtggtgaccttctactgcagcctgggccccgacagcctgctgcccaacatcttcttcaccatcaagtacaagcccaagcagctgggcctgcaggagctgttcccccagggccacagctgcgccgtgtgcggcaaggtgaagtgcaagagacacagacccagcctgctgctggagaactaccagccctggctggacctgaagatcagcagcaaggtggacgccagcctgagcgaggtgctggagctggtgctggagaacttcgtgtacccctggtacagagacgtgaccgacgacgagagcttcgtggacgagctgagaatcaccctgagattcttcgccagcgtgctgatcagaagaatccacaaggtggacatccccagcatcatcaccaagaagctgctgaaggccgccatgaagcacatcgaggtgatcgtgaaggccagacagaaggtgaagaacaccgagttcctgcagcaggccgccctggaggagtacggccccgagctgcacgtggccctgagaagcagaagagacgagctgcactacctgagaaagctgaccgagctgctgttcccctacatcctgccccccaaggccaccgactgcagaagcctgaccctgctgatcagagagatcctgagcggcagcgtgttcctgcccagcctggacttcctggccgaccccgacaccgtgaaccacctgctgatcatcttcatcgacgacagcccccccgagaaggccaccgagcccgccagccccctggtgcccttcctgcagaagttcgccgagcccagaaacaagaagcccagcgtgctgaagctggagctgaagcagatcagagagcagcaggacctgctgttcagattcatgaacttcctgaagcaggagggcgccgtgcacgtgctgcagttctgcctgaccgtggaggagttcaacgacagaatcctgagacccgagctgagcaacgacgagatgctgagcctgcacgaggagctgcagaagatctacaagacctactgcctggacgagagcatcgacaagatcagattcgaccccttcatcgtggaggagatccagagaatcgccgagggcccctacatcgacgtggtgaagctgcagaccatgagatgcctgttcgaggcctacgagcacgtgctgagcctgctggagaacgtgttcacccccatgttctgccacagcgacgagtacttcagacagctgctgagaggcgccgagagccccaccagaaacagcaagctgaacagaggcagcctgagcctggacgacttcagaaacacccagaagagaggcgagagcttcggcatcagcagaatcggcagcaagatcaagggcgtgttcaagagcaccaccatggagggcgccatgctgcccaactacggcgtggccgagggcgaggacgacttcatcgaggagggcatcgtggtgatggaggacgacagccccgtggaggccgtgagcacccccaacacccccagaaacctggccgcctggaagatcagcatcccctacgtggacttcttcgaggaccccagcagcgagagaaaggagaagaaggagagaatccccgtgttctgcatcgacgtggagagaaacgacagaagagccgtgggccacgagcccgagcactggagcgtgtacagaagatacctggagttctacgtgctggagagcaagctgaccgagttccacggcgccttccccgacgcccagctgcccagcaagagaatcatcggccccaagaactacgagttcctgaagagcaagagagaggagttccaggagtacctgcagaagctgctgcagcaccccgagctgagcaacagccagctgctggccgacttcctgagccccaacggcggcgagacccagttcctggacaagatcctgcccgacgtgaacctgggcaagatcatcaagagcgtgcccggcaagctgatgaaggagaagggccagcacctggagcccttcatcatgaacttcatcaacagctgcgagagccccaagcccaagcccagcagacccgagctgaccatcctgagccccaccagcgagaacaacaagaagctgttcaacgacctgttcaagaacaacgccaacagagccgagaacaccgagagaaagcagaaccagaactacttcatggaggtgatgaccgtggagggcgtgtacgactacctgatgtacgtgggcagagtggtgttccaggtgcccgactggctgcaccacctgctgatgggcaccagaatcctgttcaagaacaccctggagatgtacaccgactactacctgcagtgcaagctggagcagctgttccaggagcacagactggtgagcctgatcaccctgctgagagacgccatcttctgcgagaacaccgagcccagaagcctgcaggacaagcagaagggcgccaagcagaccttcgaggagatgatgaactacatccccgacctgctggtgaagtgcatcggcgaggagaccaagtacgagagcatcagactgctgttcgacggcctgcagcagcccgtgctgaacaagcagctgacctacgtgctgctggacatcgtgatccaggagctgttccccgagctgaacaaggtgcagaaggaggtgaccagcgtgaccagctggatgtag

SEQ ID NO: 246803 - DNA, 2841 bp, Artificial Sequence
  derived and/or modified sequence
atggtcccatgggtccgtacaatgggacaaaagctgaaacagaggctgcgccttgacgtaggaagagaaatatgccggcaatatcctctgttttgcttccttctcctctgtttgtccgctgccagcttgctactaaatcggtatatacacattttgatgatattttggtccttcgttgccggtgtcgttaccttctactgcagtctgggccctgactctctgctcccaaacattttcttcacaattaaatacaagcccaagcagctgggactgcaagagctatttccgcagggtcacagttgtgccgtgtgtggcaaggtgaaatgtaaacgacataggccaagcctgctgctcgagaattaccagccatggctggatctgaaaatttcctctaaggtggacgcttcactgagtgaggtccttgagttggtgcttgagaactttgtgtacccctggtaccgggatgttacagatgacgagtctttcgttgacgagcttcgcataacgctgcggttcttcgcgagcgtactgattcgcagaatacacaaggtagacatcccttccatcatcactaagaaactgctgaaagctgcaatgaaacatatcgaagttatcgtaaaggccagacaaaaggtgaagaatactgaatttcttcagcaggccgcacttgaagagtacggacctgaactgcatgtggcactgagaagtcggcgggatgaactgcattatttaaggaagttgaccgaactgctcttcccctacattttgccccccaaagctacggattgcaggtccctcacactccttatcagagagatcctgagcgggagtgtgttcctcccctcactcgatttccttgccgacccagatacagttaatcacctactgattattttcattgacgactctccacctgaaaaggccaccgagcctgcctcccccctggttcctttcctgcagaagtttgctgagccacgcaataagaagccctccgtgctgaagctggagcttaagcagatacgggagcagcaagacctcctgtttagatttatgaattttcttaaacaagaaggcgccgttcatgtgctgcaattttgccttactgtggaggagtttaatgacaggatcttgcgccctgagctgagtaacgacgagatgctgtccttgcacgaggagcttcaaaagatttataaaacgtactgtttagacgaatcaatcgacaagattcggtttgacccatttatcgtggaagagatacagagaatcgcagaggggccttacattgacgttgtcaagctccagacaatgagatgtcttttcgaagcttatgagcacgtgctgtcattacttgaaaacgtgtttactcctatgttctgccacagcgatgaatatttcagacagctactaaggggggctgaatccccaaccagaaacagcaaactgaacagaggctccctgagtttagatgattttagaaatacccagaaacgtggcgagtcctttggtataagccggatcggctctaaaattaagggggtcttcaagagtaccacaatggagggggcaatgctgcctaattacggagtcgcagagggggaggatgacttcattgaagagggcatagttgtcatggaggatgattcacccgtcgaagctgtgtccactcccaacacccctaggaatttggctgcttggaagatctccatcccatatgtcgacttctttgaagacccttccagcgaacgaaaagagaagaaagaaaggatcccagttttctgcatcgatgttgaaaggaatgaccgaagagcggttggccacgagcctgagcactggagcgtctatcggcgttatctcgagttctatgtgctcgagagcaagctgacggaattccatggtgcatttcccgatgcccagctgccttctaagcggatcatcgggcccaagaactacgagtttctgaagtcaaaaagggaggaattccaagagtatctgcaaaagctgcttcagcatcccgagctaagcaattcccagttactggctgatttcttgagcccaaacggcggggagacccaattcctagataagattcttccagacgtcaatctagggaaaattatcaagtcggtgccaggaaaattgatgaaggagaaaggtcaacatctggaaccgttcataatgaatttcataaactcatgcgaatcccctaagcctaaaccttcaaggcctgaactgacaatactgtccccaacttccgagaataataagaagctgtttaacgacctgttcaagaataatgcaaatagagcggagaataccgagagaaagcagaaccaaaattacttcatggaggtaatgacagttgagggtgtctacgactacctgatgtatgtggggcgggtggtgttccaggtgcccgactggctgcatcacctgctaatggggacccggatactgttcaaaaacacactcgaaatgtacactgattattacctgcagtgtaagctggaacagctgttccaagagcatcggctggtgagccttattacactcctgcgcgacgcaattttttgtgagaacaccgaacccagaagccttcaggacaagcagaagggcgcgaagcagacatttgaggagatgatgaactacatccccgacctgctggtcaagtgcataggcgaagaaaccaagtacgagtcaattcggttgctgttcgacggccttcaacaacccgtgctgaacaaacagctgacttatgtgttactggatatcgtgatccaggaactgttcccagaactgaataaggtgcagaaggaagtcaccagtgtgacttcatggatgtag

SEQ ID NO: 246804 - DNA, 2685 bp, Artificial Sequence
  derived and/or modified sequence
atgatattctggagcttcgttgctggagttgttaccttttattgcagcctcggccccgatagcctgctgcccaatattttcttcaccattaagtacaagccaaagcaactcggcctccaggaacttttcccccaggggcactcatgcgcggtgtgcggtaaggtcaaatgcaaaaggcaccggccctcattactgcttgaaaattatcagccttggctggacttgaaaattagcagcaaagtcgatgcgtctcttagtgaggtgcttgagttagtgctagaaaacttcgtctatccgtggtatcgtgacgtgacggacgacgagagcttcgtggacgaactcagaatcacactgcgattcttcgcctcagtcctgatcaggcgcatccacaaggtggacataccatccattatcaccaagaaactactgaaggccgcgatgaagcacatagaggtcatcgtgaaggcaaggcagaaggtgaaaaacaccgaatttctgcagcaggcggccctcgaggagtacggtcccgagctccatgtcgccctgaggagcaggcgggacgagttgcattatcttcgaaagctgacagaacttcttttcccatatattctgccccccaaggccaccgattgtcggtccctgaccctactaattcgggaaattttgagcggcagcgtctttctgccaagtctggattttttagctgacccggacacggtgaatcatttgctaattatattcattgatgactcaccgccagagaaagccaccgagcctgcttcgcccttagtgcctttcctccagaaattcgccgaaccgcggaacaaaaaaccctcagttctgaagctggagctcaagcagatccgtgagcagcaggaccttctttttcggtttatgaactttctgaagcaagagggtgccgtgcatgttctgcagttctgcctcaccgtggaggagttcaatgataggattctgaggccggagctgtcaaacgatgagatgctgtctctgcacgaagaacttcagaagatctacaaaacgtattgcctagatgaaagcatcgacaaaatccggtttgatccgtttatcgtagaagagatacagcgcattgctgagggcccatatatcgatgtcgtcaagctgcagacaatgagatgtctattcgaggcttatgaacacgttctgagcctcttagagaatgtttttaccccaatgttctgtcatagtgacgaatatttcaggcaactccttcgaggagctgagagccctaccagaaactccaagctaaaccgaggctcactttctctggatgattttcgaaacacccaaaagcggggcgaatcattcggcatttctagaatcgggagtaagatcaagggcgtgttcaagtctaccaccatggagggagccatgctgccaaattacggcgtcgctgagggggaggatgattttatagaggaagggattgtggtgatggaggatgacagtccagtggaagctgttagtacccctaatactccccgcaatctggcagcctggaagatctcgataccttacgtggatttctttgaagatccatcatccgaacgcaaggagaagaaagaaaggattcccgtgttttgtattgacgtggaacggaatgataggcgggccgtgggacatgaaccagaacattggagcgtgtatagaaggtatttagagttctacgtcctggagagcaagctcacggagtttcatggcgctttccccgacgcgcagctccctagtaagaggatcatcggccccaagaactatgagttcctgaagagcaagcgtgaggagttccaggagtatctgcagaagctccttcagcacccggaactctctaactcccagctactagcggatttcttgtctcccaatggcggggagacgcagttcctcgataagatcttacccgacgtaaacctgggcaagatcatcaagtctgtgcccggaaaactaatgaaggagaaaggacaacatcttgaacccttcatcatgaacttcatcaatagttgtgaaagcccgaaacctaagccctctcgtcccgaactgacaattctctcccctacttctgagaacaacaaaaagctctttaacgacctgttcaaaaacaatgccaatagagccgaaaatacagaaaggaagcagaatcaaaactactttatggaggtgatgactgtcgaaggtgtgtatgactacctgatgtatgttggccgggtcgtcttccaggtgcctgattggttgcaccacttattgatgggcactagaatactattcaaaaatactctggagatgtataccgactactacctgcaatgcaagctagagcaactgtttcaggagcacaggctggtctcattgatcaccctcttgagggacgctatcttctgtgagaacaccgaacctcgatccctccaggacaagcagaaaggcgccaaacaaacttttgaggagatgatgaattacattcctgatctgctggtgaaatgtatcggcgaagaaactaaatacgaaagcattcgtcttctgttcgatggtttacagcaacccgtgctgaacaagcagttgacctacgttctgctggatatagtgatccaggaactgtttccagagttgaataaggtccagaaagaagtgacttctgtgacgagttggatgtag

SEQ ID NO: 246805 - DNA, 2841 bp, Artificial Sequence
  derived and/or modified sequence
atggtgccctgggtgaggaccatgggccagaagctgaagcagaggctgcggctggatgtgggccgggagatctgccggcagtaccccctcttctgcttcctgctgctgtgcctgtctgctgccagcctgctgctgaaccgctacatccacatcctgatgatcttctggagctttgtggccggcgtggtgaccttctactgcagcctgggccctgacagcctgctgcccaacatcttcttcaccatcaagtacaagcccaagcagctgggcctgcaggagctgttcccccagggccacagctgtgctgtgtgtgggaaggtgaagtgcaagaggcaccggcccagcctgctgctggagaactaccagccctggctggacctgaagatcagcagcaaggtggatgccagcctgtctgaggtgctggagctggtgctggagaactttgtgtacccctggtacagagatgtgacagatgatgagagctttgtggatgagctgcgcatcaccctgcgcttctttgcctctgtgctgatccgccgcatccacaaggtggacatccccagcatcatcaccaagaagctgctgaaggccgccatgaagcacatcgaggtgattgtgaaggcccggcagaaggtgaagaacacagagttcctgcagcaggccgccctggaggagtatggccctgagctgcacgtggccctgcggagcagaagagatgagctgcactacctgaggaagctgacagagctgctcttcccctacatcctgccccccaaggccacagactgccgcagcctgaccctgctgatccgggagatcctgagcggctctgtgttcctgcccagcctggacttcctggccgaccctgacacagtgaaccacctgctgatcatcttcattgatgacagccccccagagaaggccacagagcccgccagccccctggtgcccttcctgcagaagtttgctgagcccaggaacaagaagcccagcgtgctgaagctggagctgaagcagatccgggagcagcaggacctgctcttccgcttcatgaacttcctgaagcaggagggcgctgtgcacgtgctgcagttctgcctgactgtggaggagttcaatgaccgcatcctgcggcctgagctgagcaatgatgagatgctgagcctgcacgaggagctgcagaagatctacaagacctactgcctggatgagagcattgacaagatccgctttgaccccttcatcgtggaggagatccagagaattgctgagggcccctacattgatgtggtgaagctgcagaccatgcgctgcctgtttgaggcctatgaacatgtgctgagcctgctggagaatgtgttcacccccatgttctgccacagtgatgagtacttccggcagctgctgcggggagctgagagccccaccaggaacagcaagctgaacagaggcagcctgagcctggatgacttcaggaacacccagaagagaggagagagctttggcatcagccgcatcggcagcaagatcaagggcgtcttcaagagcaccaccatggagggcgccatgctgcccaactatggagtggccgagggagaagatgacttcatcgaggagggcatcgtggtgatggaggatgacagccctgtggaggccgtgtccacccccaacacccccaggaacctggccgcctggaagatcagcatcccctacgtggacttctttgaggaccccagcagcgagaggaaggagaagaaggagcgcatccctgtgttctgcattgatgtggagagaaatgacagaagagctgtgggccacgagcctgagcactggagcgtgtaccgccgctacctggagttctacgtgctggagagcaagctgacagagttccatggagccttcccagatgcccagctgcccagcaagaggatcatcggccccaagaactatgagttcctgaagagcaagcgggaggagttccaggagtacctgcagaagctgctgcagcaccctgagctgagcaacagccagctgctggccgacttcctgagccccaacggcggggagacccagttcctggacaagatcctgcctgatgtgaacctgggcaagatcatcaagtctgtgcctgggaagctgatgaaggagaagggccagcacctggagcccttcatcatgaacttcatcaacagctgtgagagccccaagcccaagcccagcaggcctgagctgaccatcctgagccccaccagcgagaacaacaagaagctgttcaatgacctcttcaagaacaatgccaacagagctgagaacacagagaggaagcagaaccagaactacttcatggaggtgatgacagtggagggcgtgtatgactacctgatgtatgtgggccgggtggtgttccaggtgcctgactggctgcaccacctgctgatgggcacccgcatcctcttcaagaacaccctggagatgtacacagactactacctgcagtgcaagctggagcagctgttccaggagcaccggctggtgtccctcatcaccctgctgagagatgccatcttctgtgagaacacagagcccaggagcctgcaggacaagcagaagggggccaagcagacctttgaggagatgatgaactacatcccagacctgctggtgaagtgcattggagaggagaccaagtatgagagcatccggctgctgtttgatggcctgcagcagcctgtgctgaacaagcagctgacctacgtgctgctggacatcgtcatccaggagctgtttcctgagctgaacaaggtgcagaaggaggtgacctctgtgacctcctggatgtag

SEQ ID NO: 246806 - DNA, 2685 bp, Artificial Sequence
  derived and/or modified sequence
atgatcttctggagctttgtggccggcgtggtgaccttctactgcagcctgggccctgacagcctgctgcccaacatcttcttcaccatcaagtacaagcccaagcagctgggcctgcaggagctgttcccccagggccacagctgtgctgtgtgtgggaaggtgaagtgcaagaggcaccggcccagcctgctgctggagaactaccagccctggctggacctgaagatcagcagcaaggtggatgccagcctgtctgaggtgctggagctggtgctggagaactttgtgtacccctggtacagagatgtgacagatgatgagagctttgtggatgagctgcgcatcaccctgcgcttctttgcctctgtgctgatccgccgcatccacaaggtggacatccccagcatcatcaccaagaagctgctgaaggccgccatgaagcacatcgaggtgattgtgaaggcccggcagaaggtgaagaacacagagttcctgcagcaggccgccctggaggagtatggccctgagctgcacgtggccctgcggagcagaagagatgagctgcactacctgaggaagctgacagagctgctcttcccctacatcctgccccccaaggccacagactgccgcagcctgaccctgctgatccgggagatcctgagcggctctgtgttcctgcccagcctggacttcctggccgaccctgacacagtgaaccacctgctgatcatcttcattgatgacagccccccagagaaggccacagagcccgccagccccctggtgcccttcctgcagaagtttgctgagcccaggaacaagaagcccagcgtgctgaagctggagctgaagcagatccgggagcagcaggacctgctcttccgcttcatgaacttcctgaagcaggagggcgctgtgcacgtgctgcagttctgcctgactgtggaggagttcaatgaccgcatcctgcggcctgagctgagcaatgatgagatgctgagcctgcacgaggagctgcagaagatctacaagacctactgcctggatgagagcattgacaagatccgctttgaccccttcatcgtggaggagatccagagaattgctgagggcccctacattgatgtggtgaagctgcagaccatgcgctgcctgtttgaggcctatgaacatgtgctgagcctgctggagaatgtgttcacccccatgttctgccacagtgatgagtacttccggcagctgctgcggggagctgagagccccaccaggaacagcaagctgaacagaggcagcctgagcctggatgacttcaggaacacccagaagagaggagagagctttggcatcagccgcatcggcagcaagatcaagggcgtcttcaagagcaccaccatggagggcgccatgctgcccaactatggagtggccgagggagaagatgacttcatcgaggagggcatcgtggtgatggaggatgacagccctgtggaggccgtgtccacccccaacacccccaggaacctggccgcctggaagatcagcatcccctacgtggacttctttgaggaccccagcagcgagaggaaggagaagaaggagcgcatccctgtgttctgcattgatgtggagagaaatgacagaagagctgtgggccacgagcctgagcactggagcgtgtaccgccgctacctggagttctacgtgctggagagcaagctgacagagttccatggagccttcccagatgcccagctgcccagcaagaggatcatcggccccaagaactatgagttcctgaagagcaagcgggaggagttccaggagtacctgcagaagctgctgcagcaccctgagctgagcaacagccagctgctggccgacttcctgagccccaacggcggggagacccagttcctggacaagatcctgcctgatgtgaacctgggcaagatcatcaagtctgtgcctgggaagctgatgaaggagaagggccagcacctggagcccttcatcatgaacttcatcaacagctgtgagagccccaagcccaagcccagcaggcctgagctgaccatcctgagccccaccagcgagaacaacaagaagctgttcaatgacctcttcaagaacaatgccaacagagctgagaacacagagaggaagcagaaccagaactacttcatggaggtgatgacagtggagggcgtgtatgactacctgatgtatgtgggccgggtggtgttccaggtgcctgactggctgcaccacctgctgatgggcacccgcatcctcttcaagaacaccctggagatgtacacagactactacctgcagtgcaagctggagcagctgttccaggagcaccggctggtgtccctcatcaccctgctgagagatgccatcttctgtgagaacacagagcccaggagcctgcaggacaagcagaagggggccaagcagacctttgaggagatgatgaactacatcccagacctgctggtgaagtgcattggagaggagaccaagtatgagagcatccggctgctgtttgatggcctgcagcagcctgtgctgaacaagcagctgacctacgtgctgctggacatcgtcatccaggagctgtttcctgagctgaacaaggtgcagaaggaggtgacctctgtgacctcctggatgtag

SEQ ID NO: 246807 - DNA, 2841 bp, Artificial Sequence
  derived and/or modified sequence
atggtgccctgggtgcggaccatgggccagaagctgaagcagcggctccgactggacgtggggcgtgagatttgcaggcaatatcctctgttctgctttctgctactgtgtctgtcagccgccagcctgctgcttaaccggtatatccatattctaatgatcttttggagcttcgtcgcaggggtcgtaaccttctactgttcgctcggacctgattctctgttaccaaacatcttctttacgatcaagtacaaaccaaagcagctcggtctgcaggagctcttccctcagggtcacagctgtgccgtgtgtggcaaggtgaagtgtaaaagacaccgcccctcattactgctcgaaaactaccaaccttggctcgatctgaaaatctcaagtaaggttgatgcgtccctgagtgaagtgttggagctcgtgctagaaaattttgtgtatccgtggtatcgggatgtgaccgacgacgagtcctttgtggatgaactgaggatcacactcagattcttcgctagtgttttgattagaagaattcataaggtcgatatcccttcgattataaccaagaagctgctcaaggctgcaatgaaacatattgaagtgatcgttaaggcccgccagaaagtgaagaataccgagtttctgcaacaggcagcgctggaggaatacggcccagagttacatgtggcactgcgctccaggcgtgatgaacttcattacctccggaagttgacagaacttctgtttccatatatcctgccaccgaaagcgaccgattgcaggtctctgactctcctgattcgggaaatcttgagcggttcagtttttcttccttccctggacttcttagccgatcctgacaccgtgaatcaccttctaattatcttcattgatgactccccacctgagaaagccactgagcccgcttccccactggtgcccttcctgcaaaagtttgccgagccacggaataagaagccttcagtgcttaaattggaactcaaacagatccgtgagcaacaggatctgttatttagattcatgaacttcttgaagcaagagggcgccgtgcacgttctgcagttctgtctaaccgtagaagagttcaacgacaggattctgagacctgaactgtccaacgatgagatgctcagcctgcatgaggaactgcaaaagatatacaagacatactgcttggatgagtccattgataaaatacgcttcgatccttttatagtggaggagattcagaggatagcagagggtccctacatcgacgtggtgaaactacagacaatgcggtgtcttttcgaggcttacgaacatgtgttgtccttattggagaatgtgttcacacctatgttttgccactcagacgaatacttcaggcagttgcttcgaggcgctgaatccccaactcgaaattcgaagctcaatcgggggtctctcagccttgatgatttcaggaacactcagaaacgcggtgagtccttcggtattagccgtatcgggtccaagatcaaaggtgtcttcaaatccactacaatggagggcgcaatgttacccaactacggagtagctgagggggaggacgacttcattgaagaagggattgtggttatggaagacgactcaccagttgaagcggtaagtactcctaacacaccacgaaatctcgcagcttggaagatctccattccgtacgtggacttctttgaggacccttctagtgagcgtaaagagaagaaggaaaggattcctgtgttctgcatagacgtggagcggaacgacagacgagcagtcggccatgaacccgagcactggtccgtatatcgcagatacctcgaattttatgtcctcgagtcgaagctcacggagtttcatggcgccttccctgacgcgcagttgccttccaaacgaattatcggtcctaaaaattatgaattcctgaaaagcaaacgcgaagaattccaggagtacctccagaagttgctccagcaccccgaactctctaactcccagctgctggccgatttcctgtccccaaatgggggggagacacagttcctggataagattctccctgacgttaatttgggaaaaatcatcaaaagtgtgcccggaaaactcatgaaggaaaaggggcagcacctggagccttttattatgaatttcatcaactcatgtgagagccctaaacctaagccgagtaggcctgagttgaccattcttagccccacctccgagaacaataagaagctgttcaacgacttgttcaaaaacaacgccaaccgagccgagaatacagagagaaagcagaaccagaattatttcatggaagtgatgactgtcgagggagtctatgactacttaatgtacgtaggcagagtggtttttcaggtacccgattggttacatcacttgctaatggggaccaggatactgtttaaaaatacactggaaatgtacaccgattattatctacagtgtaagctggagcaactgttccaggagcacagattagtgagcctgattactctccttcgagacgccattttttgtgagaacaccgaacctaggagtctgcaagacaagcagaaaggcgctaaacaaacctttgaagagatgatgaactatatcccggatttgttggtaaagtgcattggcgaagaaaccaaatacgagtcaatacgcctgctgttcgatggattgcagcaaccagtcctgaacaaacagcttacatacgtactgctggatatcgtgatacaggaattattcccggagttaaataaagttcagaaggaggtgacctccgttactagttggatgtag

SEQ ID NO: 246808 - DNA, 2685 bp, Artificial Sequence
  derived and/or modified sequence
atgatcttctggagcttcgtggccggcgtggtgaccttctactgctccctgggcccagatagcctattgcctaacattttcttcaccatcaaatacaaacccaagcagttaggactgcaggagctgtttccacaaggacactcctgcgcagtatgcggcaaagttaagtgtaagagacacagaccgagtctgctcttggagaactatcagccttggctcgacctgaagatatccagcaaagtggacgcatccttgagcgaggtgctggaattagtcctggagaacttcgtgtacccctggtacagagatgtaacggacgacgaatcttttgtcgacgaacttagaattactttgagattctttgcaagtgtccttatccggagaattcacaaagtagacattcctagcattattacaaaaaaattattaaaggccgctatgaagcacattgaggtgatcgtcaaagcacgccagaaggtgaaaaatactgaattcttacagcaggcagctctggaggagtatggaccagagttgcatgtggcgctccgctccagacgggatgaactgcactatctgagaaagttaactgaacttctgtttccttatattctgcccccaaaggccacagattgtaggtccctgaccttgctgattagagaaattctaagtgggagcgtatttctgccctctctggatttccttgccgaccccgacacagtgaatcatttgcttataatattcatagacgattcccctccagaaaaggctacagaacctgcgtcccccctggttcctttcttgcaaaagtttgcagaaccaaggaacaaaaagccctctgtcctcaagctcgaacttaagcagatcagggaacagcaggatttactgtttagattcatgaattttctgaagcaggaaggcgctgtacacgttctgcaattttgcttgactgtggaagaatttaacgacagaatcctccgacctgagttatcaaatgatgagatgttgtcgctccatgaggaactccaaaagatatataagacctactgcctggacgaaagcattgataagatccgttttgacccttttatcgtggaggaaattcagagaatagccgagggaccttacatcgacgtggtcaagctacagacgatgcggtgcctgttcgaggcctacgaacatgttctgtcattgttagaaaatgtttttacaccaatgttctgtcatagtgacgagtactttagacaactcctcagaggagccgagagtcctactcgtaactcaaaacttaataggggttccctctctttagacgatttccgcaatacacagaaaagaggggagtcattcggaatctcgcgcataggaagtaagataaagggcgtgtttaagtccactacaatggagggagcaatgctacccaactatggcgtagcagaaggagaagacgattttattgaagagggaatcgtagtaatggaggacgatagccccgttgaggccgtctctacacccaacacgcctaggaacctggccgcctggaaaatttctattccttatgtggattttttcgaagacccatctagcgagcgaaaggaaaaaaaggagcgaatccccgtgttttgcatagatgttgaaagaaacgatagacgcgctgttggacacgagcccgaacactggtctgtctaccgccggtacttggagttctatgtcttagaatccaagttgaccgaattccatggggcttttcccgatgctcagctcccaagtaaacgaatcatcggaccaaaaaactacgagtttctcaaatctaagagggaggagttccaggagtatctccagaaactgctgcagcaccctgagctttcgaattcccagctgctagcagacttcctttcacctaacggtggagagactcagtttctcgataagatcctgccagatgttaatcttggcaaaatcatcaagagtgtgccagggaagctgatgaaggagaaaggtcagcatcttgagccttttatcatgaatttcataaacagctgtgaatcgccaaaacccaagcctagccggcccgaattaactatattgtctcctacctccgagaataacaagaagttgtttaacgatctgtttaagaataatgccaatagggctgaaaacacagagaggaagcagaaccagaactactttatggaggtgatgaccgttgaaggggtgtatgactacctgatgtacgtgggaagagtcgtattccaggttcccgattggttgcatcacctcctcatgggcacccgtatcctttttaaaaataccctggagatgtacaccgattattaccttcaatgtaaattagagcagctcttccaggagcaccgtctggtgtccctgatcacactacttcgggatgccattttttgcgaaaatacagaaccgcggtcgctgcaggacaaacagaaaggagctaaacagaccttcgaggaaatgatgaactatatcccggacctactcgtaaaatgtattggtgaggaaactaaatatgagagtattcgacttctctttgatgggttacagcagccagtgctaaataagcagttgacctatgtcctcctggacatcgtgattcaagagttgtttcctgaactcaacaaggttcagaaggaggttacctcagtgacatcatggatgtag

SEQ ID NO: 246809 - DNA, 2841 bp, Artificial Sequence
  derived and/or modified sequence
atggtgccttgggtccggaccatgggacaaaaactcaaacaacggctgagactagatgttggaagagagatttgtcggcagtatcccctgttttgttttttgttactatgtttgagcgcagccagtctgctgctgaacagatacattcatattctgatgatcttttggagcttcgttgccggagtggtcactttctactgttctttgggtcctgatagcttactgccaaatatcttttttaccattaagtacaaacctaaacagcttggcctgcaggaactgttccctcagggacacagctgcgccgtgtgcggcaaggttaaatgcaagaggcaccgaccctccctgctccttgagaactaccagccctggctggatctgaaaatcagctccaaagtagacgccagtctctcagaggtcttggaactggtgctggaaaacttcgtgtatccttggtaccgggacgtaactgacgatgaatcttttgtagatgagctgagaattaccctaagattctttgcaagcgtgcttatccgtcgaattcacaaagtggacataccttctatcattacgaagaagctgctgaaagctgcgatgaagcacatcgaggttatcgtaaaagcccgacagaaggtgaaaaacaccgaatttctgcaacaggccgcactcgaagagtacggaccggagttgcacgtcgcgctgagaagccgaagggacgagctgcattacttaagaaagctgactgagctgcttttcccctatatcctgcccccaaaggcgactgactgtcgcagtctgaccctattaataagagaaattttatccggctcagtgtttctgccatcgctggacttccttgctgacccagacactgtgaaccacctacttatcatctttattgacgattccccccctgagaaggccactgagcccgcttcaccgttagttccctttctacagaaattcgccgagcccaggaacaaaaaacccagcgtactgaagctggagctgaagcaaatccgcgaacagcaagacctgctgtttcgttttatgaacttcctgaaacaggaaggtgctgtacacgtgcttcagttctgcctgaccgtggaagagttcaatgaccgcatcttgagaccagaactgagcaacgatgagatgctgagcctacacgaggaacttcaaaaaatctataaaacctattgcctggatgagagtattgataagattaggtttgatccctttattgttgaagagatccagcggatagcggagggcccttacattgatgtcgtgaagttgcagaccatgcggtgtctcttcgaagcctatgagcacgtcctcagtctgctggagaacgtgttcacaccaatgttctgccattcggatgagtattttcggcaacttttgcgcggtgcagaatcacccacccggaactccaaacttaatcgcggaagcctcagtctggacgacttccgcaacacacagaaacggggtgagagcttcggaatatccaggatcggctctaaaatcaagggcgtgtttaaaagcaccaccatggagggagcaatgctgcccaactacggggttgcggagggcgaggatgatttcattgaggaaggcattgtagtaatggaagacgattctccagtggaagcggtttcaaccccgaacacaccacgaaacctcgctgcttggaagatttcaatcccatacgtcgactttttcgaggatccttcgtccgagcgaaaggagaagaaagagcgaatcccagtgttctgcattgacgtcgagcgaaatgaccgccgagctgttggacacgagcctgaacactggtccgtatacagaagatatcttgagttctacgtactcgagagtaaattaacggagttccacggtgccttcccagatgcacaacttccttctaagcgcatcatcggacctaagaattacgagttcctcaagagcaagcgtgaggaatttcaggaatatttacagaaactgctccagcacccggaattgagcaactcccagctgctggctgactttctgtctccgaatggaggcgagacccagtttcttgataaaatactgcccgatgtcaatctgggcaaaattattaagtctgtgcccggaaagctgatgaaagagaaggggcagcatttggaaccattcattatgaactttatcaattcttgcgagtcaccaaaaccaaaaccttctagaccagaactaaccatcctctcacccacgagtgagaataacaagaaattatttaacgacctgttcaaaaacaacgcaaacagagccgagaataccgaacgaaaacagaaccagaactatttcatggaagtgatgacagtcgagggggtgtatgactatctgatgtacgtgggcagagtggtgttccaagttccagattggctgcaccatttgcttatgggaacgagaattctgtttaaaaataccctagaaatgtataccgactactacctgcagtgtaaactggagcagcttttccaggagcacagactagttagtctcatcaccctgctgcgtgacgcaatcttttgtgagaataccgaacctcgctccctgcaggacaagcagaagggggctaagcagacctttgaagaaatgatgaactacatccctgacttgctggtgaagtgcattggtgaggaaaccaagtatgaatcaattcgcctgctctttgacggtctgcagcagccagtactaaataagcagctgacatatgtattactcgacatagtcatccaggaactgtttcctgaactgaacaaagtgcagaaggaggtgacctccgtgaccagttggatgtag

SEQ ID NO: 246810 - DNA, 2685 bp, Artificial Sequence
  derived and/or modified sequence
atgattttctggtctttcgttgctggtgtggtgaccttttactgtagccttggtcccgacagtctcctgcccaacattttcttcaccatcaagtacaagccaaagcagctcggactgcaggagctgtttccgcagggacatagctgtgctgtgtgtggaaaggtcaagtgcaagcgtcatcgcccttcactgctgctggagaactaccaaccatggcttgacctgaagatttcaagcaaagtggacgccagtctgtcagaggtgctggagctggttcttgaaaacttcgtatatccatggtatcgtgatgtcaccgatgatgaatcttttgttgatgagctgaggattactctccgatttttcgcatcggtcctgattcgtcgaatccacaaggtggacataccgagcattataacgaaaaaactcctgaaagccgcaatgaagcatattgaagttatcgtcaaagccaggcagaaggtgaaaaacactgaattcctgcagcaggccgcacttgaggaatacggtcctgaacttcatgtggccctgaggtctcgcagagacgaactgcactatttgaggaaactcaccgaactgctgtttccttacatccttcccccaaaagcaacagactgccgtagcctgacccttctgattagggagattctctctggcagcgtcttcctgccctcgttagactttttagctgaccctgataccgtcaatcatctcctgattatctttattgacgactcgccaccagagaaggccactgaacctgccagccccctcgtcccctttctccagaaatttgccgagccgaggaacaagaagccaagcgtgctgaagctggaactcaaacagattagagaacagcaggatctgctgttccgctttatgaacttcctgaagcaagagggcgcagtccatgtgttgcagttttgcctcacagtcgaggagttcaacgacagaatcctacggccagagttgagcaacgacgagatgcttagcctacacgaagagttacagaagatttataagacatactgtcttgacgaaagcatcgacaaaatcagattcgacccgtttattgtcgaggaaatacagcgtatcgccgagggtccatacattgatgtggtcaagctgcagacaatgcggtgcctatttgaggcctacgagcatgtgctttccttactggaaaacgtcttcacaccgatgttttgccacagcgatgaatatttcaggcaactactccgaggggctgagagtcccactcggaacagtaaacttaatcgcggaagtttaagcctcgatgactttcggaacacccagaagcgcggtgaatcttttggcatcagtaggattggtagtaagatcaagggggtctttaagtctaccactatggagggtgccatgcttcctaactacggagttgcagagggggaggacgattttattgaggagggcatagttgtaatggaagatgattcaccagtcgaagcggtaagcacaccaaacactccacgtaacctcgcagcctggaagatcagcatcccttacgttgacttctttgaggacccaagctctgagagaaaagagaagaaggagcgcattcctgtgttctgtattgatgtggagaggaacgatagaagggccgtaggacatgaaccagagcactggtcagtgtaccgcagatatctggaattttatgtcctcgagtcaaagctaaccgaatttcacggcgcattccccgacgcacagttgccttccaagcggattatcggcccaaaaaattatgaattcttgaagtccaagcgggaagaatttcaagaatatctccagaaacttcttcagcaccccgaattaagtaactcgcagctgctagccgattttctttccccaaatggtggcgagactcagtttctggacaagatcctgccagacgtcaacctagggaagattattaaaagtgtgcctggtaagctgatgaaagagaaaggccagcatctggaaccctttatcatgaattttatcaactcgtgcgagtcgcctaaacctaagccctcgaggcccgaactcacgatcctctctccaaccagcgagaataacaagaaactgtttaatgacctctttaaaaataatgcgaaccgcgcagagaatacagagcgcaagcagaatcaaaactacttcatggaagttatgaccgtagaaggagtctacgactatttgatgtacgtgggacgcgttgtgttccaggtgcccgattggctgcaccatttgctcatgggtaccaggattttgttcaagaacactttggaaatgtacaccgattattacctacagtgtaagcttgaacagctgttccaggagcatcgactggtctccttgatcacacttctgagagacgccatcttctgcgagaacacggagcctagaagcctgcaagacaaacagaagggggcaaagcagacattcgaggaaatgatgaactacataccggatcttttggtcaagtgtattggcgaggagaccaaatacgaaagcataaggctcctgtttgatggcctgcagcagcccgtccttaataagcaactcacgtacgtgctgctagacattgtcattcaggagctcttccctgagcttaacaaggtccagaaggaagttacctctgtcacctcatggatgtag

SEQ ID NO: 246811 - DNA, 3486 bp, Artificial Sequence
  derived and/or modified sequence
ggcggggggcgtggggctgggcccagccggacgcgacctcagcctgcggcggctaactgccggtaggcgtctgtgtgcgccgccaagtcggtggggcggggacgcgaggtgtggatggggggtcgccttgacctctgcctcagccagtagcgcagtctcggcctcgccgttacggagatggtgccctgggtgcggacgatggggcagaagctgaagcagcggctgcgactggacgtgggacgcgagatctgccgccagtacccgctgttctgcttcctgctgctctgtctcagcgccgcctccctgcttcttaacaggtatattcatattttaatgatcttctggtcatttgttgctggagttgtcacattctactgctcactaggacctgattctctcttaccaaatatattcttcacaataaaatacaaacccaagcagttaggacttcaggaattatttcctcaaggtcatagctgtgctgtttgtggtaaagtgaaatgtaaacgacataggccttctttgctacttgaaaactaccagccatggctagacctgaaaatttcttccaaggttgatgcatctctctcagaggttcttgaattagtgttggaaaactttgtttatccgtggtacagggatgtgacagatgatgaatcctttgttgatgaactgagaataacattacgtttttttgcatctgtcttaataagaaggattcacaaggtggatattccatctattataaccaagaaactattaaaagcagcaatgaagcatatagaagtgatagttaaagccagacagaaagtaaaaaatacagagtttttacagcaagctgctttagaagaatatggtccagagcttcatgttgctttgagaagtcgaagagatgaattgcactatttaaggaaacttactgaactgctttttccttatattttgcctcctaaagcaacagactgcagatctctgaccttacttataagagagattctgtctggctctgtgttccttccttctttggatttcctagctgatccagatactgtgaatcatttgcttatcatcttcatagatgacagtccacctgaaaaagcaactgaaccggcttctcctttggttccattcttgcagaaatttgcagaacctagaaataaaaagccatctgtgctgaagttagaattgaagcaaatcagagagcaacaagatcttttatttcgttttatgaactttctgaaacaagaaggcgcagtgcacgtgttgcagttttgtttgactgtggaggaatttaatgatagaattttacgaccagaattatcaaatgatgaaatgctgtctcttcatgaagaattgcagaagatttataaaacatactgtttggatgaaagtattgacaaaattagatttgatcccttcattgtagaagagattcaaagaattgctgaaggcccatacatagatgttgtgaaacttcaaactatgagatgtctttttgaagcatatgaacatgttctttcccttttggagaatgtatttactcctatgttctgccatagtgatgagtatttcagacaacttttaagaggtgcagaatcaccaacacgcaattcaaaattgaacagaggtagcctaagtttggatgattttcggaacacacagaaaaggggagaatcatttggaatcagcagaataggtagcaaaattaaaggagtattcaaaagtaccacaatggagggagctatgttgcctaattatggtgtagctgaaggtgaagatgattttattgaagaaggtattgttgtaatggaagatgattctccagtggaggctgtgagcacacctaatactccccgaaaccttgctgcatggaaaattagcattccatatgtagacttttttgaggatccctcctctgaaaggaaggagaaaaaagaaagaattcctgtgttttgtattgatgttgaaagaaatgatagaagagcagttggacacgagcctgaacattggtctgtctatagaagatatcttgaattctatgtacttgaatcaaaactaacagaatttcatggtgcatttcctgatgcccagcttccttctaagaggatcattggccccaaaaattatgaattcttaaagtcaaagagggaagagttccaagaatatctacagaaacttctgcagcatccagaactgagtaatagtcaacttctggcagactttctttcccctaatggtggggaaacacaatttcttgataagatactaccagatgtaaatcttgggaaaattataaaatctgttcctggaaaactaatgaaagagaaaggtcagcatttggaaccttttatcatgaatttcattaattcttgtgagtctccaaagcctaaaccaagtagaccagaactgaccattctcagccctacttcagaaaacaacaagaagcttttcaatgatctgtttaaaaataatgcaaaccgtgctgaaaatacagagagaaagcaaaatcagaattattttatggaggtgatgactgtagaaggagtctatgattacctgatgtatgtaggacgggtagttttccaggttcctgactggcttcatcatctcttaatgggaactcgaatcctctttaaaaacaccctggaaatgtatactgattactatcttcagtgtaaactagaacagctatttcaggagcaccgtttggtctcactcataacacttctcagagatgctatattctgtgaaaacactgaacctcgctctctccaagataagcaaaaaggagcaaaacagacttttgaagaaatgatgaattacattccagatctgttagtcaagtgtattggtgaagaaaccaagtatgaaagcatcagacttctgtttgatggcttacagcaaccagtactcaacaagcagctgacttatgttttattggacattgtgatacaggaactgtttccagagctcaataaggtacaaaaggaagttacctctgtgacatcttggatgtaaacacttggatttggtatagaataacccattgaaatttctgctgtgcgagggtggtagaaatttacttttttgggtatattcttatatatattatgtacatcgctgtctgaaattttagttattttttgtttttaataaagactaacacaaacttaatgattaaaagtgattgagtctcatagtctttcatttgctagctgtgatccaaattttattagaacataagtcacttgttattgccatttttaaaagagaaaattcataatgatgttatggcaaacagataagactgataaacttcgtattgtatagctttgaaaataattatgcctagtatggagaaacaggaataagatctgattttcttagagttaatatattttagtagattggttttccttttttttattttgtacatagttaactgtgtatctataaataaagcatcctatatgagtttttaataat

SEQ ID NO: 246812 - DNA, 3340 bp, Artificial Sequence
  derived and/or modified sequence
gcggccgcgcacgcgcggcggggggcgtggggctgggcccagccggacgcgacctcagcctgcggcggctaactgccggtaggcgtctgtgtgcgccgccaagtcggtggggcggggacgcgaggtgtggatggggggtcgccttgacctctgcctcagccagtagcgcagtctcggcctcgccgttacggagatggtgccctgggtgcggacgatggggcagaagctgaagcagcggctgcgactggacgtgggacgcgagatctgccgccagtacccgctgttctgcttcctgctgctctgtctcagcgccgcctccctgcttcttaacaggtatattcatattttaatgatcttctggtcatttgttgctggagttgtcacattctactgctcactaggacctgattctctcttaccaaatatattcttcacaataaaatacaaacccaagcagttaggacttcaggaattatttcctcaaggtcatagctgtgctgtttgtggtaaagtgaaatgtaaacgacataggccttctttgctacttgaaaactaccagccatggctagacctgaaaatttcttccaaggttgatgcatctctctcagaggttcttgaattagtgttggaaaactttgtttatccgtggtacagggatgtgacagatgatgaatcctttgttgatgaactgagaataacattacgtttttttgcatctgtcttaataagaaggattcacaaggtggatattccatctattataaccaagaaactattaaaagcagcaatgaagcatatagaagtgatagttaaagccagacagaaagtaaaaaatacagagtttttacagcaagctgctttagaagaatatggtccagagcttcatgttgctttgagaagtcgaagagatgaattgcactatttaaggaaacttactgaactgctttttccttatattttgcctcctaaagcaacagactgcagatctctgaccttacttataagagagattctgtctggctctgtgttccttccttctttggatttcctagctgatccagatactgtgaatcatttgcttatcatcttcatagatgacagtccacctgaaaaagcaactgaaccggcttctcctttggttccattcttgcagaaatttgcagaacctagaaataaaaagccatctgtgctgaagttagaattgaagcaaatcagagagcaacaagatcttttatttcgttttatgaactttctgaaacaagaaggcgcagtgcacgtgttgcagttttgtttgactgtggaggaatttaatgatagaattttacgaccagaattatcaaatgatgaaatgctgtctcttcatgaagaattgcagaagatttataaaacatactgtttggatgaaagtattgacaaaattagatttgatcccttcattgtagaagagattcaaagaattgctgaaggcccatacatagatgttgtgaaacttcaaactatgagatgtctttttgaagcatatgaacatgttctttcccttttggagaatgtatttactcctatgttctgccatagtgatgagtatttcagacaacttttaagaggtgcagaatcaccaacacgcaattcaaaattgaacagaggtagcctaagtttggatgattttcggaacacacagaaaaggggagaatcatttggaatcagcagaataggtagcaaaattaaaggagtattcaaaagtaccacaatggagggagctatgttgcctaattatggtgtagctgaaggtgaagatgattttattgaagaaggtattgttgtaatggaagatgattctccagtggaggctgtgagcacacctaatactccccgaaaccttgctgcatggaaaattagcattccatatgtagacttttttgaggatccctcctctgaaaggaaggagaaaaaagaaagaattcctgtgttttgtattgatgttgaaagaaatgatagaagagcagttggacacgagcctgaacattggtctgtctatagaagatatcttgaattctatgtacttgaatcaaaactaacagaatttcatggtgcatttcctgatgcccagcttccttctaagaggatcattggccccaaaaattatgaattcttaaagtcaaagagggaagagttccaagaatatctacagaaacttctgcagcatccagaactgagtaatagtcaacttctggcagactttctttcccctaatggtggggaaacacaatttcttgataagatactaccagatgtaaatcttgggaaaattataaaatctgttcctggaaaactaatgaaagagaaaggtcagcatttggaaccttttatcatgaatttcattaattcttgtgagtctccaaagcctaaaccaagtagaccagaactgaccattctcagccctacttcagaaaacaacaagaagcttttcaatgatctgtttaaaaataatgcaaaccgtgctgaaaatacagagagaaagcaaaatcagaattattttatggaggtgatgactgtagaaggagtctatgattacctgatgtatgtagatgctatattctgtgaaaacactgaacctcgctctctccaagataagcaaaaaggagcaaaacagacttttgaagaaatgatgaattacattccagatctgttagtcaagtgtattggtgaagaaaccaagtatgaaagcatcagacttctgtttgatggcttacagcaaccagtactcaacaagcagctgacttatgttttattggacattgtgatacaggaactgtttccagagctcaataaggtacaaaaggaagttacctctgtgacatcttggatgtaaacacttggatttggtatagaataacccattgaaatttctgctgtgcgagggtggtagaaatttacttttttgggtatattcttatatatattatgtacatcgctgtctgaaattttagttattttttgtttttaataaagactaacacaaacttaatgattaaaagtgattgagtctcatagtctttcatttgctagctgtgatccaaattttattagaacataagtcacttgttattgccatttttaaaagagaaaattcataatgatgttatggcaaacagataagactgataaacttcgtattgtatagctttgaaaataattatgcctagtatggagaaacaggaataagatctgattttcttagagttaatatattttagtagattggttttccttttttttattttgtacatagttaactgtgtatctataaataaagcatcctatatgagtttttaataataaa

SEQ ID NO: 246813 - DNA, 3193 bp, Artificial Sequence
  derived and/or modified sequence
gtgctgtagtttcttccgggctccctacaaccttcttccctctcctccgcaatacaggcagttactgggtgctggggctgtcctttgatttccggaaatggccggtcgccagtgttgtcagagtttccacggaagactgcgcgctactccggccaggagggcggagcggcgagacgctagaggctttgcgctgggtgacgacttcgggcacgttctacggccgttcctctggtcggctggggaccgcggccgcgcacgcgcggcggggggcgtggggctgggcccagccggacgcgacctcagcctgcggcggctaactgccggtatattcatattttaatgatcttctggtcatttgttgctggagttgtcacattctactgctcactaggacctgattctctcttaccaaatatattcttcacaataaaatacaaacccaagcagttaggacttcaggaattatttcctcaaggtcatagctgtgctgtttgtggtaaagtgaaatgtaaacgacataggccttctttgctacttgaaaactaccagccatggctagacctgaaaatttcttccaaggttgatgcatctctctcagaggttcttgaattagtgttggaaaactttgtttatccgtggtacagggatgtgacagatgatgaatcctttgttgatgaactgagaataacattacgtttttttgcatctgtcttaataagaaggattcacaaggtggatattccatctattataaccaagaaactattaaaagcagcaatgaagcatatagaagtgatagttaaagccagacagaaagtaaaaaatacagagtttttacagcaagctgctttagaagaatatggtccagagcttcatgttgctttgagaagtcgaagagatgaattgcactatttaaggaaacttactgaactgctttttccttatattttgcctcctaaagcaacagactgcagatctctgaccttacttataagagagattctgtctggctctgtgttccttccttctttggatttcctagctgatccagatactgtgaatcatttgcttatcatcttcatagatgacagtccacctgaaaaagcaactgaaccggcttctcctttggttccattcttgcagaaatttgcagaacctagaaataaaaagccatctgtgctgaagttagaattgaagcaaatcagagagcaacaagatcttttatttcgttttatgaactttctgaaacaagaaggcgcagtgcacgtgttgcagttttgtttgactgtggaggaatttaatgatagaattttacgaccagaattatcaaatgatgaaatgctgtctcttcatgaagaattgcagaagatttataaaacatactgtttggatgaaagtattgacaaaattagatttgatcccttcattgtagaagagattcaaagaattgctgaaggcccatacatagatgttgtgaaacttcaaactatgagatgtctttttgaagcatatgaacatgttctttcccttttggagaatgtatttactcctatgttctgccatagtgatgagtatttcagacaacttttaagaggtgcagaatcaccaacacgcaattcaaaattgaacagaggtagcctaagtttggatgattttcggaacacacagaaaaggggagaatcatttggaatcagcagaataggtagcaaaattaaaggagtattcaaaagtaccacaatggagggagctatgttgcctaattatggtgtagctgaaggtgaagatgattttattgaagaaggtattgttgtaatggaagatgattctccagtggaggctgtgagcacacctaatactccccgaaaccttgctgcatggaaaattagcattccatatgtagacttttttgaggatccctcctctgaaaggaaggagaaaaaagaaagaattcctgtgttttgtattgatgttgaaagaaatgatagaagagcagttggacacgagcctgaacattggtctgtctatagaagatatcttgaattctatgtacttgaatcaaaactaacagaatttcatggtgcatttcctgatgcccagcttccttctaagaggatcattggccccaaaaattatgaattcttaaagtcaaagagggaagagttccaagaatatctacagaaacttctgcagcatccagaactgagtaatagtcaacttctggcagactttctttcccctaatggtggggaaacacaatttcttgataagatactaccagatgtaaatcttgggaaaattataaaatctgttcctggaaaactaatgaaagagaaaggtcagcatttggaaccttttatcatgaatttcattaattcttgtgagtctccaaagcctaaaccaagtagaccagaactgaccattctcagccctacttcagaaaacaacaagaagcttttcaatgatctgtttaaaaataatgcaaaccgtgctgaaaatacagagagaaagcaaaatcagaattattttatggaggtgatgactgtagaaggagtctatgattacctgatgtatgtaggacgggtagttttccaggttcctgactggcttcatcatctcttaatgggaactcgaatcctctttaaaaacaccctggaaatgtatactgattactatcttcagtgtaaactagaacagctatttcaggagcaccgtttggtctcactcataacacttctcagagatgctatattctgtgaaaacactgaacctcgctctctccaagataagcaaaaaggagcaaaacagacttttgaagaaatgatgaattacattccagatctgttagtcaagtgtattggtgaagaaaccaagtatgaaagcatcagacttctgtttgatggcttacagcaaccagtactcaacaagcagctgacttatgttttattggacattgtgatacaggaactgtttccagagctcaataaggtacaaaaggaagttacctctgtgacatcttggatgtaaacacttggatttggtatagaataacccattgaaatttctgctgtgcgagggtggtagaaatttacttttttgggtatattcttatatatattatgtacatcgctgtctgaaattttagttattttttgtttttaataaagactaacacaaacttaatgattaaaagtga

SEQ ID NO: 246814 - protein, 316 aa, Artificial Sequence
  derived and/or modified sequence
MSVGFIGAGQLAFALAKGFTAAGVLAAHKIMASSPDMDLATVSALRKMGVKLTPHNKETVQHSDVLFLAVKPHIIPFILDEIGADIEDRHIVVSCAAGVTISSIEKKLSAFRPAPRVIRCMTNTPVVVREGATVYATGTHAQVEDGRLMEQLLSSVGFCTEVEEDLIDAVTGLSGSGPAYAFTALDALADGGVKMGLPRRLAVRLGAQALLGAAKMLLHSEQHPGQLKDNVSSPGGATIHALHVLESGGFRSLLINAVEASCIRTRELQSMADQEQVSPAAIKKTILDKDHLPLELGSPEGLHPLLLQYQLARAPS

SEQ ID NO: 246815 - DNA, 951 bp, Artificial Sequence
  derived and/or modified sequence
atgtctgtggggtttatcggagcagggcagctggccttcgctctggcaaaggggttcaccgccgccggagtgctggcagctcacaagatcatggctagtagcccggacatggacttggctaccgtgagcgcgcttaggaaaatgggtgtaaagctcacaccccacaataaggaaactgtgcaacactccgatgtgctatttcttgccgtgaaaccacatatcatcccctttatactcgacgaaattggagctgacattgaggaccgacacatcgtggtgtcttgcgcagccggcgtgactatttcttccatcgagaagaaattgtccgcctttcgcccggctcccagggtgattagatgtatgaccaacaccccagtggtggtacgcgaaggagcaaccgtgtacgccaccggaacacacgcacaagttgaggacgggagattgatggagcaactcctttcaagtgtgggcttctgcaccgaggtggaggaggatctcattgatgctgtgacaggcctgagcggaagcggccctgcctatgcctttaccgccctggacgcactcgcggacggcggggtcaagatgggcttgccacgacgcctggctgtccgcttgggcgctcaggctctcttaggcgctgcaaagatgctgctacatagcgagcagcaccccggccagctgaaagacaacgttagcagcccaggaggggctacaatccacgcccttcacgtgttagagtccggtggattcagaagtcttcttatcaatgctgtggaggccagctgtattcgaacccgggaactccagtccatggccgatcaagaacaggtgagccccgctgctatcaagaaaactattctggacaaggaccatctgcccctggagctgggttccccagaaggtttgcatccattactactgcagtaccagctggcccgcgccccttcatag

SEQ ID NO: 246816 - DNA, 951 bp, Artificial Sequence
  derived and/or modified sequence
atgtctgtgggcttcatcggggccggccagctggcctttgccctggccaagggcttcaccgctgctggggtgctggccgcccacaagatcatggccagcagcccagacatggacctggccaccgtgtctgccctgaggaagatgggcgtgaagctgaccccccacaacaaggagaccgtgcagcacagtgatgtgctcttcctggccgtgaagccccacatcatccccttcatcctggatgagatcggggctgacattgaagatagacacatcgtggtgtcctgtgccgccggcgtgaccatcagcagcattgagaagaagctgagcgccttccggcctgcccccagggtcatccgctgcatgaccaacacccctgtggtggtgcgggagggcgccaccgtgtatgccaccggcacccacgcccaggtggaggatggccgcctgatggagcagctgctgagctctgtgggcttctgcacagaggtggaggaggacctgattgatgctgtgacaggcctgagcggcagcggccctgcctatgccttcaccgccctggatgccctggctgatggcggcgtgaagatgggcctgccccggcggctggccgtgcggctgggcgcccaggccctgctgggcgccgccaagatgctgctgcacagcgagcagcaccctggccagctgaaggacaacgtgagcagccctgggggcgccaccatccacgccctgcacgtgctggagagcggcggcttccgcagcctgctgatcaatgctgtggaggccagctgcatccgcacccgggagctgcagagcatggctgaccaggagcaggtgtccccagctgccatcaagaagaccatcctggacaaggaccacctgcccctggagctgggcagccctgagggcctgcaccccctgctgctgcagtaccagctggcccgggcccccagctag

SEQ ID NO: 246817 - DNA, 951 bp, Artificial Sequence
  derived and/or modified sequence
atgagcgtgggcttcatcggcgccggccagctggccttcgccctggcaaagggcttcacagctgctggggtgctcgccgcccacaaaatcatggcgtcttccccagatatggatctggccacagtgtctgccttaaggaagatgggggtgaagttgacaccgcataacaaggagactgtccagcacagcgatgtgctttttctggctgtcaaacctcacatcatccctttcatcctagatgagattggtgcggacatagaagacaggcacatcgtggtgagctgcgcagcaggcgtgaccatttcttcgatagaaaagaagcttagcgccttccgcccagccccgcgcgttataaggtgcatgaccaataccccagttgttgtacgagagggcgccacagtttatgcaactggcacccatgctcaagtggaggatgggaggctgatggaacagctgctctcttctgtggggttttgcactgaagttgaggaggatttgatcgacgccgtaacaggtttatctggcagtggtcctgcatatgcgttcacagcactggatgcacttgccgatggcggtgtgaagatgggcctgccccgcagactggcagtgaggctgggggcgcaggctctgctcggtgcagctaaaatgctcctccatagcgagcagcaccccgggcaactgaaggacaacgtgtctagccccgggggcgccacgatccacgctctgcacgtgcttgaaagcggaggctttcgtagcctgctgattaacgctgtcgaagcctcttgcatcagaacacgtgagttacagagcatggccgatcaggaacaggtctcaccagcagccattaagaagacaatcctcgataaagaccatctgcctctggaactgggatctcctgagggtctgcatcctctcttgctgcaatatcagctggctcgagctccgtcctag

SEQ ID NO: 246818 - DNA, 951 bp, Artificial Sequence
  derived and/or modified sequence
atgtctgttggtttcattggtgcgggacagttggcattcgccttagcaaaaggcttcactgctgcaggagtgcttgccgcacataagatcatggcctcaagccctgatatggaccttgccacagtctctgcattgagaaagatgggagtcaaattgacaccccataataaggaaacagttcagcactccgacgtacttttcttggcagtgaagcctcacatcattcccttcatcctggacgagatcggggcagatatcgaagaccgccacatcgtagtgtcctgtgctgcgggtgtcacaatttcgtccatcgaaaagaagctctcagccttccgtcccgctccgagggtcattaggtgtatgactaataccccagtggtggtgcgagagggcgcaacagtatacgccacgggaacacacgcgcaggttgaggatggacgtcttatggaacaactgctctctagtgtgggcttctgcacagaagtcgaagaagatttgatcgacgcagtcaccgggttgagcggatccggacccgcttacgccttcacagccctggacgcattggctgatggaggcgtgaagatgggactccccaggaggttggccgtgagactgggcgcacaggcacttcttggtgcagcaaagatgctattgcatagtgaacagcaccctggccagctcaaggataatgtcagttctccgggaggcgcaacaatccacgcattgcatgtcctcgaatccggtggattcagaagcctacttatcaacgcagtggaggccagctgcatccgcactagagagcttcagagcatggcagatcaagaacaagtgtcccctgctgccatcaaaaaaacaatactggataaggaccacctgcccctcgaattgggaagccccgagggtttgcaccctctgctgttgcagtatcagcttgccagagccccttcgtag

SEQ ID NO: 246819 - DNA, 1716 bp, Artificial Sequence
  derived and/or modified sequence
agtcatttcttctgcggaacctccacccctccagtgggtgcgggaccctaggcagcaggccaggcaccgccgctctgactgggggccccgaagcagttaacgggccggacagcaaagtggaaagttagaccagctgggaccaggggaggtgggcacccggctgcgggaggagcggccaggctggcactgcccccctaacttgctctcgatcctgccggtctcgtcccgcagagccggtgccatctgtgggggctttgggccaggggtctccggacagcatgagcgtgggcttcatcggcgctggccagctggcttttgccctggccaagggcttcacagcagcaggcgtcttggctgcccacaagataatggctagctccccagacatggacctggccacagtttctgctctcaggaagatgggggtgaagttgacaccccacaacaaggagacggtgcagcacagtgatgtgctcttcctggctgtgaagccacacatcatccccttcatcctggatgaaataggcgccgacattgaggacagacacattgtggtgtcctgcgcggccggcgtcaccatcagctccattgagaagaagctgtcagcgtttcggccagcccccagggtcatccgctgcatgaccaacactccagtcgtggtgcgggagggggccaccgtgtatgccacaggcacgcacgcccaggtggaggacgggaggctcatggagcagctgctgagcagcgtgggcttctgcacggaggtggaagaggacctgattgatgccgtcacggggctcagtggcagcggccccgcctacgcattcacagccctggatgccctggctgatgggggtgtgaagatgggacttccaaggcgcctggcagtccgcctcggggcccaggccctcctgggggctgccaagatgctgctgcactcagaacagcacccaggccagctcaaggacaacgtcagctctcctggtggggccaccatccatgccttgcatgtgctggagagtgggggcttccgctccctgctcatcaacgctgtggaggcctcctgcatccgcacacgggagctgcagtccatggctgaccaggagcaggtgtcaccagccgccatcaagaagaccatcctggacaaggaccaccttcctctagagctcgggagcccggagggtcttcacccactcctactccagtatcagctggcacgggctccttcctgagagcaaaggtcaaggaccccctctgtgaaggctcagcagaggtgggatcccacgccccctcccggcccctccctgccctccattcagggagaaacctctccttcccgtgtgagaagggccagagggtccaggcatcccaagtccagcgtgaagggccacagcccctcttggctgccaagcacgcagatcccatggacatttggggaaagggctccttgggctgctggtgaacttctgtggccaccacctcctgctcctgacctccctgggagggtgctatcagttctgtcctggccctttcagttttataagttggtttccagcccccagtgtcctgacttctgtctgccacatgaggagggaggccctgcctgtgtgggagggtggttactgtgggtggaatagtggaggccttcaactgattagacaaggcccgcccacatcttggagggcatctgccttactgattaaaatgtcaatgtaatct

SEQ ID NO: 246820 - DNA, 951 bp, Artificial Sequence
  derived and/or modified sequence
atgagcgtgggcttcatcggcgccggccagctggccttcgccctggccaagggcttcaccgccgccggcgtgctggccgcccacaagatcatggccagcagccccgacatggacctggccaccgtgagcgccctgagaaagatgggcgtgaagctgaccccccacaacaaggagaccgtgcagcacagcgacgtgctgttcctggccgtgaagccccacatcatccccttcatcctggacgagatcggcgccgacatcgaggacagacacatcgtggtgagctgcgccgccggcgtgaccatcagcagcatcgagaagaagctgagcgccttcagacccgcccccagagtgatcagatgcatgaccaacacccccgtggtggtgagagagggcgccaccgtgtacgccaccggcacccacgcccaggtggaggacggcagactgatggagcagctgctgagcagcgtgggcttctgcaccgaggtggaggaggacctgatcgacgccgtgaccggcctgagcggcagcggccccgcctacgccttcaccgccctggacgccctggccgacggcggcgtgaagatgggcctgcccagaagactggccgtgagactgggcgcccaggccctgctgggcgccgccaagatgctgctgcacagcgagcagcaccccggccagctgaaggacaacgtgagcagccccggcggcgccaccatccacgccctgcacgtgctggagagcggcggcttcagaagcctgctgatcaacgccgtggaggccagctgcatcagaaccagagagctgcagagcatggccgaccaggagcaggtgagccccgccgccatcaagaagaccatcctggacaaggaccacctgcccctggagctgggcagccccgagggcctgcaccccctgctgctgcagtaccagctggccagagcccccagctag

SEQ ID NO: 246821 - protein, 384 aa, Artificial Sequence
  derived and/or modified sequence
MEPPGRRECPFPSWRFPGLLLAAMVLLLYSFSDACEEPPTFEAMELIGKPKPYYEIGERVDYKCKKGYFYIPPLATHTICDRNHTWLPVSDDACYRETCPYIRDPLNGQAVPANGTYEFGYQMHFICNEGYYLIGEEILYCELKGSVAIWSGKPPICEKVLCTPPPKIKNGKHTFSEVEVFEYLDAVTYSCDPAPGPDPFSLIGESTIYCGDNSVWSRAAPECKVVKCRFPVVENGKQISGFGKKFYYKATVMFECDKGFYLDGSDTIVCDSNSTWDPPVPKCLKVSTSSTTKSPASSASGPRPTYKPPVSNYPGYPKPEEGILDSLDVWVIAVIVIAIVVGVAVICVVPYRYLQRRKKKGKADGGAEYATYQTKSTTPAEQRG

SEQ ID NO: 246822 - protein, 364 aa, Artificial Sequence
  derived and/or modified sequence
MEPPGRRECPFPSWRFPGLLLAAMVLLLYSFSDACEEPPTFEAMELIGKPKPYYEIGERVDYKCKKGYFYIPPLATHTICDRNHTWLPVSDDACYRETCPYIRDPLNGQAVPANGTYEFGYQMHFICNEGYYLIGEEILYCELKGSVAIWSGKPPICEKVLCTPPPKIKNGKHTFSEVEVFEYLDAVTYSCDPAPGPDPFSLIGESTIYCGDNSVWSRAAPECKVVKCRFPVVENGKQISGFGKKFYYKATVMFECDKGFYLDGSDTIVCDSNSTWDPPVPKCLKVSTSSTTKSPASSASGPRPTYKPPVSNYPGYPKPEEGILDSLDVWVIAVIVIAIGKQMVELNMPLTRLNQPLQQSREAE

SEQ ID NO: 246823 - DNA, 1155 bp, Artificial Sequence
  derived and/or modified sequence
atggagcccccaggccgacgcgaatgcccatttcccagctggagatttcccggcttactcctcgccgctatggtgctactgctatattcattttcggacgcgtgcgaagaacccccaacattcgaggcgatggaattgatcggcaagccaaagccttactatgagattggggagcgggtcgattacaagtgcaagaagggatacttttacatcccccccctggccacacataccatttgcgatcggaaccacacctggttgcctgtgagtgatgatgcttgttatagagagacttgcccttatattcgcgatccccttaacggacaggccgttcccgcaaacggcacctatgaattcggttaccagatgcacttcatctgtaacgaaggttattacctaattggagaggaaatcctgtattgcgaactgaagggcagcgtggccatttggtccggtaagccaccgatctgtgaaaaggtgctgtgcacaccacctcctaaaataaaaaatggaaagcacacattcagcgaggtggaggtttttgagtatttagatgcagttacatactcctgtgacccagcaccgggccctgaccctttcagtttgatcggagagtcgaccatctactgcggcgacaattcggtttggagtcgtgccgcccctgaatgcaaggttgttaagtgtcgattcccagtggttgagaacgggaagcagatctcagggtttggaaagaaattctactataaagccacggtcatgtttgagtgcgacaagggattctacctcgacgggtctgataccatcgtctgtgacagcaattctacctgggacccccctgtgcctaagtgtttgaaggtctctacatcttcaaccaccaagtcgcccgcctctagtgcctctggccctcgaccaacatacaaacctcccgtgagtaattacccaggttaccccaaacccgaggagggaatccttgatagtcttgatgtatgggtcatcgccgtcattgtgattgctatcgtggtgggcgtggccgtgatttgcgttgtcccgtacaggtacctgcagcgtcgaaagaagaaagggaaagccgatggcggcgctgagtatgctacctaccaaacaaagtccacgactccggccgaacagcgaggttag

SEQ ID NO: 246824 - DNA, 1155 bp, Artificial Sequence
  derived and/or modified sequence
atggagcccccaggccggcgggagtgccccttccccagctggaggtttcctggcctgctgctggccgccatggtgctgctgctgtacagcttcagtgatgcctgtgaggagccccccacctttgaggccatggagctgattggcaagcccaagccctactatgagatcggggagcgggtggactacaagtgcaagaagggctacttctacatcccccccctggccacccacaccatctgtgacaggaaccacacctggctgcctgtgtctgatgatgcctgctaccgggagacctgcccctacatccgggaccccctgaatggccaggccgtgcctgccaacggcacctatgaatttggctaccagatgcacttcatctgcaatgaaggctactacctgattggagaggagatcctgtactgtgagctgaagggctctgtggccatctggagcggcaagccacccatctgtgagaaggtgctgtgcaccccaccacccaagatcaagaatggcaagcacaccttcagcgaggtggaggtgtttgagtacctggatgctgtgacctacagctgtgaccctgcccctggccctgaccccttcagcctgattggagagagcaccatctactgtggggacaacagcgtgtggagcagagctgcccctgagtgcaaggtggtgaagtgccgcttccctgtggtggagaatggcaagcagatcagcggctttgggaagaagttctactacaaggccaccgtgatgtttgaatgtgacaagggcttctacctggatggcagtgacaccatcgtgtgtgacagcaacagcacctgggacccccctgtgcccaagtgcctgaaggtgtccaccagcagcaccaccaagagccctgccagcagcgccagcggcccccggcccacctacaagccccctgtgagcaactacccaggctaccccaagccagaggagggcatcctggacagcctggatgtgtgggtgattgctgtgattgtgattgccatcgtggtgggcgtggccgtcatctgtgtggtgccctaccgctacctgcagaggaggaagaagaagggcaaggcagatggcggcgcagaatatgccacctaccagaccaagagcaccaccccagctgagcagaggggctag

SEQ ID NO: 246825 - DNA, 1155 bp, Artificial Sequence
  derived and/or modified sequence
atggagccccccggccggcgggagtgccccttccccagctggcggtttcccggcctgctgctggccgccatggttctgctgctgtactcattcagtgatgcctgcgaagagcctccaactttcgaggccatggaactgatcggcaagcccaaaccttactatgaaattggagagagggtagattataagtgcaagaaaggatacttttacatacctcctctcgctacacacacaatctgcgacagaaaccatacctggctgccagtgagtgatgacgcgtgctatcgtgaaacatgcccatacattcgggatccattaaatggccaggctgttccagccaatggcacgtacgagttcggttatcagatgcacttcatttgtaacgagggctattatctcatcggtgaagagattctctactgcgagctgaagggctccgtggcaatttggagcggaaaacccccaatctgcgaaaaggtcctgtgcacaccgcctcccaaaataaagaatggcaagcacacctttagcgaagttgaagtgtttgaatacttggacgccgtgacctatagctgtgacccagctcctggaccggatccattcagtttgatcggcgagtctactatttactgcggggataactccgtatggagccgggccgcgcccgaatgtaaggtggttaagtgtagattcccggtggtagaaaatggcaaacagatctccggttttgggaagaagttttactacaaggctacagtcatgtttgagtgcgacaagggtttttacctggacgggtcagatacaatagtgtgtgacagcaattctacgtgggacccacctgtacctaagtgtctaaaagtctcaacttccagcactactaaaagtcccgcaagtagtgcatctggccccagaccaacatataaacctcctgtgagtaattacccaggctacccaaagccagaggagggaatacttgacagccttgatgtgtgggtgatcgcagtaatagtgattgccattgtggtcggcgtggccgtcatttgcgtagtcccctataggtacctgcagcggcgaaagaagaagggcaaggcggacggcggtgccgaatatgccacctaccaaaccaagagcacaacacccgctgaacagagaggctag

SEQ ID NO: 246826 - DNA, 1155 bp, Artificial Sequence
  derived and/or modified sequence
atggagcctccaggtcgtagggagtgcccgttcccttcctggagattccccggacttttactggccgcaatggtgctcctcctttattcattcagcgacgcctgtgaggagccgccaactttcgaggccatggagcttatcggaaaaccaaagccatactacgaaatcggcgagcgggtggactataagtgcaaaaaggggtacttctatattccgcctctagccacacatacgatttgtgatcgtaatcacacatggctgcctgtttccgacgacgcctgttacagggagacctgcccttatattagggaccccctaaacggccaggctgtgcctgctaacggtacgtacgaatttggataccagatgcattttatctgtaacgagggatactatctgatcggagaggaaattctgtattgcgagctcaagggctccgtagcaatctggagcggaaaaccgccaatatgcgaaaaggtactgtgcacccctcccccaaaaatcaaaaatggcaaacacacgttctccgaagttgaagtcttcgagtacttagacgctgtgacttacagctgcgatcctgccccagggcctgatccattttcactgattggggaatcgacaatttactgtggcgacaactccgtgtggtccagagcagcgcctgagtgcaaagtggttaaatgtagattcccagtcgtcgaaaacggaaagcaaattagcggttttggaaagaagttctattataaggctaccgtgatgtttgaatgcgataaagggttctacctggacggatccgatacaattgtgtgcgactcaaactccacttgggacccaccagtgccgaagtgcctgaaggtatcaacatcttccacaaccaagtctcccgcttcaagcgcttcagggccaaggcccacatataaaccaccagtttctaattaccctggatatccaaagccagaagagggtatcctggacagtctcgacgtatgggtcattgcggtcattgtgattgcaatagtggtgggggtggcggtgatttgcgtagttccctaccgctacctgcaacgcagaaaaaagaagggcaaagccgacggcggtgccgagtatgcaacttatcaaaccaaatccactactcctgctgaacaacgtggttag

SEQ ID NO: 246827 - DNA, 3233 bp, Artificial Sequence
  derived and/or modified sequence
gctcgggccacgcccacctgtcctgcagcactggatgctttgtgagttggggattgttgcgtcccatatctggacccagaagggacttccctgctcggctggctctcggtttctctgctttcctccggagaaataacagcgtcttccgcgccgcgcatggagcctcccggccgccgcgagtgtccctttccttcctggcgctttcctgggttgcttctggcggccatggtgttgctgctgtactccttctccgatgcctgtgaggagccaccaacatttgaagctatggagctcattggtaaaccaaaaccctactatgagattggtgaacgagtagattataagtgtaaaaaaggatacttctatatacctcctcttgccacccatactatttgtgatcggaatcatacatggctacctgtctcagatgacgcctgttatagagaaacatgtccatatatacgggatcctttaaatggccaagcagtccctgcaaatgggacttacgagtttggttatcagatgcactttatttgtaatgagggttattacttaattggtgaagaaattctatattgtgaacttaaaggatcagtagcaatttggagcggtaagcccccaatatgtgaaaaggttttgtgtacaccacctccaaaaataaaaaatggaaaacacacctttagtgaagtagaagtatttgagtatcttgatgcagtaacttatagttgtgatcctgcacctggaccagatccattttcacttattggagagagcacgatttattgtggtgacaattcagtgtggagtcgtgctgctccagagtgtaaagtggtcaaatgtcgatttccagtagtcgaaaatggaaaacagatatcaggatttggaaaaaaattttactacaaagcaacagttatgtttgaatgcgataagggtttttacctcgatggcagcgacacaattgtctgtgacagtaacagtacttgggatcccccagttccaaagtgtcttaaagtgtcgacttcttccactacaaaatctccagcgtccagtgcctcaggtcctaggcctacttacaagcctccagtctcaaattatccaggatatcctaaacctgaggaaggaatacttgacagtttggatgtttgggtcattgctgtgattgttattgccatagttgttggagttgcagtaatttgtgttgtcccgtacagatatcttcaaaggaggaagaagaaagggaaagcagatggtggagctgaatatgccacttaccagactaaatcaaccactccagcagagcagagaggctgaatagattccacaacctggtttgccagttcatcttttgactctattaaaatcttcaatagttgttattctgtagtttcactctcatgagtgcaactgtggcttagctaatattgcaatgtggcttgaatgtaggtagcatcctttgatgcttctttgaaacttgtatgaatttgggtatgaacagattgcctgctttcccttaaataacacttagatttattggaccagtcagcacagcatgcctggttgtattaaagcagggatatgctgtattttataaaattggcaaaattagagaaatatagttcacaatgaaattatattttctttgtaaagaaagtggcttgaaatcttttttgttcaaagattaatgccaactcttaagattattctttcaccaactatagaatgtattttatatatcgttcattgtaaaaagcccttaaaaatatgtgtatactactttggctcttgtgcataaaaacaagaacactgaaaattgggaatatgcacaaacttggcttctttaaccaagaatattattggaaaattctctaaaagttaatagggtaaattctctattttttgtaatgtgttcggtgatttcagaaagctagaaagtgtatgtgtggcatttgttttcactttttaaaacatccctaactgatcgaatatatcagtaatttcagaatcagatgcatcctttcataagaagtgagaggactctgacagccataacaggagtgccacttcatggtgcgaagtgaacactgtagtcttgttgttttcccaaagagaactccgtatgttctcttaggttgagtaacccactctgaattctggttacatgtgtttttctctccctccttaaataaagagaggggttaaacatgccctctaaaagtaggtggttttgaagagaataaattcatcagataacctcaagtcacatgagaatcttagtccatttacattgccttggctagtaaaagccatctatgtatatgtcttacctcatctcctaaaaggcagagtacaaagtaagccatgtatctcaggaaggtaacttcattttgtctatttgctgttgattgtaccaagggatggaagaagtaaatatagctcaggtagcactttatactcaggcagatctcagccctctactgagtcccttagccaagcagtttctttcaaagaagccagcaggcgaaaagcagggactgccactgcatttcatatcacactgttaaaagttgtgttttgaaattttatgtttagttgcacaaattgggccaaagaaacattgccttgaggaagatatgattggaaaatcaagagtgtagaagaataaatactgttttactgtccaaagacatgtttatagtgctctgtaaatgttcctttcctttgtagtctctggcaagatgctttaggaagataaaagtttgaggagaacaaacaggaattctgaattaagcacagagttgaagtttatacccgtttcacatgcttttcaagaatgtcgcaattactaagaagcagataatggtgttttttagaaacctaattgaagtatattcaaccaaatactttaatgtataaaataaatattatacaatatacttgtatagcagtttctgcttcacatttgattttttcaaatttaatatttatattagagatctatatatgtataaatatgtattttgtcaaatttgttacttaaatatatagagaccagttttctctggaagtttgtttaaatgacagaagcgtatatgaattcaagaaaatttaagctgcaaaaatgtatttgctataaaatgagaagtctcactgatagaggttctttattgctcattttttaaaaaatggactcttgaaatctgttaaaataaaattgtacatttggagatgtttca

SEQ ID NO: 246828 - DNA, 1155 bp, Artificial Sequence
  derived and/or modified sequence
atggagccccccggcagaagagagtgccccttccccagctggagattccccggcctgctgctggccgccatggtgctgctgctgtacagcttcagcgacgcctgcgaggagccccccaccttcgaggccatggagctgatcggcaagcccaagccctactacgagatcggcgagagagtggactacaagtgcaagaagggctacttctacatcccccccctggccacccacaccatctgcgacagaaaccacacctggctgcccgtgagcgacgacgcctgctacagagagacctgcccctacatcagagaccccctgaacggccaggccgtgcccgccaacggcacctacgagttcggctaccagatgcacttcatctgcaacgagggctactacctgatcggcgaggagatcctgtactgcgagctgaagggcagcgtggccatctggagcggcaagccccccatctgcgagaaggtgctgtgcacccccccccccaagatcaagaacggcaagcacaccttcagcgaggtggaggtgttcgagtacctggacgccgtgacctacagctgcgaccccgcccccggccccgaccccttcagcctgatcggcgagagcaccatctactgcggcgacaacagcgtgtggagcagagccgcccccgagtgcaaggtggtgaagtgcagattccccgtggtggagaacggcaagcagatcagcggcttcggcaagaagttctactacaaggccaccgtgatgttcgagtgcgacaagggcttctacctggacggcagcgacaccatcgtgtgcgacagcaacagcacctgggacccccccgtgcccaagtgcctgaaggtgagcaccagcagcaccaccaagagccccgccagcagcgccagcggccccagacccacctacaagccccccgtgagcaactaccccggctaccccaagcccgaggagggcatcctggacagcctggacgtgtgggtgatcgccgtgatcgtgatcgccatcgtggtgggcgtggccgtgatctgcgtggtgccctacagatacctgcagagaagaaagaagaagggcaaggccgacggcggcgccgagtacgccacctaccagaccaagagcaccacccccgccgagcagagaggctag

SEQ ID NO: 246829 - protein, 1332 aa, Artificial Sequence
  derived and/or modified sequence
MGDPAPARSLDDIDLSALRDPAGIFELVEVVGNGTYGQVYKGRHVKTGQLAAIKVMDVTEDEEEEIKQEINMLKKYSHHRNIATYYGAFIKKSPPGNDDQLWLVMEFCGAGSVTDLVKNTKGNALKEDCIAYICREILRGLAHLHAHKVIHRDIKGQNVLLTENAEVKLVDFGVSAQLDRTVGRRNTFIGTPYWMAPEVIACDENPDATYDYRSDIWSLGITAIEMAEGAPPLCDMHPMRALFLIPRNPPPRLKSKKWSKKFIDFIDTCLIKTYLSRPPTEQLLKFPFIRDQPTERQVRIQLKDHIDRSRKKRGEKEETEYEYSGSEEEDDSHGEEGEPSSIMNVPGESTLRREFLRLQQENKSNSEALKQQQQLQQQQQRDPEAHIKHLLHQRQRRIEEQKEERRRVEEQQRREREQRKLQEKEQQRRLEDMQALRREEERRQAEREQEYKRKQLEEQRQSERLQRQLQQEHAYLKSLQQQQQQQQLQKQQQQQLLPGDRKPLYHYGRGMNPADKPAWAREVEERTRMNKQQNSPLAKSKPGSTGPEPPIPQASPGPPGPLSQTPPMQRPVEPQEGPHKSLVAHRVPLKPYAAPVPRSQSLQDQPTRNLAAFPASHDPDPAIPAPTATPSARGAVIRQNSDPTSEGPGPSPNPPAWVRPDNEAPPKVPQRTSSIATALNTSGAGGSRPAQAVRARPRSNSAWQIYLQRRAERGTPKPPGPPAQPPGPPNASSNPDLRRSDPGWERSDSVLPASHGHLPQAGSLERNRVGVSSKPDSSPVLSPGNKAKPDDHRSRPGRPADFVLLKERTLDEAPRPPKKAMDYSSSSEEVESSEDDEEEGEGGPAEGSRDTPGGRSDGDTDSVSTMVVHDVEEITGTQPPYGGGTMVVQRTPEEERNLLHADSNGYTNLPDVVQPSHSPTENSKGQSPPSKDGSGDYQSRGLVKAPGKSSFTMFVDLGIYQPGGSGDSIPITALVGGEGTRLDQLQYDVRKGSVVNVNPTNTRAHSETPEIRKYKKRFNSEILCAALWGVNLLVGTENGLMLLDRSGQGKVYGLIGRRRFQQMDVLEGLNLLITISGKRNKLRVYYLSWLRNKILHNDPEVEKKQGWTTVGDMEGCGHYRVVKYERIKFLVIALKSSVEVYAWAPKPYHKFMAFKSFADLPHRPLLVDLTVEEGQRLKVIYGSSAGFHAVDVDSGNSYDIYIPVHIQSQITPHAIIFLPNTDGMEMLLCYEDEGVYVNTYGRIIKDVVLQWGEMPTSVAYICSNQIMGWGEKAIEIRSVETGHLDGVFMHKRAQRLKFLCERNDKVFFASVRSGGSSQVYFMTLNRNCIMNW

SEQ ID NO: 246830 - DNA, 3999 bp, Artificial Sequence
  derived and/or modified sequence
atgggagatcccgcccccgctcgaagcctagacgacatcgatttgagtgccttgagggatccagccgggatcttcgaacttgtggaggtggtgggaaatggtacctacggacaggtgtacaagggacgtcacgtgaagacagggcaactggccgcaattaaagtcatggacgtgactgaggacgaggaggaagaaattaagcaggaaatcaatatgctgaaaaagtactctcaccaccgtaacattgcgacatattacggtgcctttatcaaaaaatctcctcctggaaacgacgatcagctttggctcgtgatggaattctgcggcgccggctccgtgacagatcttgtgaaaaataccaaggggaacgccctgaaggaggattgtatagcttacatttgccgagaaatattacggggcctggctcacctgcacgctcataaggtgattcacagggacataaaaggccagaatgtcctgcttacagagaatgcagaagtgaaactggtcgacttcggtgtctcagcccagctggaccgcaccgtgggtagacgaaacacctttattgggacgccatattggatggccccggaagtgatcgcctgtgacgaaaaccctgacgctacatatgattataggtccgatatctggagtctgggtattacagcaattgagatggctgaaggggcccccccactctgcgacatgcatcctatgagagccttgttcctcatcccgagaaacccccccccccgcctgaagtccaaaaagtggagcaagaagttcatagacttcattgatacctgtctcatcaaaacctacctgtctaggccccccacggaacaactgttgaagttcccgtttattcgtgaccagccaaccgaacgccaagtgagaattcaactgaaggaccacattgataggagcagaaaaaagcgtggcgagaaggaggaaacagagtacgagtattccggctctgaggaagaggatgacagtcacggcgaagaaggcgagcccagcagcatcatgaatgtcccaggcgagagtacccttcgacgcgagttcctgcgcctgcagcaggaaaacaagagtaatagcgaggccctcaaacagcaacagcagctgcagcagcagcagcagagagaccctgaggcacatataaaacacctgttgcaccagcgacaaagaagaatagaagagcaaaaagaagagagacggcgcgtggaggagcagcagcgccgagagcgtgaacagcgcaaacttcaggaaaaagagcagcagcgtcgtttagaggacatgcaggctttgaggagggaagaggaaagacggcaggccgaaagggagcaagagtacaaaagaaaacagctcgaagagcagcggcagtcggagcgtctgcaacggcagctgcagcaggaacacgcttacctgaaatcccttcagcagcaacagcagcaacagcagttacagaagcaacagcaacagcagttgctgcctggggaccgcaagccactttatcactatggaagaggtatgaatcctgctgacaaacctgcttgggcgagggaagtcgaagagagaactcgaatgaataagcagcagaacagtcctttggctaagtccaaacccggtagcactggccctgaacctccgattccacaggcttctcctggccctcctggacccctgtcacagaccccccccatgcagcgccccgtggagcctcaagaggggccccacaaatccttggtcgctcatagagtgcctctgaaaccatacgccgctccggtgccccggagccaatctctgcaagaccaacccacgagaaacctcgcggcattccccgcctcgcacgatcccgatcccgctatacctgcccctactgccaccccatcagcccgcggcgccgtcattcggcaaaatagcgaccctacctcggaggggcccggccccagtcctaatcctcccgcctgggtacggcccgataacgaggcacctcccaaagtgccccagcgcacttcaagtattgcaacagccctgaataccagtggggccgggggctcacgccccgcccaggccgtcagggcccggccacgctccaactcagcttggcagatttatttgcaaagacgagccgagcgtggcacccccaaacctcccgggccccctgctcagccaccaggaccacctaacgccagcagcaaccctgacctccggcggtcagaccctgggtgggagaggtccgattcagtcctcccagccagccacggtcatttgccccaggccggaagcctcgagcgcaatcgggtcggtgtgtcttcaaaacccgactccagccccgtgttgagccctgggaataaggctaagccagacgaccatcgaagtaggccgggcaggccagccgactttgtgctcctgaaggagagaaccctggatgaggctcctagaccaccaaaaaaagccatggactacagcagctcaagcgaggaagtggaaagctccgaagatgacgaggaagagggcgaaggcggacctgctgagggatcacgggatacacctggaggaaggtccgatggcgacacggactcggtcagtactatggtagtccacgatgttgaggaaatcaccggaacgcaacctccttatggtggcggcactatggttgtacaacgtactcccgaggaggagcggaacctcctccacgctgacagcaatggatataccaatctacccgacgtggtacaaccttcacattcgccaacagagaattctaaagggcagagccccccaagtaaggatggctcgggtgattatcagtctagaggattggtcaaggcccccggaaaatctagctttactatgttcgtcgaccttggcatatatcagcccgggggcagtggagactcaattccaatcacagctctcgtgggaggtgagggcactcgattagaccagctgcagtatgacgtgcggaagggatccgtggttaacgttaatccaaccaacacaagagctcactctgaaacaccagagatccggaagtataagaagagattcaattccgaaatactctgcgcagccctgtggggcgtgaatctcctggtcggaactgagaatggcctgatgctcctagaccggtccggccaggggaaggtctacggactgatcggcagacgaaggtttcagcagatggatgtgctcgaaggtttaaaccttctgatcaccatcagcggaaaaaggaataagctgcgcgtctactatttatcatggctgcggaataaaatcttacataacgacccggaagtagagaaaaagcagggatggaccacagtgggggacatggaaggctgcggacattacagagtggtgaaatatgaacgaatcaagttcctagtcatcgcattgaagtcatcagtggaggtgtatgcgtgggctccaaaaccctaccataaatttatggcttttaagtcgtttgccgacttgccacacaggccattgctggtggacctaaccgttgaagagggacagcggctaaaggtcatctacgggagctccgccggcttccatgcagtggatgtagacagcggtaactcgtatgacatttatatacccgtgcacatacaatctcagattacaccacacgccatcatttttctgcccaataccgacggaatggaaatgctgctgtgctatgaggatgagggcgtgtacgtaaatacttatggaaggattatcaaggacgtggtgcttcagtggggtgaaatgcctacttccgtggcttatatatgttcaaaccagatcatgggttggggagagaaggccatcgaaatcagatccgtggagaccgggcatctagatggcgtgttcatgcataaaagagcccagcgattgaaatttctgtgcgagcggaatgacaaagtgttctttgcctcagtgcgctcaggaggttctagccaagtttactttatgaccctcaacaggaattgtatcatgaattggtag

SEQ ID NO: 246831 - DNA, 3999 bp, Artificial Sequence
  derived and/or modified sequence
atgggagaccctgccccagcccggagcctggatgacatcgacctgagcgccctgcgggaccctgctggcatctttgagctggtggaggtggtgggcaatggcacctacggccaggtgtacaagggccgccacgtgaagacaggccagctggccgccatcaaggtgatggatgtgacagaagatgaggaggaggagatcaagcaggagatcaacatgctgaagaagtacagccaccacaggaacatcgccacctactacggggccttcatcaagaagagccccccaggaaatgatgaccagctgtggctggtgatggagttctgtggggccggctctgtgacagacctggtgaagaacaccaagggaaatgccctgaaggaggactgcatcgcctacatctgccgggagatcctgcggggcctggcccacctgcacgcccacaaggtgatccaccgggacatcaagggccagaatgtgctgctgacagaaaatgctgaggtgaagctggtggactttggagtgtctgcccagctggacagaacagtgggcagaagaaacaccttcatcggcaccccctactggatggcccctgaggtgattgcctgtgatgagaacccagatgccacctatgactacagaagtgacatctggagcctgggcatcacagccatcgagatggccgagggcgccccacccctgtgtgacatgcaccccatgagggccctcttcctgatccccagaaatcctccaccccggctgaagagcaagaagtggagcaagaagttcatcgacttcatcgacacctgcctgatcaagacctacctgagccggcccccaacagagcagctgctgaagttccccttcatccgggaccagcccacagagcggcaggtgcgcatccagctgaaggaccacatcgacaggagcaggaagaagagaggagagaaggaggagacagaatatgagtacagcggcagcgaggaggaggatgacagccatggagaggagggggagcccagcagcatcatgaatgtgcctggagagagcaccctgcggcgggagttcctgcggctgcagcaggagaacaagagcaacagcgaggccctgaagcagcagcagcagctgcagcagcagcagcagagggaccctgaggcccacatcaagcacctgctgcaccagaggcagaggcgcatcgaggagcagaaggaggagcggcggcgggtggaggagcagcagaggcgggagcgggagcagaggaagctgcaggagaaggagcagcagaggcggctggaggacatgcaggccctgcggcgggaggaggagcggcggcaggccgagcgggagcaggagtacaagaggaagcagctggaggagcagaggcagagcgagcggctgcagaggcagctgcagcaggagcacgcctacctgaagagcctgcagcagcagcagcagcagcagcagctgcagaagcagcagcagcagcagctgctgcccggggacaggaagcccctgtaccactacggccggggcatgaacccagctgacaagccagcctgggcccgggaggtggaggagaggaccaggatgaacaagcagcagaacagccccctggccaagagcaagccaggcagcactggacctgagccccccatcccccaggccagccctggccccccaggccccctgagccagaccccacccatgcagaggcctgtggagccccaggagggcccccacaagagcctggtggcccaccgggtgcccctgaagccctatgctgcccctgtgcccaggagccagagcctgcaggaccagcccaccaggaacctggccgccttccctgccagccatgaccctgaccctgccatcccagcccccacagccaccccatctgcccggggagctgtgatccggcagaacagcgaccccaccagcgagggccctggccccagccccaaccccccagcctgggtgcggccagacaatgaggccccacccaaggtgccccagaggaccagcagcatcgccacagccctgaacaccagcggggccggcggcagcaggcctgcccaggccgtgcgggcccggcccaggagcaacagcgcctggcagatctacctgcagaggagagctgagcggggcacccccaagcccccaggccccccagcccagcccccaggccccccaaatgccagcagcaacccagacctgcggcggagtgaccccggctgggagaggagtgacagcgtgctgcctgccagccacggccacctgccccaggccggcagcctggagaggaacagagtgggcgtgagcagcaagccagacagcagccctgtgctgagccctggcaacaaggccaagccagatgaccacaggagccggcccggccggcctgctgactttgtgctgctgaaggagaggaccctggatgaggccccccggccccccaagaaggccatggactacagcagcagcagcgaggaggtggagagcagtgaagatgatgaggaggagggggagggcggccctgctgagggcagccgggacacccctgggggccgcagtgatggagacacagacagcgtgtccaccatggtggtgcatgatgtggaggagatcaccggcacccagcccccctatggaggcggcaccatggtggtgcagaggaccccagaggaggagaggaacctgctgcatgctgacagcaatggctacaccaacctgcctgatgtggtgcagcccagccacagccccacagagaacagcaagggccagagcccccccagcaaggatggcagcggggactaccagagccggggcctggtgaaggcccctgggaagagcagcttcaccatgtttgtggacctgggcatctaccagcccggcggcagcggggacagcatccccatcacagccctggtgggcggggagggcacccggctggaccagctgcagtatgatgtgaggaaaggatctgtggtgaatgtgaaccccaccaacacccgggcccacagcgagaccccagagatcaggaagtacaagaagcgcttcaacagcgagatcctgtgtgccgccctgtggggcgtgaacctgctggtgggcacagaaaatggcctgatgctgctggacaggagcggccagggcaaggtgtatggcctgattggaagaagacgcttccagcagatggatgtgctggagggcctgaacctgctgatcaccatcagcggcaagaggaacaagctgcgggtgtactacctgtcctggctgaggaacaagatcctgcacaatgaccctgaggtggagaagaagcagggctggaccaccgtgggggacatggagggctgcggccactacagagtggtgaagtatgaaagaatcaagttcctggtgattgccctgaagagctctgtggaggtgtatgcctgggcccccaagccctaccacaagttcatggccttcaagagctttgctgacctgccccaccggcccctgctggtggacctgactgtggaggagggccagaggctgaaggtgatctacggcagcagcgctggcttccacgctgtggatgtggacagcggcaacagctatgacatctacatccctgtgcacatccagagccagatcacccctcatgccatcatcttcctgcccaacacagatggcatggagatgctgctgtgctatgaagatgagggcgtgtatgtgaacacctacggccgcatcatcaaggatgtggtgctgcagtggggcgagatgcccacctctgtggcctacatctgcagcaaccagatcatgggctggggcgagaaggccatcgagatccgctctgtggagaccggccacctggatggagtcttcatgcacaagagggcccagaggctgaagttcctgtgtgaaagaaatgacaaggtgttctttgcctctgtgcgcagcggcggcagcagccaggtgtacttcatgaccctgaacagaaactgcatcatgaactggtag

SEQ ID NO: 246832 - DNA, 5016 bp, Artificial Sequence
  derived and/or modified sequence
agtgcgcggtcgctccgcgcctgcgcaggagaggtggtaggctcgggtggctggctccggggagatagcgcctgtcagtcggtgggtcggtcctcgcgccggccctccccctccccggtctccgggggaggcgcggtggagtccgcccccggggttctccgatgggggagaagcggcgacggcggcagtggagtaaccgagccggagcgtgagcggccccggtgccccgttccccacggaggccatgggcgacccagcccccgcccgcagcctggacgacatcgacctgtccgccctgcgggaccctgctgggatctttgagcttgtggaggtggtcggcaatggaacctacggacaggtgtacaagggtcggcatgtcaagacggggcagctggctgccatcaaggtcatggatgtcacggaggacgaggaggaagagatcaaacaggagatcaacatgctgaaaaagtactctcaccaccgcaacatcgccacctactacggagccttcatcaagaagagccccccgggaaacgatgaccagctctggctggtgatggagttctgtggtgctggttcagtgactgacctggtaaagaacacaaaaggcaacgccctgaaggaggactgtatcgcctatatctgcagggagatcctcaggggtctggcccatctccatgcccacaaggtgatccatcgagacatcaaggggcagaatgtgctgctgacagagaatgctgaggtcaagctagtggattttggggtgagtgctcagctggaccgcaccgtgggcagacggaacactttcattgggactccctactggatggctccagaggtcatcgcctgtgatgagaaccctgatgccacctatgattacaggagtgatatttggtctctaggaatcacagccatcgagatggcagagggagccccccctctgtgtgacatgcaccccatgcgagccctcttcctcattcctcggaaccctccgcccaggctcaagtccaagaagtggtctaagaagttcattgacttcattgacacatgtctcatcaagacttacctgagccgcccacccacggagcagctactgaagtttcccttcatccgggaccagcccacggagcggcaggtccgcatccagcttaaggaccacattgaccgatcccggaagaagcggggtgagaaagaggagacagaatatgagtacagcggcagcgaggaggaagatgacagccatggagaggaaggagagccaagctccatcatgaacgtgcctggagagtcgactctacgccgggagtttctccggctccagcaggaaaataagagcaactcagaggctttaaaacagcagcagcagctgcagcagcagcagcagcgagaccccgaggcacacatcaaacacctgctgcaccagcggcagcggcgcatagaggagcagaaggaggagcggcgccgcgtggaggagcaacagcggcgggagcgggagcagcggaagctgcaggagaaggagcagcagcggcggctggaggacatgcaggctctgcggcgggaggaggagcggcggcaggcggagcgcgagcaggaatacaagcggaagcagctggaggagcagcggcagtcagaacgtctccagaggcagctgcagcaggagcatgcctacctcaagtccctgcagcagcagcaacagcagcagcagcttcagaaacagcagcagcagcagctcctgcctggggacaggaagcccctgtaccattatggtcggggcatgaatcccgctgacaaaccagcctgggcccgagaggtagaagagagaacaaggatgaacaagcagcagaactctcccttggccaagagcaagccaggcagcacggggcctgagccccccatcccccaggcctccccagggcccccaggacccctttcccagactcctcctatgcagaggccggtggagccccaggagggaccgcacaagagcctggtggcacaccgggtcccactgaagccatatgcagcacctgtaccccgatcccagtccctgcaggaccagcccacccgaaacctggctgccttcccagcctcccatgaccccgaccctgccatccccgcacccactgccacgcccagtgcccgaggagctgtcatccgccagaattcagaccccacctctgaaggacctggccccagcccgaatcccccagcctgggtccgcccagataacgaggccccacccaaggtgcctcagaggacctcatctatcgccactgcccttaacaccagtggggccggagggtcccggccagcccaggcagtccgtgccagacctcgcagcaactccgcctggcaaatctatctgcaaaggcgggcagagcggggcaccccaaagcctccagggccccctgctcagccccctggcccgcccaacgcctctagtaaccccgacctcaggaggagcgaccctggctgggaacgctcggacagcgtccttccagcctctcacgggcacctcccccaggctggctcactggagcggaaccgcgtgggagtctcctccaaaccggacagctcccctgtgctctcccctgggaataaagccaagcccgacgaccaccgctcacggccaggccggcccgcagactttgtgttgctgaaagagcggactctggacgaggcccctcggcctcccaagaaggccatggactactcgtcgtccagcgaggaggtggaaagcagtgaggacgacgaggaggaaggcgaaggcgggccagcagaggggagcagagatacccctgggggccgcagcgatggggatacagacagcgtcagcaccatggtggtccacgacgtcgaggagatcaccgggacccagcccccatacgggggcggcaccatggtggtccagcgcacccctgaagaggagcggaacctgctgcatgctgacagcaatgggtacacaaacctgcctgacgtggtccagcccagccactcacccaccgagaacagcaaaggccaaagcccaccctcgaaggatgggagtggtgactaccagtctcgtgggctggtaaaggcccctggcaagagctcgttcacgatgtttgtggatctagggatctaccagcctggaggcagtggggacagcatccccatcacagccctagtgggtggagagggcactcggctcgaccagctgcagtacgacgtgaggaagggttctgtggtcaacgtgaatcccaccaacacccgggcccacagtgagacccctgagatccggaagtacaagaagcgattcaactccgagatcctctgtgcagccctttggggggtcaacctgctggtgggcacggagaacgggctgatgttgctggaccgaagtgggcagggcaaggtgtatggactcattgggcggcgacgcttccagcagatggatgtgctggaggggctcaacctgctcatcaccatctcagggaaaaggaacaaactgcgggtgtattacctgtcctggctccggaacaagattctgcacaatgacccagaagtggagaagaagcagggctggaccaccgtgggggacatggagggctgcgggcactaccgtgttgtgaaatacgagcggattaagttcctggtcatcgccctcaagagctccgtggaggtgtatgcctgggcccccaaaccctaccacaaattcatggccttcaagtcctttgccgacctcccccaccgccctctgctggtcgacctgacagtagaggaggggcagcggctcaaggtcatctatggctccagtgctggcttccatgctgtggatgtcgactcggggaacagctatgacatctacatccctgtgcacatccagagccagatcacgccccatgccatcatcttcctccccaacaccgacggcatggagatgctgctgtgctacgaggacgagggtgtctacgtcaacacgtacgggcgcatcattaaggatgtggtgctgcagtggggggagatgcctacttctgtggcctacatctgctccaaccagataatgggctggggtgagaaagccattgagatccgctctgtggagacgggccacctcgacggggtcttcatgcacaaacgagctcagaggctcaagttcctgtgtgagcggaatgacaaggtgttttttgcctcagtccgctctgggggcagcagccaagtttacttcatgactctgaaccgtaactgcatcatgaactggtgacggggccctgggctggggctgtcccacactggacccagctctccccctgcagccaggcttcccgggccgcccctctttcccctccctgggcttttgcttttactggtttgatttcactggagcctgctgggaacgtgacctctgacccctgatgctttcgtgatcacgtgaccatcctcttccccaacatgtcctcttcccaaaactgtgcctgtccccagcttctggggagggacacagcttccccttcccaggaattgagtgggcctagcccctccccccttttctccatttgagaggagagtgcttggggcttgaaccccttaccccactgctgctgactgggcagggccctggacccctttatttgcacgtcaggggagccggctccccccttgaatgtaccagaccctggggggggtcactgggccctagatttttggggggtcaccagccactccaggggcagggaccatttcttcattttctgaaagcactttaatgattccccttcccccaaactccagggaatggaggggggaccccgccagccaaaacattccccccattcccgacccccctctcctcttctagcccatgcccttccccggtggagggagggagcagggagccctcactctccacgccccttgcttgcatctgtatatagtgtgagcagcaagtaacccttctccctccccccccacccctcctcaatgtagtggccttggatatcctgtttgttaataaagacaattcaaccagctcccacc

SEQ ID NO: 246833 - DNA, 3999 bp, Artificial Sequence
  derived and/or modified sequence
atgggcgaccccgcccccgcccggagcctggacgacatcgacctgagcgccctgcgcgatcccgctggtatattcgagttggtggaggtcgtaggcaacggcacctatgggcaggtttacaagggccgccatgtaaaaactggacaactcgctgcaatcaaagtgatggacgtgacggaggacgaggaggaggagataaaacaggagatcaacatgttgaagaagtactcccaccacaggaatattgctacctattacggcgccttcataaaaaagtccccacctggcaatgacgatcaactctggctggttatggagttttgcggtgcaggctccgtgacggatctggtcaagaacactaaaggtaatgccctcaaagaggactgtatcgcttacatttgccgagagatcctccgagggcttgcccatctgcacgcccataaggttattcaccgggacattaaaggacagaacgtactacttactgagaatgcggaggtgaagctggtggactttggagtgtctgcccagctggacaggactgtcggccgacgcaatacctttatcggcacgccttactggatggctcctgaagtaatcgcctgcgatgagaatcctgacgcaacatatgactatcggtcggacatatggagcctaggaatcacggctattgaaatggccgagggagcaccccccctgtgtgacatgcatccaatgcgcgcactcttcctgatcccgcggaaccctcctcctcggctgaagtccaaaaagtggagcaagaagttcattgacttcattgacacttgtctgatcaaaacttatctaagccgtccaccaacggagcaattgcttaagtttcccttcatccgcgatcagccaacagagcggcaggtacggatccagcttaaagatcatatcgaccgcagccggaagaagaggggggagaaggaagaaaccgaatacgaatactcaggctcagaggaggaagatgactctcatggtgaggagggtgagccaagttcaattatgaacgttcctggagagagtacgctccgtcgggagttcctacggctgcaacaggaaaacaaatccaactccgaagcactgaagcaacagcaacaactccaacagcagcagcaaagagatccagaggcccatataaagcacctcctgcaccagcggcagagacgtattgaggaacagaaagaggagcgacgacgcgtggaagagcagcagcgacgggagagggagcagcggaagctgcaggaaaaagagcaacaaaggaggctcgaagatatgcaggctttgcgacgtgaggaagagcgacgacaggccgaaagggagcaagaatacaagcgcaagcagctggaagagcagagacagagtgaacggctgcagcgccagttgcagcaggagcatgcatatctcaaaagtctccagcagcagcagcagcagcagcagcttcagaagcagcaacagcaacagctcttgcctggggaccgcaaaccgttatatcactatggtagggggatgaatcccgccgacaagcctgcatgggcacgggaggttgaggagcggacacgaatgaacaagcagcagaacagccccttggctaaaagcaagccaggcagcaccggccctgaaccaccaattcctcaggcatcccctggcccccctggaccactgtcacagactcctccgatgcagagacccgttgagccacaggaagggccccataagtctctggtggcccaccgcgttcccctgaaaccttacgcagccccagttccgcgctcccagtcccttcaggaccaacccacccggaacctggccgctttccctgcctcccacgaccctgatcccgctattcctgccccaacagcaacaccttccgcacggggagcagtgattagacagaattctgatccaacaagcgaagggcccggcccttcacctaatccccccgcctgggtcagacctgacaatgaggcaccgcccaaggttccgcagagaacatccagtatcgcaacagcgctcaacaccagcggggcgggaggttctagaccggcccaggccgttagggcccgtcccagaagtaactccgcctggcagatttacttgcagagacgggccgagaggggaaccccaaagccgcccggcccgcctgctcaaccccccggcccgccgaatgcatcttctaatcccgacctgaggcggagcgaccccggctgggagcggtctgacagcgtcctgccggcgtctcacggtcatctgccacaggccggctctcttgaacggaaccgtgtgggggtttcaagcaaaccagatagtagtccggtgctcagccctggcaacaaagcgaagcctgacgatcatagaagtcggcctggaaggccagcggatttcgtccttcttaaagagcgcactctggatgaggctcctcggcctcctaagaaagcaatggattactccagctcctccgaggaagtggagtcgtccgaagatgatgaggaggagggagaaggtggtcctgccgaaggtagcagagacacccccggggggagatccgacggggacactgatagcgtgtccaccatggtcgtgcacgacgtcgaggaaattactgggacacagcccccctacggaggcggcaccatggtcgtacagcggacgcctgaagaggagagaaatcttctgcacgctgattctaacggatacactaatttaccagacgtggtgcagcctagccactcaccgactgaaaattctaagggtcagtcccctccgtctaaagatggcagtggcgactatcaatctagggggcttgttaaagccccaggaaaatcaagctttactatgttcgtggacctaggaatatatcagccgggaggttccggcgactcgatccccattaccgccctcgtagggggagagggaacccgactcgatcaactacagtacgatgtgcgcaagggtagtgtcgtcaatgtaaatcctaccaacacaagggctcacagcgagacaccagagattaggaaatacaaaaagcggttcaactcagagatcttatgtgctgctctctggggcgtcaaccttttagtgggcactgaaaatgggctgatgctgctcgatcgctcgggtcagggcaaggtgtacggtctcattggaaggcggcgtttccagcagatggacgtgctggagggcctcaatctgctgatcacaatatcaggcaagcgcaataaacttcgggtatattacctgagctggttgcggaacaagattcttcacaatgatcccgaagtggagaaaaaacagggctggacgacagttggggacatggaaggatgcggtcactatagggtagtgaagtatgagcgaatcaaattcttagttattgccttaaagtcttcggtggaggtttatgcatgggcccccaaaccttatcacaagtttatggcctttaagtcgttcgctgatctccctcaccgcccgctcctcgtcgatctgactgttgaggagggtcagcgcctgaaggtgatctacgggtcgtcagcaggcttccacgctgtggatgtggatagcggaaacagttacgacatttatatccccgtccatatccaaagccagattaccccacacgctataatctttctgcccaacacagatggaatggaaatgctcttgtgttatgaggatgaaggcgtgtacgtaaatacctacggccggatcattaaagacgtggtgctccagtggggggaaatgcctacttcagtggcatacatttgctcaaaccagatcatgggctggggcgaaaaggccatagaaatcagatcagttgaaacaggccacctggacggagtgtttatgcacaagagggcgcagcggcttaaattcctgtgcgagaggaatgataaggtgttttttgccagtgtcaggtctggtggcagcagccaggtctattttatgactctaaatagaaactgtataatgaactggtag

SEQ ID NO: 246834 - DNA, 3999 bp, Artificial Sequence
  derived and/or modified sequence
atgggcgacccggctcccgctcgctcactggacgatatcgacttgagtgcactacgcgatcccgctggaatctttgagctggtggaggtggtggggaacggaacatacggccaggtctacaaaggacgacacgtgaagacggggcagcttgccgctataaaggtgatggatgtgacagaggacgaggaggaagagatcaaacaagaaatcaatatgcttaaaaaatatagccatcaccgaaacattgccacatattacggggcatttatcaagaaaagccctccaggcaatgacgaccaactctggctcgtgatggaattttgtggtgcgggtagcgtcaccgacctggtgaaaaacactaaaggaaacgctctgaaagaggactgcattgcatatatttgtcgcgagatcctgcggggtctcgcacatttgcatgcccacaaagtcatccatagggacattaagggccagaatgtcctattgacagagaatgccgaagtaaagcttgtcgatttcggcgtttccgcacagctggacaggacagttggtcggagaaacacttttatcggaacaccttattggatggctcccgaggtgatcgcatgtgatgaaaacccagatgcgacctatgactaccggtctgacatctggtcactgggaatcaccgctatcgagatggctgagggtgccccacctctctgcgatatgcatccaatgagggctctgtttctcatacctcgcaatcccccacctcggctgaagagcaagaaatggagtaaaaagtttatcgacttcatcgacacctgtctgataaaaacttacttgtctcggccacctactgagcagctcctgaaattcccctttatccgggaccaacctactgaacgtcaggttaggatccagctgaaagaccacattgaccgctcacggaagaaacggggagaaaaagaggagaccgagtacgaatacagcgggagtgaagaggaagatgattcgcatggcgaggagggggaaccttcctctatcatgaatgtccctggcgagagtaccctgcggagagaatttctccggctccagcaggagaacaaatccaacagcgaagcactgaagcagcagcagcaacttcagcagcagcaacagcgggaccctgaggcgcacatcaaacacttgcttcatcagcggcaacgacggatcgaggagcagaaagaggagcggcgaagagtcgaagagcaacagagacgcgagagggagcagagaaagctgcaggagaaggagcagcagcggagattggaagacatgcaagcactgcggagagaggaagagaggagacaggcagaacgggagcaggagtacaagaggaagcagctagaggaacagcgccagtcggaacgcctccagaggcagctccagcaggagcacgcctacctgaaatcactgcaacaacagcaacagcagcagcagctgcagaagcagcagcagcaacagttgctacctggcgaccgcaaaccgctttaccactatggccgaggaatgaatccggcagataagccagcctgggcaagggaggtggaggagcgcaccaggatgaataagcagcagaattctcccttggctaagtctaagcccggttcgaccggcccagagccccctattccccaggcgagtcccggaccacccggacctctatctcagacaccaccgatgcagagaccagtcgagccccaagagggaccacacaagtctctggttgcccaccgcgttccattaaaaccctatgcagccccagtgccccgatctcaatctctccaagaccagccgactagaaatcttgccgcattcccagcctcccacgatcctgatcccgctatcccagcacccaccgcaactccgtctgctaggggagctgtgatcagacagaattcggaccctacaagcgagggtccgggtccaagtcccaatccaccggcttgggttagaccagacaatgaggctccaccgaaggttccccaacggacctcctctattgcaaccgccttaaacacctccggcgcaggaggctcccgacctgcccaggccgtgcgggcaagacctaggagtaacagtgcatggcagatctatctgcagcgccgagctgagcggggtaccccaaagcctcccggtcctccagctcagcccccaggacccccaaatgcatcctctaaccccgatctgagacgctcagaccctggctgggagagatccgactctgtgctgcccgcttcccatggacatttacctcaggccggtagcctggaaagaaatcgggtaggcgtgtcatctaaacctgactcatccccagtgctatcacctggcaacaaagcaaagcccgatgatcacagatcacggcctggaagacccgcagacttcgtcctgctaaaggagagaacactcgacgaggctcccagacccccaaaaaaagccatggactattcctccagcagtgaagaggtagagagcagtgaagatgatgaagaagagggggagggtggtcctgctgagggcagccgcgacaccccagggggaagatcagacggcgacactgacagtgtgtcgaccatggtggtacatgacgtggaggagataacaggcacacaaccaccctatggaggcggaactatggtggttcaacgcaccccggaggaagaacggaacttactccacgcagattctaacggctacaccaaccttcccgacgtcgtgcagccaagtcactcacctactgagaacagtaagggtcagtctcctcccagtaaagatggaagcggcgactatcaatctcggggtttggtaaaggcacctgggaagtccagcttcaccatgtttgtcgacctaggaatttatcagcctggaggctctggcgactccatccctatcacagccctggtgggtggtgaaggcaccagactcgaccagctgcaatacgacgttcggaagggcagcgtcgtcaacgtgaaccctactaatacacgcgcacatagcgaaacgcctgaaataagaaaatataagaaacggtttaactctgagatcctgtgtgcagccttatggggagtgaaccttctcgtcggaacggagaacggcttgatgctactggaccggtctggtcaaggaaaagtgtacggcctgattgggagaagacggtttcagcagatggatgtccttgagggactaaatcttctgattactattagtggaaagcggaataagctgcgggtgtactatctcagttggcttagaaataaaatcctacacaatgaccccgaggtagaaaagaagcagggctggactacagtcggcgatatggagggatgcgggcattacagggtggtcaaatatgagcggattaagttcctcgtcatcgctctcaaatctagcgtggaagtgtatgcctgggctcccaagccttatcataaatttatggcctttaaaagtttcgccgatcttcctcatagacctttactggtcgatctgaccgtggaagagggtcaacggctcaaagtgatttacggctcatctgccggatttcatgccgttgatgtagactctgggaactcttatgatatatatattcctgtgcatattcagagtcagatcacaccacacgccattatcttcctgcctaacacagatggaatggaaatgctgttatgctatgaagatgagggtgtctacgtgaacacctacggaagaatcataaaggatgtggtcctgcagtggggagaaatgcccactagcgtggcctacatctgctctaaccagattatgggatggggtgagaaggctatcgaaatccgcagcgtggaaacgggacacctagatggggtctttatgcacaaacgtgctcagaggttaaaattcctctgcgagagaaacgacaaggtcttttttgcctccgtcaggtccggagggtcttcccaggtttattttatgacactgaaccgaaactgtattatgaactggtag

SEQ ID NO: 246835 - DNA, 3999 bp, Artificial Sequence
  derived and/or modified sequence
atgggcgaccccgcccccgccagaagcctggacgacatcgacctgagcgccctgagagaccccgccggcatcttcgagctggtggaggtggtgggcaacggcacctacggccaggtgtacaagggcagacacgtgaagaccggccagctggccgccatcaaggtgatggacgtgaccgaggacgaggaggaggagatcaagcaggagatcaacatgctgaagaagtacagccaccacagaaacatcgccacctactacggcgccttcatcaagaagagcccccccggcaacgacgaccagctgtggctggtgatggagttctgcggcgccggcagcgtgaccgacctggtgaagaacaccaagggcaacgccctgaaggaggactgcatcgcctacatctgcagagagatcctgagaggcctggcccacctgcacgcccacaaggtgatccacagagacatcaagggccagaacgtgctgctgaccgagaacgccgaggtgaagctggtggacttcggcgtgagcgcccagctggacagaaccgtgggcagaagaaacaccttcatcggcaccccctactggatggcccccgaggtgatcgcctgcgacgagaaccccgacgccacctacgactacagaagcgacatctggagcctgggcatcaccgccatcgagatggccgagggcgccccccccctgtgcgacatgcaccccatgagagccctgttcctgatccccagaaaccccccccccagactgaagagcaagaagtggagcaagaagttcatcgacttcatcgacacctgcctgatcaagacctacctgagcagaccccccaccgagcagctgctgaagttccccttcatcagagaccagcccaccgagagacaggtgagaatccagctgaaggaccacatcgacagaagcagaaagaagagaggcgagaaggaggagaccgagtacgagtacagcggcagcgaggaggaggacgacagccacggcgaggagggcgagcccagcagcatcatgaacgtgcccggcgagagcaccctgagaagagagttcctgagactgcagcaggagaacaagagcaacagcgaggccctgaagcagcagcagcagctgcagcagcagcagcagagagaccccgaggcccacatcaagcacctgctgcaccagagacagagaagaatcgaggagcagaaggaggagagaagaagagtggaggagcagcagagaagagagagagagcagagaaagctgcaggagaaggagcagcagagaagactggaggacatgcaggccctgagaagagaggaggagagaagacaggccgagagagagcaggagtacaagagaaagcagctggaggagcagagacagagcgagagactgcagagacagctgcagcaggagcacgcctacctgaagagcctgcagcagcagcagcagcagcagcagctgcagaagcagcagcagcagcagctgctgcccggcgacagaaagcccctgtaccactacggcagaggcatgaaccccgccgacaagcccgcctgggccagagaggtggaggagagaaccagaatgaacaagcagcagaacagccccctggccaagagcaagcccggcagcaccggccccgagccccccatcccccaggccagccccggcccccccggccccctgagccagaccccccccatgcagagacccgtggagccccaggagggcccccacaagagcctggtggcccacagagtgcccctgaagccctacgccgcccccgtgcccagaagccagagcctgcaggaccagcccaccagaaacctggccgccttccccgccagccacgaccccgaccccgccatccccgcccccaccgccacccccagcgccagaggcgccgtgatcagacagaacagcgaccccaccagcgagggccccggccccagccccaacccccccgcctgggtgagacccgacaacgaggccccccccaaggtgccccagagaaccagcagcatcgccaccgccctgaacaccagcggcgccggcggcagcagacccgcccaggccgtgagagccagacccagaagcaacagcgcctggcagatctacctgcagagaagagccgagagaggcacccccaagccccccggcccccccgcccagccccccggcccccccaacgccagcagcaaccccgacctgagaagaagcgaccccggctgggagagaagcgacagcgtgctgcccgccagccacggccacctgccccaggccggcagcctggagagaaacagagtgggcgtgagcagcaagcccgacagcagccccgtgctgagccccggcaacaaggccaagcccgacgaccacagaagcagacccggcagacccgccgacttcgtgctgctgaaggagagaaccctggacgaggcccccagaccccccaagaaggccatggactacagcagcagcagcgaggaggtggagagcagcgaggacgacgaggaggagggcgagggcggccccgccgagggcagcagagacacccccggcggcagaagcgacggcgacaccgacagcgtgagcaccatggtggtgcacgacgtggaggagatcaccggcacccagcccccctacggcggcggcaccatggtggtgcagagaacccccgaggaggagagaaacctgctgcacgccgacagcaacggctacaccaacctgcccgacgtggtgcagcccagccacagccccaccgagaacagcaagggccagagcccccccagcaaggacggcagcggcgactaccagagcagaggcctggtgaaggcccccggcaagagcagcttcaccatgttcgtggacctgggcatctaccagcccggcggcagcggcgacagcatccccatcaccgccctggtgggcggcgagggcaccagactggaccagctgcagtacgacgtgagaaagggcagcgtggtgaacgtgaaccccaccaacaccagagcccacagcgagacccccgagatcagaaagtacaagaagagattcaacagcgagatcctgtgcgccgccctgtggggcgtgaacctgctggtgggcaccgagaacggcctgatgctgctggacagaagcggccagggcaaggtgtacggcctgatcggcagaagaagattccagcagatggacgtgctggagggcctgaacctgctgatcaccatcagcggcaagagaaacaagctgagagtgtactacctgagctggctgagaaacaagatcctgcacaacgaccccgaggtggagaagaagcagggctggaccaccgtgggcgacatggagggctgcggccactacagagtggtgaagtacgagagaatcaagttcctggtgatcgccctgaagagcagcgtggaggtgtacgcctgggcccccaagccctaccacaagttcatggccttcaagagcttcgccgacctgccccacagacccctgctggtggacctgaccgtggaggagggccagagactgaaggtgatctacggcagcagcgccggcttccacgccgtggacgtggacagcggcaacagctacgacatctacatccccgtgcacatccagagccagatcaccccccacgccatcatcttcctgcccaacaccgacggcatggagatgctgctgtgctacgaggacgagggcgtgtacgtgaacacctacggcagaatcatcaaggacgtggtgctgcagtggggcgagatgcccaccagcgtggcctacatctgcagcaaccagatcatgggctggggcgagaaggccatcgagatcagaagcgtggagaccggccacctggacggcgtgttcatgcacaagagagcccagagactgaagttcctgtgcgagagaaacgacaaggtgttcttcgccagcgtgagaagcggcggcagcagccaggtgtacttcatgaccctgaacagaaactgcatcatgaactggtag

SEQ ID NO: 246836 - protein, 373 aa, Artificial Sequence
  derived and/or modified sequence
MEDLDQSPLVSSSDSPPRPQPAFKYQFVREPEDEEEEEEEEEEDEDEDLEELEVLERKPAAGLSAAPVPTAPAAGAPLMDFGNDFVPPAPRGPLPAAPPVAPERQPSWDPSPVSSTVPAPSPLSAAAVSPSKLPEDDEPPARPPPPPPASVSPQAEPVWTPPAPAPAAPPSTPAAPKRRGSSGSVVVDLLYWRDIKKTGVVFGASLFLLLSLTVFSIVSVTAYIALALLSVTISFRIYKGVIQAIQKSDEGHPFRAYLESEVAISEELVQKYSNSALGHVNCTIKELRRLFLVDDLVDSLKFAVLMWVFTYVGALFNGLTLLILALISLFSVPVIYERHQAQIDHYLGLANKNVKDAMAKIQAKIPGLKRKAE

SEQ ID NO: 246837 - protein, 345 aa, Artificial Sequence [sequence omitted]

SEQ ID NO: 246838 - DNA, 1122 bp, Artificial Sequence
  derived and/or modified sequence
atggaggacctagaccagtctcccctggtgtcttcctctgatagccctccccgccctcagcctgcctttaaatatcagtttgttcgcgaacctgaggacgaggaagaggaagaagaggaagaagaagaagacgaagatgaggacctggaagagctggaagtactagagaggaagcctgctgctggcctttcagccgcacctgttcccactgccccggcagccggggcccctctgatggacttcggcaatgacttcgtgccccctgccccaaggggtcctcttcctgccgccccccccgtggctcctgaacgacagccctcctgggatccaagccctgtgagttcaaccgtcccagcccccagcccactgtcagccgcggctgtctccccctcaaaactaccagaggacgatgagcctccagcccggcctccacccccacccccagctagtgtgtccccgcaggctgagcctgtgtggacacctccagcacctgcacctgctgcgcccccctccactccggcagccccaaaacgtcgtgggtcctcaggatctgttgtggttgatctcctatactggcgcgacataaagaaaacgggagtggtttttggtgcctccttattcctgcttttatcgctcactgtgttcagcatcgtgtccgtgacggcctatatcgctttagcattgctgtccgtgacaatctcattccggatctataagggcgtgatccaggccatccaaaagtctgacgagggccaccccttccgcgcctacctggaaagcgaggttgcaatctccgaggaactggtccaaaaatacagcaattctgcccttggccacgtgaattgcaccatcaaggagctccgtcggcttttcttagtcgacgaccttgtcgactcactgaagttcgcagtgcttatgtgggtatttacgtacgttggcgccttatttaatgggctcactctgcttattctggccctcattagtttattcagcgtccccgtgatctacgagcgccatcaggctcaaatcgaccattacctcgggctagcgaacaagaacgtgaaggacgccatggccaagatccaagcgaaaatccccggtcttaaacgcaaggctgaatag

SEQ ID NO: 246839 - DNA, 1038 bp, Artificial Sequence
  derived and/or modified sequence
atggagcccgaggacgaagaggaggaggaagaggaggaggaggaggacgaagatgaggacctggaagagctggaagtcctggagcgaaaacccgctgctgggctgagcgctgcacccgtcccaactgcaccagctgccggcgctccgctgatggatttcgggaatgattttgtgccgccagcaccccggggacccctgccagccgcccctcctgtggcacctgagcggcagccatcctgggatcctagtcctgtcagttccacagtgccagccccttccccactgagtgcagctgcagtcagtcctagcaaactgcccgaagatgacgagccccccgcaaggccccccccaccaccacccgcttctgtgtcacctcaggcagaacccgtctggactcctcccgcacccgcccctgccgccccccctagcactcctgccgccccaaagcgcaggggcagttcgggcagtgtggtcgttgaccttctatactggcgtgatattaaaaaaacaggcgtagtcttcggtgcgagcttgtttttactgttaagcctgacggtgttttccatcgtgtctgttaccgcctatatcgcgcttgcattgttatccgtgacgattagcttccgtatatataagggcgtgatccaagctatacaaaagtcagatgagggccatcctttccgggcctatctggagagcgaagtggctatttctgaggaactcgtccagaagtacagcaatagcgccctgggacatgtaaattgcaccatcaaggaacttcgaagactgttcctcgtggatgatctggtggactcgctcaagtttgccgtactaatgtgggttttcacttacgtgggggccctgtttaacgggctgaccctgcttatattggcactaatctccctctttagcgtccctgtcatctatgaaagacaccaagctcagatagatcactatctgggcttagcaaataaaaatgtgaaagacgccatggcgaagatccaggccaagattcccggattgaagagaaaggcggagtag

SEQ ID NO: 246840 - DNA, 1122 bp, Artificial Sequence
  derived and/or modified sequence
atggaggacctggaccagagccccctggtgagcagcagtgacagccccccccggccccagcctgccttcaagtaccagtttgtgcgggagccagaagatgaggaggaggaggaggaggaggaggaggaggatgaagatgaggacctggaggagctggaggtgctggagaggaagccagctgctggcctgtctgctgcccctgtgcccacagccccagctgctggggcccccctgatggactttggaaatgactttgtgcccccagccccccggggccccctgcctgctgcccctcctgtggcccctgagcggcagcccagctgggaccccagccctgtgagcagcacagtgcctgcccccagccccctgtctgctgctgctgtgagccccagcaagctgcctgaagatgatgagcccccagcccggcccccacctcctcctccagcctctgtgagcccccaggccgagcctgtgtggaccccaccagccccagccccagctgccccacccagcaccccagctgcccccaagaggcggggcagcagcggctctgtggtggtggacctgctgtactggagggacatcaagaagacaggagtggtgtttggagccagcctcttcctgctgctgagcctgactgtgttcagcatcgtgtctgtgacagcctacatcgccctggccctgctgtctgtgaccatctccttccgcatctacaagggcgtcatccaggccatccagaagagtgatgagggccaccccttccgggcctacctggagagcgaggtggccatcagcgaggagctggtgcagaagtacagcaacagcgccctgggccacgtgaactgcaccatcaaggagctgcggcggctcttcctggtggatgacctggtggacagcctgaagtttgctgtgctgatgtgggtgttcacctacgtgggcgccctcttcaacggcctgaccctgctgatcctggccctgatcagcctcttctctgtgcctgtgatctatgaaagacaccaggcccagattgaccactacctgggcctggccaacaagaatgtgaaggatgccatggccaagatccaggccaagatccctggcctgaagaggaaggccgagtag

SEQ ID NO: 246841 - DNA, 1038 bp, Artificial Sequence
  derived and/or modified sequence
atggagccagaagatgaggaggaggaggaggaggaggaggaggaggatgaagatgaggacctggaggagctggaggtgctggagaggaagccagctgctggcctgtctgctgcccctgtgcccacagccccagctgctggggcccccctgatggactttggaaatgactttgtgcccccagccccccggggccccctgcctgctgcccctcctgtggcccctgagcggcagcccagctgggaccccagccctgtgagcagcacagtgcctgcccccagccccctgtctgctgctgctgtgagccccagcaagctgcctgaagatgatgagcccccagcccggcccccacctcctcctccagcctctgtgagcccccaggccgagcctgtgtggaccccaccagccccagccccagctgccccacccagcaccccagctgcccccaagaggcggggcagcagcggctctgtggtggtggacctgctgtactggagggacatcaagaagacaggagtggtgtttggagccagcctcttcctgctgctgagcctgactgtgttcagcatcgtgtctgtgacagcctacatcgccctggccctgctgtctgtgaccatctccttccgcatctacaagggcgtcatccaggccatccagaagagtgatgagggccaccccttccgggcctacctggagagcgaggtggccatcagcgaggagctggtgcagaagtacagcaacagcgccctgggccacgtgaactgcaccatcaaggagctgcggcggctcttcctggtggatgacctggtggacagcctgaagtttgctgtgctgatgtgggtgttcacctacgtgggcgccctcttcaacggcctgaccctgctgatcctggccctgatcagcctcttctctgtgcctgtgatctatgaaagacaccaggcccagattgaccactacctgggcctggccaacaagaatgtgaaggatgccatggccaagatccaggccaagatccctggcctgaagaggaaggccgagtag

SEQ ID NO: 246842 - DNA, 1122 bp, Artificial Sequence
  derived and/or modified sequence
atggaggacctggaccagagccccctggtgagcagcagcgacagccctcctaggccccagccggctttcaaataccagtttgtccgcgagcccgaggacgaggaggaagaagaggaagaggaggaggaggacgaagacgaggatctggaagaactggaggtgcttgagcggaagcccgccgccgggctgtccgcagcccccgtgcctacagctccagctgcaggcgctcctttgatggattttggaaatgatttcgtgccaccggcgccaagaggacccttgcccgccgctccccctgtggctcccgaacgtcagcccagctgggaccccagtccagtctcctccactgtgccggccccttctccgctaagtgcagctgccgttagcccgtcaaaacttcccgaggatgatgagccccccgctaggcctcctccacctccccctgcatcagtgagtcctcaggccgagcctgtgtggacaccccctgccccagctccagccgctcccccaagcacccccgcagcccccaaaaggcgaggcagctctggttcagttgtggtagatcttctttactggcgggacatcaagaagaccggagttgtgttcggggcctccctatttcttctgctcagcctgaccgtattctccatcgtcagcgttacagcttatattgccctagcgctgctaagcgtgaccatttccttccgaatctataagggcgtgatccaggccatacagaagtctgatgaaggacacccgtttagggcttacctcgagtctgaggtggcgataagcgaggagctcgtgcagaaatatagcaatagcgccctcggtcacgttaactgtacaattaaagaactgaggcgtcttttcctggtggacgacctggtggatagtctcaaatttgccgtgttaatgtgggtgttcacatacgtgggagccctgttcaacggtctgacactcctcatattggcactcatctccctgttcagcgtgcctgtgatttacgagcggcaccaggcacagatagaccactacctggggctcgccaataaaaatgtgaaagatgctatggccaaaatacaggccaagatacccggactgaagagaaaagccgagtag

SEQ ID NO: 246843 - DNA, 1038 bp, Artificial Sequence
  derived and/or modified sequence
atggagcccgaggacgaggaggaggaggaggaggaggaggaggaggacgaggatgaggatctagaggagctggaggtcctcgaacgaaagccagctgccggcctgtcggcagcgccagtgcccacggcccccgctgcgggggccccattgatggacttcggtaatgactttgtcccacccgccccccgcggccccctgcccgccgccccaccagtcgctcctgaaaggcaaccgtcatgggaccctagtccagtttcctctacagtcccagccccgagccccctgtctgccgccgcagtcagtccatctaagctgcctgaggacgacgaaccacctgcgcgcccaccaccccccccaccggccagtgtttccccacaagcagaacctgtgtggactcctcctgcacctgctcccgctgctccgcccagcacaccggccgcccctaagcgtcggggttcatcgggttctgtggttgtggacctgctctattggcgcgacatcaagaaaaccggcgtggtctttggtgcatccctgttcctgctcctgtctctaaccgtatttagcatagtgtccgtcaccgcctacatcgcactagcactgctcagtgtcacaatatccttcaggatttataagggggtcatccaggccatccagaagagcgacgaaggtcatccattccgagcctacctggaatctgaagttgctatttccgaggaactggtccagaaatatagcaactcagccttaggtcatgtgaattgcactattaaggagctccggagattgtttctggtcgatgacctagtggacagcctgaaatttgcagtgctcatgtgggtctttacctacgtcggagctctgtttaacggattaacacttctaatcctggcgctcatatcccttttttcagtgcctgtaatttacgagaggcaccaggctcaaatagatcactatctggggctggccaataagaacgttaaggatgctatggcaaaaatacaagctaagatccctggcctgaagagaaaagcggagtag

SEQ ID NO: 246844 - DNA, 1122 bp, Artificial Sequence
  derived and/or modified sequence
atggaggacctggaccagtcaccgctggtgagctcttcggattcgcctccaaggccgcagccagccttcaagtaccagtttgtgcgagagccagaggacgaggaggaagaggaggaggaagaagaggaggacgaagatgaggacttagaggagctcgaagtgctggagcgtaaaccggctgccggtctttctgctgccccagtgcccactgcccctgcagcaggtgccccactgatggactttggaaatgatttcgtaccaccagcgccacggggacccctcccagcggctcccccagtagcaccggagaggcagcccagttgggatccttctccagtgagctctaccgtgccagcgccttctcctctgtcggcagccgcagtctcacccagtaagctccccgaagacgacgagcctccagcacgcccacctcctcctccacctgccagcgtgagtccacaggcagagccagtgtggacccctcccgctccagctccggctgctcctccctcaaccccagcagctcccaaacgcagaggtagcagtgggtctgttgtggtggaccttctctactggagggatattaagaagacaggcgtggttttcggtgccagtcttttccttctgctatcactgaccgttttctccattgtgagtgtgactgcatatatcgcccttgccctactgtcagttacgatatcatttagaatttataaaggggttatccaggccatccagaagagcgacgagggacaccccttccgggcataccttgagtctgaggtggcaattagtgaagagctagtgcagaagtactcaaactcagccctgggccatgtcaactgtacaattaaagaactccgcagattattcctggtggatgacctggttgattccctcaaatttgcggtgctcatgtgggtgttcacttatgtaggtgcactgttcaatggccttacactgctgatcctggctttgataagccttttcagtgtccccgtgatctacgagaggcatcaggcacagatcgaccactatctggggctcgcaaacaaaaacgttaaagacgcaatggcgaagattcaggcaaaaatccctggccttaaacgcaaggctgagtag

SEQ ID NO: 246845 - DNA, 1038 bp, Artificial Sequence
  derived and/or modified sequence
atggagcccgaggatgaggaggaggaagaagaagaggaggaggaagatgaggacgaagacctggaagagctggaggtactggagcgaaagcctgcagctgggctcagcgccgcacctgttccgacagctcccgctgcaggcgcaccgttgatggacttcggcaatgatttcgtccctcctgccccacgcggtccccttcctgcagctcctcctgtcgccccagaacgccagccttcctgggacccttctcccgttagttcaactgtgcccgcacccagcccactctcggcggctgcagtgtctccctcaaaactccctgaagacgacgagccccctgcaaggccccctcctccaccaccagctagtgtgtcacctcaagcagagcccgtatggacacccccagcccctgcccctgcagcaccaccctccacccccgctgcacccaagcggagaggttcctctggatctgtagtcgtggatctcctatattggcgcgacatcaagaagactggagttgtgtttggggctagccttttcctcctgctgtctcttacggtcttcagcatcgtctcggtgactgcctacatagccctcgccctcctctccgtcactattagtttccggatctataaaggcgtcatccaggccatccaaaagtccgatgagggccacccatttcgcgcatacttggagtcagaggtggctatctctgaggaattggtgcagaaatacagtaacagcgcgctcggccatgtgaattgtacaatcaaggagttgaggcgacttttcttggtagacgatctagtggacagcctgaaatttgccgtactgatgtgggtcttcacttatgtgggcgctctgttcaatggactgacacttctgattctggcactgatctccctgttcagtgttcctgtgatatatgaacgacaccaggcccagatcgaccattatttgggactcgctaataagaacgtaaaggacgcgatggccaaaatccaggcaaagattccaggtctgaagcgtaaggcagaatag

SEQ ID NO: 246846 - DNA, 2333 bp, Artificial Sequence
  derived and/or modified sequence
gctggcctcactcctagctcatctgggcggcggcggcaagtggggacagggcgggtggcgcatcaccggcgcggaggcaggaggagcagtctcattgttccgggagccgtcaccacagtaggtccctcggctcagtcggcccagcccctctcagtcctccccaacccccacaaccgcccgcggctctgagacgcggccccggcggcggcggcagcagctgcagcatcatctccaccctccagccatggaagacctggaccagtctcctctggtctcgtcctcggacagcccaccccggccgcagcccgcgttcaagtaccagttcgtgagggagcccgaggacgaggaggaagaagaggaggaggaagaggaggacgaggacgaagacctggaggagctggaggtgctggagaggaagcccgccgccgggctgtccgcggccccagtgcccaccgcccctgccgccggcgcgcccctgatggacttcggaaatgacttcgtgccgccggcgccccggggacccctgccggccgctccccccgtcgccccggagcggcagccgtcttgggacccgagcccggtgtcgtcgaccgtgcccgcgccatccccgctgtctgctgccgcagtctcgccctccaagctccctgaggacgacgagcctccggcccggcctccccctcctcccccggccagcgtgagcccccaggcagagcccgtgtggaccccgccagccccggctcccgccgcgcccccctccaccccggccgcgcccaagcgcaggggctcctcgggctcagtggttgttgacctcctgtactggagagacattaagaagactggagtggtgtttggtgccagcctattcctgctgctttcattgacagtattcagcattgtgagcgtaacagcctacattgccttggccctgctctctgtgaccatcagctttaggatatacaagggtgtgatccaagctatccagaaatcagatgaaggccacccattcagggcatatctggaatctgaagttgctatatctgaggagttggttcagaagtacagtaattctgctcttggtcatgtgaactgcacgataaaggaactcaggcgcctcttcttagttgatgatttagttgattctctgaagtttgcagtgttgatgtgggtatttacctatgttggtgccttgtttaatggtctgacactactgattttggctctcatttcactcttcagtgttcctgttatttatgaacggcatcaggcacagatagatcattatctaggacttgcaaataagaatgttaaagatgctatggctaaaatccaagcaaaaatccctggattgaagcgcaaagctgaatgaaaacgcccaaaataattagtaggagttcatctttaaaggggatattcatttgattatacgggggagggtcagggaagaacgaaccttgacgttgcagtgcagtttcacagatcgttgttagatctttatttttagccatgcactgttgtgaggaaaaattacctgtcttgactgccatgtgttcatcatcttaagtattgtaagctgctatgtatggatttaaaccgtaatcatatctttttcctatctatctgaggcactggtggaataaaaaacctgtatattttactttgttgcagatagtcttgccgcatcttggcaagttgcagagatggtggagctagaaaaaaaaaaaaaaaagcccttttcagtttgtgcactgtgtatggtccgtgtagattgatgcagattttctgaaatgaaatgtttgtttagacgagatcataccggtaaagcaggaatgacaaagcttgcttttctggtatgttctaggtgtattgtgacttttactgttatattaattgccaatataagtaaatatagattatatatgtatagtgtttcacaaagcttagacctttaccttccagccaccccacagtgcttgatatttcagagtcagtcattggttatacatgtgtagttccaaagcacataagctagaagaagaaatatttctaggagcactaccatctgttttcaacatgaaatgccacacacatagaactccaacatcaatttcattgcacagactgactgtagttaattttgtcacagaatctatggactgaatctaatgcttccaaaaatgttgtttgtttgcaaatatcaaacattgttatgcaagaaattattaattacaaaatgaagatttataccattgtggtttaagctgtactgaactaaatctgtggaatgcattgtgaactgtaaaagcaaagtatcaataaagcttatagacttaaaa

SEQ ID NO: 246847 - DNA, 1456 bp, Artificial Sequence
  derived and/or modified sequence
cacaaccgcccgcggctctgagacgcggccccggcggcggcggcagcagctgcagcatcatctccaccctccagccatggagcccgaggacgaggaggaagaagaggaggaggaagaggaggacgaggacgaagacctggaggagctggaggtgctggagaggaagcccgccgccgggctgtccgcggccccagtgcccaccgcccctgccgccggcgcgcccctgatggacttcggaaatgacttcgtgccgccggcgccccggggacccctgccggccgctccccccgtcgccccggagcggcagccgtcttgggacccgagcccggtgtcgtcgaccgtgcccgcgccatccccgctgtctgctgccgcagtctcgccctccaagctccctgaggacgacgagcctccggcccggcctccccctcctcccccggccagcgtgagcccccaggcagagcccgtgtggaccccgccagccccggctcccgccgcgcccccctccaccccggccgcgcccaagcgcaggggctcctcgggctcagtggttgttgacctcctgtactggagagacattaagaagactggagtggtgtttggtgccagcctattcctgctgctttcattgacagtattcagcattgtgagcgtaacagcctacattgccttggccctgctctctgtgaccatcagctttaggatatacaagggtgtgatccaagctatccagaaatcagatgaaggccacccattcagggcatatctggaatctgaagttgctatatctgaggagttggttcagaagtacagtaattctgctcttggtcatgtgaactgcacgataaaggaactcaggcgcctcttcttagttgatgatttagttgattctctgaagtttgcagtgttgatgtgggtatttacctatgttggtgccttgtttaatggtctgacactactgattttggctctcatttcactcttcagtgttcctgttatttatgaacggcatcaggcacagatagatcattatctaggacttgcaaataagaatgttaaagatgctatggctaaaatccaagcaaaaatccctggattgaagcgcaaagctgaatgaaaacgcccaaaataattagtaggagttcatctttaaaggggatattcatttgattatacgggggagggtcagggaagaacgaaccttgacgttgcagtgcagtttcacagatcgttgttagatctttatttttagccatgcactgttgtgaggaaaaattacctgtcttgactgccatgtgttcatcatcttaagtattgtaagctgctatgtatggatttaaaccgtaatcatatctttttcctatctatctgaggcactggtggaataaaaaacctgtatattttactttgttgcagatagtcttgccgcatcttggcaagttgcagagatggtggagct

SEQ ID NO: 246848 - DNA, 1122 bp, Artificial Sequence
  derived and/or modified sequence
atggaggacctggaccagagccccctggtgagcagcagcgacagcccccccagaccccagcccgccttcaagtaccagttcgtgagagagcccgaggacgaggaggaggaggaggaggaggaggaggaggacgaggacgaggacctggaggagctggaggtgctggagagaaagcccgccgccggcctgagcgccgcccccgtgcccaccgcccccgccgccggcgcccccctgatggacttcggcaacgacttcgtgccccccgcccccagaggccccctgcccgccgccccccccgtggcccccgagagacagcccagctgggaccccagccccgtgagcagcaccgtgcccgcccccagccccctgagcgccgccgccgtgagccccagcaagctgcccgaggacgacgagccccccgccagaccccccccccccccccccgccagcgtgagcccccaggccgagcccgtgtggaccccccccgcccccgcccccgccgccccccccagcacccccgccgcccccaagagaagaggcagcagcggcagcgtggtggtggacctgctgtactggagagacatcaagaagaccggcgtggtgttcggcgccagcctgttcctgctgctgagcctgaccgtgttcagcatcgtgagcgtgaccgcctacatcgccctggccctgctgagcgtgaccatcagcttcagaatctacaagggcgtgatccaggccatccagaagagcgacgagggccaccccttcagagcctacctggagagcgaggtggccatcagcgaggagctggtgcagaagtacagcaacagcgccctgggccacgtgaactgcaccatcaaggagctgagaagactgttcctggtggacgacctggtggacagcctgaagttcgccgtgctgatgtgggtgttcacctacgtgggcgccctgttcaacggcctgaccctgctgatcctggccctgatcagcctgttcagcgtgcccgtgatctacgagagacaccaggcccagatcgaccactacctgggcctggccaacaagaacgtgaaggacgccatggccaagatccaggccaagatccccggcctgaagagaaaggccgagtag

SEQ ID NO: 246849 - DNA, 1038 bp, Artificial Sequence
  derived and/or modified sequence
atggagcccgaggacgaggaggaggaggaggaggaggaggaggaggacgaggacgaggacctggaggagctggaggtgctggagagaaagcccgccgccggcctgagcgccgcccccgtgcccaccgcccccgccgccggcgcccccctgatggacttcggcaacgacttcgtgccccccgcccccagaggccccctgcccgccgccccccccgtggcccccgagagacagcccagctgggaccccagccccgtgagcagcaccgtgcccgcccccagccccctgagcgccgccgccgtgagccccagcaagctgcccgaggacgacgagccccccgccagaccccccccccccccccccgccagcgtgagcccccaggccgagcccgtgtggaccccccccgcccccgcccccgccgccccccccagcacccccgccgcccccaagagaagaggcagcagcggcagcgtggtggtggacctgctgtactggagagacatcaagaagaccggcgtggtgttcggcgccagcctgttcctgctgctgagcctgaccgtgttcagcatcgtgagcgtgaccgcctacatcgccctggccctgctgagcgtgaccatcagcttcagaatctacaagggcgtgatccaggccatccagaagagcgacgagggccaccccttcagagcctacctggagagcgaggtggccatcagcgaggagctggtgcagaagtacagcaacagcgccctgggccacgtgaactgcaccatcaaggagctgagaagactgttcctggtggacgacctggtggacagcctgaagttcgccgtgctgatgtgggtgttcacctacgtgggcgccctgttcaacggcctgaccctgctgatcctggccctgatcagcctgttcagcgtgcccgtgatctacgagagacaccaggcccagatcgaccactacctgggcctggccaacaagaacgtgaaggacgccatggccaagatccaggccaagatccccggcctgaagagaaaggccgagtag

SEQ ID NO: 246850 - protein, 553 aa, Artificial Sequence
  derived and/or modified sequence
SDYMIIKKKSNYEVLEKDVGLKRFFPKSLLDSVKAKTLRKLIQQTFRQFANLNREESILKFFEILSPVYRFDKECFKCALGSSWIISVELAIGPEEGISYLTDKGCNPTHLADFTQVQTIQYSNSEDKDRKGMLQLKIAGAPEPLTVTAPSLTIAENMADLIDGYCRLVNGTSQSFIIRPQKEGERALPSIPKLANSEKQGMRTHAVSVSETDDYAEIIDEEDTYTMPSTRDYEIQRERIELGRCIGEGQFGDVHQGIYMSPENPALAVAIKTCKNCTSDSVREKFLQEACHYTSLHWNWCRYISDPNVDCPDPRNAEVTMRQFDHPHIVKLIGVITENPVWIIMELCTLGELRSFLQVRKYSLDLASLILYAYQLSTALAYLESKRFVHRDIAARNVLVSSNDCVKLGDFGLSRYMEDSTYYKASKGKLPIKWMAPESINFRRFTSASDVWMFGVCMWEILMHGVKPFQGVKNNDVIGRIENGERLPMPPNCPPTLYSLMTKCWAYDPSRRPRFTELKAQLSFQNPAQMLPASGRLPNQPCPERENYSFATF

SEQ ID NO: 246851 - protein, 680 aa, Artificial Sequence
  derived and/or modified sequence
MKYQEVRCLTSFNISVSFPAETDDYAEIIDEEDTYTMPSTRDYEIQRERIELGRCIGEGQFGDVHQGIYMSPENPALAVAIKTCKNCTSDSVREKFLQEALTMRQFDHPHIVKLIGVITENPVWIIMELCTLGELRSFLQVRKYSLDLASLILYAYQLSTALAYLESKRFVHRDIAARNVLVSSNDCVKLGDFGLSRYMEDSTYYKASKGKLPIKWMAPESINFRRFTSASDVWMFGVCMWEILMHGVKPFQGVKNNDVIGRIENGERLPMPPNCPPTLYSLMTKCWAYDPSRRPRFTELKAQLSTILEEEKAQQEERMRMESRRQATVSWDSGGSDEAPPKPSRPGYPSPRSSEGFYPSPQHMVQTNHYQVSGYPGSHGITAMAGSIYPGQASLLDQTDSWNHRPQEIAMWQPNVEDSTVLDLRGIGQVLPTHLMEERLIRQQQEMEEDQRWLEKEERFLKPDVRLSRGSIDREDGSLQGPIGNQHIYQPVGKPDPAAPPKKPPRPGAPGHLGSLASLSSPADSYNEGVKLQPQEISPPPTANLDRSNDKVYENVTGLVKAVIEMSSKIQPAPPEEYVPMVKEVGLALRTLLATVDETIPLLPASTHREIEMAQKLLNSDLGELINKMKLAQQYVMTSLQQEYKKQMLTAAHALAVDAKNLLDVIDQARLKMLGQTRPH

SEQ ID NO: 246852 - protein, 156 aa, Artificial Sequence
  derived and/or modified sequence
MAAAYLDPNLNHTPNSSTKTHLGTGMERSPGAMERVLKVFHYFESNSEPTTWASIIRHGDATDVRGIIQKIVDSHKVKHVACYGFRLSHLRSEEVHWLHVDMGVSSVREKYELAHPPEEWKYELRIRYLPKGFLNQFTEDKPTLNFFYQQVKSDYM

SEQ ID NO: 246853 - protein, 1052 aa, Artificial Sequence
  derived and/or modified sequence
MAAAYLDPNLNHTPNSSTKTHLGTGMERSPGAMERVLKVFHYFESNSEPTTWASIIRHGDATDVRGIIQKIVDSHKVKHVACYGFRLSHLRSEEVHWLHVDMGVSSVREKYELAHPPEEWKYELRIRYLPKGFLNQFTEDKPTLNFFYQQVKSDYMLEIADQVDQEIALKLGCLEIRRSYWEMRGNALEKKSNYEVLEKDVGLKRFFPKSLLDSVKAKTLRKLIQQTFRQFANLNREESILKFFEILSPVYRFDKECFKCALGSSWIISVELAIGPEEGISYLTDKGCNPTHLADFTQVQTIQYSNSEDKDRKGMLQLKIAGAPEPLTVTAPSLTIAENMADLIDGYCRLVNGTSQSFIIRPQKEGERALPSIPKLANSEKQGMRTHAVSVSETDDYAEIIDEEDTYTMPSTRDYEIQRERIELGRCIGEGQFGDVHQGIYMSPENPALAVAIKTCKNCTSDSVREKFLQEALTMRQFDHPHIVKLIGVITENPVWIIMELCTLGELRSFLQVRKYSLDLASLILYAYQLSTALAYLESKRFVHRDIAARNVLVSSNDCVKLGDFGLSRYMEDSTYYKASKGKLPIKWMAPESINFRRFTSASDVWMFGVCMWEILMHGVKPFQGVKNNDVIGRIENGERLPMPPNCPPTLYSLMTKCWAYDPSRRPRFTELKAQLSTILEEEKAQQEERMRMESRRQATVSWDSGGSDEAPPKPSRPGYPSPRSSEGFYPSPQHMVQTNHYQVSGYPGSHGITAMAGSIYPGQASLLDQTDSWNHRPQEIAMWQPNVEDSTVLDLRGIGQVLPTHLMEERLIRQQQEMEEDQRWLEKEERFLKPDVRLSRGSIDREDGSLQGPIGNQHIYQPVGKPDPAAPPKKPPRPGAPGHLGSLASLSSPADSYNEGVKLQPQEISPPPTANLDRSNDKVYENVTGLVKAVIEMSSKIQPAPPEEYVPMVKEVGLALRTLLATVDETIPLLPASTHREIEMAQKLLNSDLGELINKMKLAQQYVMTSLQQEYKKQMLTAAHALAVDAKNLLDVIDQARLKMLGQTRPH

SEQ ID NO: 246854 - DNA, 1089 bp, Artificial Sequence
  derived and/or modified sequence
atgagaatggagagcagaagacaggccaccgtgagctgggacagcggcggcagcgacgaggccccccccaagcccagcagacccggctaccccagccccagaagcagcgagggcttctaccccagcccccagcacatggtgcagaccaaccactaccaggtgagcggctaccccggcagccacggcatcaccgccatggccggcagcatctaccccggccaggccagcctgctggaccagaccgacagctggaaccacagaccccaggagatcgccatgtggcagcccaacgtggaggacagcaccgtgctggacctgagaggcatcggccaggtgctgcccacccacctgatggaggagagactgatcagacagcagcaggagatggaggaggaccagagatggctggagaaggaggagagattcctgaagcccgacgtgagactgagcagaggcagcatcgacagagaggacggcagcctgcagggccccatcggcaaccagcacatctaccagcccgtgggcaagcccgaccccgccgccccccccaagaagccccccagacccggcgcccccggccacctgggcagcctggccagcctgagcagccccgccgacagctacaacgagggcgtgaagctgcagccccaggagatcagccccccccccaccgccaacctggacagaagcaacgacaaggtgtacgagaacgtgaccggcctggtgaaggccgtgatcgagatgagcagcaagatccagcccgccccccccgaggagtacgtgcccatggtgaaggaggtgggcctggccctgagaaccctgctggccaccgtggacgagaccatccccctgctgcccgccagcacccacagagagatcgagatggcccagaagctgctgaacagcgacctgggcgagctgatcaacaagatgaagctggcccagcagtacgtgatgaccagcctgcagcaggagtacaagaagcagatgctgaccgccgcccacgccctggccgtggacgccaagaacctgctggacgtgatcgaccaggccagactgaagatgctgggccagaccagaccccactag

SEQ ID NO: 246855 - DNA, 354 bp, Artificial Sequence
  derived and/or modified sequence
atggccgccgcctacctggaccccaacctgaaccacacccccaacagcagcaccaagacccacctgggcaccggcatggagagaagccccggcgccatggagagagtgctgaaggtgttccactacttcgagagcaacagcgagcccaccacctgggccagcatcatcagacacggcgacgccaccgacgtgagaggcatcatccagaagatcgtggacagccacaaggtgaagcacgtggcctgctacggcttcagactgagccacctgagaagcgaggaggtgcactggctgcacgtggacatgggcgtgagcagcgtgagagagaagtacgagctggcccaccccccctag

SEQ ID NO: 246856 - DNA, 471 bp, Artificial Sequence
  derived and/or modified sequence
atggccgccgcctacctggaccccaacctgaaccacacccccaacagcagcaccaagacccacctgggcaccggcatggagagaagccccggcgccatggagagagtgctgaaggtgttccactacttcgagagcaacagcgagcccaccacctgggccagcatcatcagacacggcgacgccaccgacgtgagaggcatcatccagaagatcgtggacagccacaaggtgaagcacgtggcctgctacggcttcagactgagccacctgagaagcgaggaggtgcactggctgcacgtggacatgggcgtgagcagcgtgagagagaagtacgagctggcccacccccccgaggagtggaagtacgagctgagaatcagatacctgcccaagggcttcctgaaccagttcaccgaggacaagcccaccctgaacttcttctaccagcaggtgaagagcgactacatgtag

SEQ ID NO: 246857 - DNA, 324 bp, Artificial Sequence
  derived and/or modified sequence
atggccgccgcctacctggaccccaacctgaaccacacccccaacagcagcaccaagacccacctgggcaccggcatggagagaagccccggcgccatggagagagtgctgaaggtgttccactacttcgagagcaacagcgagcccaccacctgggccagcatcatcagacacggcgacgccaccgacgtgagaggcatcatccagaagatcgtggacagccacaaggtgaagcacgtggcctgctacggcttcagactgagccacctgagaagcgaggaggtgcactggctgcacgtggacatgggcgtgagcagcgtgtag

SEQ ID NO: 246858 - DNA, 360 bp, Artificial Sequence
  derived and/or modified sequence
atggccgccgcctacctggaccccaacctgaaccacacccccaacagcagcaccaagacccacctgggcaccggcatggagagaagccccggcgccatggagagagtgctgaaggtgttccactacttcgagagcaacagcgagcccaccacctgggccagcatcatcagacacggcgacgccaccgacgtgagaggcatcatccagaagatcgtggacagccacaaggtgaagcacgtggcctgctacggcttcagactgagccacctgagaagcgaggaggtgcactggctgcacgtggacatgggcgtgagcagcgtgagagagaagtacgagctggcccacccccccgaggagtag

SEQ ID NO: 246859 - DNA, 363 bp, Artificial Sequence
  derived and/or modified sequence
atggccgccgcctacctggaccccaacctgaaccacacccccaacagcagcaccaagacccacctgggcaccggcatggagagaagccccggcgccatggagagagtgctgaaggtgttccactacttcgagagcaacagcgagcccaccacctgggccagcatcatcagacacggcgacgccaccgacgtgagaggcatcatccagaagatcgtggacagccacaaggtgaagcacgtggcctgctacggcttcagactgagccacctgagaagcgaggaggtgcactggctgcacgtggacatgggcgtgagcagcgtgagagagaagtacgagctggcccacccccccgaggagtggtag

SEQ ID NO: 246860 - DNA, 1089 bp, Artificial Sequence
  derived and/or modified sequence
atgcgcatggaatctagacgccaagcaaccgtgagctgggattctgggggaagtgatgaagctcctcccaagccttcgaggcccggctatccttcgcctcgctccagtgaaggtttctaccctagcccccagcacatggtccagactaatcattatcaggtatctggatatcccggatctcatgggatcactgccatggctggctctatctacccagggcaggcaagcctcttagatcaaacggattcctggaatcatcgccctcaggaaatcgccatgtggcagcccaatgtggaggactccacagttctggaccttagaggtatcggtcaggtgctgccaactcatctgatggaagaacgtttgatcaggcagcagcaggaaatggaggaggatcaacgctggttagagaaggaagagaggttcctgaaacccgacgtaaggctctcccgcgggagtattgatagggaagatgggagcctgcagggacccatcgggaatcagcatatataccaaccggtgggcaaacctgaccctgccgcgccaccgaaaaagcctccccggcctggcgctccagggcatctcgggagtttagctagcctgtcttcccccgcggacagctataatgagggcgtaaagctgcagccccaggaaatcagcccaccaccaaccgccaacctggatagatccaatgataaggtctacgagaacgttacaggcctggttaaagcagtcatcgagatgagcagcaaaatacagcccgccccccccgaggaatacgttcctatggtgaaggaagttggtctcgccttaaggactctactcgcgacagtggatgaaaccatcccattgttacccgcaagcacccaccgcgaaatcgagatggcccagaagctactgaattccgatctcggggaactgattaacaaaatgaagttggcccaacagtacgtgatgacgtcacttcagcaggagtataagaaacagatgctcacggcggctcacgctctcgctgtcgacgcaaaaaatcttttagacgtgattgaccaagcaagacttaagatgttaggacaaacgagacctcactag

SEQ ID NO: 246861 - DNA, 354 bp, Artificial Sequence
  derived and/or modified sequence
atggccgctgcttacctggatcccaatctcaatcataccccaaactcttcaaccaaaacacatttaggtacggggatggaaagatcaccgggggcaatggagcgcgtgcttaaagtcttccactacttcgagtctaattctgagcctaccacctgggcctccatcattaggcatggcgacgcaaccgatgtgaggggtatcatccagaagatagtggactctcacaaggttaaacacgtggcttgctatggttttcgcctgtcccacctcaggtcggaggaagtgcactggctccacgtagatatgggggtatcctcagtgcgtgaaaagtacgaactggcacacccaccatag

SEQ ID NO: 246862 - DNA, 354 bp, Artificial Sequence
  derived and/or modified sequence
atggccgccgcctatctggacccaaacctcaaccacacccctaactcttcaacaaaaacccacctggggactggcatggaacgcagccctggggccatggaacgtgtgctgaaggtgtttcactatttcgaatccaattccgaacctacaacctgggcttccattatccggcatggtgatgccactgatgttcgggggatcatccagaaaatcgtcgacagccacaaagtaaagcacgtggcctgctacggctttcgcttatctcaccttcgatcagaagaagtgcactggttgcatgtggacatgggagtaagctccgtcagggaaaaatacgaactcgctcaccctccctag

SEQ ID NO: 246863 - DNA, 471 bp, Artificial Sequence
  derived and/or modified sequence
atggccgccgcttaccttgacccaaacctcaaccacaccccgaacagctctaccaaaacccatcttggcaccgggatggagagatcccctggcgcaatggaaagagtgctcaaagtttttcactatttcgagagtaacagcgagcctacaacatgggcctctataattcgccacggcgatgccacagatgtcagagggatcatacagaagatagtcgactcacataaagtgaagcacgtggcatgctatggctttagactaagccacctgagatctgaagaggtgcactggctccacgtggacatgggcgtcagctcagttcgggagaaatatgagctggctcatcccccagaggaatggaagtatgagctcaggatacgctatctccccaaaggattcctgaaccaatttacagaagataagcctacactgaacttcttctaccagcaggtaaagtccgactatatgtag

SEQ ID NO: 246864 - DNA, 324 bp, Artificial Sequence
  derived and/or modified sequence
atggccgctgcttatttagaccctaatctaaatcacactcccaatagcagcactaagacacacctcggcacgggtatggaacgcagccctggggctatggagagagtactgaaagtctttcattattttgagagcaacagcgagccaacgacatgggccagtatcatcaggcatggggacgccacagatgtgaggggaattattcagaagattgtcgactcgcacaaagtgaagcatgtggcctgttatggatttagattatcacacttgagatccgaagaagtgcactggcttcatgtggatatgggggttagctctgtgtag

SEQ ID NO: 246865 - DNA, 360 bp, Artificial Sequence
  derived and/or modified sequence
atggccgctgcttatctcgaccccaatctgaaccacactccaaacagtagcaccaagactcatctgggaaccggaatggaacgttccccaggggcaatggagagagtactcaaagtgtttcactattttgaatctaatagtgagcctactacatgggccagcattattcgccacggtgacgccactgatgtaagagggattatccagaaaattgttgacagtcataaggtgaaacacgtcgcctgttacggattcaggttaagccatctgagatctgaagaggtgcactggctgcacgtcgatatgggggtctcatcagtacgtgaaaaatacgagttggctcatccaccagaggaatag

SEQ ID NO: 246866 - DNA, 363 bp, Artificial Sequence
  derived and/or modified sequence
atggccgctgcttacctggaccccaacctcaaccacacaccgaattcttctacaaaaacccacctggggaccgggatggaacgctccccaggggctatggagcgtgttttaaaagtctttcactattttgaatcaaactccgaacccaccacctgggcatcaataatccggcacggcgacgctacggacgtcaggggcatcatccagaagatcgtagactcgcacaaagtgaaacacgtggcctgttacggcttcaggcttagccatctccgaagtgaagaggtgcactggctccatgtcgatatgggggtctcctcagtcagggagaagtacgagctggcacatcctccagaagaatggtag

SEQ ID NO: 246867 - DNA, 1089 bp, Artificial Sequence
  derived and/or modified sequence
atgaggatggagagccggcggcaggccaccgtgtcctgggacagcggcggcagtgatgaggccccacccaagcccagccggcccggctaccccagccccaggagcagcgagggcttctaccccagcccccagcacatggtgcagaccaaccactaccaggtgtctggctacccaggcagccacggcatcacagccatggccggcagcatctacccaggccaggccagcctgctggaccagacagacagctggaaccaccggccccaggagatcgccatgtggcagcccaacgtggaggacagcacagtgctggacctgcggggcatcggccaggtgctgcccacccacctgatggaggagcggctcatccggcagcagcaggagatggaggaggaccagcgctggctggagaaggaggagcgcttcctgaagccagatgtgcggctgagccggggcagcattgacagagaagatggcagcctgcagggccccatcggcaaccagcacatctaccagcctgtgggcaagccagaccctgctgccccacccaagaagccacccaggcctggggcccctggccacctgggcagcctggccagcctgagcagccctgctgacagctacaatgaaggagtgaagctgcagccccaggagatcagccccccacccacagccaacctggacaggagcaatgacaaggtgtatgaaaatgtgacaggcctggtgaaggccgtcatcgagatgagcagcaagatccagcctgcccctcctgaggagtatgtgcccatggtgaaggaggtgggcctggccctgcggaccctgctggccaccgtggatgagaccatccccctgctgcctgccagcacccaccgggagattgagatggcccagaagctgctgaacagcgacctgggggagctgatcaacaagatgaagctggcccagcagtatgtgatgaccagcctgcagcaggagtacaagaagcagatgctgacagctgcccacgccctggccgtggatgccaagaacctgctggatgtgattgaccaggcccggctgaagatgctgggccagacccggccccactag

SEQ ID NO: 246868 - DNA, 354 bp, Artificial Sequence
  derived and/or modified sequence
atggctgctgcctacctggaccccaacctgaaccacacccccaacagcagcaccaagacccacctgggcaccggcatggagaggagccctggggccatggagcgggtgctgaaggtgttccactactttgagagcaacagcgagcccaccacctgggccagcatcatcagacatggagatgccacagatgtgcggggcatcatccagaagatcgtggacagccacaaggtgaagcacgtggcctgctacggcttccggctgagccacctgcggtctgaggaggtgcactggctgcacgtggacatgggcgtgtcctctgtgcgggagaagtatgagctggcccaccccccatag

SEQ ID NO: 246869 - DNA, 471 bp, Artificial Sequence
  derived and/or modified sequence
atggctgctgcctacctggaccccaacctgaaccacacccccaacagcagcaccaagacccacctgggcaccggcatggagaggagccctggggccatggagcgggtgctgaaggtgttccactactttgagagcaacagcgagcccaccacctgggccagcatcatcagacatggagatgccacagatgtgcggggcatcatccagaagatcgtggacagccacaaggtgaagcacgtggcctgctacggcttccggctgagccacctgcggtctgaggaggtgcactggctgcacgtggacatgggcgtgtcctctgtgcgggagaagtatgagctggcccaccccccagaggagtggaagtatgagctgcgcatccgctacctgcccaagggcttcctgaaccagttcacagaggacaagcccaccctgaacttcttctaccagcaggtgaagagtgactacatgtag

SEQ ID NO: 246870 - DNA, 324 bp, Artificial Sequence
  derived and/or modified sequence
atggctgctgcctacctggaccccaacctgaaccacacccccaacagcagcaccaagacccacctgggcaccggcatggagaggagccctggggccatggagcgggtgctgaaggtgttccactactttgagagcaacagcgagcccaccacctgggccagcatcatcagacatggagatgccacagatgtgcggggcatcatccagaagatcgtggacagccacaaggtgaagcacgtggcctgctacggcttccggctgagccacctgcggtctgaggaggtgcactggctgcacgtggacatgggcgtgtcctctgtgtag

SEQ ID NO: 246871 - DNA, 360 bp, Artificial Sequence
  derived and/or modified sequence
atggctgctgcctacctggaccccaacctgaaccacacccccaacagcagcaccaagacccacctgggcaccggcatggagaggagccctggggccatggagcgggtgctgaaggtgttccactactttgagagcaacagcgagcccaccacctgggccagcatcatcagacatggagatgccacagatgtgcggggcatcatccagaagatcgtggacagccacaaggtgaagcacgtggcctgctacggcttccggctgagccacctgcggtctgaggaggtgcactggctgcacgtggacatgggcgtgtcctctgtgcgggagaagtatgagctggcccaccccccagaggagtag

SEQ ID NO: 246872 - DNA, 363 bp, Artificial Sequence
  derived and/or modified sequence
atggctgctgcctacctggaccccaacctgaaccacacccccaacagcagcaccaagacccacctgggcaccggcatggagaggagccctggggccatggagcgggtgctgaaggtgttccactactttgagagcaacagcgagcccaccacctgggccagcatcatcagacatggagatgccacagatgtgcggggcatcatccagaagatcgtggacagccacaaggtgaagcacgtggcctgctacggcttccggctgagccacctgcggtctgaggaggtgcactggctgcacgtggacatgggcgtgtcctctgtgcgggagaagtatgagctggcccaccccccagaggagtggtag

SEQ ID NO: 246873 - DNA, 1089 bp, Artificial Sequence
  derived and/or modified sequence
atgcggatggagagccggcggcaggccaccgtgagctgggacagcggtggcagcgacgaagcgccaccaaaaccgagccgcccaggctaccctagtccccgttcatccgaaggtttctatcctagtccacagcatatggtgcagactaatcactatcaggtcagcggatacccaggaagccacggcattacagccatggctggatctatctaccccggacaagcaagcctactagatcagactgattcttggaatcacaggccccaggaaattgctatgtggcagccaaacgtggaggacagtaccgtgcttgaccttcgcggcattgggcaggtgctaccaacacatttaatggaagaaaggcttatacggcagcagcaagaaatggaagaagaccagcggtggctggagaaagaagaacgattccttaaaccagatgtgcggttatcacggggcagcatcgatcgtgaagatggcagccttcagggccctattggcaatcagcacatctaccagcctgtgggcaagcccgacccagctgccccaccaaaaaaaccgcctcggccaggcgcgcctgggcatttgggatctcttgcatccctgagtagccctgccgactcatataacgaaggcgtgaaattgcaaccgcaggaaataagtcctcccccgaccgccaatctcgatcgcagcaacgataaggtgtacgagaacgtaaccggactagttaaggccgtgattgagatgtcttctaaaattcagcccgctcccccagaagagtacgtgccaatggttaaggaagttgggctggcattgaggaccctgcttgcaactgtcgatgagactatcccgctgctgccggcatcaacccacagagagattgaaatggcccagaagctgctgaatagtgatctaggcgagttgattaataagatgaagttggcccagcagtacgtcatgacgagccttcaacaggagtataaaaaacagatgctgacggctgcccatgcgctggccgtagatgctaaaaacctgctggacgtaatagaccaggcccgcctgaaaatgcttggacagacaaggccccattag

SEQ ID NO: 246874 - DNA, 354 bp, Artificial Sequence
  derived and/or modified sequence
atggccgccgcctacctggaccccaacctgaaccacacccccaacagctccactaagacacacctgggaacgggcatggaaagaagccccggagccatggaaagggtgttgaaagttttccattactttgagtcgaacagcgagcctacaacctgggccagcatcatccggcacggagatgcgaccgatgtgaggggcatcattcagaagattgtcgactcacacaaagtcaagcacgtggcgtgctatggtttccgactctctcatctgagatcagaggaggtccattggctgcacgttgatatgggggttagttcagtgcgcgagaaatacgagcttgctcacccaccttag

SEQ ID NO: 246875 - DNA, 354 bp, Artificial Sequence
  derived and/or modified sequence
atggccgccgcctacctggaccccaacctgaaccacacccccaactcgagtaccaaaactcaccttggcactggcatggaaaggtcacccggtgcaatggaaagggttctgaaggtgtttcactactttgagagcaattcagaaccaacaacatgggccagcatcataagacacggcgacgcaaccgacgtgcgcggaattatccagaagatcgtagattcccacaaggttaagcatgtggcctgctacggattcaggctgtctcatttgaggagcgaggaagttcattggctgcacgtggatatgggagtgagttctgtacgcgaaaagtatgaattggcccaccctccttag

SEQ ID NO: 246876 - DNA, 471 bp, Artificial Sequence
  derived and/or modified sequence
atggccgccgcctacctggaccccaacctgaaccacacccccaactccagcactaaaacccacctcgggaccgggatggaaagatcccccggcgctatggaacgggtgcttaaggtcttccactacttcgaatcgaactctgaaccaacaacctgggctagcatcattcgccacggggacgccaccgacgtaaggggaatcatacaaaagatagtggacagtcacaaggtcaagcacgtggcatgctacggatttagacttagccacttaaggagtgaggaagttcactggctccatgttgacatgggagtctccagcgtcagggaaaaatatgagctggcacaccctcctgaggagtggaagtacgagctgagaatacgctacttgcccaaaggttttcttaatcagttcaccgaagataaacccacactgaactttttttaccaacaagtcaagagcgactatatgtag

SEQ ID NO: 246877 - DNA, 324 bp, Artificial Sequence
  derived and/or modified sequence
atggccgccgcctacctggaccccaacctgaaccacacccccaactcctccactaaaacgcacctcggaaccggcatggaaagatctcccggtgcgatggaaagggtgctgaaggtgtttcactatttcgagtcaaactccgaaccaacaacatgggcatctattatacgccatggggacgcgaccgatgtgcggggtattatccagaaaattgtggacagccataaggtgaaacatgtggcttgctacggcttccgtctgtcccatctacgatctgaagaggtgcattggttacacgttgatatgggagtgtcgagcgtttag

SEQ ID NO: 246878 - DNA, 360 bp, Artificial Sequence
  derived and/or modified sequence
atggccgccgcctacctggaccccaacctgaaccacacccccaactcttctaccaagactcatttaggaaccggcatggaacgatcccctggagcgatggagcgggtcctgaaggtgttccactactttgaaagtaactccgaacctaccacttgggcctccatcattcggcatggagatgccacggatgtcaggggaattatccagaaaatcgtagacagccacaaagtcaaacacgtggcctgctacggtttcaggttgagccacctgcgatccgaagaagtgcattggctccacgtggacatgggcgttagttctgtgagagaaaaatatgagctggctcatccccctgaggagtag

SEQ ID NO: 246879 - DNA, 363 bp, Artificial Sequence
  derived and/or modified sequence
atggccgccgcctacctggaccccaacctgaaccacacccccaactcatctactaagacccacttaggaactgggatggaacggtcaccaggagcaatggaacgcgtgcttaaggtcttccattattttgagtccaactccgaaccaactacctgggctagcataattaggcatggcgacgccaccgacgtccgcgggattattcagaagatcgtagatagtcacaaagtgaaacatgtcgcctgttacggattcaggctgagccatctcaggtctgaggaggtgcactggttacatgttgatatgggggtttcatccgtgcgcgagaagtacgagctggcacatccccctgaggaatggtag

SEQ ID NO: 246880 - DNA, 1089 bp, Artificial Sequence
  derived and/or modified sequence
atgagaatggaatcaagacgtcaagccactgtgtcctgggacagcgggggtagtgacgaagcccctcctaagccctcgcgcccaggataccctagtccaaggtcatcagagggcttttacccatccccccagcatatggtgcagacaaaccattatcaggtgtccggctaccccggttctcatggcattacagctatggccggaagtatttaccccggacaggcaagtttgctggatcaaaccgattcctggaaccatcgcccacaggagatcgcaatgtggcagcccaatgtggaagactcaacagtgctggatctgcgcggaatcgggcaagttctgcctacccacctgatggaggaaaggctaattcgccagcaacaggagatggaagaggaccagcgttggctcgagaaagaggagaggttcctgaagcctgacgtgagactgagtcggggaagtatcgacagggaggacggatctttacaggggccaatagggaaccagcacatatatcagcccgtaggcaaacccgatcctgctgccccaccaaagaagcctcccaggccgggagcacctgggcacctgggaagtttggcttccttgtctagtcccgctgattcctacaacgagggagtgaagttgcagcctcaggagatctccccccctccaaccgcgaatcttgacagaagtaatgacaaagtgtacgagaacgttaccggcctggtaaaagctgtcattgaaatgtcaagcaaaattcaacctgctcctcccgaagagtatgtgccaatggtgaaggaagtcggcctcgctcttagaactcttctggccacagttgacgagactatcccactcctgcccgcatccacccaccgggaaattgagatggcacagaaactgctgaacagcgatctgggagagcttattaacaagatgaagctggcacagcaatatgtcatgacatccctgcagcaggagtacaaaaagcagatgctcacagcagcgcacgccctcgctgtggacgcaaagaatctgctggatgtcatcgatcaggcgcgtctgaaaatgctgggccagacacgcccacattag

SEQ ID NO: 246881 - DNA, 354 bp, Artificial Sequence
  derived and/or modified sequence
atggcagctgcatatctggatcccaacctcaaccacactccaaatagctctaccaagacccacctaggcaccggtatggaaagaagtcctggcgcaatggagagggtgctcaaggtgttccactacttcgaatctaatagcgagcctaccacatgggctagcatcattaggcacggcgacgcaaccgacgtgagggggatcattcagaagattgtggactctcacaaagtgaaacacgtcgcatgctatggattccggctctcccatctcagaagcgaggaggtccattggctacatgtcgacatgggagtgagttctgtgcgggaaaagtacgagctggctcaccctccctag

SEQ ID NO: 246882 - DNA, 354 bp, Artificial Sequence
  derived and/or modified sequence
atggccgctgcgtacctcgatcctaacctgaaccacacaccgaatagctctacgaaaacccatctagggactgggatggaaaggtcaccgggagccatggaacgggtgttaaaggtcttccattatttcgagtctaatagcgagcctaccacatgggcttccataatacggcatggcgacgctaccgatgtccgtggcataatccaaaagatcgtggactcacacaaagtgaaacatgtcgcgtgctatggcttcaggctcagccatctcagatccgaagaggttcactggcttcacgtcgacatgggagtctcatccgtgcgcgagaagtatgaacttgcccatcctccatag

SEQ ID NO: 246883 - DNA, 471 bp, Artificial Sequence
  derived and/or modified sequence
atggctgccgcatacctggacccgaatctcaaccataccccaaattcgtccaccaaaacgcacctgggtacgggcatggagcgtagccccggagccatggaacgggtgctgaaagtcttccactacttcgaatcaaattctgagcccactacttgggccagcattattcggcatggggatgccaccgacgtcagaggaataattcagaaaattgtagacagtcacaaagtgaaacatgtcgcttgctatggcttccggctgtcccacttgcgcagtgaagaggtccattggctacatgtggacatgggcgtgagcagtgtccgcgaaaaatatgaactggctcacccgccagaggaatggaagtacgagcttagaattagatatctgccaaaagggttcctaaaccaatttaccgaagacaaacctacactcaactttttctaccaacaagtgaaaagcgactacatgtag

SEQ ID NO: 246884 - DNA, 324 bp, Artificial Sequence
  derived and/or modified sequence
atggcggcagcctatctcgatccaaatttaaatcatactccaaattcttccacaaagacccacttgggaactggcatggaacgctcaccaggagctatggagagagtgttgaaggtattccattattttgaatcaaatagcgagccaacaacctgggcatctatcatccgccacggagacgccactgatgtcagagggattattcagaagatagtggatagccataaggtgaaacatgtcgcatgttacggtttcagactgtcacacttgagaagcgaagaggtgcactggctgcacgtagatatgggtgtgtctagtgtgtag

SEQ ID NO: 246885 - DNA, 360 bp, Artificial Sequence
  derived and/or modified sequence
atggccgctgcatatctagaccccaatcttaaccacacgccaaactcatcgactaagacccacctggggacggggatggagaggtctcccggagccatggagcgggttctcaaagtcttccactattttgagtccaattctgaaccaacgacatgggccagcattattcgccacggtgacgccacggacgtcagagggatcatacagaagatcgtagacagccacaaagtgaaacatgtcgcatgctacggattccgtctaagccaccttaggtcagaagaagttcactggttgcatgtggacatgggtgtcagctcggtacgggagaagtacgagcttgctcaccctcctgaggagtag

SEQ ID NO: 246886 - DNA, 363 bp, Artificial Sequence
  derived and/or modified sequence
atggcagccgcttatcttgacccaaacctcaatcacacacccaacagcagcacgaagacccatttgggcaccggcatggagcggtctccgggagctatggagcgggtgctgaaagtgtttcactatttcgaatcaaattctgaacccacaacctgggcctccattattaggcacggtgatgccacagacgtcaggggtatcatccaaaaaattgtcgatagccataaagtcaaacatgtagcttgctacgggtttaggctgagtcacttgcggtctgaagaagtccactggctgcacgtcgatatgggtgttagcagcgttagggaaaagtacgaattggcgcaccctcccgaggagtggtag

SEQ ID NO: 246887 - DNA, 1940 bp, Artificial Sequence
  derived and/or modified sequence
aacagcacattctagcctccagccaagcaggaatgtctttttaaacagttgagcaaattcccagattagaaagtctggtgcactgatgtcactctttcctgagtaatttttgggtggttgtttactgcacactatctaccaggagcctagaaactttgaatgagtgtcattattagaactctagagttgtaggaatgtaggaagagctgtttgccacagttaggacgagggtttcaaactgtctgctgagccctggggcatctgcgtggaatgggaaactagcaaagtctcgctttggctgcattctgaggggtttatgtgatggcaaacagccaagatgaagaagctgcctagcagtcgctgcagcggctgcagcgttatgtgggacttcagatagcttctgagtagtcaagcagtgcacaatcctggaggaagagaaggctcagcaagaagagcgcatgaggatggagtccagaagacaggccacagtgtcctgggactccggagggtctgatgaagcaccgcccaagcccagcagaccgggttatcccagtccgaggtccagcgaaggattttatcccagcccacagcacatggtacaaaccaatcattaccaggtttctggctaccctggttcacatggaatcacagccatggctggcagcatctatccaggtcaggcatctcttttggaccaaacagattcatggaatcatagacctcaggagatagcaatgtggcagcccaatgtggaggactctacagtattggacctgcgagggattgggcaagtgttgccaacccatctgatggaagagcgtctaatccgacagcaacaggaaatggaagaagatcagcgctggctggaaaaagaggaaagatttctgaaacctgatgtgagactctctcgaggcagtattgacagggaggatggaagtcttcagggtccgattggaaaccaacatatatatcagcctgtgggtaaaccagatcctgcagctccaccaaagaaaccgcctcgccctggagctcccggtcatctgggaagccttgccagcctcagcagccctgctgacagctacaacgagggtgtcaagcttcagccccaggaaatcagcccccctcctactgccaacctggaccggtcgaatgataaggtgtacgagaatgtgacgggcctggtgaaagctgtcatcgagatgtccagtaaaatccagccagccccaccagaggagtatgtccctatggtgaaggaagtcggcttggccctgaggacattattggccactgtggatgagaccattcccctcctaccagccagcacccaccgagagattgagatggcacagaagctattgaactctgacctgggtgagctcatcaacaagatgaaactggcccagcagtatgtcatgaccagcctccagcaagagtacaaaaagcaaatgctgactgctgctcacgccctggctgtggatgccaaaaacttactcgatgtcattgaccaagcaagactgaaaatgcttgggcagacgagaccacactgagcctcccctaggagcacgtcttgctaccctcttttgaagatgttctctagccttccaccagcagcgaggaattaaccctgtgtcctcagtcgccagcacttacagctccaacttttttgaatgaccatctggttgaaaaatctttctcatataagtttaaccacactttgatttgggttcattttttgttttgtttttttcaatcatgatattcagaaaaatccaggatccaaaatgtggcgtttttctaagaatgaaaattatatgtaagcttttaagcatcatgaagaacaatttatgttcacattaagatacgttctaaagggggatggccaaggggtgacatcttaattcctaaactaccttagctgcatagtggaagaggagagcatg

SEQ ID NO: 246888 - protein, 388 aa, Artificial Sequence
  derived and/or modified sequence
MPQLSQDNQECLQKHFSRPSIWTQFLPLFRAQRYNTDIHQITENEGDLRAVPDIKSFPPAQLPDSPAAPKLFGLLSSPLSSLARFFSHLLRRPPPEAPRRRLDFSPLLPALPAARLSRGHEELPGRLSLLLGAALALPGRPSGGRPLRPPHPVAKPREEDATAGQSSPMPQMGSERMEMRKRQMPAAQDTPGAAPGQPGAGSRGSNACCFCWCCCCSCSCLTVRNQEDQRPTIASHELRADLPTWEESPAPTLEEVNAWAQSFDKLMVTPAGRNAFREFLRTEFSEENMLFWMACEELKKEANKNIIEEKARIIYEDYISILSPKEVSLDSRVREVINRNMVEPSQHIFDDAQLQIYTLMHRDSYPRFMNSAVYKDLLQSLSEKSIEA

SEQ ID NO: 246889 - DNA, 1167 bp, Artificial Sequence
  derived and/or modified sequence
atgccccagctgagccaggacaaccaggagtgcctgcagaagcacttcagcagacccagcatctggacccagttcctgcccctgttcagagcccagagatacaacaccgacatccaccagatcaccgagaacgagggcgacctgagagccgtgcccgacatcaagagcttcccccccgcccagctgcccgacagccccgccgcccccaagctgttcggcctgctgagcagccccctgagcagcctggccagattcttcagccacctgctgagaagacccccccccgaggcccccagaagaagactggacttcagccccctgctgcccgccctgcccgccgccagactgagcagaggccacgaggagctgcccggcagactgagcctgctgctgggcgccgccctggccctgcccggcagacccagcggcggcagacccctgagacccccccaccccgtggccaagcccagagaggaggacgccaccgccggccagagcagccccatgccccagatgggcagcgagagaatggagatgagaaagagacagatgcccgccgcccaggacacccccggcgccgcccccggccagcccggcgccggcagcagaggcagcaacgcctgctgcttctgctggtgctgctgctgcagctgcagctgcctgaccgtgagaaaccaggaggaccagagacccaccatcgccagccacgagctgagagccgacctgcccacctgggaggagagccccgcccccaccctggaggaggtgaacgcctgggcccagagcttcgacaagctgatggtgacccccgccggcagaaacgccttcagagagttcctgagaaccgagttcagcgaggagaacatgctgttctggatggcctgcgaggagctgaagaaggaggccaacaagaacatcatcgaggagaaggccagaatcatctacgaggactacatcagcatcctgagccccaaggaggtgagcctggacagcagagtgagagaggtgatcaacagaaacatggtggagcccagccagcacatcttcgacgacgcccagctgcagatctacaccctgatgcacagagacagctaccccagattcatgaacagcgccgtgtacaaggacctgctgcagagcctgagcgagaagagcatcgaggcctag

SEQ ID NO: 246890 - DNA, 1167 bp, Artificial Sequence
  derived and/or modified sequence
atgccacagttgagtcaagataatcaggagtgtcttcagaagcacttcagccgtcctagcatttggacgcagtttctgccactctttcgggctcagcggtataacactgacatacatcaaattactgaaaatgagggagacctccgtgcagttccagacattaaatctttcccgccggcccagctgcccgattctcccgccgcccccaaattatttggtttactgtccagccccctatcaagcctcgccagattttttagtcacctgctgcgtcggcctccccccgaagcccctcgacgaagacttgacttctcgccactgttgccggccctgcccgccgctcgcctatctaggggtcacgaagaacttcccggccgcctgagcttactgctaggggcggcccttgccctgcctggaaggccgtccggcgggcgaccactgcgaccaccccatcccgtagccaaaccaagagaggaagacgcaactgcgggccaatccagccctatgcctcagatggggtcggagcgcatggaaatgcgtaagagacagatgccagcagcacaggacaccccaggtgccgcccctggacaacctggcgctgggtctagggggtcaaacgcatgttgcttttgctggtgctgctgttgctcttgcagctgcttgactgtgcgcaatcaggaggaccagagaccgactatagccagccacgagctgcgcgccgatctgcctacttgggaagagagtccggctcccacactcgaggaggtgaatgcctgggcacagagtttcgacaagctgatggtgacccccgctggtcggaacgctttcagggaattcctcagaacagaattttccgaagaaaacatgttgttctggatggcttgcgaggagctgaaaaaggaagcaaacaagaatatcatcgaggagaaggctagaatcatatacgaggactatattagcatcttaagtccaaaggaggtgagtttggattcaagagtacgcgaagtgatcaatcggaacatggtggaaccaagccagcatattttcgatgatgcccagctacagatctataccttgatgcaccgggactcgtaccccagatttatgaattctgccgtgtataaagacttactacagtctttgtcagaaaagagcatagaggcatag

SEQ ID NO: 246891 - DNA, 1167 bp, Artificial Sequence
  derived and/or modified sequence
atgccccagctgagccaggacaaccaggagtgcctgcagaagcacttcagccggcccagcatctggacccagttcctgcccctcttccgggcccagcgctacaacacagacatccaccagatcacagaaaatgaaggagacctgcgggctgtgcctgacatcaagagcttccccccagcccagctgcctgacagccctgctgcccccaagctgtttggcctgctgagcagccccctgagcagcctggcccgcttcttcagccacctgctgcggcggcccccacctgaggccccccggcggcggctggacttcagccccctgctgcctgccctgcctgctgcccggctgagccggggccacgaggagctgcccggccgcctgagcctgctgctgggcgccgccctggccctgcccggccggcccagcggcggccggcccctgcggcccccccaccctgtggccaagccccgggaggaggatgccacagctggccagagcagccccatgccccagatgggcagcgagaggatggagatgaggaagaggcagatgcctgctgcccaggacaccccaggagctgcccctggccagcccggggccggcagccggggcagcaatgcctgctgcttctgctggtgctgctgctgcagctgcagctgcctgactgtgaggaaccaggaggaccagaggcccaccatcgccagccatgagctgcgggctgacctgcccacctgggaggagagccctgcccccaccctggaggaggtgaatgcctgggcccagagctttgacaagctgatggtgaccccagctggaagaaatgccttccgggagttcctgaggacagagttcagcgaggagaacatgctgttctggatggcctgtgaggagctgaagaaggaggccaacaagaacatcatcgaggagaaggcccgcatcatctatgaggactacatcagcatcctgagccccaaggaggtgtccctggacagccgggtgcgggaggtgatcaacagaaacatggtggagcccagccagcacatctttgatgatgcccagctgcagatctacaccctgatgcaccgggacagctacccccgcttcatgaacagcgctgtgtacaaggacctgctgcagagcctgtctgagaagagcattgaggcctag

SEQ ID NO: 246892 - DNA, 1167 bp, Artificial Sequence
  derived and/or modified sequence
atgccccagctgagccaggacaaccaggagtgcctgcagaagcacttctctagacccagtatctggacgcagtttctgccactgtttagggcacagcgatacaatacagacattcatcagattacggagaatgaaggcgaccttcgggctgtcccagacatcaaaagtttcccccctgcgcaactgcccgattcaccagctgcccctaaattattcggacttctgtctagccccctgtctagcctggctaggttcttttcccacctcctgcggcgtcccccccctgaggcgccccgacggcgcttggacttcagtcccctgttgcccgccctgccagcagcaagattgtccaggggccacgaggaactccctggccgcctctcactattactgggggctgccctggctttgcccgggcggcctagtggaggacggccactgaggcctcctcatcccgtggccaagccacgggaagaggacgctacagccggccagagcagtccaatgccgcagatgggaagtgagcggatggagatgcggaagagacagatgccggccgcccaggatactcctggagccgctccaggacagccaggcgccgggtcaagagggtcgaatgcgtgctgcttttgctggtgctgctgctgcagttgtagctgcctgaccgtgcgcaatcaggaggatcagagaccaacaatcgcctctcatgaactgcgtgctgacctgccgacatgggaagagtctcccgcacctacactggaggaggtgaatgcctgggcccagtcgtttgataagctgatggtaactccggccggccgtaacgcctttagggaatttctgcggacggagtttagtgaagagaatatgctgttctggatggcgtgcgaagagcttaaaaaggaagccaacaaaaatatcatcgaagagaaggcgaggatcatctacgaggattacatttctatattatctccaaaagaagtttccttggactcaagagtccgggaagtgatcaacaggaatatggtagagccttctcagcacatttttgacgatgcccagcttcagatttatacactcatgcaccgcgactcatatcctcggtttatgaatagtgccgtttataaagatctgctccagtctctctccgagaaatctatagaagcgtag

SEQ ID NO: 246893 - DNA, 1167 bp, Artificial Sequence
  derived and/or modified sequence
atgccccagttgagtcaggataatcaggaatgtttgcagaagcacttctccaggccttcaatctggacccagttcctgccgctgttcagagcgcaacgctataataccgacattcaccagatcacggagaatgaaggagacctgagagcagtgcccgacattaaaagtttcccaccggctcagttgcccgatagtccagcggctcccaaactgtttggtctcctctccagtcctttatctagccttgctcgttttttcagtcacctgctgcgccgaccccctcccgaggcaccaagacgccgacttgattttagtcccctactccctgcacttccagctgctcgcctgtccagaggccacgaagaactgccaggacgcctgagtctattgttaggggcagcgttggccctacccggtagacccagtgggggtagacctttacgcccacctcaccccgtagccaagccaagggaagaggacgccaccgcgggacaatcaagccctatgccgcagatgggctccgaaagaatggagatgcgaaagcggcaaatgccggcagcccaggacacacctggagcagccccaggccaaccaggggcaggaagccgtgggagcaacgcttgctgtttttgctggtgctgctgttgttcttgtagctgtctaaccgtaaggaaccaggaggatcagaggcccacgatcgcaagtcacgaacttcgagccgacttgcctacctgggaagaatcccccgcacctacactggaggaggtgaatgcctgggcacaaagctttgacaagctaatggtaaccccggctgggagaaacgcattccgcgagtttctccgaacagagttcagcgaggaaaatatgctgttttggatggcctgcgaggagctgaaaaaggaggccaacaaaaacatcatcgaggagaaggcccgaataatatacgaagattacatatcaattctctctccaaaggaggtgtcactggactcaagggtccgcgaggtgattaaccgaaatatggtggaaccctcacagcatatattcgacgacgctcaactgcagatatacacactaatgcacagggactcatacccccgatttatgaattccgctgtgtacaaggatcttctgcagtcactttccgagaagagcatcgaggcgtag

SEQ ID NO: 246894 - DNA, 2104 bp, Artificial Sequence
  derived and/or modified sequence
cattaaccaaacaaagagaagcagagtggatcctgtgctaatattgggaaaaccaggcaacaggactcatttggggcctttattgtgaaaacatgccccagctttcccaagataaccaagagtgcctccagaaacatttctccaggccgtctatatggacacagtttctgcccctgttcagggctcagagatataatacagacattcaccaaatcacagaaaatgaaggagacctcagggctgttcctgatatcaagtccttcccgcctgcacagctcccagactcgcccgccgccccgaagctgttcggcctcctttctagcccgctttccagcctcgcaaggttcttctctcaccttctccggcgaccccctcccgaggctccccggaggcgcctggacttctcccccctgcttcccgccctgccggccgcccggctctcgagggggcacgaggagctgccgggccgcctctcgctcctgctcggggcggcgctggcactgcccggccgaccctcggggggtcgtccgctgaggcccccccatccggtagccaagcccagggaagaagacgccaccgctgggcagagctcgcctatgccgcagatgggatcagagcggatggagatgcggaagcggcagatgcccgccgcccaggacacaccaggcgccgccccaggccagcccggagcggggagtcgcgggtccaacgcatgctgcttctgctggtgctgctgttgtagctgctcgtgtctcactgttagaaaccaggaagatcagaggcccacaatagcttcccacgaactcagagcagatcttccaacctgggaagaaagccctgctcctactctggaagaagtcaacgcctgggctcagtcatttgacaaattaatggtcactccagcaggaaggaatgcattccgtgaattcctccgaacagaattcagtgaggaaaatatgctcttctggatggcctgtgaggaactgaaaaaggaagctaataaaaacattattgaagagaaagcaaggataatctatgaagactacatttctatactttctcctaaggaggtgagcttagactcccgggtgagagaagtgatcaacagaaacatggtggagccatcccaacacatattcgatgatgctcaacttcagatttacaccctgatgcacagagactcatatcctcgattcatgaactctgctgtctataaggacttgcttcagtccttatcggagaaatctattgaagcataggatttttcaaatatatttattattaataaaataataaaagaattcatgggctacaactagcacagggaatttagaggttgtagcatcttctgctggagtaatactcaggctattctaataacagatgattccttcaacagactgctatatattcaccatgtaaactgcagccacctttagtgatacttttgaaaaaaaaaaataaagggatatggctgttgtagaaagatagcgtatttgcatttacaataacagtagcatgttgtcagtggccaaggctacacagaaggctccctgctgcccggagcaggtacatccaccagagcaaagggaaccacttttattttgcatgagtttggtaactgattactctcccctcaaagaaaagacattcaggtgtttctcaacgacatcttctgtccagcaagctcggtttgaatacgtcacttaccagtgccattgcaggacccaaattcacagttcataaaagatgtgaccactacatgtaaaaatagcattctacttgatcttacagtatgtatgtatgtatgtatggagacatatgtgtgcgtgtggatgtctacatggttaatggaaagcactgtgctctgaagtggatcagtctcaagtgtctggtaacagcagcagtgcttagaaaattcttttgttgaaaagagttactgttattatcagaatttgccaacctaaagaatgaatttttaaattcataacttggtcatgttcacaacaaaactgtcaaataagcatatttccatttttattactgaaagaaatatgggcattttcattctttaaagaaataaagcacaagaattttatctcaa

SEQ ID NO: 246895 - protein, 2342 aa, Artificial Sequence
  derived and/or modified sequence
MDGVSSEANEENDNIERPVRRRHSSILKPPRSPLQDLRGGNERVQESNALRNKKNSRRVSFADTIKVFQTESHMKIVRKSEMEGCSAMVPSQLQLLPPGFKRFSCLSLPETETGENLLLIQNKKLEDNYCEITGMNTLLSAPIHTQMQQKEFSIIEHTRERKHANDQTVIFSDENQMDLTSSHTVMITKGLLDNPISEKSTKIDTTSFLANLKLHTEDSRMKKEVNFSVDQNTSSENKIDFNDFIKRLKTGKCSAFPDVPDKENFEIPIYSKEPNSASSTHQMHVSLKEDENNSNITRLFREKDDGMNFTQCHTANIQTLIPTSSETNSRESKGNDITIYGNDFMDLTFNHTLQILPATGNFSEIENQTQNAMDVTTGYGTKASGNKTVFKSKQNTAFQDLSINSADKIHITRSHIMGAETHIVSQTCNQDARILAMTPESIYSNPSIQGCKTVFYSSCNDAMEMTKCLSNMREEKNLLKHDSNYAKMYCNPDAMSSLTEKTIYSGEENMDITKSHTVAIDNQIFKQDQSNVQIAAAPTPEKEMMLQNLMTTSEDGKMNVNCNSVPHVSKERIQQSLSNPLSISLTDRKTELLSGENMDLTESHTSNLGSQVPLAAYNLAPESTSESHSQSKSSSDECEEITKSRNEPFQRSDIIAKNSLTDTWNKDKDWVLKILPYLDKDSPQSADCNQEIATSHNIVYCGGVLDKQITNRNTVSWEQSLFSTTKPLFSSGQFSMKNHDTAISSHTVKSVLGQNSKLAEPLRKSLSNPTPDYCHDKMIICSEEEQNMDLTKSHTVVIGFGPSELQELGKTNLEHTTGQLTTMNRQIAVKVEKCGKSPIEKSGVLKSNCIMDVLEDESVQKPKFPKEKQNVKIWGRKSVGGPKIDKTIVFSEDDKNDMDITKSYTIEINHRPLLEKRDCHLVPLAGTSETILYTCRQDDMEITRSHTTALECKTVSPDEITTRPMDKTVVFVDNHVELEMTESHTVFIDYQEKERTDRPNFELSQRKSLGTPTVICTPTEESVFFPGNGESDRLVANDSQLTPLEEWSNNRGPVEVADNMELSKSATCKNIKDVQSPGFLNEPLSSKSQRRKSLKLKNDKTIVFSENHKNDMDITQSCMVEIDNESALEDKEDFHLAGASKTILYSCGQDDMEITRSHTTALECKTLLPNEIAIRPMDKTVLFTDNYSDLEVTDSHTVFIDCQATEKILEENPKFGIGKGKNLGVSFPKDNSCVQEIAEKQALAVGNKIVLHTEQKQQLFAATNRTTNEIIKFHSAAMDEKVIGKVVDQACTLEKAQVESCQLNNRDRRNVDFTSSHATAVCGSSDNYSCLPNVISCTDNLEGSAMLLCDKDEEKANYCPVQNDLAYANDFASEYYLESEGQPLSAPCPLLEKEEVIQTSTKGQLDCVITLHKDQDLIKDPRNLLANQTLVYSQDLGEMTKLNSKRVSFKLPKDQMKVYVDDIYVIPQPHFSTDQPPLPKKGQSSINKEEVILSKAGNKSLNIIENSSAPICENKPKILNSEEWFAAACKKELKENIQTTNYNTALDFHSNSDVTKQVIQTHVNAGEAPDPVITSNVPCFHSIKPNLNNLNGKTGEFLAFQTVHLPPLPEQLLELGNKAHNDMHIVQATEIHNINIISSNAKDSRDEENKKSHNGAETTSLPPKTVFKDKVRRCSLGIFLPRLPNKRNCSVTGIDDLEQIPADTTDINHLETQPVSSKDSGIGSVAGKLNLSPSQYINEENLPVYPDEINSSDSINIETEEKALIETYQKEISPYENKMGKTCNSQKRTWVQEEEDIHKEKKIRKNEIKFSDTTQDREIFDHHTEEDIDKSANSVLIKNLSRTPSSCSSSLDSIKADGTSLDFSTYRSSQMESQFLRDTICEESLREKLQDGRITIREFFILLQVHILIQKPRQSNLPGNFTVNTPPTPEDLMLSQYVYRPKIQIYREDCEARRQKIEELKLSASNQDKLLVDINKNLWEKMRHCSDKELKAFGIYLNKIKSCFTKMTKVFTHQGKVALYGKLVQSAQNEREKLQIKIDEMDKILKKIDNCLTEMETETKNLEDEEKNNPVEEWDSEMRAAEKELEQLKTEEEELQRNLLELEVQKEQTLAQIDFMQKQRNRTEELLDQLSLSEWDVVEWSDDQAVFTFVYDTIQLTITFEESVVGFPFLDKRYRKIVDVNFQSLLDEDQAPPSSLLVHKLIFQYVEEKESWKKTCTTQHQLPKMLEEFSLVVHHCRLLGEEIEYLKRWGPNYNLMNIDINNNELRLLFSSSAAFAKFEITLFLSAYYPSVPLPSTIQNHVGNTSQDDIATILSKVPLENNYLKNVVKQIYQDLFQDCHFYH

SEQ ID NO: 246896 - DNA, 7029 bp, Artificial Sequence
  derived and/or modified sequence
atggacggcgtgagcagcgaggccaacgaggagaacgacaacatcgagagacccgtgagaagaagacacagcagcatcctgaagccccccagaagccccctgcaggacctgagaggcggcaacgagagagtgcaggagagcaacgccctgagaaacaagaagaacagcagaagagtgagcttcgccgacaccatcaaggtgttccagaccgagagccacatgaagatcgtgagaaagagcgagatggagggctgcagcgccatggtgcccagccagctgcagctgctgccccccggcttcaagagattcagctgcctgagcctgcccgagaccgagaccggcgagaacctgctgctgatccagaacaagaagctggaggacaactactgcgagatcaccggcatgaacaccctgctgagcgcccccatccacacccagatgcagcagaaggagttcagcatcatcgagcacaccagagagagaaagcacgccaacgaccagaccgtgatcttcagcgacgagaaccagatggacctgaccagcagccacaccgtgatgatcaccaagggcctgctggacaaccccatcagcgagaagagcaccaagatcgacaccaccagcttcctggccaacctgaagctgcacaccgaggacagcagaatgaagaaggaggtgaacttcagcgtggaccagaacaccagcagcgagaacaagatcgacttcaacgacttcatcaagagactgaagaccggcaagtgcagcgccttccccgacgtgcccgacaaggagaacttcgagatccccatctacagcaaggagcccaacagcgccagcagcacccaccagatgcacgtgagcctgaaggaggacgagaacaacagcaacatcaccagactgttcagagagaaggacgacggcatgaacttcacccagtgccacaccgccaacatccagaccctgatccccaccagcagcgagaccaacagcagagagagcaagggcaacgacatcaccatctacggcaacgacttcatggacctgaccttcaaccacaccctgcagatcctgcccgccaccggcaacttcagcgagatcgagaaccagacccagaacgccatggacgtgaccaccggctacggcaccaaggccagcggcaacaagaccgtgttcaagagcaagcagaacaccgccttccaggacctgagcatcaacagcgccgacaagatccacatcaccagaagccacatcatgggcgccgagacccacatcgtgagccagacctgcaaccaggacgccagaatcctggccatgacccccgagagcatctacagcaaccccagcatccagggctgcaagaccgtgttctacagcagctgcaacgacgccatggagatgaccaagtgcctgagcaacatgagagaggagaagaacctgctgaagcacgacagcaactacgccaagatgtactgcaaccccgacgccatgagcagcctgaccgagaagaccatctacagcggcgaggagaacatggacatcaccaagagccacaccgtggccatcgacaaccagatcttcaagcaggaccagagcaacgtgcagatcgccgccgcccccacccccgagaaggagatgatgctgcagaacctgatgaccaccagcgaggacggcaagatgaacgtgaactgcaacagcgtgccccacgtgagcaaggagagaatccagcagagcctgagcaaccccctgagcatcagcctgaccgacagaaagaccgagctgctgagcggcgagaacatggacctgaccgagagccacaccagcaacctgggcagccaggtgcccctggccgcctacaacctggcccccgagagcaccagcgagagccacagccagagcaagagcagcagcgacgagtgcgaggagatcaccaagagcagaaacgagcccttccagagaagcgacatcatcgccaagaacagcctgaccgacacctggaacaaggacaaggactgggtgctgaagatcctgccctacctggacaaggacagcccccagagcgccgactgcaaccaggagatcgccaccagccacaacatcgtgtactgcggcggcgtgctggacaagcagatcaccaacagaaacaccgtgagctgggagcagagcctgttcagcaccaccaagcccctgttcagcagcggccagttcagcatgaagaaccacgacaccgccatcagcagccacaccgtgaagagcgtgctgggccagaacagcaagctggccgagcccctgagaaagagcctgagcaaccccacccccgactactgccacgacaagatgatcatctgcagcgaggaggagcagaacatggacctgaccaagagccacaccgtggtgatcggcttcggccccagcgagctgcaggagctgggcaagaccaacctggagcacaccaccggccagctgaccaccatgaacagacagatcgccgtgaaggtggagaagtgcggcaagagccccatcgagaagagcggcgtgctgaagagcaactgcatcatggacgtgctggaggacgagagcgtgcagaagcccaagttccccaaggagaagcagaacgtgaagatctggggcagaaagagcgtgggcggccccaagatcgacaagaccatcgtgttcagcgaggacgacaagaacgacatggacatcaccaagagctacaccatcgagatcaaccacagacccctgctggagaagagagactgccacctggtgcccctggccggcaccagcgagaccatcctgtacacctgcagacaggacgacatggagatcaccagaagccacaccaccgccctggagtgcaagaccgtgagccccgacgagatcaccaccagacccatggacaagaccgtggtgttcgtggacaaccacgtggagctggagatgaccgagagccacaccgtgttcatcgactaccaggagaaggagagaaccgacagacccaacttcgagctgagccagagaaagagcctgggcacccccaccgtgatctgcacccccaccgaggagagcgtgttcttccccggcaacggcgagagcgacagactggtggccaacgacagccagctgacccccctggaggagtggagcaacaacagaggccccgtggaggtggccgacaacatggagctgagcaagagcgccacctgcaagaacatcaaggacgtgcagagccccggcttcctgaacgagcccctgagcagcaagagccagagaagaaagagcctgaagctgaagaacgacaagaccatcgtgttcagcgagaaccacaagaacgacatggacatcacccagagctgcatggtggagatcgacaacgagagcgccctggaggacaaggaggacttccacctggccggcgccagcaagaccatcctgtacagctgcggccaggacgacatggagatcaccagaagccacaccaccgccctggagtgcaagaccctgctgcccaacgagatcgccatcagacccatggacaagaccgtgctgttcaccgacaactacagcgacctggaggtgaccgacagccacaccgtgttcatcgactgccaggccaccgagaagatcctggaggagaaccccaagttcggcatcggcaagggcaagaacctgggcgtgagcttccccaaggacaacagctgcgtgcaggagatcgccgagaagcaggccctggccgtgggcaacaagatcgtgctgcacaccgagcagaagcagcagctgttcgccgccaccaacagaaccaccaacgagatcatcaagttccacagcgccgccatggacgagaaggtgatcggcaaggtggtggaccaggcctgcaccctggagaaggcccaggtggagagctgccagctgaacaacagagacagaagaaacgtggacttcaccagcagccacgccaccgccgtgtgcggcagcagcgacaactacagctgcctgcccaacgtgatcagctgcaccgacaacctggagggcagcgccatgctgctgtgcgacaaggacgaggagaaggccaactactgccccgtgcagaacgacctggcctacgccaacgacttcgccagcgagtactacctggagagcgagggccagcccctgagcgccccctgccccctgctggagaaggaggaggtgatccagaccagcaccaagggccagctggactgcgtgatcaccctgcacaaggaccaggacctgatcaaggaccccagaaacctgctggccaaccagaccctggtgtacagccaggacctgggcgagatgaccaagctgaacagcaagagagtgagcttcaagctgcccaaggaccagatgaaggtgtacgtggacgacatctacgtgatcccccagccccacttcagcaccgaccagccccccctgcccaagaagggccagagcagcatcaacaaggaggaggtgatcctgagcaaggccggcaacaagagcctgaacatcatcgagaacagcagcgcccccatctgcgagaacaagcccaagatcctgaacagcgaggagtggttcgccgccgcctgcaagaaggagctgaaggagaacatccagaccaccaactacaacaccgccctggacttccacagcaacagcgacgtgaccaagcaggtgatccagacccacgtgaacgccggcgaggcccccgaccccgtgatcaccagcaacgtgccctgcttccacagcatcaagcccaacctgaacaacctgaacggcaagaccggcgagttcctggccttccagaccgtgcacctgccccccctgcccgagcagctgctggagctgggcaacaaggcccacaacgacatgcacatcgtgcaggccaccgagatccacaacatcaacatcatcagcagcaacgccaaggacagcagagacgaggagaacaagaagagccacaacggcgccgagaccaccagcctgccccccaagaccgtgttcaaggacaaggtgagaagatgcagcctgggcatcttcctgcccagactgcccaacaagagaaactgcagcgtgaccggcatcgacgacctggagcagatccccgccgacaccaccgacatcaaccacctggagacccagcccgtgagcagcaaggacagcggcatcggcagcgtggccggcaagctgaacctgagccccagccagtacatcaacgaggagaacctgcccgtgtaccccgacgagatcaacagcagcgacagcatcaacatcgagaccgaggagaaggccctgatcgagacctaccagaaggagatcagcccctacgagaacaagatgggcaagacctgcaacagccagaagagaacctgggtgcaggaggaggaggacatccacaaggagaagaagatcagaaagaacgagatcaagttcagcgacaccacccaggacagagagatcttcgaccaccacaccgaggaggacatcgacaagagcgccaacagcgtgctgatcaagaacctgagcagaacccccagcagctgcagcagcagcctggacagcatcaaggccgacggcaccagcctggacttcagcacctacagaagcagccagatggagagccagttcctgagagacaccatctgcgaggagagcctgagagagaagctgcaggacggcagaatcaccatcagagagttcttcatcctgctgcaggtgcacatcctgatccagaagcccagacagagcaacctgcccggcaacttcaccgtgaacaccccccccacccccgaggacctgatgctgagccagtacgtgtacagacccaagatccagatctacagagaggactgcgaggccagaagacagaagatcgaggagctgaagctgagcgccagcaaccaggacaagctgctggtggacatcaacaagaacctgtgggagaagatgagacactgcagcgacaaggagctgaaggccttcggcatctacctgaacaagatcaagagctgcttcaccaagatgaccaaggtgttcacccaccagggcaaggtggccctgtacggcaagctggtgcagagcgcccagaacgagagagagaagctgcagatcaagatcgacgagatggacaagatcctgaagaagatcgacaactgcctgaccgagatggagaccgagaccaagaacctggaggacgaggagaagaacaaccccgtggaggagtgggacagcgagatgagagccgccgagaaggagctggagcagctgaagaccgaggaggaggagctgcagagaaacctgctggagctggaggtgcagaaggagcagaccctggcccagatcgacttcatgcagaagcagagaaacagaaccgaggagctgctggaccagctgagcctgagcgagtgggacgtggtggagtggagcgacgaccaggccgtgttcaccttcgtgtacgacaccatccagctgaccatcaccttcgaggagagcgtggtgggcttccccttcctggacaagagatacagaaagatcgtggacgtgaacttccagagcctgctggacgaggaccaggccccccccagcagcctgctggtgcacaagctgatcttccagtacgtggaggagaaggagagctggaagaagacctgcaccacccagcaccagctgcccaagatgctggaggagttcagcctggtggtgcaccactgcagactgctgggcgaggagatcgagtacctgaagagatggggccccaactacaacctgatgaacatcgacatcaacaacaacgagctgagactgctgttcagcagcagcgccgccttcgccaagttcgagatcaccctgttcctgagcgcctactaccccagcgtgcccctgcccagcaccatccagaaccacgtgggcaacaccagccaggacgacatcgccaccatcctgagcaaggtgcccctggagaacaactacctgaagaacgtggtgaagcagatctaccaggacctgttccaggactgccacttctaccactag

SEQ ID NO: 246897 - DNA, 9573 bp, Artificial Sequence
  derived and/or modified sequence
aagcaatcgaaagaagatggccgctcccacgattgtgggggaggtctccactggggaggggcagaggaaattcggtcgaaaaagagataaagctgaaggaaataaaattggcacggagtctgggaaagtagtttccctaaaggagtcttagaaatagggttggtctggaacctaaggggcggagccgacgcgtagagccgctttgcgcgtgcgcatcacctaggcggttagatttgaatacttcactgaggcgagccgggcgttgtgagcggactgctagaggcggctgtctgtttccgctctaaggaaactcagagcgtgtggaccccaaacaagtctgcgcaaaatttgtcgaggaggtttgccgcggcagaaaagttttcttcaaaaatggatggggtgtcttcagaggctaatgaagaaaatgacaatatagagagacctgttagaagacggcattcttcaatattgaaacccccaaggagtcctcttcaggacctcagaggtgggaatgaaagagttcaggaatccaatgctttgagaaataagaaaaactctcgtcgagtcagctttgcagatactataaaggtattccagacggagtctcatatgaaaatagtgagaaagtcagaaatggaaggctgcagtgcaatggtgccatctcagctgcaacttctgcctcctgggtttaagcgattctcctgcctcagcctcccagaaacagaaacaggagaaaatcttcttttgatacagaataagaaattagaagataattactgtgaaattactgggatgaacacattgctttctgctcccattcatacccagatgcaacagaaggagttttcaattatagaacatacccgtgaaaggaaacatgcaaatgaccagacagtcattttttcagatgaaaaccagatggacctgacatcaagtcacactgtaatgattaccaaaggccttttagataatcccataagtgaaaagtccaccaagatagataccacatcatttctagctaatttaaagcttcacaccgaggactcaagaatgaaaaaagaagtaaatttttccgtggatcaaaacacttcttcagaaaataaaatagatttcaatgacttcataaaaagattgaaaacaggaaaatgtagtgcttttcctgatgtgcctgataaagaaaattttgagatacctatttattccaaggaaccgaacagtgcctcttctacacatcaaatgcatgtatctcttaaggaagatgaaaataacagtaatattactaggctctttagagaaaaagatgatgggatgaatttcacccagtgtcatacagccaatattcagacattgattcccacatccagtgagaccaactcacgggaatctaaaggtaatgatattacaatttatggcaatgactttatggacttgacatttaaccacactttgcagatcttacctgcaacaggtaatttttctgaaatagaaaatcaaactcagaatgccatggatgtaacaacaggttatggaactaaagcttcaggaaataaaacagtttttaagagtaaacaaaatactgcttttcaagacctttccataaactctgcagacaaaatacatattaccagaagtcatattatgggggcagaaactcacatagtctcacagacttgtaatcaggatgccagaatattagccatgaccccagaatctatatattctaatccatctattcaaggttgtaagactgttttctattctagttgtaatgatgccatggaaatgaccaaatgtctctcaaatatgagagaggagaaaaatttgctaaagcatgacagtaattatgctaaaatgtattgcaatccagatgctatgtcttctctcacagagaaaactatttattccggagaggagaacatggacattaccaagagtcatacagttgcaatagataatcaaatttttaaacaagatcaatcaaatgtgcaaatagcagctgcaccaacacccgaaaaagaaatgatgctccaaaatcttatgaccacatcagaagatgggaaaatgaatgtaaattgtaactcagttcctcatgtatctaaggaaagaatacagcagagcctgtcaaatcctttgtctatttcattgactgatagaaagactgaactcttatcaggtgaaaatatggatttgactgaaagtcacacaagtaacttaggaagtcaggttcctcttgcagcttataatctagcaccggagagtaccagtgaatctcactctcagagcaaaagctcttcagatgaatgtgaagaaattaccaaaagtcgtaatgaaccatttcagcgatcagacataatagccaaaaacagcttaaccgacacctggaacaaagacaaagattgggttttgaagattttgccctaccttgataaagattctcctcagtcagctgattgtaatcaggagatagcaacaagccataatatagtctactgtggtggagttcttgataaacaaataactaatagaaatacagtatcatgggaacaatctttgttttctaccacaaagccattattttcatcaggacagttctctatgaaaaatcatgatactgctataagtagtcatacagtgaaatctgtactaggccagaattctaaactggctgagccactgaggaaaagtttaagcaatcccacacctgactattgccatgacaagatgattatatgttcagaggaagagcaaaatatggatctaacaaagagccacactgtcgtcattggatttggtccttctgaactacaagaacttggtaaaactaatttagaacacactactggccagctaacaacaatgaacagacagatagctgtaaaagttgaaaaatgtggtaaaagtcccatagaaaaaagtggagtgcttaaatctaactgtattatggatgtgttagaggacgaaagtgtacagaaacctaaatttccaaaggaaaagcaaaatgtcaaaatttggggaaggaaaagtgttggtggaccaaaaattgataagactattgtattttcagaagacgataagaatgatatggatatcactaagagttatacaatagaaataaaccatagacctttattagagaaacgtgattgtcatttggtgccattggcaggaacttctgaaactattttatatacatgtaggcaggatgacatggagatcactagaagtcacacaactgccttagaatgtaaaactgtctcaccagatgaaataactactaggcctatggacaaaactgtagtgtttgtagataatcatgttgaactagaaatgacagagtcccatactgttttcattgactaccaagaaaaggaaagaacagacagacctaactttgaactatcccaaaggaaaagcctaggaacaccaacagtgatatgtactcctactgaggagagtgttttctttccaggaaatggtgaaagtgaccgtctagtagcaaatgacagccagctaacccctctggaggaatggtctaataataggggccctgtagaggtagctgataacatggaattgtctaaatcagccacttgcaaaaacatcaaagatgtacaaagtcctggatttctgaatgaacctctatcaagcaaaagtcagagaagaaaaagccttaagctaaaaaatgacaagaccattgtattttcagagaatcataaaaatgatatggatattacccagagttgtatggtggaaatagataacgaaagtgccctggaggataaagaggacttccatttggcaggggcttctaaaactattttgtattcatgtgggcaggatgacatggagatcactaggagtcacacaactgccttagaatgtaaaactctcctgccaaatgaaatagctattaggcccatggacaaaaccgtattgttcacagataattacagtgatctggaagtcaccgattcccatactgttttcattgactgtcaagccacagagaaaatacttgaagaaaaccctaaatttggaataggaaaaggaaaaaacttgggtgtttcctttcctaaggataatagctgtgttcaagaaatcgctgaaaaacaagcactggctgtaggaaacaaaatagttcttcacaccgagcaaaagcaacaactctttgctgctactaatagaactactaatgaaatcatcaaatttcatagtgctgctatggatgaaaaggtcatagggaaagttgtagaccaggcctgtacattggaaaaagcgcaagttgaaagctgtcagttaaataatagagatagaagaaatgtggactttacaagtagtcatgcaactgctgtttgtggatccagtgataattattcctgtttaccaaatgttatttcctgtactgataatttggagggtagtgccatgctcttatgtgataaagatgaggaaaaagccaattattgcccagtgcaaaatgatcttgcttatgcaaatgattttgccagtgaatattacttggaatctgagggacagcctctctctgctccttgtcctttgttagagaaggaagaagttattcaaaccagtaccaaaggacagttagactgtgttataacactgcacaaagatcaagatctgattaaggatccacgaaatctattggctaatcaaactttagtatatagtcaagatctgggggagatgactaaacttaattcaaagcgagtatcttttaagcttccaaaggatcaaatgaaagtctatgttgatgacatttatgttattcctcagcctcatttctcaaccgaccaacctccattacctaaaaaaggacagagtagtatcaataaagaagaagtaatactgtctaaagctggaaataagagtttaaatattatagaaaattcctctgcacccatatgtgaaaacaagcccaaaatactcaatagtgaggaatggtttgctgcagcctgtaaaaaagaactgaaggaaaatattcaaacaactaactataatacagctctagatttccacagtaactcagacgtaactaagcaagtcattcaaactcatgtcaatgctggagaagcaccagatcctgtaattacatctaatgttccatgttttcatagtatcaaaccaaatctgaataatttgaatggaaaaactggagagtttttagcctttcaaactgttcatctaccaccccttccagagcaattacttgaattaggaaataaggcacacaatgatatgcatatagtgcaagctacagaaatacataatattaacataatctccagcaatgctaaagatagtagagatgaggaaaataaaaagtctcataatggagctgaaaccacctctctaccgccaaagacagtttttaaagataaagtaaggagatgttctttgggaatctttttgcctagattgcccaacaagagaaattgtagtgtcactggtattgatgacctggaacagattccagcagacacaactgatataaatcacttagaaactcagccggtctctagcaaagattcaggcattggatctgttgcaggtaaactgaacctaagtccttctcaatatataaatgaggaaaatcttcctgtatatcctgatgagatcaattcttcagactctattaacatagaaactgaggaaaaggccttgattgagacataccaaaaagagatttcaccatatgaaaataaaatgggaaaaacttgcaatagccaaaaaagaacgtgggtacaagaagaagaagatattcataaggagaaaaaaatcagaaaaaatgagattaagtttagtgatacgacacaagatcgggagatttttgatcaccatactgaagaggatatagataaaagtgctaacagtgtattgataaaaaacctgagcaggaccccatctagttgcagcagctctctggattcaatcaaggctgatgggacctctctggacttcagcacttaccgcagtagtcaaatggaatcacagtttctcagagatactatttgtgaagagagcttgagggagaaactccaagatgggagaataacaataagggagttctttatacttctccaggtccacatcttgatacagaaaccccgacagagcaatctcccaggcaattttactgtaaacacaccacctactccagaagacctgatgttaagtcaatatgtttaccgacccaagatacagatttatagagaagattgtgaggctcgtcgccaaaagattgaagaattaaagctttctgcatcgaaccaagataagctgttggttgatataaataagaacctgtgggaaaaaatgagacactgctctgacaaagagctgaaggcctttggaatttatcttaacaaaataaagtcatgttttaccaagatgactaaagtcttcactcaccaaggaaaagtggctctgtatggcaagctggtgcagtcagctcagaatgagagggagaaacttcaaataaagatagatgagatggataaaatacttaagaagatcgataactgcctcactgagatggaaacagaaactaagaatttggaggatgaagagaaaaacaatcctgtggaagaatgggattctgaaatgagagctgcagaaaaagaattggaacagctgaaaactgaagaagaggagcttcaaagaaatctcttagaactggaggtacaaaaagagcagacccttgctcaaatagactttatgcaaaaacaaagaaatagaactgaagagctactggatcagttgagcttgtctgagtgggatgtcgttgagtggagtgatgatcaagctgtattcacctttgtttatgacacgatacaactcaccatcacctttgaagagtcagttgttggtttccctttcctggacaagcgttataggaagattgttgatgtcaattttcaatctctgttagatgaggatcaagctcctccttcctcccttttagttcataagcttattttccagtacgttgaagaaaaggaatcctggaagaagacatgtacaacccagcatcagttacccaagatgcttgaagaattctcactggtagtgcaccattgcagactccttggagaggagattgagtatttaaagagatggggaccaaattataacctaatgaacatagatattaataataatgaattgagacttttattctctagctccgcagcatttgcaaagtttgaaataactttgtttctctcagcctattatccatctgtaccattaccttccaccattcagaatcacgttgggaacactagccaagatgatattgctaccattctatctaaagtgccactggagaacaactacctgaagaatgtagtcaagcaaatttaccaagatctgtttcaggactgccatttctaccactagacccttggaccaccattggaacaaccaagcagaatgtacttgatattatttcagggtcccattgctgttcagcctttgtttttacgtcattacaagctgagtaaaattccttctgatgatgttatagttaatctgtatgttttttatatctctgcagaatgatggtgatgaagtctggatggtaggcctcatagcctactatcaacttactcatctttgtaccaaaggtttaagtaataggacacttaggaaaaatgtctcctaactaaactagtgctttctgctttagtacaagccctaaggattaacttaagtataagaagtgttatcactgacaagaacattagccattttcccataactagatagagctatgattttttaggttgcctggcttctgcctagcagatatttctggagtagaaatgtatctgtctacaaactattatcctttttctccgttactaaaatgctattaagagaaagtagggctgggtgcggtggctcacacctgtaataccagcagtttgggaggccaaaatgggtgaatagcctgagtccaggaattcaagaccagcctgggcaacatggcaaaaccccacctctacaaaaaatacgaaagttagccagtcatggtggcttgcgcctgtggtcccagctacttaggagcttaaggcaggaggatcacttgagcccaggaggcagaggttgcagtaagccgagaccattccactgcactccagcctaggcaacagagcaagaccctgtctcaaaaaaacaaaaagagagaaagcaatagcactcagctattgaaatggttgccatctttttttgaaggccttgctttttattctatggtgtctattatgttttctttttctttttttttgagacggagtcttgctctgtcgcccaggctggagtgcagtggcatgatctcagctcactgcaagctccgcctcctgggttcacgccattctcctgcctcagcctcccgagtagctgggactacaggtgcccaccaccatgccgggctaattttttgtctttttagtagaaatggggtttcacgatgttagccaggatggtctcgatctcctgacctcgtgatccgcctgcctcggcttcaaagtgctgggattacaggtgtgagccaccacacccagcaatgttttcttaataagtatagtttttctagggaaagttaattcatttttgtctagtacatatatgtaaatatattaatgttgtttttgtgtttgtgatgtagtaaggagatgtacatagaaattcattgaggtatatagatactcatctgtctaggcagttcccaattttctgaagaatgttttacagcaaaattttctattttcttttattaaatagtgacacgtcaaacaatgtcacatccaaaacactagtttcatcaatttctagcagtaataatagacttgctgtaagtattgttttctgatgccatacccttgtcatacatattattaaatgaccaatattatgtatgaagtagacaaaaaaatttactcaaacttcattcaaatcctaattgtgataatttttgttttatatttaattataaaccaaaatacatttgcatttttaagctaatttgtctcaaaattttgctttatatttttggatcaggttaaagtcctgtggatcccctgaatgttattgtccctcttgattggtttttacttctgagctatacgtcaaaagacacataagcttcaaaagtcaagacaaacctcatttgccataaaaatcaagatatagatgttctgttccgtaaactccttgaaaaacattttaaagtcatcaatatgatctgtttcccatgaaacttaagttagctttcttattggagttatttcttttctgtaagtctgaaaagtagagattttgttttacgcattttagtaacctgcaacaaccaactctaaaaaagatttggcttgtaatgacggtctctgcttttttgggtttggagtacacaattgtaatatttacttagttatttgtgtttttctttgttcaaggtattgactagtttcataaattttttgaaagtttttctttcattggttggaaagcagattacattttgcactattaaaataagtttattactttaaa

SEQ ID NO: 246898 - DNA, 7029 bp, Artificial Sequence
  derived and/or modified sequence
atggacggggtgagttctgaggcgaatgaggagaacgacaacatagaaagacctgtcagaaggcgccactccagcattctcaagccacccagaagtccactgcaggacctcagaggaggcaacgaaagggtgcaggaatctaatgcactgagaaataagaaaaactctcggcgtgtgtccttcgctgatacaatcaaagtgtttcagacggagtcacatatgaaaattgtgcggaagtcagaaatggagggttgttcagcaatggtgccatcccaactgcaactgctcccccccggattcaagcgcttctcttgtctctctctaccagaaacagaaacgggcgagaacctgctgctcatccagaacaagaagttggaggacaactactgcgagatcactgggatgaacactcttctgagtgctccaatccacacacagatgcaacagaaggagttttctatcatcgagcatactagagagcggaaacacgccaacgatcagaccgtcatcttctctgacgagaatcaaatggatctgactagttcacacactgtgatgattaccaaaggactcctcgacaacccaataagtgaaaaatctaccaagatcgatactaccagtttcctcgcaaatctaaaactgcacacggaggacagtcggatgaagaaagaggttaactttagcgtcgatcaaaacacttcttctgaaaataaaattgattttaatgactttataaaacgactgaaaaccgggaagtgttctgcatttcctgatgttccagataaagaaaactttgaaattcctatatattccaaggagcccaactccgcctcaagcacacaccagatgcatgtgtcacttaaggaggatgagaacaattccaacatcactcggctgttcagagagaaagatgatggtatgaactttacccagtgccacactgcaaacatccagactctgattcccacctcgtcagagacgaacagcagagagtctaaagggaacgacattaccatctatgggaacgacttcatggatctgacattcaaccacacattgcagatcctcccggccaccggaaatttctctgaaattgagaaccagacacagaatgctatggatgtgaccaccggctatggtactaaggcaagtggaaataagaccgtgtttaagagtaaacagaatacggctttccaggatcttagcatcaacagtgcagataaaattcatattacacgaagccacatcatgggggccgagactcatatcgtatcacaaacatgtaaccaggatgcgagaatcctcgcaatgacccccgaaagcatctattccaacccaagtattcagggttgcaaaactgtattctatagctcctgtaacgatgctatggaaatgacaaagtgtctgagtaacatgagagaagagaagaatcttctgaaacatgattcaaactatgcaaagatgtattgcaatcccgacgcgatgtccagcttaacagagaaaacaatatattccggagaggaaaacatggatataactaagtcacacacggtcgccatcgacaaccagatttttaagcaggatcagtccaatgtccagattgcagccgccccaacacctgaaaaggagatgatgttgcagaatctgatgacaaccagcgaagatggaaagatgaatgtgaattgtaatagcgttccccacgtgagcaaagaacgcattcagcaatcgctgtccaatccccttagcatttcgctgacggacaggaagactgagctgcttagcggggaaaatatggacctcactgagagccacacttcgaatctcggcagtcaggttcctctggcggcctataacctggcgcctgagtctacatccgagtctcactcacaaagtaaaagttcttctgatgagtgcgaggagataacaaagagtcggaatgaacctttccaacgttcagatattattgcgaaaaactcactgaccgacacatggaataaagataaggattgggtcctgaagattctgccttatttggacaaagactctccacagagtgccgattgcaaccaagagatagccactagccacaacatcgtgtattgtggcggcgtgctggacaagcagatcactaataggaacactgtcagctgggagcagtcactgttttcaactacgaaacctttattcagctctggccagttctcaatgaagaatcatgatactgcaatcagctcccacactgtgaaaagcgtacttggacagaattctaagctggccgagcccctccgaaagagtctgagtaacccgacccctgactattgtcatgacaagatgataatctgttccgaggaggagcagaacatggacttgacgaaatctcatacagttgtaattggcttcggaccttccgagctgcaagaactggggaagactaatctagaacacacaaccggtcagctgaccactatgaacagacagatcgccgttaaagttgagaaatgcggaaagtcaccaatagagaagtcgggtgtcctgaagtccaactgcataatggacgtgttagaggacgagtcagtccagaaacccaagttcccaaaggagaagcaaaatgtcaagatctgggggcgcaagtctgtcggggggcccaagatagacaagaccattgttttctcagaagacgacaagaatgacatggatatcacaaagagttacaccatcgaaatcaaccaccgcccactcttggaaaagagggactgccacctagtccctctggccggtacatccgagacaattctttacacttgtaggcaggatgacatggagataacaagatctcatactactgcactagaatgtaagaccgtgtctcccgatgagatcacgacaaggccaatggacaaaactgtcgttttcgtagacaatcacgtggaattagagatgacagagagccacaccgtgtttatcgattatcaggagaaggagcgcactgaccgtccaaactttgagctttctcagcgcaagtccctcgggacacccactgttatttgcacccctaccgaagaatcagttttcttcccaggaaacggggagtccgatagacttgtggctaatgatagtcaattgacacccctggaagaatggtcaaataaccgagggcccgtagaagtggcagataatatggaactgtccaaatcagcaacatgcaagaacattaaggacgtccagtcacctggttttctcaatgagcccctttcttcaaagtcgcagcggagaaagagccttaaacttaagaatgataaaaccatcgtgtttagtgagaaccataaaaatgacatggatatcacacagtcttgcatggtggagattgataacgagtcagcactcgaagataaggaggattttcatctggccggtgcatccaagactatcctctactcatgtggccaggacgatatggaaattacccgatcccacaccactgctctcgaatgcaaaactctactgccaaatgaaattgcaatccggcccatggataagactgtgctgttcacagacaattatagcgatctggaagttaccgacagtcatacagtgtttattgattgtcaagcaaccgagaagattctggaagaaaaccccaagttcgggatcggcaaggggaagaatctgggcgtctctttccctaaggacaatagctgtgtgcaggagatcgcggagaagcaggccctcgcagtgggaaataagattgtattacacacagaacagaaacagcagcttttcgctgctacgaataggaccaccaacgagattatcaaattccactctgccgcgatggacgagaaggtcattggcaaagtggtcgaccaggcgtgcaccttagagaaagctcaggtagagtcctgtcaacttaacaatagagaccgtcggaacgtggacttcacttcttctcacgccaccgcagtctgcggatcaagcgataactacagctgcctaccgaatgtcatttcctgtacagataatttagaggggtctgcaatgctactgtgcgataaggacgaagagaaggctaactactgcccagtccagaacgacctagcttatgcaaatgatttcgcaagcgagtattacctggaatctgagggccagccgctcagtgcgccttgtccactactcgagaaggaggaggtcatacagacttcgactaaggggcagctcgactgcgttatcaccctgcacaaggatcaggacctcatcaaagaccctaggaatctactggctaaccagaccctcgtgtacagccaggacctgggagagatgaccaaactaaacagtaagagagtgagcttcaaactccctaaagaccaaatgaaggtgtatgtggatgatatttacgttatcccccaacctcatttttcaaccgaccaaccaccccttcctaagaaagggcagtctagcatcaataaagaagaagttattctgtctaaggccgggaacaagagtttgaatatcatcgagaattcaagtgcgcctatctgtgagaacaagccaaagatcctgaacagcgaagaatggtttgccgccgcctgtaaaaaggaattgaaagagaacatccagacaactaactataacactgccctggacttccatagcaattcagacgtgaccaaacaggtcattcagacccatgtgaatgctggcgaggcccccgacccagtgatcacgagcaacgttccttgttttcactccattaagcccaatctgaataatttgaatggaaaaacaggcgagtttctggctttccagaccgtgcacctccccccacttcccgaacagctgctggagcttgggaacaaggctcataacgatatgcatatcgtccaggccaccgagatccataacatcaatattattagtagcaatgcgaaagattctagagatgaggagaataagaaaagccacaatggcgcggaaacaaccagcttacccccaaaaacagtgttcaaggataaagtccggagatgttcgcttggaattttcctgcctagactgcccaacaaaaggaactgttccgtaacaggaattgacgatctcgagcagatacccgccgacacaacggatataaaccacttggaaacccagccggtgagctcaaaggattccggtattggttccgtggccggaaagctcaatctatccccctcccagtacatcaatgaggagaatttaccagtgtaccccgacgagatcaactcttctgactctataaacattgagaccgaagagaaggctctgatcgaaacttaccagaaggaaatatcgccctacgaaaacaagatggggaaaacctgtaattcccaaaagcggacctgggtccaagaagaggaagatattcataaagagaagaaaatccgcaaaaacgaaatcaaatttagcgacactacacaagatcgagagattttcgaccaccacacagaagaggacattgacaaatcggcaaattccgtgctaataaaaaatctgtcccgcacgccatctagttgcagtagtagccttgatagtattaaagcggacggcacatccctggatttcagtacctacagaagctcccaaatggaatcacagtttctgagagacactatatgtgaggaaagtctccgggagaagctgcaagacggccgcatcactatccgggagttctttattctcctgcaagtgcacatcctcatacagaaacctcgtcagtctaacctgcccggaaatttcaccgtaaataccccccccacccctgaagatctgatgctgtcccaatacgtctatcgtccaaaaattcagatttatagggaggactgtgaagcccgcaggcaaaagatcgaagaactcaaactctccgcttctaaccaggataagctactggtagatattaataagaatctatgggagaaaatgagacattgttctgataaagaactcaaagccttcgggatttatcttaataaaattaagagttgcttcaccaaaatgacgaaagtgttcacccatcagggaaaagtagccctttacggcaagttggtccagagtgctcagaatgagcgggaaaaactccagattaagatcgatgagatggacaagatccttaaaaaaattgataattgcctgactgaaatggagacagaaacgaagaatcttgaggacgaagaaaagaacaaccctgtcgaggagtgggattctgagatgcgggctgcagaaaaggagttggaacagttaaagacggaagaagaggagctccagaggaacctgctggagctggaggtccagaaagaacagaccctcgctcagatagattttatgcagaaacagcgcaaccgcaccgaggagctgctcgatcagctgtccctgtcggagtgggacgttgttgaatggtccgacgaccaagccgtgttcacttttgtgtacgacaccattcagctgaccattacctttgaggaatctgtggtgggtttcccctttctggacaaacgctaccgcaaaatcgttgatgtcaacttccagagtctgttggatgaagatcaggctcctccatcttctctgctggtgcacaaactgattttccagtacgtggaggagaaagaatcatggaaaaaaacctgtacaacccaacatcagctcccaaagatgctggaggaattcagtctagtggtgcaccattgccgcctcctcggagaggaaatcgagtacctaaagcgttggggtcccaactataacctgatgaatatcgatattaataacaacgagttgagactcctgttctcatcaagtgcagcttttgccaagtttgaaattaccttgttcctgagtgcctactacccaagtgtgccacttccttcaacaattcaaaatcacgtcggcaatacatctcaggatgacattgcgaccattctatctaaagtccccctggagaacaactacctgaagaacgttgtcaagcagatttatcaggatctctttcaggactgccatttctaccactag

SEQ ID NO: 246899 - DNA, 7029 bp, Artificial Sequence
  derived and/or modified sequence
atggatggagtgagcagcgaggccaatgaagaaaatgacaacatcgagaggcctgtgagaagaagacacagcagcatcctgaagcccccaagaagccccctgcaggacctgcggggcggcaatgaaagagtgcaggagagcaatgccctgaggaacaagaagaacagcagaagagtgtcctttgctgacaccatcaaggtgttccagacagagagccacatgaagatcgtgaggaagtctgagatggagggctgcagcgccatggtgcccagccagctgcagctgctgcccccaggcttcaagcgcttcagctgcctgagcctgcctgagacagaaacaggagagaacctgctgctgatccagaacaagaagctggaggacaactactgtgagatcaccggcatgaacaccctgctgagcgcccccatccacacccagatgcagcagaaggagttcagcatcatcgagcacacccgggagaggaagcacgccaatgaccagaccgtcatcttcagtgatgagaaccagatggacctgaccagcagccacacagtgatgatcaccaagggcctgctggacaaccccatcagcgagaagagcaccaagattgacaccaccagcttcctggccaacctgaagctgcacacagaggacagcaggatgaagaaggaggtgaacttctctgtggaccagaacaccagcagcgagaacaagattgacttcaatgacttcatcaagaggctgaagacaggcaagtgcagcgccttcccagatgtgcctgacaaggaaaattttgagatccccatctacagcaaggagcccaacagcgccagcagcacccaccagatgcacgtgtccctgaaggaggatgagaacaacagcaacatcaccaggctcttccgggagaaggatgatggcatgaacttcacccagtgccacacagccaacatccagaccctcatccccaccagcagcgagaccaacagccgggagagcaaaggaaatgacatcaccatctatggaaatgacttcatggacctgaccttcaaccacaccctgcagatcctgcctgccactggaaacttcagcgagattgagaaccagacccagaatgccatggatgtgaccaccggctacggcaccaaggccagcggcaacaagacagtgttcaagagcaagcagaacacagccttccaggacctgagcatcaacagcgctgacaagatccacatcaccaggagccacatcatgggcgctgagacccacatcgtgtcccagacctgcaaccaggatgcccgcatcctggccatgaccccagagagcatctacagcaaccccagcatccagggctgcaagacagtgttctacagcagctgcaatgatgccatggagatgaccaagtgcctgagcaacatgagggaggagaagaacctgctgaagcatgacagcaactatgccaagatgtactgcaacccagatgccatgagcagcctgacagagaagaccatctacagcggggaggagaacatggacatcaccaagagccacacagtggccatcgacaaccagatcttcaagcaggaccagagcaatgtgcagattgctgctgcccccaccccagagaaggagatgatgctgcagaacctgatgaccaccagtgaagatggcaagatgaatgtgaactgcaacagcgtgccccacgtgtccaaggagcgcatccagcagagcctgagcaaccccctgagcatcagcctgacagacaggaagacagagctgctgagcggggagaacatggacctgacagagagccacaccagcaacctgggcagccaggtgcccctggccgcctacaacctggcccctgagagcaccagcgagagccacagccagagcaagagcagcagtgatgaatgtgaggagatcaccaagagcagaaatgagcccttccagaggagtgacatcatcgccaagaacagcctgacagacacctggaacaaggacaaggactgggtgctgaagatcctgccctacctggacaaggacagcccccagagcgctgactgcaaccaggagatcgccaccagccacaacatcgtgtactgcggcggcgtgctggacaagcagatcaccaacagaaacacagtgtcctgggagcagagcctcttcagcaccaccaagcccctcttcagcagcggccagttctccatgaagaaccacgacacagccatcagcagccacacagtgaagtctgtgctgggccagaacagcaagctggccgagcccctgaggaagagcctgagcaaccccaccccagactactgccacgacaagatgatcatctgcagcgaggaggagcagaacatggacctgaccaagagccacacagtggtgattggcttcggccccagcgagctgcaggagctgggcaagaccaacctggagcacaccaccggccagctgaccaccatgaaccggcagattgctgtgaaggtggagaagtgtgggaagagccccatcgagaagagcggcgtgctgaagagcaactgcatcatggatgtgctggaggatgagagcgtgcagaagcccaagttccccaaggagaagcagaatgtgaagatctggggcaggaagtctgtgggcggccccaagattgacaagaccatcgtgttttctgaagatgacaagaatgacatggacatcaccaagagctacaccatcgagatcaaccaccggcccctgctggagaagagggactgccacctggtgcccctggccggcaccagcgagaccatcctgtacacctgccggcaggatgacatggagatcaccaggagccacaccacagccctggagtgcaagacagtgtccccagatgagatcaccacccggcccatggacaagacagtggtgtttgtggacaaccacgtggagctggagatgacagagagccacacagtgttcatcgactaccaggagaaggagaggacagaccggcccaactttgagctgagccagaggaagagcctgggcacccccaccgtcatctgcacccccacagaggagagcgtcttcttccctggaaatggagagagtgaccggctggtggccaatgacagccagctgacccccctggaggagtggagcaacaacagaggccctgtggaggtggccgacaacatggagctgagcaagagcgccacctgcaagaacatcaaggatgtgcagagccctggcttcctgaatgagcccctgagcagcaagagccagaggaggaagagcctgaagctgaagaatgacaagaccatcgtgttttctgagaaccacaagaatgacatggacatcacccagagctgcatggtggagattgacaatgaaagtgccctggaggacaaggaggacttccacctggccggggccagcaagaccatcctgtacagctgtggccaggatgacatggagatcaccaggagccacaccacagccctggagtgcaagaccctgctgcccaatgagatcgccatccggcccatggacaagacagtgctcttcacagacaactacagcgacctggaggtgacagacagccacacagtgttcatcgactgccaggccacagagaagatcctggaggagaaccccaagtttggaattggcaagggcaagaacctgggcgtgtccttccccaaggacaacagctgtgtgcaggagattgctgagaagcaggccctggccgtgggcaacaagatcgtgctgcacacagagcagaagcagcagctgtttgctgccaccaacagaaccaccaatgagatcatcaagttccacagcgctgccatggatgagaaggtgattggcaaggtggtggaccaggcctgcaccctggagaaggcccaggtggagagctgccagctgaacaacagagacagaagaaatgtggacttcaccagcagccacgccacagctgtgtgtggcagcagtgacaactacagctgcctgcccaacgtcatcagctgcacagacaacctggagggcagcgccatgctgctgtgtgacaaggatgaggagaaggccaactactgccctgtgcagaatgacctggcctatgccaatgactttgccagcgagtactacctggagagcgagggccagcccctgagcgccccctgccccctgctggagaaggaggaggtgatccagaccagcaccaagggccagctggactgtgtgatcaccctgcacaaggaccaggacctgatcaaggaccccaggaacctgctggccaaccagaccctggtgtacagccaggacctgggggagatgaccaagctgaacagcaagagggtgtccttcaagctgcccaaggaccagatgaaggtgtatgtggatgacatctacgtgatcccccagccccacttcagcacagaccagccccccctgcccaagaagggccagagcagcatcaacaaggaggaggtgatcctgagcaaggccggcaacaagagcctgaacatcatcgagaacagcagcgcccccatctgtgagaacaagcccaagatcctgaacagcgaggagtggtttgctgctgcctgcaagaaggagctgaaggagaacatccagaccaccaactacaacacagccctggacttccacagcaacagtgatgtgaccaagcaggtgatccagacccacgtgaatgctggggaggccccagaccctgtgatcaccagcaatgtgccctgcttccacagcatcaagcccaacctgaacaacctgaatggcaagacaggagagttcctggccttccagacagtgcacctgccccccctgcctgagcagctgctggagctgggcaacaaggcccacaatgacatgcacatcgtgcaggccacagagatccacaacatcaacatcatcagcagcaatgccaaggacagcagagatgaggagaacaagaagagccacaacggggctgagaccaccagcctgccccccaagacagtgttcaaggacaaggtgcggcgctgcagcctgggcatcttcctgccccggctgcccaacaagaggaactgcagcgtgactggaattgatgacctggagcagatcccagctgacaccacagacatcaaccacctggagacccagcctgtgagcagcaaggacagcggcatcggctctgtggccggcaagctgaacctgagccccagccagtacatcaatgaggagaacctgcctgtgtacccagatgagatcaacagcagtgacagcatcaacattgaaacagaggagaaggccctgattgagacctaccagaaggagatcagcccctatgagaacaagatgggcaagacctgcaacagccagaagaggacctgggtgcaggaggaggaggacatccacaaggagaagaagatcaggaagaatgagatcaagttcagtgacaccacccaggaccgggagatctttgaccaccacacagaggaggacatcgacaagagcgccaacagcgtgctgatcaagaacctgagcaggacccccagcagctgcagcagcagcctggacagcatcaaggcagatggcaccagcctggacttcagcacctaccgcagcagccagatggagagccagttcctgcgggacaccatctgtgaggagagcctgcgggagaagctgcaggacggccgcatcaccatccgggagttcttcatcctgctgcaggtgcacatcctgatccagaagccccggcagagcaacctgcccggcaacttcaccgtgaacaccccacccaccccagaggacctgatgctgagccagtatgtgtaccggcccaagatccagatctaccgggaggactgtgaggcccggcggcagaagattgaggagctgaagctgagcgccagcaaccaggacaagctgctggtggacatcaacaagaacctgtgggagaagatgaggcactgcagcgacaaggagctgaaggccttcggcatctacctgaacaagatcaagagctgcttcaccaagatgaccaaggtgttcacccaccagggcaaggtggccctgtatggcaagctggtgcagagcgcccagaatgaaagagagaagctgcagatcaagattgatgagatggacaagatcctgaagaagattgacaactgcctgacagagatggagacagagaccaagaacctggaggatgaggagaagaacaaccctgtggaggagtgggacagcgagatgagagctgctgagaaggagctggagcagctgaagacagaggaggaggagctgcagaggaacctgctggagctggaggtgcagaaggagcagaccctggcccagattgacttcatgcagaagcagaggaacagaacagaggagctgctggaccagctgagcctgtctgagtgggatgtggtggagtggagcgatgaccaggccgtgttcacctttgtgtatgacaccatccagctgaccatcacctttgaggagagcgtggtgggcttccccttcctggacaagcgctacaggaagatcgtggatgtgaacttccagagcctgctggatgaggaccaggccccacccagcagcctgctggtgcacaagctgatcttccagtatgtggaggagaaggagagctggaagaagacctgcaccacccagcaccagctgcccaagatgctggaggagttcagcctggtggtgcaccactgccgcctgctgggggaggagattgagtacctgaagcgctggggccccaactacaacctgatgaacatcgacatcaacaacaatgagctgcggctgctcttcagcagcagcgctgcctttgccaagtttgagatcaccctcttcctgagcgcctactaccccagcgtgcccctgcccagcaccatccagaaccacgtgggcaacaccagccaggatgacatcgccaccatcctgagcaaggtgcccctggagaacaactacctgaagaatgtggtgaagcagatctaccaggacctcttccaggactgccacttctaccactag

SEQ ID NO: 246900 - DNA, 7029 bp, Artificial Sequence
  derived and/or modified sequence
atggacggcgtgagcagcgaggccaacgaggagaacgacaacatcgagcggcccgttcggagacgccattcgtcgatcctgaaacccccgaggtccccattgcaagatctgagaggagggaacgagcgggttcaagaatccaatgccctcagaaacaaaaagaactcccggcgcgtctctttcgctgacacaattaaagtcttccagactgaatcgcatatgaaaattgttcgtaaatccgaaatggaaggctgctcggctatggtgccgagccagctgcaactcttgccccccggattcaagagattctcatgtctcagccttcccgaaaccgagaccggcgaaaatctactgcttatccagaacaaaaagctggaggacaactattgcgaaataaccggtatgaatacactcttatccgcacctatccacacgcagatgcaacagaaggagtttagtatcatagagcacacaagggagagaaagcacgctaacgatcagactgttatcttctctgacgagaaccagatggatttgacctcttctcataccgtgatgatcacgaaaggactgttagacaacccgatttctgaaaagagtactaagattgacaccacatctttcctcgccaacctgaaattacacaccgaagatagtaggatgaagaaggaggtgaattttagtgtggaccaaaacacttcctctgaaaacaaaattgacttcaacgattttattaagagactcaagacaggtaaatgttcggcatttcccgacgtgccagataaagagaactttgagataccgatctacagtaaagagcccaactccgcctcctccacacatcagatgcatgtgagtctgaaggaggatgaaaataactccaacatcactcgcttgttccgcgagaaggacgacggcatgaactttacgcaatgccataccgctaacatccagacactgattccgacaagctccgagactaattcacgcgagagcaaaggaaatgatataacgatctatgggaacgacttcatggatctgacattcaatcataccctccaaattttgccagctactggtaactttagcgaaatagagaatcagactcaaaatgcaatggacgtaacaaccggatatggaacgaaggctagcgggaataagaccgtgttcaagtcaaagcagaatactgcttttcaggatctgagcatcaactcggccgataaaattcacatcaccaggtcccacataatgggggctgagacgcatatcgtgagccagacctgcaaccaggacgctcggatcctagccatgacacccgagtccatctacagcaatcctagtatccaaggctgtaaaactgtgttctactcatcgtgcaatgatgctatggaaatgaccaaatgtctcagcaatatgcgtgaggaaaagaacctcctgaagcacgattctaattacgccaaaatgtactgtaaccctgacgcaatgtcctccctgacagagaaaaccatatacagcggtgaggagaacatggacattaccaagagccacacagtggcgattgacaatcaaattttcaagcaagatcagagcaacgtgcaaattgcagccgcaccaacacccgagaaggaaatgatgctccagaacctgatgacgaccagcgaggatggcaagatgaacgtgaactgtaacagcgtcccccacgtgtccaaagaacggattcagcaaagcctgtccaaccccctgtctatttccctcacagaccggaagaccgaattgctgtccggggagaacatggatctgaccgaatcacacaccagcaatttggggtcccaggtaccactggctgcctataacctggcgcccgagagcacgagtgagagccactcccagtccaaaagttcctcggacgagtgtgaggagatcacaaagtcccgcaacgagccttttcagcgatcggatattattgccaaaaattccttgacagacacatggaacaaggataaggactgggttctcaagattctgccctatttagacaaggacagcccccagtcagccgattgcaatcaggagatcgccaccagtcacaatatcgtatattgtgggggagtactggataaacagatcactaaccgaaatacagtcagctgggagcagagtctgttctccaccacaaaacctctgttcagtagtgggcaatttagcatgaagaaccatgatacggcaatttcatcccacacggtgaaatctgtgctagggcagaacagtaagctagccgaacctctgagaaaaagcctttcaaatcccacaccggactattgccacgataagatgattatttgcagtgaagaagagcaaaacatggatctgactaaaagtcacacggtcgtgatcgggtttggaccatccgagctgcaggaattaggaaaaactaaccttgaacacactaccgggcagttgactactatgaacaggcagattgcagttaaggttgaaaaatgcggtaaatcaccgatagagaagtctggcgttttgaagtcaaactgtatcatggatgtcctggaggatgaaagcgtccagaagccgaaattccctaaagaaaaacagaatgttaagatatgggggagaaagagtgtgggaggtcccaagatcgataagaccatcgtgtttagcgaagatgacaagaacgacatggacataactaagagctacaccatcgagattaatcacagacccctcttggagaagcgcgattgccacctggtgccgcttgccggtacttcagaaaccattctctatacttgtcgccaggacgacatggagataactagaagccacaccacagctcttgagtgtaaaaccgtgtctccagacgaaattacgacaaggcctatggacaagacagtggtattcgttgataaccacgttgagctggaaatgacagagtcgcatactgttttcatcgactatcaagaaaaagaacggacagaccgcccaaacttcgagctgtcccagcgtaagtccctgggaactcccacagtcatttgtactcccactgaggagtccgtgttctttccagggaacggcgagtcagatagacttgtggctaacgacagccagctgactccactcgaagagtggagcaataataggggtccggtggaggtggccgacaatatggagctgtccaagtctgctacatgtaaaaatatcaaggatgtgcagtcaccggggttcttgaacgaacccttgtcatctaaaagccaacggagaaaatcgttgaaactgaagaatgacaaaaccattgtgttcagtgaaaaccacaagaacgacatggatattactcagtcatgcatggttgagatagacaacgaaagtgctctggaagacaaggaggattttcatctcgctggcgcatcgaagaccatcctctattcttgtgggcaggatgacatggaaatcactcggtcccacactacagctctagaatgcaagactttactaccgaacgaaattgccataaggcccatggacaagacagtgctgtttactgacaattacagcgatctggaagtgaccgacagccacactgtattcatcgattgccaggcgactgagaagatactggaggagaaccccaagttcggcataggcaaaggcaagaacctgggtgtgagcttccccaaggacaactcttgcgtccaagagattgccgagaagcaagctttggctgttggcaacaaaattgtgctgcacactgagcagaaacagcagctctttgccgccacgaatagaacaaccaacgaaatcatcaagtttcatagcgccgctatggacgagaaggtgatcggcaaggtggttgaccaggcgtgcaccttagagaaagcccaggtggaatcctgccagctgaacaatagggatcgacgaaatgttgacttcacttcttctcacgcgactgctgtttgcggttcatcggataactactcatgcctgccaaacgttataagttgcacggataacttggaggggtccgccatgctcctgtgcgacaaagacgaggagaaggctaattattgtcctgttcaaaatgacttagcctacgcaaatgatttcgcttcggagtattatctggaatctgaggggcaacccctctccgcaccctgccctttgctcgaaaaagaggaggtgattcagactagcaccaaagggcaacttgactgcgttattactctgcataaagaccaggatctcatcaaagatccacggaacctgctggccaaccaaactctggtgtattcgcaagacttgggcgagatgaccaaattgaattccaaacgcgtgtccttcaaattgcccaaggaccagatgaaagtgtatgtggacgacatatatgtcatccctcaaccccatttcagcaccgaccagcccccgttgcctaagaaagggcagtcgagcattaacaaggaggaagtgatcttatcaaaggcagggaacaagagtttgaatatcatcgaaaattcatctgctcccatctgtgagaataagcccaaaattcttaatagtgaggaatggttcgccgccgcctgcaaaaaagaattaaaagaaaacatacagaccacgaattataacactgccctggattttcattcgaattccgacgtaactaaacaagttatccagacccatgtgaacgctggggaggcgcccgatccagtcattaccagtaacgtcccatgttttcattcgataaaaccgaatcttaataacctgaatggtaagactggagaattcctagcctttcagaccgtgcacctgcctcctttgccggaacagctgctcgagctgggcaataaagcacataacgacatgcacatagtccaggccactgagattcataacatcaatattatctcttccaacgccaaagactcgcgggacgaagagaataaaaaaagccacaacggagcagagaccacctctctgccccccaagaccgtgtttaaggacaaggtccgtaggtgctctttaggcatcttcctccctcgactgcctaataaaaggaactgtagtgtgacgggcatcgacgacctggagcagatccctgctgatacaactgatatcaatcacctggagacgcagcctgtctcctcaaaggatagtgggataggcagcgtagcaggcaagctcaacctgtctccttctcaatacataaacgaagaaaacctgcccgtctaccccgacgaaatcaactcctctgactctattaatatcgagaccgaggagaaggccctcatcgaaacctaccagaaagagattagcccttacgaaaacaaaatgggcaaaacatgcaacagccagaaacggacctgggtgcaggaagaagaggatatacataaggaaaagaagatcagaaagaatgaaataaagttttctgacaccactcaagaccgtgaaatcttcgaccaccatacagaggaggatattgacaaatccgccaatagcgtccttatcaagaacttgtctaggacaccttcctcctgtagctctagcctggacagtataaaagcggacgggacctcactggacttttcaacctacaggtcctcccaaatggaaagtcagttcttgagagacacaatctgcgaggagagtcttcgcgaaaaactgcaagatggacggattactatccgcgagttttttattctgctgcaggtccacatcctgattcaaaagcccaggcagtccaacttaccggggaactttacggttaatacaccaccaactcccgaggatctgatgctgtcccagtacgtatatagacccaaaattcagatataccgggaagactgcgaagccagacgtcagaagatcgaggaattgaagctgtccgcatctaaccaggataagctcctggtagatatcaataaaaacctgtgggagaaaatgcggcactgtagtgacaaagagctgaaagctttcggcatctacctaaataaaatcaagagttgctttacgaagatgaccaaggtcttcacgcaccagggaaaagtggccctgtacggcaaactggtacagtccgcccagaacgagagagagaagctacaaatcaagattgatgaaatggacaaaattctgaaaaagatagacaattgtctaacagagatggagaccgagaccaagaacctcgaagacgaggaaaagaataatccagtggaggaatgggatagcgaaatgcgcgccgcagagaaagaactggagcagctgaagactgaggaagaagagcttcagaggaacctgctggagctagaagttcaaaaggagcaaactctggcacagatcgactttatgcagaagcagcgaaatcgaacggaagaattgctagatcagctgtctctgagcgagtgggatgttgtggaatggtcggacgatcaggctgtgtttactttcgtgtacgacactatccagcttactattacgttcgaggagagcgtggttgggtttccatttcttgacaaacgataccgcaaaattgtcgacgttaactttcagagccttctggacgaggaccaggcccctccctcttccctgctcgtgcataaactgatcttccagtatgttgaagaaaaggagtcatggaaaaagacctgcaccactcaacaccagttacccaaaatgctggaggagtttagcttggtcgtacaccattgcagacttcttggcgaggagatcgaatacttgaaaaggtggggccctaactacaacctcatgaacatcgatatcaataacaacgagcttcgcctcctgttctcaagcagtgccgccttcgctaagttcgagattacactcttcctgagcgcgtattatcccagcgtgcccttaccatctacaatccagaaccacgtgggcaacactagccaggatgatatcgccaccattctctccaaagtacctctggaaaataactatttaaagaatgtcgttaaacagatttaccaggatctgtttcaagattgccatttttaccactag

SEQ ID NO: 246901 - DNA, 7028 bp, Artificial Sequence
  derived and/or modified sequence
atggacggcgtgtcatcagaggccaacgaggaaaatgacaacatcgaacgtcctgtacggcgaaggcattcatcaatactgaaaccacctagaagccccctccaggacctgcgaggcggtaatgaaagggtgcaagagtctaacgccctgcggaacaaaaaaaactcaagacgggtgtctttcgcggacacaatcaaggttttccagactgaatcccatatgaagattgtcaggaagtctgaaatggaggggtgctccgctatggtgccatcgcagttacagttgctgccccctggattcaaacggttctcttgtctgtccttaccagagacagagaccggagagaacctcctgcttatacaaaataagaaacttgaagataactattgtgagataactgggatgaacaccctgttgtccgctccaattcacacccagatgcagcaaaaggagttctccatcatcgaacatacccgagaacgcaagcacgcaaacgatcaaactgtaatctttagtgatgagaatcagatggacttgacaagttcccacacagttatgattaccaaaggcctgctggacaacccaattagcgagaaatccacaaaaatagatacaacttctttccttgcaaacctaaagctgcacacggaagactctaggatgaaaaaggaagtgaatttctcagtggaccagaatacctcctcagaaaacaaaattgacttcaacgacttcatcaagagactgaaaacaggtaagtgttctgcattccccgacgtcccagataaggagaattttgagatacccatctattccaaggaaccaaacagtgcctcaagtactcatcagatgcacgtgtcactgaaggaggatgagaataacagtaatataacacgcctctttcgcgaaaaggacgatgggatgaactttacgcaatgtcatacggccaacattcagactctgatccccacatcatccgagaccaactcacgtgaatctaaggggaacgatattactatctacggcaacgatttcatggacctgaccttcaaccacacactgcaaatcctgccggctaccggaaatttttcagagatagaaaaccagacacagaacgccatggacgtgactactggctacggcactaaggcatctgggaataagacggtgtttaagagtaagcaaaacactgcctttcaggatctgagcatcaacagtgctgataaaatccatatcacaagatcgcacatcatgggagctgagacccatattgtatctcaaacatgcaaccaggacgccagaattttagccatgacgcctgagagcatttattcaaatcctagcatccaggggtgcaaaacagttttctatagctcctgcaacgatgcgatggaaatgactaagtgtctgtctaatatgagggaggaaaagaaccttttgaagcatgacagtaattatgcaaaaatgtattgcaatcctgacgctatgtcgagcctgacagaaaagactatctacagcggagaagagaacatggatatcacgaagtctcataccgtcgccattgacaatcagatattcaaacaggatcagtccaatgtccagatcgccgctgctcccacccccgaaaaggagatgatgctccagaatttaatgacgacatctgaggatggaaagatgaacgtgaattgcaactcggtaccccatgtttcgaaagagcgcattcagcaaagcctgagtaatccactatccattagcctcacagaccgcaaaaccgaacttctctccggcgaaaatatggatctgaccgaaagccacacaagtaacctgggtagccaagtgcccctggccgcatacaaccttgcgccagaatctacttccgagtctcattctcagagcaagagcagctcagacgaatgcgaggaaattaccaagagccgcaacgagccattccagcggtcagatataatcgccaaaaactctctaacggacacctggaataaagataaagattgggtgctcaagatcctgccttatttggacaaggactctccacaatcagccgattgcaatcaagagatcgctacatctcacaacattgtctattgcggcggagtgctggataagcagatcaccaatagaaacacagtgagttgggaacagagtttattttcaacaactaaaccgctgttctcaagcggccagttctctatgaagaatcatgacaccgctatcagctcacataccgttaaaagtgtgctcggccagaactctaagctggcagagccgttgcggaagagcctgagcaatcccaccccagactactgtcatgacaaaatgatcatttgcagtgaggaggagcagaatatggatttgacaaagtcccataccgtggtgattggctttggcccaagtgagctgcaggagctcggcaagacaaacttggaacacactactggccaacttacaactatgaatcggcaaatagcggttaaagtggagaaatgcggcaagtctcccatagaaaagagcggagtgcttaaatccaattgcataatggatgttctggaggacgagtcggtccagaaaccaaagttccccaaagaaaagcagaacgtcaagatttgggggcgtaaatcagtgggaggccctaaaatcgacaagacaatcgtgtttagcgaagacgataaaaatgacatggacattacaaagtcttacactatcgaaattaatcaccgcccattgctggagaaaagagactgccacctggtgcctctcgccggaaccagtgaaactatcttgtatacctgccgacaggatgatatggagattacaaggtcacacactactgctttggagtgcaagacagtttctcctgatgagatcaccacccgacccatggacaagacagtggtctttgttgataaccacgtggaactggaaatgacagaaagtcacactgtatttattgactatcaggagaaggagcggaccgataggcccaacttcgagctgtctcagagaaaaagtctgggcactcccacggttatatgtacacccaccgaggagagcgtgttctttccgggaaacggcgagtccgaccgcttagttgctaacgatagccagctcacacccttggaggaatggtctaataacaggggccctgtcgaggtcgcagataacatggagttgagcaaatcagccacctgcaagaacatcaaagacgtgcaaagcccgggattcctgaatgaacctctgagctccaagagtcagcggaggaagtcccttaaattaaagaatgacaaaaccattgtattcagtgaaaaccataaaaacgatatggacattacacagagctgcatggtcgagattgacaatgagagcgccctggaagacaaagaagatttccatcttgctggagccagtaaaacaattctctactcttgcggacaggatgatatggaaatcaccaggtctcacactaccgctctcgaatgcaagacactgcttcccaatgaaatcgccatccggccaatggataagactgtgctgtttactgacaattactcagacttagaggtcactgactcccataccgtttttattgactgtcaggctaccgagaagatacttgaggagaatcctaagtttggcataggcaaggggaagaatttgggcgtgagtttccctaaagataattcatgtgtgcaggagattgcagagaagcaggcactggcagtgggcaacaaaatcgtgctgcacaccgagcagaagcagcagctcttcgctgccaccaataggactaccaatgagattatcaaatttcattcggctgccatggatgaaaaggtgatcggcaaggtagtggaccaggcttgtacactcgagaaagcacaggtcgagtcatgtcagctcaataatagagaccggagaaatgtggactttactagctcccacgcgactgctgtatgcggttcgtccgacaactacagctgcctgcctaatgttatttcctgcacagataacctggaaggctcagcaatgcttctgtgtgataaagacgaagagaaagccaactactgcccagtgcaaaatgatctggcttacgctaacgactttgcctcagagtactatttagagtcggagggtcagcccctctccgccccatgtcccctgctggaaaaggaggaggtgatacagacctctacaaaggggcagttagactgcgtcatcaccctgcacaaagaccaagatcttatcaaagacccacgaaatctactagctaatcagactcttgtatattcgcaggatctgggggagatgaccaaactgaactccaaaagagtctcatttaaacttccaaaagatcaaatgaaagtctacgtcgatgacatatacgtcattccccagccacacttctctacagaccaaccacctctgcccaagaagggccagtccagcattaataaagaagaggtgattttaagcaaagccggaaacaagtcacttaacattatcgagaacagcagcgctccgatctgcgagaataagcctaagatcttgaactcggaggagtggtttgccgctgcatgtaagaaagaattaaaagaaaacatacagactacaaactacaatacagcactagatttccactcaaattccgatgtgaccaaacaggttatacagactcacgtgaacgccggagaagcccctgacccagtaatcacgagcaatgttccctgttttcactctattaagcctaaccttaacaatctgaacggaaagactggggagtttctcgccttccaaacagtgcaccttccaccgctgccagaacaactcttggagctgggcaacaaagctcataatgatatgcatattgtgcaggccactgaaattcataatatcaacatcatttcatccaatgcaaaagacagccgtgatgaagaaaacaagaagtcacacaacggtgctgagaccaccagcttacccccaaagaccgtgttcaaggacaaggtacgacggtgctctttgggtatttttctccctcggctgccaaataagagaaactgtagcgtgacaggaatagatgatctcgaacagatccctgcagacactacggatatcaatcatctagagacacagccagtctccagtaaggattctggcatcggttctgtagccggaaagctgaacctgagcccatctcagtacattaacgaagagaatctgccggtgtatccagatgagatcaattcatccgattccattaacattgagaccgaagagaaagccctgattgagacctaccagaaggaaatttccccctatgagaacaaaatgggaaaaacctgcaattcacagaaacggacctgggtacaggaggaggaagatatacacaaggagaaaaaaattaggaaaaacgaaatcaagttcagtgatacgacccaggatcgggaaatatttgatcaccacacggaggaggatattgacaaatctgctaattcggtcttgataaagaaccttagtcggacacccagctcatgttcttcctcacttgattccattaaggcggatgggacgtccctagactttagtacttatcgaagtagccaaatggagagtcagttcctccgagatacaatctgcgaagaaagtctgcgcgagaagctgcaagacggacggattacgatcagagagttttttatcctcttgcaggtgcacatcctgattcagaaacctcggcagagtaacctgcccggtaattttaccgtaaacaccccccctacaccagaagatctcatgctgtcacaatacgtgtataggcccaaaattcagatataccgagaagactgtgaagctcggaggcagaaaattgaagagcttaaactgagcgcttccaaccaggacaagctgttagtggacataaacaagaatttgtgggagaaaatgcgccactgctcagataaagagttgaaggctttcggtatttacctaaataaaatcaagtcttgcttcactaagatgaccaaggtctttacccaccaggggaaagttgcgctgtatggcaaattggtacagtcagctcagaatgagagagagaagcttcagattaagatcgatgagatggataaaatcctgaaaaagatcgataactgtctgacggagatggaaactgaaacgaaaaacctcgaagatgaggagaaaaacaatcctgtcgaggagtgggattcggagatgcgtgccgctgagaaggaactggaacagctgaagacggaggaggaagagttgcaacgaaacctcctggaactagaagtgcaaaaggagcagacgctcgcgcaaatagacttcatgcagaagcaaaggaatagaaccgaagaactgctcgatcaactgagtctaagtgagtgggatgttgttgaatggtccgatgaccaggccgtattcaccttcgtttacgacaccattcaactgacaattacatttgaggagagtgtcgtggggtttccatttctcgataaaagatacaggaaaattgtcgatgtgaactttcagagccttctggatgaggaccaggcacccccaagctccctgctagttcataaactgatctttcagtatgtcgaggaaaaggagtcatggaaaaaaacctgcactacgcaacatcagctgccgaaaatgctggaagagttttccctggtggttcaccattgtaggttactgggggaggagattgagtatcttaagaggtgggggcctaactacaacctaatgaatatcgacatcaataataacgaactgcgcctcctattctcttcaagcgcggcttttgccaaattcgaaataaccctgttcttaagtgcatattacccatctgtcccgttgccttctaccatccagaaccacgtcggcaatacatcgcaggatgatattgctactatactcagcaaggtgcccctggagaacaactacctgaaaaacgtggtgaagcagatctatcaggatctgtttcaggactgtcacttctatcatta

SEQ ID NO: 246902 - protein, 860 aa, Artificial Sequence
  derived and/or modified sequence
MTEGTKKTSKKFKFFKFKGFGSLSNLPRSFTLRRSSASISRQSHLEPDTFEATQDDMVTVPKSPPAYARSSDMYSHMGTMPRPSIKKAQNSQAARQAQEAGPKPNLVPGGVPDPPGLEAAKEVMVKATGPLEDTPAMEPNPSAVEVDPIRKPEVPTGDVEEERPPRDVHSERAAGEPEAGSDYVKFSKEKYILDSSPEKLHKELEEELKLSSTDLRSHAWYHGRIPREVSETLVQRNGDFLIRDSLTSLGDYVLTCRWRNQALHFKINKVVVKAGESYTHIQYLFEQESFDHVPALVRYHVGSRKAVSEQSGAIIYCPVNRTFPLRYLEASYGLGQGSSKPASPVSPSGPKGSHMKRRSVTMTDGLTADKVTRSDGCPTSTSLPRPRDSIRSCALSMDQIPDLHSPMSPISESPSSPAYSTVTRVHAAPAAPSATALPASPVARRSSEPQLCPGSAPKTHGESDKGPHTSPSHTLGKASPSPSLSSYSDPDSGHYCQLQPPVRGSREWAATETSSQQARSYGERLKELSENGAPEGDWGKTFTVPIVEVTSSFNPATFQSLLIPRDNRPLEVGLLRKVKELLAEVDARTLARHVTKVDCLVARILGVTKEMQTLMGVRWGMELLTLPHGRQLRLDLLERFHTMSIMLAVDILGCTGSAEERAALLHKTIQLAAELRGTMGNMFSFAAVMGALDMAQISRLEQTWVTLRQRHTEGAILYEKKLKPFLKSLNEGKEGPPLSNTTFPHVLPLITLLECDSAPPEGPEPWGSTEHGVEVVLAHLEAARTVAHHGGLYHTNAEVKLQGFQARPELLEVFSTEFQMRLLWGSQGASSSQARRYEKFDKVLTALSHKLEPAVRSSEL

SEQ ID NO: 246903 - protein, 196 aa, Artificial Sequence
  derived and/or modified sequence
MPFSKEKYILDSSPEKLHKELEEELKLSSTDLRSHAWYHGRIPREVSETLVQRNGDFLIRDSLTSLGDYVLTCRWRNQALHFKINKVVVKAGESYTHIQYLFEQESFDHVPALVRYHVGSRKAVSEQSGAIIYCPVNRTFPLRYLEASYGLGQGSSKPASPVSPSGPKGSHMKRRSVTMTDGLTADKVTRSDGCPT

SEQ ID NO: 246904 - protein, 506 aa, Artificial Sequence
  derived and/or modified sequence
MKRRSVTMTDGLTADKVTRSDGCPTSTSLPRPRDSIRSCALSMDQIPDLHSPMSPISESPSSPAYSTVTRVHAAPAAPSATALPASPVARRSSEPQLCPGSAPKTHGESDKGPHTSPSHTLGKASPSPSLSSYSDPDSGHYCQLQPPVRGSREWAATETSSQQARSYGERLKELSENGAPEGDWGKTFTVPIVEVTSSFNPATFQSLLIPRDNRPLEVGLLRKVKELLAEVDARTLARHVTKVDCLVARILGVTKEMQTLMGVRWGMELLTLPHGRQLRLDLLERFHTMSIMLAVDILGCTGSAEERAALLHKTIQLAAELRGTMGNMFSFAAVMGALDMAQISRLEQTWVTLRQRHTEGAILYEKKLKPFLKSLNEGKEGPPLSNTTFPHVLPLITLLECDSAPPEGPEPWGSTEHGVEVVLAHLEAARTVAHHGGLYHTNAEVKLQGFQARPELLEVFSTEFQMRLLWGSQGASSSQARRYEKFDKVLTALSHKLEPAVRSSEL

SEQ ID NO: 246905 - protein, 325 aa, Artificial Sequence
  derived and/or modified sequence
  misc_feature (1)..(1): Xaa can be any naturally occurring amino acid
XIQGEASRRAAGEPEAGSDYVKFSKEKYILDSSPEKLHKELEEELKLSSTDLRSHAWYHGRIPREVSETLVQRNGDFLIRDSLTSLGDYVLTCRWRNQALHFKINKVVVKAGESYTHIQYLFEQESFDHVPALVRYHVGSRKAVSEQSGAIIYCPVNRTFPLRYLEASYGLGQGSSKPASPVSPSGPKGSHMKRRSVTMTDGLTADKVTRSDGCPTSTSLPRPRDSIRSCALSMDQIPDLHSPMSPISESPSSPAYSTVTRVHAAPAAPSATALPASPVARRSSEPQLCPGSAPKTHGESDKGPHTSPSHTLGKASPSPSLSSYS

SEQ ID NO: 246906 - DNA, 1521 bp, Artificial Sequence
  derived and/or modified sequence
atgaagagaagaagcgtgaccatgaccgacggcctgaccgccgacaaggtgaccagaagcgacggctgccccaccagcaccagcctgcccagacccagagacagcatcagaagctgcgccctgagcatggaccagatccccgacctgcacagccccatgagccccatcagcgagagccccagcagccccgcctacagcaccgtgaccagagtgcacgccgcccccgccgcccccagcgccaccgccctgcccgccagccccgtggccagaagaagcagcgagccccagctgtgccccggcagcgcccccaagacccacggcgagagcgacaagggcccccacaccagccccagccacaccctgggcaaggccagccccagccccagcctgagcagctacagcgaccccgacagcggccactactgccagctgcagccccccgtgagaggcagcagagagtgggccgccaccgagaccagcagccagcaggccagaagctacggcgagagactgaaggagctgagcgagaacggcgcccccgagggcgactggggcaagaccttcaccgtgcccatcgtggaggtgaccagcagcttcaaccccgccaccttccagagcctgctgatccccagagacaacagacccctggaggtgggcctgctgagaaaggtgaaggagctgctggccgaggtggacgccagaaccctggccagacacgtgaccaaggtggactgcctggtggccagaatcctgggcgtgaccaaggagatgcagaccctgatgggcgtgagatggggcatggagctgctgaccctgccccacggcagacagctgagactggacctgctggagagattccacaccatgagcatcatgctggccgtggacatcctgggctgcaccggcagcgccgaggagagagccgccctgctgcacaagaccatccagctggccgccgagctgagaggcaccatgggcaacatgttcagcttcgccgccgtgatgggcgccctggacatggcccagatcagcagactggagcagacctgggtgaccctgagacagagacacaccgagggcgccatcctgtacgagaagaagctgaagcccttcctgaagagcctgaacgagggcaaggagggcccccccctgagcaacaccaccttcccccacgtgctgcccctgatcaccctgctggagtgcgacagcgccccccccgagggccccgagccctggggcagcaccgagcacggcgtggaggtggtgctggcccacctggaggccgccagaaccgtggcccaccacggcggcctgtaccacaccaacgccgaggtgaagctgcagggcttccaggccagacccgagctgctggaggtgttcagcaccgagttccagatgagactgctgtggggcagccagggcgccagcagcagccaggccagaagatacgagaagttcgacaaggtgctgaccgccctgagccacaagctggagcccgccgtgagaagcagcgagctgtag

SEQ ID NO: 246907 - DNA, 2583 bp, Artificial Sequence
  derived and/or modified sequence
atgaccgagggcacaaagaaaacctccaagaagttcaaattcttcaaattcaaaggcttcggtagcctgagcaatctaccccggtcatttactctgaggagaagttccgcttctatcagccgccagtcccacctcgagcccgacactttcgaggcaactcaggatgacatggttacggtaccaaagtcaccaccggcatatgcaaggtcctcagatatgtactcccatatgggtaccatgccccgcccatccatcaaaaaggcccagaactcgcaagcagcacgccaggcccaagaagctggcccaaagcctaacctggttcccggtggagtccccgatcctcccggcctggaagccgctaaggaagtcatggtgaaagcgactggtcctctggaagacacaccagccatggagcctaatccatccgcagtggaggtggaccctatcagaaagcccgaagtgcccaccggcgatgtggaagaggaacgccccccacgcgacgtgcactccgagagggccgccggagagccggaggctgggtcagattatgtgaagttcagcaaggaaaagtatatcctggactctagcccagaaaagctccacaaagagctggaggaagaattaaaactctccagcaccgacctgagatctcacgcctggtatcacggtagaattccacgagaagtgagcgagactctggtccagcgaaacggcgactttctgataagggactcccttacctctctgggagactatgtgctgacatgtagatggcggaaccaggcactgcacttcaagataaataaagtcgttgtgaaggccggggagagttacacacacatacagtatttattcgaacaggaatcgttcgatcacgtgcctgccctggtccggtatcatgtggggtctcgcaaggcggttagcgaacagagcggcgcgattatctactgtccagttaacagaacctttcccttgaggtacctggaggcctcatatggactcggacagggttccagcaagcccgcatccccagttagcccatccggcccaaaggggagccacatgaaacgtcggtctgtgactatgacagacggtcttacagccgacaaagtgacacgcagcgatggttgtcctacctctacttcccttcctcgaccacgtgatagtattaggagctgcgctctgtccatggatcagatccctgacctccatagccctatgagccccatttccgaatctccctcatccccagcatacagcacagtgactagggtacatgcagccccagctgcaccctcagcaactgctcttccagcatccccggttgcccggaggagctccgagccccaactctgtcctgggtccgcccctaagacgcatggggagagcgataaaggaccacacacttccccctcgcatactctggggaaggccagcccgtctccctccctgtcttcatattctgaccccgacagcggtcactactgtcagctgcaacccccagtccgaggatcccgggaatgggcagctaccgagaccagttctcaacaggctagaagttacggcgaacggttaaaggaattgtctgagaacggagcccctgaaggcgattggggtaagacttttaccgtccctattgtggaggtcaccagcagttttaatccagctacctttcagagcctgctcattccccgggacaaccggccacttgaagtgggactcctgcgaaaagtcaaagagttgctggcggaggtggacgccagaacgctcgccaggcatgttacaaaggtggattgcttggtggcccggatcttaggagtcacaaaggaaatgcaaacacttatgggcgttcgctggggaatggagctcctgacactgccccatggcaggcagctgcgcctggacctgcttgagcggttccacaccatgtctattatgttagcggtggatatcctgggatgtacagggtccgcggaggagcgagcagctttactgcacaagacgatccaacttgcagccgagctgcggggcaccatgggcaacatgttttcattcgctgcagtcatgggagcgctcgacatggcccagatatccaggttagaacaaacctgggtgacattgcgacagcggcataccgagggcgcaatattgtatgagaagaagctcaagcccttcctgaagtcgctcaacgaagggaaagaaggaccacccttgtctaatactacatttccccacgtgctcccgctgattactctgctcgaatgtgactctgccccccccgaaggccctgagccatggggttcgacggaacacggggtggaagtagtacttgcccacctcgaagctgctcggaccgtcgcccatcacgggggcctgtatcatacaaacgcggaggtgaagctgcaaggtttccaggccaggcccgaattgctggaggtgttctcgactgaattccagatgaggcttctctggggctcacagggcgcaagttcaagccaagcgcgcaggtatgaaaaatttgataaggttctgaccgcgctgtcccataagttggagcctgccgtgcgttcctctgagctctag

SEQ ID NO: 246908 - DNA, 1521 bp, Artificial Sequence
  derived and/or modified sequence
atgaaaagaagaagcgtgacaatgactgatggtttgacggcggacaaggttacaagatccgatggctgccccacctctacatctcttccgagacccagagactccatccggagctgtgccctgtccatggatcagatccctgatctccattcccctatgagcccaatttcagagagcccgtcttctccagcctactctacggttacacgtgtgcacgccgctcccgctgcaccatctgccaccgcactccccgcatcccctgtggcccgccggagttccgaaccccagctctgtccgggttcagcaccaaaaacccatggcgaatcagataaagggccccacacatcccccagtcacacgctggggaaagccagcccatcccccagtctctcttcatacagcgaccccgattctggccactattgccaattgcagccccctgtcaggggctccagagaatgggctgcaactgaaacgtctagtcagcaagctcgttcttacggggagaggttgaaggaactgtcagaaaacggggcccccgagggggactgggggaagacattcaccgtccctatagtggaagttacctcaagctttaacccagctacctttcagtctctcctgattccaagagacaaccgacccctcgaggtggggttgctacgaaaggtcaaagagctgctggcagaggtggatgccagaactctcgctcggcatgttaccaaagtggattgcctcgtggcccggatattaggcgtcacaaaggaaatgcagacgctcatgggggtgcggtgggggatggagctactgactctccctcatggtcgtcaacttaggctggacttgctcgagagatttcatactatgtctatcatgcttgctgtagatattctgggttgtaccggaagtgccgaggagagggctgctctgctacataagaccatccagctcgccgctgaactaaggggcacaatgggaaacatgttctcgttcgccgccgtgatgggagctcttgatatggcacaaatctccaggctggaacaaacatgggtcaccctgaggcagcgtcataccgagggagctattctctacgagaaaaaactgaagccctttcttaaatcattgaacgaggggaaagaaggacctcctctgagcaacacaactttcccgcacgtgcttcccttaattaccctgctggagtgcgactctgcccccccagaggggcccgagccatgggggagtaccgagcacggcgtggaggtggttctggcacatttagaagccgcccggaccgtcgcacaccacggcggactgtatcatacaaacgctgaagttaagctacagggcttccaagcccgacctgagctactcgaggtattctcaacggaattccagatgcgcctactgtggggaagccaaggggcatctagcagtcaagcccggagatatgaaaagtttgataaagtgcttacagctctctcacataagctagaacccgccgtgaggagtagcgagttatag

SEQ ID NO: 246909 - DNA, 2583 bp, Artificial Sequence
  derived and/or modified sequence
atgacagagggcaccaagaagaccagcaagaagttcaagttcttcaagttcaagggcttcggcagcctgagcaacctgcccaggagcttcaccctgcggcgcagcagcgccagcatcagccggcagagccacctggagccagacacctttgaggccacccaggatgacatggtgacagtgcccaagagccccccagcctatgcccggagcagtgacatgtacagccacatgggcaccatgccccggcccagcatcaagaaggcccagaacagccaggccgcccggcaggcccaggaggccggccccaagcccaacctggtgcctgggggcgtgcctgaccccccaggcctggaggccgccaaggaggtgatggtgaaggccaccggccccctggaggacaccccagccatggagcccaaccccagcgctgtggaggtggaccccatcaggaagccagaggtgcccactggagatgtggaggaggagcggcccccaagagatgtgcacagcgagagagctgctggggagcctgaggccggcagtgactatgtgaagttcagcaaggagaagtacatcctggacagcagccctgagaagctgcacaaggagctggaggaggagctgaagctgagcagcacagacctgcggagccacgcctggtaccacggccgcatcccccgggaggtgtctgagaccctggtgcagagaaatggagacttcctgatccgggacagcctgaccagcctgggggactatgtgctgacctgccgctggaggaaccaggccctgcacttcaagatcaacaaggtggtggtgaaggccggggagagctacacccacatccagtacctgtttgagcaggagagctttgaccacgtgcctgccctggtgcgctaccacgtgggcagcaggaaggctgtgtctgagcagagcggggccatcatctactgccctgtgaacagaaccttccccctgcgctacctggaggccagctatggcctgggccagggcagcagcaagccagccagccctgtgagccccagcggccccaagggcagccacatgaagagaagatctgtgaccatgacagatggcctgacagctgacaaggtgaccaggagtgatggctgccccaccagcaccagcctgccccggccccgggacagcatccgcagctgtgccctgtccatggaccagatcccagacctgcacagccccatgagccccatcagcgagagccccagcagccctgcctacagcacagtgaccagggtgcatgctgccccagctgcccccagcgccacagccctgcctgccagccctgtggcccggcgcagcagcgagccccagctgtgccccggcagcgcccccaagacccacggggagagtgacaagggcccccacaccagccccagccacaccctgggcaaggccagccccagccccagcctgagcagctacagcgaccctgacagcggccactactgccagctgcagccccctgtgcggggcagccgggagtgggccgccacagagaccagcagccagcaggcccggagctatggagagcggctgaaggagctgtctgaaaatggagcccctgagggggactggggcaagaccttcaccgtgcccatcgtggaggtgaccagcagcttcaacccagccaccttccagagcctgctgatcccccgggacaaccggcccctggaggtgggcctgctgaggaaggtgaaggagctgctggccgaggtggatgcccggaccctggcccggcacgtgaccaaggtggactgcctggtggcccgcatcctgggcgtgaccaaggagatgcagaccctgatgggcgtgcgctggggcatggagctgctgaccctgccccacggccggcagctgcggctggacctgctggagcgcttccacaccatgagcatcatgctggccgtggacatcctgggctgcaccggcagcgctgaggagcgggccgccctgctgcacaagaccatccagctggccgctgagctgcggggcaccatgggcaacatgttctcctttgctgctgtgatgggcgccctggacatggcccagatcagccggctggagcagacctgggtgaccctgcggcagaggcacacagagggcgccatcctgtatgagaagaagctgaagcccttcctgaagagcctgaatgaaggcaaggagggcccccccctgagcaacaccaccttcccccacgtgctgcccctcatcaccctgctggagtgtgacagcgcccctcctgagggccctgagccctggggcagcacagaacatggagtggaggtggtgctggcccacctggaggccgccaggacagtggcccaccacggcggcctgtaccacaccaatgctgaggtgaagctgcagggcttccaggcccggcctgagctgctggaggtgttcagcacagagttccagatgaggctgctgtggggcagccagggcgccagcagcagccaggccaggagatatgagaagtttgacaaggtgctgacagccctgagccacaagctggagcctgctgtgcgcagcagcgagctgtag

SEQ ID NO: 246910 - DNA, 1521 bp, Artificial Sequence
  derived and/or modified sequence
atgaagagaagatctgtgaccatgacagatggcctgacagctgacaaggtgaccaggagtgatggctgccccaccagcaccagcctgccccggccccgggacagcatccgcagctgtgccctgtccatggaccagatcccagacctgcacagccccatgagccccatcagcgagagccccagcagccctgcctacagcacagtgaccagggtgcatgctgccccagctgcccccagcgccacagccctgcctgccagccctgtggcccggcgcagcagcgagccccagctgtgccccggcagcgcccccaagacccacggggagagtgacaagggcccccacaccagccccagccacaccctgggcaaggccagccccagccccagcctgagcagctacagcgaccctgacagcggccactactgccagctgcagccccctgtgcggggcagccgggagtgggccgccacagagaccagcagccagcaggcccggagctatggagagcggctgaaggagctgtctgaaaatggagcccctgagggggactggggcaagaccttcaccgtgcccatcgtggaggtgaccagcagcttcaacccagccaccttccagagcctgctgatcccccgggacaaccggcccctggaggtgggcctgctgaggaaggtgaaggagctgctggccgaggtggatgcccggaccctggcccggcacgtgaccaaggtggactgcctggtggcccgcatcctgggcgtgaccaaggagatgcagaccctgatgggcgtgcgctggggcatggagctgctgaccctgccccacggccggcagctgcggctggacctgctggagcgcttccacaccatgagcatcatgctggccgtggacatcctgggctgcaccggcagcgctgaggagcgggccgccctgctgcacaagaccatccagctggccgctgagctgcggggcaccatgggcaacatgttctcctttgctgctgtgatgggcgccctggacatggcccagatcagccggctggagcagacctgggtgaccctgcggcagaggcacacagagggcgccatcctgtatgagaagaagctgaagcccttcctgaagagcctgaatgaaggcaaggagggcccccccctgagcaacaccaccttcccccacgtgctgcccctcatcaccctgctggagtgtgacagcgcccctcctgagggccctgagccctggggcagcacagaacatggagtggaggtggtgctggcccacctggaggccgccaggacagtggcccaccacggcggcctgtaccacaccaatgctgaggtgaagctgcagggcttccaggcccggcctgagctgctggaggtgttcagcacagagttccagatgaggctgctgtggggcagccagggcgccagcagcagccaggccaggagatatgagaagtttgacaaggtgctgacagccctgagccacaagctggagcctgctgtgcgcagcagcgagctgtag

SEQ ID NO: 246911 - DNA, 2583 bp, Artificial Sequence
  derived and/or modified sequence
atgaccgagggcaccaagaagaccagcaagaagttcaagttcttcaaatttaaaggcttcggttccctgtcaaatctgccacggagcttcacactacggaggtcttctgcctctatcagccgccagagccacctggaacccgacacattcgaagccacacaggatgatatggtaacggtccccaagtcacctcctgcctacgcccgatccagcgatatgtattcccatatggggaccatgccacggcccagcatcaagaaagcacagaatagccaggccgctcggcaagcacaggaggccggtcctaagcccaatctagtgcctggtggcgtccctgacccacccggactagaggccgctaaggaagtgatggtcaaggccacaggcccactggaggatacccccgccatggagcctaacccgtctgcagttgaagtcgatccaatccgtaagcctgaagtgcccacaggagatgtagaagaagagcggcctcccagagatgtgcatagtgagcgtgcagctggagagccagaagctggctcagattacgtgaagtttagtaaagagaaatacatcctggactcttcacctgaaaagctgcacaaggagcttgaggaggagctcaagctcagctccaccgacctgaggtcacatgcctggtatcatggtcggataccccgtgaggtaagcgaaaccctagtgcagcggaacggcgatttcctgatcagagattcccttacaagcttaggcgattacgtgctcacttgccggtggaggaaccaagccctccacttcaaaattaacaaggttgtggtgaaggcgggagagagttatacacacattcagtatctctttgaacaagaatcatttgaccatgtccccgcactggtacgataccacgtggggagtcgcaaggctgtgtctgagcagagcggcgctatcatttattgcccagtgaaccggaccttcccgctccgctacctggaggcttcttacgggctgggacagggcagttcgaagcctgctagcccagtatctccctcaggccctaaaggctctcatatgaagagacggagcgtaacaatgactgatggtctgactgctgacaaggtgaccaggtcggacggatgtccaaccagcacatcgctgccacgtcccagggacagcatcaggtcctgtgctctgtcgatggaccagatcccggacttgcactcaccaatgagccctatctctgaaagtccttcatcacccgcctacagcactgttacacgcgtgcacgccgctcctgccgcaccttctgcaaccgccctgccagcttctcccgtggcccgacgtagctctgagcctcagctgtgcccagggagcgccccaaagacacacggagaaagcgacaaggggcctcacacaagccctagtcacactctgggaaaagccagtccatctccctctctgagctcctatagcgacccggacagcggtcactactgtcagttgcagccgcccgtccggggatcccgagagtgggcagccaccgagacttcaagccagcaggcaaggtcttatggggagagactgaaggagctttcagaaaatggagcacctgagggagattggggaaagacatttaccgtcccaatagtcgaagtgacctcatcttttaatcctgctacttttcagtctctgctcattccacgggacaatcggcccctggaggttggcctgttgagaaaggtcaaagagctacttgctgaggtggacgctagaaccctcgccaggcatgtgactaaggttgactgtctggtggcccggattttgggagtgactaaagagatgcagactctgatgggagtgcgctgggggatggagcttctgactctgcctcacggccgtcagctcagactcgacttattggagcgctttcataccatgagcatcatgttggccgtcgatatcctcggttgcaccggttcagccgaggagcgcgccgcactgctgcataaaaccattcagctagccgcagaactcagggggacgatgggcaacatgttctcctttgccgctgtgatgggggcattagatatggcacaaatcagcagacttgagcaaacatgggtgacattgagacagagacacacagagggcgctattctctatgagaagaaactcaagccatttcttaaatccctcaatgaaggaaaggagggcccacccctgtctaataccactttcccacatgtccttcccctgataaccctgctcgaatgcgactctgctccacctgagggcccagaaccctggggttcaactgaacacggtgtagaggtggtgctggcccacctggaagcggccagaactgtcgctcaccatggcggcctttatcatactaacgcggaagttaagctgcagggattccaggccagacctgagcttttagaagtcttttccaccgagtttcagatgcgtctactgtggggctcccagggtgcatcatcatctcaggctcggaggtacgaaaagtttgataaagtgctcaccgccctttctcacaagcttgaacccgcggtgagatcctctgagctgtag

SEQ ID NO: 246912 - DNA, 1521 bp, Artificial Sequence
  derived and/or modified sequence
atgaagcggcggagcgtgaccatgaccgacggcctgaccgccgacaaagtgacacgctcggacgggtgccctacttccacctcactgcccaggcctcgcgatagcattagatcatgtgcactatccatggaccagattcccgacctccacagtcccatgtcacctatctcggagtcaccctcctctcccgcttattctacggtcaccagagttcacgccgcccctgccgctccatcagccacagcgctccccgcatctcccgtagcccgacggtctagcgagccccagctgtgtccaggttcggctcctaaaacacatggcgagagtgacaagggcccacacaccagtccgtctcatacactggggaaggcctccccatcacctagcttatcgagctacagtgatccggactccggccactactgccaactgcagccacctgtgaggggctctagggagtgggccgcgaccgaaacttctagtcagcaggcccggtcctacggagagcgtctcaaggaactgtctgagaatggcgcccctgagggcgattgggggaaaacctttacagtacccattgtcgaagtcaccagcagttttaacccagctactttccagagcctgctaatacctcgcgataaccgccccctcgaagtagggcttttacgtaaggtgaaagagctgcttgctgaggtggacgctaggacactggccagacatgtcacgaaggtggactgcctggtggctagaatcctgggagtcactaaggagatgcagactctaatgggggtgagatggggtatggaactgctaactctgcctcacggtcgccaattacgactggatcttctggaacggtttcacactatgagcatcatgctcgcggtggacattctgggctgcacaggttctgccgaagagcgagctgcattactccacaaaaccatccagctggcagcagagcttagagggactatggggaatatgtttagtttcgccgccgtcatgggcgccctggacatggcccagataagtcggcttgaacagacatgggtgaccctgcgacagcgacataccgaaggcgcaatcctgtacgagaagaaattgaaaccctttctgaaatctttaaatgaagggaaggagggacctcccttgagtaacacaacattcccccatgtgctaccacttattaccttgctggaatgtgatagcgctcctccggaaggtcctgagccgtggggctctaccgaacatggagtggaagttgtgttggcccatctcgaagctgcccgaacagtcgcccaccatgggggcttgtatcacaccaatgctgaggtgaagctgcaaggctttcaagcccgtcctgagctgttggaggtattcagcaccgaatttcagatgcgcctgctttggggcagccagggagcttctagttctcaggctcgacgctacgaaaaatttgacaaggtgctaactgccctctcccataagctggaacccgctgttcgtagcagcgaattatag

SEQ ID NO: 246913 - DNA, 2583 bp, Artificial Sequence
  derived and/or modified sequence
atgacagagggcaccaagaagacctccaaaaaatttaagttctttaaattcaagggctttggttccctctctaacctcccgagatctttcacactccggaggtcttccgctagcatctctaggcaaagtcaccttgagcctgatacttttgaggcaacgcaggacgatatggttactgttcctaagtcccctccagcctacgccagatcctcagatatgtattcgcatatgggcacgatgcctcgacctagtatcaagaaggcccagaatagtcaagccgcaaggcaggcccaggaagccggaccgaagccaaacttagtgccaggaggggtccccgatcctcctggcctcgaggctgccaaagaggtcatggtaaaggccactgggcctttggaggatactccggcaatggagcccaacccatcagcggtggaggtggaccctatacggaagcctgaggtgccgacgggagacgttgaggaggaacgcccaccgagagatgtgcatagcgaaagggcagcaggagaaccagaagctggcagtgattacgtgaaattttccaaagagaagtacattctggacagctcacctgagaagcttcacaaagagctagaagaagaactgaagctatctagtacagacctgagatcccacgcctggtaccacggcagaatccccagggaggtgagcgaaacactcgtgcagaggaacggcgattttctgatccgtgatagtctcacgtcccttggagactatgtactgacgtgcagatggagaaaccaggctctgcacttcaaaatcaacaaggtggttgtaaaggccggagaatcttatacgcacatccagtacctctttgaacaagagtccttcgatcacgtgccggcactcgtaagatatcacgtgggatccagaaaagccgtctccgagcaatcaggggctatcatttactgccctgtcaacaggacctttccgcttcgatatctggaggccagttatggcttgggacaaggttcaagcaaaccagcctccccggtgagcccgtccggcccaaagggttcccatatgaagcggagatctgtgactatgacagacggcctcacagcagacaaggtgactagaagtgatggatgtccaacctcaaccagcctccctagacccagggactctatcaggagctgcgcccttagcatggaccagatccctgatctgcacagccccatgtccccaatctcagagagcccctcatcgcctgcatatagcacggtgacaagggtgcacgccgctcccgcagctcccagcgcaacggcactacccgcttccccggtggcacggagatcatcagaaccccagctgtgtcccggtagcgcccctaagacacatggcgaatccgacaaaggtccccataccagcccttcccatacccttggaaaggccagcccatctccttctctgtcttcctattctgaccccgattctgggcactactgtcagctgcagccacctgtcaggggatccagagagtgggccgctacggaaacatctagtcaacaagccaggagctacggggagaggttgaaagagttatctgagaacggggctcccgagggcgattggggaaagaccttcacggtgccgatagttgaggtcacgagcagcttcaatccagcgacctttcagagtctgttaatccccagagataacagacctctcgaggtgggcctgttgcgtaaggttaaggagctgctggcagaggtggatgcccgaacactggctagacacgttactaaggtcgactgcctggtggccagaatcctgggtgttacaaaagaaatgcaaactttgatgggagtgcgttggggcatggagctcctcacattaccacacggccgtcaattacggctggaccttctagagagattccacaccatgagtattatgttagccgtcgacattctgggttgtacaggatcggcagaagagcgcgctgccttgctgcataaaaccatacagctggctgcggaactgagaggaacgatgggcaacatgttttccttcgccgcagtgatgggcgctctcgatatggcgcagataagccggttggagcagacgtgggtaaccttgaggcagcgccataccgaaggagcaatcctatacgagaagaaactgaagcccttcctcaagagcctgaacgaggggaaagaggggccacccttaagcaacaccactttcccacacgtgttgccgttgatcaccttgctcgagtgcgactctgcccctcctgagggtccagaaccttggggtagcacagaacacggggtggaagtagtgctggcacacttggaggcagcacgtaccgtggcccaccatggcggtctgtaccacacaaacgccgaggttaaactgcagggattccaggccagacctgagctgttagaagtgtttagtacagaattccagatgcgcctcctttggggttcccagggagcctccagttcacaggcaaggaggtatgaaaaattcgacaaggtgctgacggccctgtcccacaagctggagcctgccgtacgctcctccgagctttag

SEQ ID NO: 246914 - DNA, 1521 bp, Artificial Sequence
  derived and/or modified sequence
atgaaaaggagatccgtcaccatgaccgacggcctcaccgctgataaagtgacacggtctgacggatgtcccactagtacctcactccccaggccgagagattctatccgatcctgcgccctgagcatggaccagatcccagacctacactcacctatgagtcccatcagcgagtcgccctcatctccagcctactcaaccgtgacccgcgtgcatgcagccccagctgccccttctgcgaccgctctaccagctagccctgtggcacgaagaagcagcgagccacagctctgtcctggttcagcccctaagactcacggtgaatccgataagggacctcataccagcccgtcccatacattgggaaaggcgtccccctctccttcgctgtcttcctactcagacccagactcaggccactactgtcagctgcagcccccagtgaggggcagccgggagtgggctgcaaccgaaacaagttcacagcaagcccgatcctacggtgagcgactaaaagagctcagcgaaaacggcgctccggaaggcgactgggggaagacgtttaccgttcccatcgtcgaggtgacatcctccttcaacccggctacctttcagtccctactcatcccaagagacaatagacccctggaggtgggcctcctccgcaaagtgaaggagctgctggccgaggtcgacgcccgtaccctggcacggcatgtcaccaaggtggattgcctggtggccagaatactgggagttacgaaagagatgcagaccttaatgggcgtccggtgggggatggagctgctgacgctgccccatgggaggcagctgcgtctggatctgttagagcgctttcacacaatgagtatcatgttggctgtcgacatccttgggtgcaccggcagcgcagaagaaagggcagcccttttacataaaactattcagctggctgccgaacttcgtggaacaatggggaacatgttttctttcgccgctgtgatgggtgctctggatatggcccagataagtagactggagcagacctgggtaacattaaggcaacgccacaccgaaggcgcaatactctatgagaagaagctgaaaccattcctaaagtcgctgaatgaggggaaggagggcccacccctctccaacaccacattccctcatgtgctgccgttgataactctcctcgaatgtgacagcgccccacctgaggggcctgagccttgggggtcgacggaacatggtgtggaggtggtgttggcccacttagaggccgctcgcacagttgctcaccacggagggctctaccatactaatgccgaggtcaagctccagggctttcaggctcgacctgagctgcttgaagtcttctcaacggaattccaaatgcgactcctgtggggcagtcaaggagctagtagcagtcaggctagaagatatgaaaagttcgacaaagtcctgaccgctctttcacacaaactagagcctgctgttcggtccagcgaattatag

SEQ ID NO: 246915 - DNA, 2794 bp, Artificial Sequence
  derived and/or modified sequence
agatatccaaggggaggcgtccaggaggtagttgggtttccaagtctggggttggaggggcaggtccaggctgcctgagggtaggggtagcatttaaggccatgcggtggggggagtggttcacggtggccctcaggaggaaggaaggaaaaacagccgtctctggcctctggcctctccaggctctccaccctgggggcagaatcaattctgtagccctctagcaccggcagtggctccgcagtcagctgggcagtggccgtgactgggtcactctaccctaggaagtgagtgcaggggctgctggagagccagaggctggcagcgactatgtgaagttctccaaggagaagtacatcctggactcatcgccagagaaactccacaaggaattggaggaggagctcaaactcagcagcacggatctccgcagccatgcctggtaccatggccgcatcccccgagaggtctcggagaccttggtacaacgcaacggcgacttcctcatccgggactcactcaccagcctgggcgactatgtgctcacgtgccgctggcgcaaccaggccttgcacttcaagatcaacaaggtggtggtgaaggcaggcgagagctacacacacatccagtacctgtttgagcaggagagctttgaccacgtgcccgccctcgtgcgctatcatgtgggcagccgcaaggctgtgtcagagcagagtggtgccatcatctactgcccggtgaaccgcaccttcccactgcgctacctcgaggccagctatggcctgggacaggggagtagcaagcctgctagccccgtcagcccctcaggccccaagggcagccacatgaagcggcgcagcgtcaccatgaccgatgggctcactgctgacaaggtcacccgcagcgatggctgccccaccagtacgtcgctgccccgccctcgggactccatccgcagctgtgccctcagcatggaccagatcccagacctgcactcacccatgtcgcccatctccgagagccctagctcccctgcctacagcactgtaacccgtgtccatgccgcccctgcagccccttctgccacagcattgcctgcctcccctgtcgcccgccgttccagtgagccccagctgtgtcccggaagtgccccaaagacccatggggagtcagacaagggcccccacaccagcccctcccacacccttggcaaggcctccccgtcaccatcactcagcagctacagtgacccggactctggccactactgccagctccagcctcccgtgcgtggcagccgagagtgggcagcgactgagacctccagccagcaggccaggagctatggggagaggctaaaggaactgtcagaaaatggggcccctgaaggggactggggcaagaccttcacagtccccatcgtggaagtcacttcttccttcaacccggccaccttccagtcactactgatccccagggataaccggccactggaggtgggccttctgcgcaaggtcaaggagctgctggcagaagtggatgcccggacgctggcccggcatgtcaccaaggtggactgcctggttgctaggatactgggcgttaccaaggagatgcagaccctaatgggagtccgctggggcatggaactgctcaccctcccccatggccggcagctacgcctagacctgctggaaaggttccacaccatgtccatcatgctggccgtggacatcctgggctgcaccggctctgcggaggagcgggcagcgctgctgcacaagaccattcagctggcggccgagctgcgggggactatgggcaacatgttcagcttcgcggcggtcatgggtgccctggacatggcccagatttctcggctggagcagacatgggtgaccctgcggcagcgacacacagagggtgccatcctgtacgagaagaagctcaagccttttctcaagagcctcaacgagggcaaagaaggcccgccgctgagcaacaccacgtttcctcatgtgctgcccctcatcaccctgctggagtgtgactcggccccaccagagggccctgagccctggggcagcacggagcacggcgtggaggtggtgctggctcacctggaggccgcccgcacagtggcacaccacggaggcctgtaccacaccaatgctgaagtcaagctgcaggggttccaggcccggccggagctcctggaggtgttcagcacggagttccagatgcgccttctctggggcagtcagggtgccagcagcagccaggcccggcgctatgagaagttcgacaaggtcctcactgccctgtcccacaagctggaacctgctgtccgctccagcgagctgtgaccccagggacatttcccctctgcagctgcggacagcgtcaggggcagaggggcacacaactttccccagagcaccccaaggacactgtgatcaacccgagaatgttctgggttcaactcaagcatctcccttgcacctccagggtcctgcgtggactctgggttccatcccacctgctacatgctcaccaggtctccattgaggaagaacaggaacgccggttcccccaccagcttttgctgctccccttcctgctggggttccctgttttcgagccatgggaggcaggctgctcacgcctcctcactctctgtctgtccctcaccaacaccaaggcctccatctcactgtaaataagtctctgttctgtaaatagatgtacagaagccatgttatttctttcatataataaacttttatgactcttt

SEQ ID NO: 246916 - DNA, 3124 bp, Artificial Sequence
  derived and/or modified sequence
ggaagcgagtaagagaaaggggaaggggaggtgggagaggcacctcaactttgatgtcccgagccttgagtggccactcgcaagctggccaagggcttcacacaatttgccaagatgacagaggggaccaagaagaccagcaaaaagttcaagttcttcaagttcaagggctttgggagtctctccaacctccctcggtccttcactctgagacgatcctcagcttccatcagtaggcagtcccatttggagcctgacacctttgaagccacgcaggatgacatggtgacggtgcccaagagtcccccagcctatgcccgctccagtgacatgtacagccacatgggcaccatgcctcgccccagcatcaagaaagcacagaactcacaggctgcccggcaggcccaggaggcgggtcccaagcccaacttggtacccggaggtgtacccgaccccccaggcttggaggcagccaaagaggtgatggtgaaggccactggccctctagaggacaccccagcaatggaacccaacccttcagcagtggaggtagaccccatcagaaagcctgaggtccccacaggagacgtagaagaggagagacctcccagggacgtgcactcagaaagggctgctggagagccagaggctggcagcgactatgtgaagttctccaaggagaagtacatcctggactcatcgccagagaaactccacaaggaattggaggaggagctcaaactcagcagcacggatctccgcagccatgcctggtaccatggccgcatcccccgagaggtctcggagaccttggtacaacgcaacggcgacttcctcatccgggactcactcaccagcctgggcgactatgtgctcacgtgccgctggcgcaaccaggccttgcacttcaagatcaacaaggtggtggtgaaggcaggcgagagctacacacacatccagtacctgtttgagcaggagagctttgaccacgtgcccgccctcgtgcgctatcatgtgggcagccgcaaggctgtgtcagagcagagtggtgccatcatctactgcccggtgaaccgcaccttcccactgcgctacctcgaggccagctatggcctgggacaggggagtagcaagcctgctagccccgtcagcccctcaggccccaagggcagccacatgaagcggcgcagcgtcaccatgaccgatgggctcactgctgacaaggtcacccgcagcgatggctgccccaccagtacgtcgctgccccgccctcgggactccatccgcagctgtgccctcagcatggaccagatcccagacctgcactcacccatgtcgcccatctccgagagccctagctcccctgcctacagcactgtaacccgtgtccatgccgcccctgcagccccttctgccacagcattgcctgcctcccctgtcgcccgccgttccagtgagccccagctgtgtcccggaagtgccccaaagacccatggggagtcagacaagggcccccacaccagcccctcccacacccttggcaaggcctccccgtcaccatcactcagcagctacagtgacccggactctggccactactgccagctccagcctcccgtgcgtggcagccgagagtgggcagcgactgagacctccagccagcaggccaggagctatggggagaggctaaaggaactgtcagaaaatggggcccctgaaggggactggggcaagaccttcacagtccccatcgtggaagtcacttcttccttcaacccggccaccttccagtcactactgatccccagggataaccggccactggaggtgggccttctgcgcaaggtcaaggagctgctggcagaagtggatgcccggacgctggcccggcatgtcaccaaggtggactgcctggttgctaggatactgggcgttaccaaggagatgcagaccctaatgggagtccgctggggcatggaactgctcaccctcccccatggccggcagctacgcctagacctgctggaaaggttccacaccatgtccatcatgctggccgtggacatcctgggctgcaccggctctgcggaggagcgggcagcgctgctgcacaagaccattcagctggcggccgagctgcgggggactatgggcaacatgttcagcttcgcggcggtcatgggtgccctggacatggcccagatttctcggctggagcagacatgggtgaccctgcggcagcgacacacagagggtgccatcctgtacgagaagaagctcaagccttttctcaagagcctcaacgagggcaaagaaggcccgccgctgagcaacaccacgtttcctcatgtgctgcccctcatcaccctgctggagtgtgactcggccccaccagagggccctgagccctggggcagcacggagcacggcgtggaggtggtgctggctcacctggaggccgcccgcacagtggcacaccacggaggcctgtaccacaccaatgctgaagtcaagctgcaggggttccaggcccggccggagctcctggaggtgttcagcacggagttccagatgcgccttctctggggcagtcagggtgccagcagcagccaggcccggcgctatgagaagttcgacaaggtcctcactgccctgtcccacaagctggaacctgctgtccgctccagcgagctgtgaccccagggacatttcccctctgcagctgcggacagcgtcaggggcagaggggcacacaactttccccagagcaccccaaggacactgtgatcaacccgagaatgttctgggttcaactcaagcatctcccttgcacctccagggtcctgcgtggactctgggttccatcccacctgctacatgctcaccaggtctccattgaggaagaacaggaacgccggttcccccaccagcttttgctgctccccttcctgctggggttccctgttttcgagccatgggaggcaggctgctcacgcctcctcactctctgtctgtccctcaccaacaccaaggcctccatctcactgtaaataagtctctgttctgtaaatagatgtacagaagccatgttatttctttcatataataaacttttatgactctt

SEQ ID NO: 246917 - DNA, 2583 bp, Artificial Sequence
  derived and/or modified sequence
atgaccgagggcaccaagaagaccagcaagaagttcaagttcttcaagttcaagggcttcggcagcctgagcaacctgcccagaagcttcaccctgagaagaagcagcgccagcatcagcagacagagccacctggagcccgacaccttcgaggccacccaggacgacatggtgaccgtgcccaagagcccccccgcctacgccagaagcagcgacatgtacagccacatgggcaccatgcccagacccagcatcaagaaggcccagaacagccaggccgccagacaggcccaggaggccggccccaagcccaacctggtgcccggcggcgtgcccgacccccccggcctggaggccgccaaggaggtgatggtgaaggccaccggccccctggaggacacccccgccatggagcccaaccccagcgccgtggaggtggaccccatcagaaagcccgaggtgcccaccggcgacgtggaggaggagagaccccccagagacgtgcacagcgagagagccgccggcgagcccgaggccggcagcgactacgtgaagttcagcaaggagaagtacatcctggacagcagccccgagaagctgcacaaggagctggaggaggagctgaagctgagcagcaccgacctgagaagccacgcctggtaccacggcagaatccccagagaggtgagcgagaccctggtgcagagaaacggcgacttcctgatcagagacagcctgaccagcctgggcgactacgtgctgacctgcagatggagaaaccaggccctgcacttcaagatcaacaaggtggtggtgaaggccggcgagagctacacccacatccagtacctgttcgagcaggagagcttcgaccacgtgcccgccctggtgagataccacgtgggcagcagaaaggccgtgagcgagcagagcggcgccatcatctactgccccgtgaacagaaccttccccctgagatacctggaggccagctacggcctgggccagggcagcagcaagcccgccagccccgtgagccccagcggccccaagggcagccacatgaagagaagaagcgtgaccatgaccgacggcctgaccgccgacaaggtgaccagaagcgacggctgccccaccagcaccagcctgcccagacccagagacagcatcagaagctgcgccctgagcatggaccagatccccgacctgcacagccccatgagccccatcagcgagagccccagcagccccgcctacagcaccgtgaccagagtgcacgccgcccccgccgcccccagcgccaccgccctgcccgccagccccgtggccagaagaagcagcgagccccagctgtgccccggcagcgcccccaagacccacggcgagagcgacaagggcccccacaccagccccagccacaccctgggcaaggccagccccagccccagcctgagcagctacagcgaccccgacagcggccactactgccagctgcagccccccgtgagaggcagcagagagtgggccgccaccgagaccagcagccagcaggccagaagctacggcgagagactgaaggagctgagcgagaacggcgcccccgagggcgactggggcaagaccttcaccgtgcccatcgtggaggtgaccagcagcttcaaccccgccaccttccagagcctgctgatccccagagacaacagacccctggaggtgggcctgctgagaaaggtgaaggagctgctggccgaggtggacgccagaaccctggccagacacgtgaccaaggtggactgcctggtggccagaatcctgggcgtgaccaaggagatgcagaccctgatgggcgtgagatggggcatggagctgctgaccctgccccacggcagacagctgagactggacctgctggagagattccacaccatgagcatcatgctggccgtggacatcctgggctgcaccggcagcgccgaggagagagccgccctgctgcacaagaccatccagctggccgccgagctgagaggcaccatgggcaacatgttcagcttcgccgccgtgatgggcgccctggacatggcccagatcagcagactggagcagacctgggtgaccctgagacagagacacaccgagggcgccatcctgtacgagaagaagctgaagcccttcctgaagagcctgaacgagggcaaggagggcccccccctgagcaacaccaccttcccccacgtgctgcccctgatcaccctgctggagtgcgacagcgccccccccgagggccccgagccctggggcagcaccgagcacggcgtggaggtggtgctggcccacctggaggccgccagaaccgtggcccaccacggcggcctgtaccacaccaacgccgaggtgaagctgcagggcttccaggccagacccgagctgctggaggtgttcagcaccgagttccagatgagactgctgtggggcagccagggcgccagcagcagccaggccagaagatacgagaagttcgacaaggtgctgaccgccctgagccacaagctggagcccgccgtgagaagcagcgagctgtag

SEQ ID NO: 246918 - protein, 523 aa, Artificial Sequence
  derived and/or modified sequence
MVAPGLVLGLVLPLILWADRSAGIGFRFASYINNDMVLQKEPAGAVIWGFGTPGATVTVTLRQGQETIMKKVTSVKAHSDTWMVVLDPMKPGGPFEVMAQQTLEKINFTLRVHDVLFGDVWLCSGQSNMQMTVLQIFNATRELSNTAAYQSVRILSVSPIQAEQELEDLVAVDLQWSKPTSENLGHGYFKYMSAVCWLFGRHLYDTLQYPIGLIASSWGGTPIEAWSSGRSLKACGVPKQGSIPYDSVTGPSKHSVLWNAMIHPLCNMTLKGVVWYQGESNINYNTDLYNCTFPALIEDWRETFHRGSQGQTERFFPFGLVQLSSDLSKKSSDDGFPQIRWHQTADFGYVPNPKMPNTFMAVAMDLCDRDSPFGSIHPRDKQTVAYRLHLGARALAYGEKNLTFEGPLPEKIELLAHKGLLNLTYYQQIQVQKKDNKIFEISCCSDHRCKWLPASMNTVSTQSLTLAIDSCHGTVVALRYAWTTWPCEYKQCPLYHPSSALPAPPFIAFITDQGPGHQSNVAK

SEQ ID NO: 246919 - protein, 488 aa, Artificial Sequence
  derived and/or modified sequence
MVLQKEPAGAVIWGFGTPGATVTVTLRQGQETIMKKVTSVKAHSDTWMVVLDPMKPGGPFEVMAQQTLEKINFTLRVHDVLFGDVWLCSGQSNMQMTVLQIFNATRELSNTAAYQSVRILSVSPIQAEQELEDLVAVDLQWSKPTSENLGHGYFKYMSAVCWLFGRHLYDTLQYPIGLIASSWGGTPIEAWSSGRSLKACGVPKQGSIPYDSVTGPSKHSVLWNAMIHPLCNMTLKGVVWYQGESNINYNTDLYNCTFPALIEDWRETFHRGSQGQTERFFPFGLVQLSSDLSKKSSDDGFPQIRWHQTADFGYVPNPKMPNTFMAVAMDLCDRDSPFGSIHPRDKQTVAYRLHLGARALAYGEKNLTFEGPLPEKIELLAHKGLLNLTYYQQIQVQKKDNKIFEISCCSDHRCKWLPASMNTVSTQSLTLAIDSCHGTVVALRYAWTTWPCEYKQCPLYHPSSALPAPPFIAFITDQGPGHQSNVAK

SEQ ID NO: 246920 - DNA, 1572 bp, Artificial Sequence
  derived and/or modified sequence
atggtagcaccagggctggtactcggtctggtactcccattgattctgtgggccgacagatctgcgggcattggttttcgatttgcatcgtatattaataatgatatggtgctgcaaaaggaaccagctggcgcggtgatttggggctttggaacccctggcgcgacagtaactgtgacattaaggcagggccaggagactatcatgaaaaaggtgaccagtgttaaggcgcacagcgacacctggatggttgtgttggatccaatgaagcctggcggtccatttgaagtgatggcacagcaaacacttgaaaagatcaatttcacactacgggtacatgacgtcctgttcggcgacgtctggctgtgctctggtcaatccaatatgcagatgaccgtgttacagattttcaatgctacgagggagctttctaataccgcagcctatcaaagcgtccgcatactgtccgtaagccctatccaggccgagcaagaacttgaggatttagtagctgtggacttgcaatggagcaaaccaacctccgaaaatctgggccacggctactttaagtatatgagtgcagtatgctggcttttcggacgtcatctgtatgatactctccaatatccaatcggactgatcgcatctagctggggaggtacgccaattgaagcttggagctccggaagaagtctaaaggcctgcggcgtgcccaagcagggttcaattccctatgattcagttacagggccctccaaacactctgtgctttggaatgccatgattcatccgttatgtaatatgaccctgaaaggcgtagtctggtatcagggagagtcaaatatcaactacaataccgatctgtacaattgtacctttcccgccctgattgaagactggagggagacctttcataggggcagccagggacaaacagagagattctttcccttcggactggtgcagctatccagcgatctgagcaaaaagtcatcagatgatggctttcctcagattaggtggcaccagacagccgactttggctatgttcccaaccctaaaatgcccaatactttcatggcagtcgccatggacctttgcgatagggactccccgttcggttcgatccacccaagagacaagcagaccgttgcctatcggcttcacctcggcgctagagcactggcctacggcgagaaaaatctcaccttcgagggtccattgcccgagaagattgagctgctggcccataagggtttgttgaacctgacatactaccagcaaattcaagtgcaaaagaaagataataagatattcgagatctcttgctgcagtgatcacagatgcaaatggctgcctgcctctatgaacactgtcagtacccaaagcctgaccctggcgattgactcctgccacggcacagtagtggctcttagatacgcctggacaacctggccatgtgaatacaaacagtgtccgctgtatcacccgagctctgcactgcctgcccctccctttattgccttcataaccgatcaggggcctggccatcagtcaaatgtggctaagtag

SEQ ID NO: 246921 - DNA, 1572 bp, Artificial Sequence
  derived and/or modified sequence
atggtggcccctggcctggtgctgggcctggtgctgcccctcatcctgtgggccgacagatctgctggcatcggcttccgctttgccagctacatcaacaatgacatggtgctgcagaaggagcctgctggagctgtgatctggggcttcggcacccctggggccaccgtgacagtgaccctgcggcagggccaggagaccatcatgaagaaggtgacctctgtgaaggcccacagcgacacctggatggtggtgctggaccccatgaagccaggcggcccctttgaggtgatggcccagcagaccctggagaagatcaacttcaccctgcgggtgcatgatgtgctgtttggagatgtgtggctgtgcagcggccagagcaacatgcagatgacagtgctgcagatcttcaatgccacccgggagctgagcaacacagctgcctaccagagcgtgcgcatcctgtctgtgagccccatccaggccgagcaggagctggaggacctggtggccgtggacctgcagtggagcaagcccaccagcgagaacctgggccacggctacttcaagtacatgtctgctgtgtgctggctgtttggccgccacctgtatgacaccctgcagtaccccatcggcctcatcgccagctcctggggcggcacccccatcgaggcctggagcagcggccgcagcctgaaggcctgtggggtgcccaagcagggcagcatcccctatgattctgtgacaggccccagcaagcacagcgtgctgtggaatgccatgatccaccccctgtgcaacatgaccctgaagggcgtggtgtggtaccagggcgagagcaacatcaactacaacacagacctgtacaactgcaccttccctgccctgattgaggactggagggagaccttccaccggggcagccagggccagacagagcgcttcttccccttcggcctggtgcagctgagcagtgacctgagcaagaagagcagtgatgatggcttcccccagatccgctggcaccagacagctgactttggctacgtgcccaaccccaagatgcccaacaccttcatggctgtggccatggacctgtgtgaccgggacagccccttcggcagcatccacccccgggacaagcagacagtggcctaccgcctgcacctgggcgcccgggccctggcctatggagagaagaacctgacctttgagggccccctgcctgagaagattgagctgctggcccacaagggcctgctgaacctgacctactaccagcagatccaggtgcagaagaaggacaacaagatctttgagatcagctgctgcagcgaccaccgctgcaagtggctgcctgcctccatgaacacagtgtccacccagagcctgaccctggccatcgacagctgccacggcaccgtggtggccctgcgctatgcctggaccacctggccctgtgagtacaagcagtgccccctgtaccaccccagcagcgccctgcctgccccacccttcatcgccttcatcacagaccagggccctggccaccagagcaatgtggccaagtag

SEQ ID NO: 246922 - DNA, 1572 bp, Artificial Sequence
  derived and/or modified sequence
atggtggcccccggcctggtgctgggcctggtgctgcccctgatcctctgggcagacagatctgccgggatcgggttccgcttcgcatcttacattaacaatgacatggtccttcagaaagagcccgcaggggccgtgatttggggctttggaacccccggcgcgaccgttacggtcactctgaggcagggccaggagaccataatgaaaaaggtaactagcgttaaggctcacagtgacacatggatggttgtcctcgatcccatgaaaccaggcggcccttttgaagtgatggcgcagcagactctggaaaagattaacttcaccctgcgagtgcacgacgtgctgttcggcgacgtttggctctgcagcggtcaatccaatatgcaaatgacggttctgcagatcttcaacgccacccgcgaactaagtaatacggccgcttaccagagtgtccggattttgtccgtgagccccattcaggcagagcaagaactcgaagatctcgtggccgttgatctccagtggagcaaacctaccagtgaaaacctcggacatggctattttaaatatatgagcgctgtgtgctggctcttcggccgacacctatatgatacactacagtaccccataggtctgattgcaagctcatggggcgggacccctattgaggcctggtcatcaggccgttccctgaaggcgtgtggagtccccaagcagggcagcatcccgtacgactccgtcaccgggccttccaagcacagcgtgctgtggaacgctatgatccaccccctgtgcaatatgactttaaagggggtcgtgtggtaccagggtgagtcaaatattaactataacaccgacctctacaactgtacttttcccgccctgatcgaggattggcgggagacctttcacagaggctcacagggacagactgaaagatttttcccctttggacttgtgcagctgagctctgacttgtccaagaagagttccgatgatggcttcccccagatccgctggcaccagacagcagattttggctacgtgcccaatcctaagatgcctaatacgtttatggctgtggcaatggatttgtgtgaccgagactctcctttcggctcaatccatccacgcgataaacaaaccgtggcctatcgcctccacctaggcgctcgcgccctggcttacggggaaaaaaatcttacatttgaagggcctctgccagaaaagatcgaactgcttgctcataaggggctgcttaatctcacgtactaccagcagatccaagttcagaagaaagacaacaaaattttcgaaatctcatgttgctctgaccatcgctgtaaatggctacctgcctcaatgaataccgtgagcacacaatccctcactctggcaatcgatagctgccatggaactgtggttgcgctacgctatgcctggacgacatggccatgcgaatacaagcagtgccccctttatcacccttccagcgcactgcctgcccctcctttcatcgcctttatcaccgaccaagggccaggccaccagagcaacgttgcgaaatag

SEQ ID NO: 246923 - DNA, 1572 bp, Artificial Sequence
  derived and/or modified sequence
atggtcgcacccggtctcgttctcgggctggtgctgcccctgatattgtgggcagacaggtcagccggtatcggattccgcttcgcgtcatatatcaataatgatatggttttgcagaaagagccagctggagccgttatctggggcttcggaactccgggtgcaactgtcaccgtcacactgaggcaggggcaggaaactatcatgaaaaaagtgacatctgtgaaggcacacagcgacacttggatggtggttctagatccaatgaagcccggtggcccatttgaggttatggctcaacaaaccctggagaagatcaatttcactttgcgggtccatgacgtgctgtttggcgacgtgtggctgtgctctggccagagcaatatgcagatgaccgttctgcagatctttaacgcaactcgcgaactgtctaacacagctgcctatcagtcggtgcgcatactgagcgtgtcaccaattcaagctgagcaggagcttgaagacctggtggctgtggacctccagtggagcaagcccacctctgagaatctgggtcacggttatttcaagtacatgagtgctgtgtgttggctttttggccgacacctctacgataccctgcagtacccgatcgggctcatcgctagctcttggggtggaacacccattgaggcctggagctccggccgtagtctcaaggcatgtggggtccccaaacagggatctattccttatgactctgtcactggtccatcaaagcactcagtcctctggaatgccatgatccaccctctgtgcaacatgactctgaagggggttgtttggtaccagggggaatccaacataaactataacaccgacttatacaattgcacttttccggctctgatagaggactggcgggaaacctttcatcgcggatcacagggccagacagagcgattcttcccgttcggactcgtccagctgagcagcgatctatcgaaaaagagctcggacgacggcttccctcagattaggtggcaccagaccgcagacttcggttacgtcccgaaccccaagatgccaaacacctttatggccgtggccatggacctgtgcgaccgcgacagccctttcggcagcattcacccccgagacaagcagacagtcgcttatcgcctccacttaggtgcacgagccctggcttacggagagaaaaatctcacatttgaaggtcctctgcctgagaagatcgaactgctcgcccacaaaggtctgttaaatcttacctactaccagcaaatacaagtgcagaagaaagacaataagatcttcgagatctcttgttgcagcgaccaccgatgcaaatggcttcctgcatccatgaatactgtgtctactcaatcattaaccctcgcaatcgactcctgccacggaactgtggtggcattgagatacgcttggactacttggccgtgcgaatacaagcagtgtccactgtaccacccatccagtgccctcccggcaccaccattcatcgcattcatcaccgatcaggggccaggacaccagtccaatgtggccaaatag

SEQ ID NO: 246924 - DNA, 5583 bp, Artificial Sequence
  derived and/or modified sequence
aaaaaaaaaaaaaaactacggcggccgagaaggggcgagtacagcccagtcctgaggtcgcgggaggctgcgaggactgcaaaagggtggagtcggcctcgcccccgcccaggccccgcccctgccgggaacccactttcccagtcctaggcggcggtcagatccttgcaagcatggtcgcgccggggcttgtactcgggctggtgctgccattaatcctgtgggccgacagaagtgcaggtattggttttcgctttgcttcatacatcaataatgatatggtgctgcagaaggagcctgctggggcagtgatatggggcttcggtacacctggagccacagtgaccgtgaccctgcgccaaggtcaggaaaccatcatgaagaaagtgaccagtgtgaaagctcactctgatacgtggatggtggtactggatcctatgaagcctggaggacctttcgaagtgatggcacaacagactttggagaaaataaacttcaccctgagagttcatgacgtcctgtttggagatgtctggctctgtagtgggcagagtaacatgcagatgactgtgttacagatatttaatgctacaagggagttgtctaacactgcggcatatcagtctgtccgcatcctctctgtctctcccattcaagcagagcaggagctggaggaccttgttgcggttgacttgcagtggtctaagcccacctcagaaaacttaggccatggatatttcaagtacatgtcagcagtgtgctggctctttggacgtcacctttatgacactctgcagtatcccatcgggctgatcgcctccagctggggcgggacacccattgaagcctggtcatctggacggtcactgaaagcctgtggggtccctaaacaagggtccattccatacgattctgtaactggtcccagtaagcactctgttctctggaatgccatgatccatccactgtgcaatatgactctgaaaggggtagtatggtaccagggggagtccaatataaattataacacggatctgtacaattgcacattccctgcactcatcgaagactggcgtgaaaccttccaccgtggttcccaggggcagacggagcgtttcttcccatttggacttgtccagttatcttcagatttgtctaagaagagctcagacgatggatttccccagatccgttggcatcaaacagcagacttcggctatgtccccaacccaaagatgcccaatactttcatggctgtagctatggatctctgtgatagagactcgccttttggcagcatccaccctcgagataaacagactgtggcttatcggctgcatttgggggcccgtgctctggcttatggtgagaagaatttgacctttgaaggaccactgcctgagaagatagaactcttggctcacaaggggctgctcaatctcacatattaccagcaaatccaggtgcagaaaaaggacaacaagatatttgagatctcctgttgcagtgaccatcgatgcaagtggcttccagcttctatgaacaccgtctccacccagtccctgaccctggcgatcgattcttgtcatggcactgtggttgctctccgctatgcttggaccacgtggccttgtgaatataagcagtgtcccctataccaccccagtagtgccctgccagcccctcccttcattgctttcattacagaccagggtcctggacatcagagcaatgttgctaaatgactgtttcagtatgatcagaacttagatataaggatgggtccttcagattttagcatttaggagtttcaataataaccattgcttttaaaggaaattaatagaaagcctcattgaatggctttcagctagcacatggctgtttctatattctgatgagcccaggcttataggtaacttgaaatgcttgctttttgttccctagttggtctaagggtctgtattggactaattctgaactacagacaaattggacctcaatgtcatttacttccctcatattaatgggagtgaaatgtctaatacttttgcccctttttatccagagttgtgggaatctcaggattggaagagattttaaaggccacataggccagctagtgttcatgtgttctttataaaatttctcccatccaagtactaaccaggcccgaccctgcttagcttccgagatcagatgagatcaggcgcgttcagggtgatatggccgtagacgtctttacaaaattcctgacaggtggttactgaatctctctatgaactttccattcaaaactttccaagtttttccttatgtggaaccgaaatctttctttctcccgtgaaactttactactatcagataattgaagacagatctctttgtattctcttcaagcccaaaccaattctgttccttcaatctaaatagtggtaatatgaatgtttaagaaatgaaataagaaacatgtgcaggcactttggaaggtgctaagtgactgccctaaggaatgaaaagcaagggccaggtgggagtagcccagcgaaggcacttgggctgccaggaacaggaggcgtgggaaactctggcttaggaaaacatgaacacaggggcaacagaggcaaactgttgttcgagttaaatataaatctcaggctctttaaaggtaaaaggtttaaggataatccatttggaagaagaaaagagtgaggctgaaagtaaagccacatgacaagcatataaaaaaaaatgcagatgatacaaatatgaaagaggccttcagtgtttgtttattaagaatcttaatgcagtttactgatggattaaaaacagctaacattgtctgaaaattatgttacctataagaagttggaaataaataaaagcataatcactagtgatgtgtatgtatttatatccacttgcaaactgtccttgaagcatgtgaaaaggagtaagaatactatctatgggtagctttcctccccttaatgtgaaaaatgagaactaaagcaaaaagcatcactcactgtacatatacaatgtattttacgtagtgtaaaaaatatggtttagatagtgaatatattaatgaaatcatatgtaaatttatttttagtggctgaataatttaaaacattatgtggaattcactatgtttcccccaatttaggaactttttactgtgtgaaaatgaaatttataatactctgtagggtgaatgatggtttttgctttagttctacccctctgtagagttccaaggggttctggtgtagctccaaacagcaggaataactttgtcagtgccaagattttatttagttaaaaaacaaaaaatctacacactttacaaggaacgttggctcccctgaggacttcctagcattcaactcgttcagttaacccctattgcccatgctttgacctctcatgcatctggccccatagaaaccatgaaccttgtaacagattgatgcctgagaaaaagtcaatctacccgtccactcctccactcccaatacacatacccccatgggctgttctaattcgggggcagccagaggtagccaagaactctaagtccagattcctttcacctccaggaacctagagtacatagtgtgaaaaatacggttcaggcaatgattatgttaatgacgccatgcacattcatttttagtggctgagtaatttaaaacatgatgtgggaattcactgcatttccccaaatgtaagaactttttagttttaaaatgaaatttatagtcactgtagaaaatttggacactaaagtataagcaagtaaaaatcacccccaaattcatcattcagagaaacactattttgctgaaccattcacttgacttgagttatataattttatacagtacatattattttgtaatctgtgtttttgacttacttactttaccaaaataattttcttatgtaaataatagaatatagatttagagtgtttcagtttgtggaagcctcattttatttaaccaatttcctattaatggacatatagatttttaacaattttctactattaaaataatactgtaatgaatatcacatgcaaacatcataccacactcgtccagttatttcttagggttcttaacatggaagaggataaatatatatttaaaatttagatatctacagcttaaccctcccaaaggattaaacaacttacattctcaccaaggtagtcctttttttgccctcaccctcattgacactggatgttgtcaaatttaaaaaaaatccttaacaatctgatagatgaaaagatagtttaagtatactaaggcagtgtttttcaaggtgtttttgtttttgtttttgagttggagttttgctctgttgcccaggctggagtgcagtggcgcggtctcggctcactgcaacctctgcctcccgggttcaagcgattcttcctgcctcagcctcccgagtagctgggactacaggcgcgtgccaccacgcctggctaattttttgtatttttattagagaccgacttagccaggatggtctcgatctcctgacctcttgatccacccgcctcagcctcccaaagtgctgggattacaggcgtgagccaccgtgcccagcttttcaagtttcttaaatccatgatccatagtaaaaacattttacacatatcttcatacaagtatatgtatatgtggtatacgtacacactatagttgtatatgcattatagctgaaaaaccagttcaacctttctacatgtggtatgttccaaaaattttaaatgtctttctaaaatgaggctcttttaatacgggtattactcaggctgtaatagtgggaaaatatttgttatatgataaaagcagcatatatcatttctgtgtaaatgccagtatgctcaagccatttatgcagagaaaaaaagaaaaacactgcattaacattttaagcagtccccttcccgatttgctattatacaaagtttgtttcttttacattgtaaagtgtatacaacttataaaaagactatactcaaaatcataaaataccagttaacttagcttctcagtttacagtggccagtgtggtgtgctctaaacactgctgcctgatccctccctctgctggtcagatttattactataaagtaccaatcccatttgtgttgtcctcaattggcaattatgaatggcagtgcattaaccattcaattctcaccactccatccccattcttctacttctgggtccttttgtccctccctttccagacagcccttggtaacctgctgctgggtaactaaggcatcccacaggtagtgttgaggtgttaggtgatagagtaaacctctaccttaatgctattaacagggtccaaaaatccagttgcatggaacatggagttatattattacatggctaatgaaaagacaggactaagtctgttatagagtatgggactaacccccaattatatgtgaatttgtgttatcatatggtttcagtgtactgagctaaaaagcacattatctgaggtgcaatacaaaggttaaagaggttaaagatcccc

SEQ ID NO: 246925 - DNA, 2884 bp, Artificial Sequence
  derived and/or modified sequence
actacggcggccgagaaggggcgagtacagcccagtcctgaggtcgcgggaggctgcgaggactgcaaaagggtggagtcggcctcgcccccgcccaggccccgcccctgccgggaacccactttcccagtcctaggcggcggtcagatccttgcaagcatggtcgcgccggggcttgtactcgggctggtgctgccattaatcctgtgggccgacagaagtgcaggtattggttttcgctttgcttcatacatcaataatgatatggtgctgcagaaggagcctgctggggcagtgatatggggcttcggtacacctggagccacagtgaccgtgaccctgcgccaaggtcaggaaaccatcatgaagaaagtgaccagtgtgaaagctcactctgatacgtggatggtggtactggatcctatgaagcctggaggacctttcgaagtgatggcacaacagactttggagaaaataaacttcaccctgagagttcatgacgtcctgtttggagatgtctggctctgtagtgggcagagtaacatgcagatgactgtgttacagatatttaatgctacaagggagttgtctaacactgcggcatatcagtctgtccgcatcctctctgtctctcccattcaagcagagcaggagctggaggaccttgttgcggttgacttgcagtggtctaagcccacctcagaaaacttaggccatggatatttcaagtacatgtcagcagtgtgctggctctttggacgtcacctttatgacactctgcagtatcccatcgggctgatcgcctccagctggggcgggacacccattgaagcctggtcatctggacggtcactgaaagcctgtggggtccctaaacaagggtccattccatacgattctgtaactggtcccagtaagcactctgttctctggaatgccatgatccatccactgtgcaatatgactctgaaaggggtagtatggtaccagggggagtccaatataaattataacacggatctgtacaattgcacattccctgcactcatcgaagactggcgtgaaaccttccaccgtggttcccaggggcagacggagcgtttcttcccatttggacttgtccagttatcttcagatttgtctaagaagagctcagacgatggatttccccagatccgttggcatcaaacagcagacttcggctatgtccccaacccaaagatgcccaatactttcatggctgtagctatggatctctgtgatagagactcgccttttggcagcatccaccctcgagataaacagactgtggcttatcggctgcatttgggggcccgtgctctggcttatggtgagaagaatttgacctttgaaggaccactgcctgagaagatagaactcttggctcacaaggggctgctcaatctcacatattaccagcaaatccaggtgcagaaaaaggacaacaagatatttgagatctcctgttgcagtgaccatcgatgcaagtggcttccagcttctatgaacaccgtctccacccagtccctgaccctggcgatcgattcttgtcatggcactgtggttgctctccgctatgcttggaccacgtggccttgtgaatataagcagtgtcccctataccaccccagtagtgccctgccagcccctcccttcattgctttcattacagaccagggtcctggacatcagagcaatgttgctaaatgactgtttcagtatgatcagaacttagatataaggatgggtccttcagattttagcatttaggagtttcaataataaccattgcttttaaaggaaattaatagaaagcctcattgaatggctttcagctagcacatggctgtttctatattctgatgagcccaggcttataggtaacttgaaatgcttgctttttgttccctagttggtctaagggtctgtattggactaattctgaactacagacaaattggacctcaatgtcatttacttccctcatattaatgggagtgaaatgtctaatacttttgcccctttttatccagagttgtgggaatctcaggattggaagagattttaaaggccacataggccagctagtgttcatgtgttctttataaaatttctcccatccaagtactaaccaggcccgaccctgcttagcttccgagatcagatgagatcaggcgcgttcagggtgatatggccgtagacgtctttacaaaattcctgacaggtggttactgaatctctctatgaactttccattcaaaactttccaagtttttccttatgtggaaccgaaatctttctttctcccgtgaaactttactactatcagataattgaagacagatctctttgtattctcttcaagcccaaaccaattctgttccttcaatctaaatagtggtaatatgaatgtttaagaaatgaaataagaaacatgtgcaggcactttggaaggtgctaagtgactgccctaaggaatgaaaagcaagggccaggtgggagtagcccagcgaaggcacttgggctgccaggaacaggaggcgtgggaaactctggcttaggaaaacatgaacacaggggcaacagaggcaaactgttgttcgagttaaatataaatctcaggctctttaaaggtaaaaggtttaaggataatccatttggaagaagaaaagagtgaggctgaaagtaaagccacatgacaagcatataaaaaaaaatgcagatgatacaaatatgaaagaggccttcagtgtttgtttattaagaatcttaatgcagtttactgatggattaaaaacagctaacattgtctgaaaattatgttacctataagaagttggaaataaataaaagcataatcact

SEQ ID NO: 246926 - DNA, 1572 bp, Artificial Sequence
  derived and/or modified sequence
atggtggcccccggcctggtgctgggcctggtgctgcccctgatcctgtgggccgacagaagcgccggcatcggcttcagattcgccagctacatcaacaacgacatggtgctgcagaaggagcccgccggcgccgtgatctggggcttcggcacccccggcgccaccgtgaccgtgaccctgagacagggccaggagaccatcatgaagaaggtgaccagcgtgaaggcccacagcgacacctggatggtggtgctggaccccatgaagcccggcggccccttcgaggtgatggcccagcagaccctggagaagatcaacttcaccctgagagtgcacgacgtgctgttcggcgacgtgtggctgtgcagcggccagagcaacatgcagatgaccgtgctgcagatcttcaacgccaccagagagctgagcaacaccgccgcctaccagagcgtgagaatcctgagcgtgagccccatccaggccgagcaggagctggaggacctggtggccgtggacctgcagtggagcaagcccaccagcgagaacctgggccacggctacttcaagtacatgagcgccgtgtgctggctgttcggcagacacctgtacgacaccctgcagtaccccatcggcctgatcgccagcagctggggcggcacccccatcgaggcctggagcagcggcagaagcctgaaggcctgcggcgtgcccaagcagggcagcatcccctacgacagcgtgaccggccccagcaagcacagcgtgctgtggaacgccatgatccaccccctgtgcaacatgaccctgaagggcgtggtgtggtaccagggcgagagcaacatcaactacaacaccgacctgtacaactgcaccttccccgccctgatcgaggactggagagagaccttccacagaggcagccagggccagaccgagagattcttccccttcggcctggtgcagctgagcagcgacctgagcaagaagagcagcgacgacggcttcccccagatcagatggcaccagaccgccgacttcggctacgtgcccaaccccaagatgcccaacaccttcatggccgtggccatggacctgtgcgacagagacagccccttcggcagcatccaccccagagacaagcagaccgtggcctacagactgcacctgggcgccagagccctggcctacggcgagaagaacctgaccttcgagggccccctgcccgagaagatcgagctgctggcccacaagggcctgctgaacctgacctactaccagcagatccaggtgcagaagaaggacaacaagatcttcgagatcagctgctgcagcgaccacagatgcaagtggctgcccgccagcatgaacaccgtgagcacccagagcctgaccctggccatcgacagctgccacggcaccgtggtggccctgagatacgcctggaccacctggccctgcgagtacaagcagtgccccctgtaccaccccagcagcgccctgcccgccccccccttcatcgccttcatcaccgaccagggccccggccaccagagcaacgtggccaagtag

SEQ ID NO: 246927 - protein, 617 aa, Artificial Sequence
  derived and/or modified sequence
MNRKDSKRKSHQECTGKIGGRGRPRQVRRHKTCPSPREISKVMASMNLGLLSEGGCSEDELLEKCIQSFDSAGSLCHEDHMLNMVLAMHSWVLPSADLAARLLTSYQKATGDTQELRRLQICHLVRYWLMRHPEVMHQDPQLEEVIGRFWATVAREGNSAQRRLGDSSDLLSPGGPGPPLPMSSPGLGKKRKVSLLFDHLETGELAQHLTYLEFRSFQAITPQDLRSYVLQGSVRGCPALEGSVGLSNSVSRWVQVMVLSRPGPLQRAQVLDKFIHVAQRLHQLQNFNTLMAVTGGLCHSAISRLKDSHAHLSPDSTKALLELTELLASHNNYARYRRTWAGCAGFRLPVLGVHLKDLVSLHEAQPDRLPDGRLHLPKLNNLYLRLQELVALQGQHPPCSANEDLLHLLTLSLDLFYTEDEIYELSYAREPRCPKSLPPSPFNAPLVVEWAPGVTPKPDRVTLGRHVEQLVESVFKNYDPEGRGTISQEDFERLSGNFPFACHGLHPPPRQGRGSFSREELTGYLLRASAICSKLGLAFLHTFHEVTFRKPTFCDSCSGFLWGVTKQGYRCRGEWGVSEWEGSLGPQAGRMDDTDRTPAAAFPQSAGCVATNTAETR

SEQ ID NO: 246928 - protein, 673 aa, Artificial Sequence
  derived and/or modified sequence
MNRKDSKRKSHQECTGKIGGRGRPRQVRRHKTCPSPREISKVMASMNLGLLSEGGCSEDELLEKCIQSFDSAGSLCHEDHMLNMVLAMHSWVLPSADLAARLLTSYQKATGDTQELRRLQICHLVRYWLMRHPEVMHQDPQLEEVIGRFWATVAREGNSAQRRLGDSSDLLSPGGPGPPLPMSSPGLGKKRKVSLLFDHLETGELAQHLTYLEFRSFQAITPQDLRSYVLQGSVRGCPALEGSVGLSNSVSRWVQVMVLSRPGPLQRAQVLDKFIHVAQRLHQLQNFNTLMAVTGGLCHSAISRLKDSHAHLSPDSTKALLELTELLASHNNYARYRRTWAGCAGFRLPVLGVHLKDLVSLHEAQPDRLPDGRLHLPKLNNLYLRLQELVALQGQHPPCSANEDLLHLLTLSLDLFYTEDEIYELSYAREPRCPKSLPPSPFNAPLVVEWAPGVTPKPDRVTLGRHVEQLVESVFKNYDPEGRGTISQEDFERLSGNFPFACHGLHPPPRQGRGSFSREELTGYLLRASAICSKLGLAFLHTFHEVTFRKPTFCDSCSGFLWGVTKQGYRCRECGLCCHKHCRDQVKVECKKRPGAKGDAGPPGAPVPSTPAPHASCGSEENHSYTLSLEPETGCQLRHAWTQTESPHPSWETDTVPCPVMDPPSTASSKLDS

SEQ ID NO: 246929 - DNA, 1854 bp, Artificial Sequence
  derived and/or modified sequence
atgaatcgcaaggacagcaaacggaagtcccaccaggaatgtacaggcaagatcggtggccgcggccggccccggcaggtgcggagacataaaacatgcccgtcaccccgcgaaatctccaaggttatggcatcaatgaatctggggctgttatctgagggaggctgttctgaggatgaactcctcgaaaaatgcatccagtcctttgatagcgccggaagtctttgccacgaggatcatatgctgaatatggtgctcgccatgcactcatgggtactgccctctgctgatctcgcagcacgccttctcactagctatcagaaagcgacaggggatacacaggagctcagacgtctccagatctgccatcttgtgaggtactggctgatgcggcaccccgaggttatgcatcaggaccctcagttggaagaggtgatcggacgcttttgggccacagtggcacgggaaggcaactcagcccagcgtaggctgggggacagttctgatctcctcagtcctggcggtcccggccccccactcccgatgtcatctcctggacttggcaagaagaggaaggtatctttgctcttcgaccatctggaaactggtgagttggctcagcacctcacttaccttgagtttcgatctttccaggccattacccctcaggatctccgctcctatgttctgcagggatctgtaagagggtgtccggccctggagggatctgtgggattgtcaaatagcgtatccagatgggtgcaagtcatggtgctatcaaggccaggacccctgcagcgcgcgcaggtcttggacaagtttatccacgttgcacagcgtcttcaccaactgcagaattttaatacccttatggcagtgactggaggactgtgtcactccgcgataagtcgcctgaaggactcccacgctcacctttcccccgattcaactaaagctcttcttgagctcaccgagctcttggcctcccataataattatgcacgttatcgacgcacttgggctggctgcgccggctttcgccttcccgttctgggggttcacctgaaggacctggtctccttacacgaggcacagcctgaccgcctgcccgatggaaggcttcatctgcctaagctgaataacctatatttaaggctgcaggagctcgtggccctgcaggggcaacacccgccctgttctgccaacgaggacctgctgcacctgctgacactgtccctggatctcttctataccgaagatgaaatttacgagctctcctatgcacgcgaaccccgatgtcctaagtccctgcccccaagcccttttaacgcaccattggtggtggagtgggccccgggagtaacccccaagccagatagagtgaccctaggtaggcatgtggaacagctggtggaaagtgtctttaagaactatgaccccgaagggagaggcaccatatcacaagaggacttcgaacgcttatctggaaattttccattcgcctgccacggcttgcacccacctcccaggcaggggagaggttctttctctcgtgaagaactgactggctatttgctccgagctagcgccatttgctctaagctgggcctggcatttttacacacttttcatgaagtgacttttcggaaacctacattttgcgacagctgtagcggatttctgtggggcgtcaccaagcaggggtatagatgtaggggagagtggggcgtgtctgagtgggagggctccctaggaccccaggcaggaagaatggatgacacagaccgtaccccagctgccgcctttccgcagtctgccggatgtgtggcaacaaataccgccgagactaggtag

SEQ ID NO: 246930 - DNA, 2022 bp, Artificial Sequence
  derived and/or modified sequence
atgaataggaaggacagtaagaggaagtctcaccaggagtgcaccgggaaaataggtggaagggggagacccaggcaggtgcgcagacacaaaacatgtcctagtccacgcgagatatccaaggtgatggcgtccatgaacctgggccttctcagcgagggcgggtgctccgaagatgagcttttggaaaaatgcatccaaagctttgattccgccggttctctatgtcacgaagatcacatgttaaatatggtgctggctatgcactcatgggtgctcccgtccgccgaccttgccgcccgcttgctgacttcgtaccagaaagccaccggcgacacacaggagttgcggcggctgcagatttgccacctggttaggtactggctcatgaggcatcctgaggttatgcaccaagacccacagttggaagaagtgatcggtcgcttttgggccactgttgcacgggaaggcaattccgctcagagaagacttggcgattcttcagatctgttgtctcccggcggaccagggccacctctacctatgtcaagccctggattaggaaaaaagagaaaggtctcactgctttttgatcatctcgaaacaggcgagctagcacagcatctgacttatctcgaattcaggtcgtttcaggctatcaccccacaggatttacgtagttatgttctgcaaggttcggtgagagggtgtcccgcccttgaagggtccgtggggctgagcaattctgtgagccgctgggtacaggtgatggtgctctctcggccaggcccccttcagcgcgctcaggtgttggataaattcattcacgtcgctcaacgtctccatcagctccagaattttaacactctcatggctgtgacaggagggctatgtcatagcgccatatcccgccttaaggattcccatgcccacttgtctcccgacagtaccaaggccctcctcgaactaaccgagctgctcgcctcgcacaacaattacgcacggtatagaaggacttgggccggctgcgctggcttcagactgcccgtgttaggcgtccatctaaaggacctcgtttcactccacgaggctcagcctgatcggctgccagacggaagactgcatttgcccaaactgaacaatctctacctgaggctgcaggaactggttgcactgcaagggcagcatccgccctgcagcgccaacgaggacctgctccaccttctaacattgtccctggacctgttctacaccgaagacgagatctatgagctcagttacgcccgtgagccaaggtgccccaagtctttgccaccgtctcctttcaatgcccctttggttgtggagtgggccccaggtgtgacccccaagccggatcgggtcaccctcggcagacacgttgaacagctggtggaatccgtcttcaagaactacgatcctgaagggagggggaccatttctcaggaagactttgagagattatccggtaacttcccatttgcctgccacggcctgcaccccccacctcggcaaggccgtgggagcttctcgcgcgaagagcttactggttatctactgcgcgccagtgcaatctgcagcaaattggggctcgctttcctgcatacattccacgaggtgacctttagaaagcccactttctgcgactcgtgctccggattcctgtggggcgtcaccaaacagggatatcgctgtcgcgagtgcggactctgctgccataagcactgtcgggatcaggtgaaagttgagtgcaagaagcgacctggtgcaaagggggatgcggggccccctggagccccggtgcctagcactcccgccccacacgcttcctgcggcagcgaagaaaaccatagctatactcttagtctggaaccggagaccgggtgccaactgaggcatgcgtggacacaaacagaatccccacacccctcctgggagaccgacactgttccctgtcctgttatggacccgcccagcacggcaagcagcaaattggactcctag

SEQ ID NO: 246931 - DNA, 1854 bp, Artificial Sequence
  derived and/or modified sequence
atgaacaggaaggacagcaagaggaagagccaccaggagtgcaccgggaagattggaggccggggccggccccggcaggtgcggcggcacaagacctgccccagcccccgggagatcagcaaggtgatggcctccatgaacctgggcctgctgtctgagggcggctgcagtgaagatgagctgctggagaagtgcatccagagctttgattctgctggcagcctgtgccacgaggaccacatgctgaacatggtgctggccatgcacagctgggtgctgcccagcgctgacctggccgcccggctgctgaccagctaccagaaggccaccggggacacccaggagctgcggcggctgcagatctgccacctggtgcgctactggctgatgaggcaccctgaggtgatgcaccaggacccccagctggaggaggtgattggccgcttctgggccaccgtggcccgggagggcaacagcgcccagaggcggctgggggacagcagtgacctgctgagccctgggggccctggcccccccctgcccatgagcagccctggcctgggcaagaagaggaaggtgtccctgctgtttgaccacctggagaccggggagctggcccagcacctgacctacctggagttccgctccttccaggccatcaccccccaggacctgcggagctatgtgctgcagggctctgtgcggggctgcccagccctggagggctctgtgggcctgagcaacagcgtgagccgctgggtgcaggtgatggtgctgagccggcccggccccctgcagagggcccaggtgctggacaagttcatccacgtggcccagaggctgcaccagctgcagaacttcaacaccctgatggctgtgactggaggcctgtgccacagcgccatcagccggctgaaggacagccacgcccacctgagcccagacagcaccaaggccctgctggagctgacagagctgctggccagccacaacaactatgcccgctacagaaggacctgggccggctgtgccggcttccggctgcctgtgctgggcgtgcacctgaaggacctggtgtccctgcacgaggcccagcctgaccggctgcctgatggccgcctgcacctgcccaagctgaacaacctgtacctgcggctgcaggagctggtggccctgcagggccagcaccccccctgcagcgccaatgaagacctgctgcacctgctgaccctgagcctggacctcttctacacagaagatgagatctatgagctgtcctatgcccgggagccccgctgccccaagagcctgccccccagccccttcaatgcccccctggtggtggagtgggcccctggggtgacccccaagccagacagagtgaccctgggccgccacgtggagcagctggtggagagcgtcttcaagaactatgaccctgagggccggggcaccatcagccaggaggactttgagcggctgagcggcaacttcccctttgcctgccacggcctgcaccccccaccccggcagggccggggcagcttcagccgggaggagctgaccggctacctgctgcgggccagcgccatctgcagcaagctgggcctggccttcctgcacaccttccacgaggtgaccttcaggaagcccaccttctgtgacagctgcagcggcttcctgtggggcgtgaccaagcagggctaccgctgccgcggggagtggggcgtgtctgagtgggagggcagcctgggcccccaggccggccgcatggatgacacagacaggaccccagctgctgccttcccccagagcgctggctgtgtggccaccaacacagctgagaccaggtag

SEQ ID NO: 246932 - DNA, 2022 bp, Artificial Sequence
  derived and/or modified sequence
atgaacaggaaggacagcaagaggaagagccaccaggagtgcaccgggaagattggaggccggggccggccccggcaggtgcggcggcacaagacctgccccagcccccgggagatcagcaaggtgatggcctccatgaacctgggcctgctgtctgagggcggctgcagtgaagatgagctgctggagaagtgcatccagagctttgattctgctggcagcctgtgccacgaggaccacatgctgaacatggtgctggccatgcacagctgggtgctgcccagcgctgacctggccgcccggctgctgaccagctaccagaaggccaccggggacacccaggagctgcggcggctgcagatctgccacctggtgcgctactggctgatgaggcaccctgaggtgatgcaccaggacccccagctggaggaggtgattggccgcttctgggccaccgtggcccgggagggcaacagcgcccagaggcggctgggggacagcagtgacctgctgagccctgggggccctggcccccccctgcccatgagcagccctggcctgggcaagaagaggaaggtgtccctgctgtttgaccacctggagaccggggagctggcccagcacctgacctacctggagttccgctccttccaggccatcaccccccaggacctgcggagctatgtgctgcagggctctgtgcggggctgcccagccctggagggctctgtgggcctgagcaacagcgtgagccgctgggtgcaggtgatggtgctgagccggcccggccccctgcagagggcccaggtgctggacaagttcatccacgtggcccagaggctgcaccagctgcagaacttcaacaccctgatggctgtgactggaggcctgtgccacagcgccatcagccggctgaaggacagccacgcccacctgagcccagacagcaccaaggccctgctggagctgacagagctgctggccagccacaacaactatgcccgctacagaaggacctgggccggctgtgccggcttccggctgcctgtgctgggcgtgcacctgaaggacctggtgtccctgcacgaggcccagcctgaccggctgcctgatggccgcctgcacctgcccaagctgaacaacctgtacctgcggctgcaggagctggtggccctgcagggccagcaccccccctgcagcgccaatgaagacctgctgcacctgctgaccctgagcctggacctcttctacacagaagatgagatctatgagctgtcctatgcccgggagccccgctgccccaagagcctgccccccagccccttcaatgcccccctggtggtggagtgggcccctggggtgacccccaagccagacagagtgaccctgggccgccacgtggagcagctggtggagagcgtcttcaagaactatgaccctgagggccggggcaccatcagccaggaggactttgagcggctgagcggcaacttcccctttgcctgccacggcctgcaccccccaccccggcagggccggggcagcttcagccgggaggagctgaccggctacctgctgcgggccagcgccatctgcagcaagctgggcctggccttcctgcacaccttccacgaggtgaccttcaggaagcccaccttctgtgacagctgcagcggcttcctgtggggcgtgaccaagcagggctaccgctgcagagaatgtggcctgtgctgccacaagcactgccgggaccaggtgaaggtggagtgcaagaagaggcctggggccaagggagatgctggccccccaggggcccctgtgcccagcaccccagccccccacgccagctgtggcagcgaggagaaccacagctacaccctgagcctggagcctgagaccggctgccagctgcggcatgcctggacccagacagagagcccccaccccagctgggagacagacacagtgccctgccctgtgatggacccccccagcacagccagcagcaagctggacagctag

SEQ ID NO: 246933 - DNA, 1854 bp, Artificial Sequence
  derived and/or modified sequence
atgaaccggaaggacagcaagcggaagagccaccaggagtgcaccgggaagattggaggcagaggccgccctcgccaggtccgcaggcataagacatgtccttcaccacgggagatctcgaaagtaatggcatctatgaatctgggcctcctttcggaaggcgggtgctcagaggatgaactgttagagaaatgcatccaaagctttgacagcgccggctcactctgccatgaagaccatatgctgaatatggtcctagccatgcatagctgggtgttaccctcagccgacttggcagcaagactactgacctcttatcagaaagcaaccggagacacccaagagctgcggcggttacagatctgccatcttgtcaggtactggctgatgcgtcatcccgaagtgatgcatcaggatccgcaacttgaagaggtcataggccggttttgggcaacagtggcaagggaaggtaactctgcgcagcggcgcctgggcgactcctccgacctcctttcaccaggcggcccagggccccctctgcctatgtcatcccctggactggggaaaaaacggaaggtatcgcttctgtttgatcacctggaaacaggcgagctcgcccaacacctcacatacctagagttcaggtcgtttcaggccataacgcctcaggacctcaggagctacgtcctgcagggatcagtcaggggatgtccagcactggagggttctgtgggattatcaaatagtgtatctcgatgggtgcaggtaatggtgctgagccggcctggccccttgcagagggcccaagttctcgacaaattcatacatgtcgctcaacgcttgcatcaactgcaaaattttaacactctcatggcagtcactggcgggttatgtcattcagcaatctctcgtctgaaagactcccatgcccacctgtcccccgattcaacgaaggccttgctggagttgactgaattgttggctagccacaacaactatgcccgctataggcggacgtgggccggatgcgcaggattccggctgccagtgctgggtgtccatctgaaggacttggtatcactacatgaggcccagcccgaccgacttcccgacgggaggctgcacctgcccaagctcaataacttatacttgaggctgcaggagctggttgcactgcagggacagcaccctccctgcagtgcaaacgaagatttactccacctgcttacgctgagcctggacctgttctatacagaggacgaaatctacgaactaagttatgccagagaaccacgatgccctaaatccttgcccccgtcacccttcaacgcccccctggttgtagagtgggcacccggcgtcaccccaaaacccgatagagtgacgctggggcggcacgtggagcagttagttgaaagcgtcttcaagaactatgaccctgaggggcggggcaccatctcccaagaagattttgagagattatcgggtaacttcccatttgcctgccacggcttgcatccgccacctcgacaagggagaggaagtttcagtcgagaggaactgacagggtacctgctgcgtgctagtgcgatttgcagtaaactggggctggccttcctgcacacgttccacgaggtcacctttcggaagcccaccttctgtgattcctgctccgggttcttgtggggcgttacaaaacaggggtaccgatgcagaggcgagtggggtgtgagcgagtgggagggctccctgggaccccaagccggtcgcatggacgataccgaccggacgcctgccgccgcgttccctcagtccgctggatgcgtggctacaaacacagcggagacaaggtag

SEQ ID NO: 246934 - DNA, 2022 bp, Artificial Sequence
  derived and/or modified sequence
atgaaccggaaggacagcaagcggaagagccaccaggagtgcaccgggaaaatcggaggcaggggaaggcctcgccaggtccgcagacataagacatgcccctctccaagagagatctcgaaggtgatggcttccatgaacctgggtctgctaagtgagggtggctgttcagaggatgagctcctggagaagtgcatccagtcattcgatagtgccgggagcctgtgtcatgaggatcatatgctcaatatggtgctggctatgcatagctgggtcctgccatctgcagatctcgccgcgcggctgctcactagttatcagaaggctactggggatacgcaggaattgaggcgcttacagatctgtcacctggtacggtactggctgatgcgacaccccgaggtgatgcaccaagaccctcagctggaggaagtgatcggccgcttctgggctacagtggccagagagggaaactctgcccagcggaggctgggcgactcctccgacctcctgtctcctggagggcctgggccgccactccccatgagctctccaggacttggaaaaaaaaggaaggtttctcttttattcgatcatctcgagaccggggaactggcacagcacctcacatatctggagttccgctccttccaggccatcacacctcaagacctgcgttcatacgtactccaggggtctgtacgtgggtgccctgctctggaaggcagcgtggggctctccaattctgtgtcccgatgggtgcaggtaatggtactatcgcggcccgggcccctgcagagagctcaggtcctcgataaattcatccatgtcgcgcagagactccatcaactgcagaatttcaatacactgatggccgtgactggcgggctgtgccacagcgctatttcaaggctgaaggacagtcatgcccacctctccccagacagtacaaaggcgctgctagagctaaccgagctgttggcctcccacaataattatgcaaggtacagacggacctgggcagggtgtgctggctttcgcctgccagttctgggggtgcatcttaaggatctggtgtcgcttcacgaagcgcagcccgataggttgcccgacggccggctgcacctcccgaagttgaacaacctctatttgaggctgcaggaactcgtagctttgcagggccagcacccaccttgcagcgccaatgaggacctgcttcatttgttgaccttgtctctggacctcttctacaccgaggacgaaatctatgagttgtcctacgccagagagcctcgatgccccaagagcttaccgccgtctcctttcaatgcacccctcgtggtcgagtgggcccctggggtgactcccaagcctgaccgggtgactttggggaggcacgtggaacagttggtggagtccgtgttcaagaattacgatccagaaggccgaggcaccatttcccaagaagacttcgagagattgtctgggaactttccttttgcttgccacggcctgcacccaccgccccgccagggcagaggatctttctctcgagaagagctgacggggtacctgctgcgagcatccgctatttgttctaagctcggcttagcattcctccacacctttcatgaagtcacatttcggaagccaaccttttgcgactcgtgttctggctttctctggggagtcaccaagcagggatatagatgcagagagtgcggcctctgctgccataagcattgtcgagaccaggtcaaggttgaatgtaagaaacgccctggggcaaagggggacgccggtccgccaggggctcccgtaccctctacccctgcaccacacgcttcctgcggctccgaagaaaatcacagctacaccctaagccttgagcccgagactggatgccaactccggcacgcttggacccaaacagaatctccacacccttcttgggagaccgatactgtgccctgcccagtgatggatcccccttcaacagcatcctctaagctggactcatag

SEQ ID NO: 246935 - DNA, 1854 bp, Artificial Sequence
  derived and/or modified sequence
atgaacaggaaggatagtaagcggaaaagccaccaggagtgtaccgggaaaatcggcggtagaggacgaccacggcaggtaaggaggcacaagacatgcccttccccgagagaaatttctaaggttatggctagtatgaatctgggtctgctctctgagggcggatgtagcgaggacgagctgctggagaaatgtatacagtcttttgattctgccggaagcctgtgtcacgaagaccatatgctgaatatggttctagcaatgcacagctgggtgttaccaagcgctgaccttgcagctaggctcctgactagctaccagaaggcaaccggagacacccaggaattgcggcgacttcaaatctgccatcttgtgcgttactggctcatgaggcacccagaagttatgcatcaggatcctcagctggaggaggtcataggccgtttctgggcgacagtcgctagggaagggaattcagctcagaggaggctaggagatagctctgatttgctcagcccgggagggcctggacctcctcttcctatgtcctctccaggtttaggcaaaaaacgtaaagtctccctgctgttcgaccatctcgagacaggagaattggcccaacaccttacctacctcgaatttcgaagcttccaggcgattacaccccaggatctgaggagttacgtactacaaggatctgttagggggtgtcctgctttggagggaagtgtcgggctatcaaacagcgtgtcacgctgggtgcaagtgatggttctctcccgcccaggccctttacagcgcgctcaggttttagataaattcatacacgtggcacaacgtttgcaccagctacagaactttaacacactaatggctgttactggaggcctctgtcacagtgccatcagccgtctgaaggatagccacgcccacctgagcccagattctactaaagcccttctggaacttaccgaactcctcgcatcacacaataactacgctcgataccgcaggacatgggcgggttgtgcgggtttccgcctccctgtactgggcgtacatttgaaagatctggttagcctgcatgaggcgcagcccgacagactcccagatgggaggctacacctgccaaagctgaataatctgtatctgagactccaagagctcgtggcccttcagggccagcaccccccatgttctgccaatgaggatctcttacatctcctaaccctctcactggacctgttttatacagaagacgaaatctacgagctctcctacgcgagagagccgagatgcccaaaaagcctaccacccagcccttttaatgctccactggtagtcgagtgggccccaggcgtcactcccaaaccggaccgcgtgacacttggcaggcacgtggagcagctggtggagtctgtgttcaagaattacgaccccgagggacggggaaccatttctcaggaagacttcgaacgcctttctgggaactttccgtttgcttgccacggactgcacccccctccgcgacagggcaggggctccttttccagggaggagctgaccgggtacctgctgcgggcaagcgccatttgtagtaagctgggcttggccttcctccacacgtttcatgaggtcaccttccggaagcccacattctgcgactcatgtagcggctttctgtggggggtcacgaagcaaggataccggtgtagaggtgagtggggcgtctccgaatgggagggaagtctgggtccccaggccggaaggatggatgacactgaccgcacaccagccgctgccttcccccaatccgccggatgcgtggctactaatacagccgaaacgcgttag

SEQ ID NO: 246936 - DNA, 2022 bp, Artificial Sequence
  derived and/or modified sequence
atgaaccggaaggactcaaagcgcaaatcccaccaggaatgtactggcaaaatcggcggaagaggcagacctcgccaggtccgacggcacaagacatgcccatcccccagagaaatctcaaaagtgatggcaagtatgaacctcggtctgttatccgaggggggatgcagtgaggacgagttgctggaaaagtgtatccagtcatttgactctgccggttccctttgtcatgaggaccacatgctcaacatggtcttagctatgcacagttgggtcctaccctccgcagacctggccgctagactcctaacgtcctatcagaaggcaactggggacacacaggaactgaggcgcctgcagatctgccacttggttcggtactggcttatgcgccatcccgaggtcatgcaccaggatccacagctcgaagaggttatcggacggttttgggcaaccgtagcccgagagggcaattcagcccagaggagactgggggattctagcgatttgctgagtcccggaggcccaggcccacctttgcccatgtctagcccgggtctcggcaagaagagaaaagtcagcctcctttttgatcatttggagactggcgagctggcccagcacctgacctacctggagtttcggagcttccaagccatcacccctcaagatctgaggagttacgtgctccagggtagtgtgcgaggctgccccgctctggaaggttcagtgggattgtccaacagcgtcagccgatgggttcaggtgatggttctctccagacccggacccctccagagggcacaggtactcgacaaattcatccacgtggcccagcgcttgcaccagctgcagaatttcaacaccctcatggccgttaccggaggactgtgtcattcagccataagtcgtctaaaggatagtcatgcccatctgtctccagatagtacaaaagctctgctggaactgacagagctccttgcttctcataacaattatgcacgctaccgtcgaacttgggccggatgtgccggtttccgcctacctgttctgggcgtacacttgaaggatctggtctcgctccacgaggcacagcctgaccggctccctgacgggcgattgcatctgcccaaactgaacaatttgtacctacggctgcaagagctggttgccctgcagggtcagcaccccccatgtagcgccaacgaagacttacttcacctgctcactctgagccttgatctgttctacaccgaggacgaaatatacgagctctcgtatgcgagagaacccagatgccctaagtctctgccaccaagtccattcaatgctccattggtcgttgagtgggcaccgggtgtgaccccaaaacccgatagagtgactctcggcaggcacgtggaacagctggtggagagtgtgtttaagaattacgatcctgaggggaggggaaccatatcccaagaagattttgaacggctgagcgggaactttccatttgcctgccacggattgcacccccctccccgacagggacgaggaagtttcagcagggaggagcttactggctacctcctccgcgctagcgccatttgcagcaagctgggccttgcgtttttgcacacgtttcacgaggtgactttcaggaagccgacattctgcgactcgtgctcgggtttcctatggggagtgactaagcagggatacagatgcagagagtgtggtctgtgctgtcacaaacattgcagagaccaagtgaaggtggagtgtaagaaacgtcccggagctaaaggcgacgccggaccgccaggcgctccagtgcccagcactcctgctcctcatgctagctgtggaagtgaagaaaaccactcatacactttgagcctcgagcccgaaactggatgtcaactgcgccacgcctggacacagacagaatcaccccatcccagctgggagactgacactgtgccctgtcccgtaatggacccgccatccaccgcgagcagcaaactcgattcgtag

SEQ ID NO: 246937 - DNA, 3313 bp, Artificial Sequence
  derived and/or modified sequence
atccccgtgtgggggaggggggccttcggtctctccccagcctcttccttccccctggcctgagggtgggtggggaggggcagttcctctttccttcccaagcaccgaggaggccccagctccctaggggctgagaagctggagtcctgggcaaggggaggagctgagccctactcttgcaagacccccggcctcctcaccccacgcgggaagcatgaacagaaaagacagtaagaggaagtcccaccaggaatgcaccggaaaaataggagggcgaggccggccccgccaagtgcgccgccacaagacatgccccagccctcgggaaatcagcaaggtcatggcttccatgaacctgggcctgctgagtgagggcggctgcagcgaagatgagctgctggagaaatgcatccagtccttcgattcagctggcagcctgtgccacgaggaccacatgctcaacatggtgctggccatgcacagctgggtgctgccgtccgccgacctggctgcccgcctgctgacctcataccagaaggccacaggggacacccaggagctgagacggctgcagatctgtcacctggtcaggtactggctgatgcgacaccctgaggtgatgcaccaggatccccagctagaagaagtcataggtcgtttctgggccaccgtggcccgggagggcaactcagcccagagaagactgggagactcttctgacctcctgagccctggtggccctggccccccactcccaatgagcagcccaggcctgggcaaaaagcgcaaagtgtccttgcttttcgaccacttggagacgggggagctggctcagcacctcacctacctggagttccggtccttccaggctatcacgccccaggacctgcggagctacgttttgcagggctcagtacgaggctgcccggccctggagggctccgtaggtctcagcaacagcgtgtcccgctgggtgcaggtgatggtgctgagccgtcccgggcccctacagcgtgcacaggtgctggacaagttcattcacgtggcacagaggctccaccagctgcagaatttcaacacgctgatggcagtcacagggggcctgtgtcacagtgccatctccagactcaaggactcccatgcccacctgagccctgacagcaccaaggccctcctggagctcactgagctccttgcctcccacaacaactacgcccgctaccgccgcacctgggctggctgcgcgggtttccggctgcctgtactgggcgtgcacctcaaggacctggtgtccctgcatgaggcacagcccgacaggttgcctgacggccgcctgcacctacccaagctgaacaacctctacctgcggctgcaggagctggtggccctccaagggcagcatccaccctgcagcgccaatgaggatctgctgcacctgctcacgctctccctggacctcttctacacggaagacgagatctatgagctttcttatgcccgggagccgcgttgtcccaagagcctgccaccctcccccttcaatgcacctctggtggtggagtgggcccctggtgtgacacccaagccggacagggtcacactgggtcggcatgtggagcagctggtggagtctgtgttcaagaattatgaccctgaaggccgaggaacaatctctcaggaggactttgagcgactctcgggcaattttcccttcgcctgccatgggcttcacccacccccacgccaggggagaggatccttcagcagagaggagctgacagggtacctgctccgggccagcgccatctgctccaagttgggcctggccttcctgcacaccttccatgaggtcaccttccgaaagcctaccttctgcgacagctgcagtggcttcctctggggtgtcaccaagcaaggctaccgctgtcggggtgagtggggtgtcagtgagtgggagggaagccttggcccgcaggctggaagaatggatgacacagatcggacccctgccgctgccttcccccagagtgcgggctgtgttgccacaaacactgcagagaccaggtgaaggtagaatgtaagaagaggccaggggccaagggcgatgcaggaccccccggagctcctgtcccatccacaccagctccccatgccagctgtggctccgaggaaaatcactcctacacgctatccctggagcctgagactgggtgccagcttcgccatgcctggacccagactgaatccccacacccttcctgggaaacagatacggtcccctgcccggtgatggacccaccatcaactgcatcctccaagctggattcctagacatctcttggtctcctctcttcctcactcccttcccccagtcagtcctgagtcctgccgtcagactctggcagggctcccagaggtaggcctccagaggcatccgccttcccatccacactgcctttagtggtacgtccgtcatctttttccctggaagtgactttcctcttttgcatcctggtggatgctaatcctgctccctttccctgcacttagtatctgtgcggctgtgtgttggatacatttagactcaggcctcattctaccaactccctacatctccatttctttttttttttgagacagagtcttgctctgtcacccaggctggagtgcaatgatgcaatctcagctcactgcaacttccgcctcctgggttcaagtgattcttctgcctcagcctcccaagtagctgggattacaggcacgcgccaccatgcccggctaatttttgtatttttagtagagacggggtttccccatgttggccaagatggtctcaaactcctgacctcatgatccaccagcctcagcctcccaaagtgctgggaatacaggcgtgagccaccacgcccagctcctgtttttctgcatagaatgtgctccctctgacagcctatactttttccctctttatctcgttgaacgtctgtctttcctcaacaggagcatcaactccaggagaacagggatttctatcaatgtcattcactgctgcatccccagtgcctagaacagggctggcaggtggtaggcgcctgacagatgcttgtctgatgcctgaatgtctccttacccatgcccacggcacaggatagatgtgctatagggcaaagaactttgagggtcgagcagcaggggcccattcagtcccagggagcagagacccccccaaccccttcacaaaccccaacacccctgacttggcccccacagagagaggtcctacagctgtcataaattaaatttattctctgga

SEQ ID NO: 246938 - DNA, 3217 bp, Artificial Sequence
  derived and/or modified sequence
atccccgtgtgggggaggggggccttcggtctctccccagcctcttccttccccctggcctgagggtgggtggggaggggcagttcctctttccttcccaagcaccgaggaggccccagctccctaggggctgagaagctggagtcctgggcaaggggaggagctgagccctactcttgcaagacccccggcctcctcaccccacgcgggaagcatgaacagaaaagacagtaagaggaagtcccaccaggaatgcaccggaaaaataggagggcgaggccggccccgccaagtgcgccgccacaagacatgccccagccctcgggaaatcagcaaggtcatggcttccatgaacctgggcctgctgagtgagggcggctgcagcgaagatgagctgctggagaaatgcatccagtccttcgattcagctggcagcctgtgccacgaggaccacatgctcaacatggtgctggccatgcacagctgggtgctgccgtccgccgacctggctgcccgcctgctgacctcataccagaaggccacaggggacacccaggagctgagacggctgcagatctgtcacctggtcaggtactggctgatgcgacaccctgaggtgatgcaccaggatccccagctagaagaagtcataggtcgtttctgggccaccgtggcccgggagggcaactcagcccagagaagactgggagactcttctgacctcctgagccctggtggccctggccccccactcccaatgagcagcccaggcctgggcaaaaagcgcaaagtgtccttgcttttcgaccacttggagacgggggagctggctcagcacctcacctacctggagttccggtccttccaggctatcacgccccaggacctgcggagctacgttttgcagggctcagtacgaggctgcccggccctggagggctccgtaggtctcagcaacagcgtgtcccgctgggtgcaggtgatggtgctgagccgtcccgggcccctacagcgtgcacaggtgctggacaagttcattcacgtggcacagaggctccaccagctgcagaatttcaacacgctgatggcagtcacagggggcctgtgtcacagtgccatctccagactcaaggactcccatgcccacctgagccctgacagcaccaaggccctcctggagctcactgagctccttgcctcccacaacaactacgcccgctaccgccgcacctgggctggctgcgcgggtttccggctgcctgtactgggcgtgcacctcaaggacctggtgtccctgcatgaggcacagcccgacaggttgcctgacggccgcctgcacctacccaagctgaacaacctctacctgcggctgcaggagctggtggccctccaagggcagcatccaccctgcagcgccaatgaggatctgctgcacctgctcacgctctccctggacctcttctacacggaagacgagatctatgagctttcttatgcccgggagccgcgttgtcccaagagcctgccaccctcccccttcaatgcacctctggtggtggagtgggcccctggtgtgacacccaagccggacagggtcacactgggtcggcatgtggagcagctggtggagtctgtgttcaagaattatgaccctgaaggccgaggaacaatctctcaggaggactttgagcgactctcgggcaattttcccttcgcctgccatgggcttcacccacccccacgccaggggagaggatccttcagcagagaggagctgacagggtacctgctccgggccagcgccatctgctccaagttgggcctggccttcctgcacaccttccatgaggtcaccttccgaaagcctaccttctgcgacagctgcagtggcttcctctggggtgtcaccaagcaaggctaccgctgtcgggagtgcgggctgtgttgccacaaacactgcagagaccaggtgaaggtagaatgtaagaagaggccaggggccaagggcgatgcaggaccccccggagctcctgtcccatccacaccagctccccatgccagctgtggctccgaggaaaatcactcctacacgctatccctggagcctgagactgggtgccagcttcgccatgcctggacccagactgaatccccacacccttcctgggaaacagatacggtcccctgcccggtgatggacccaccatcaactgcatcctccaagctggattcctagacatctcttggtctcctctcttcctcactcccttcccccagtcagtcctgagtcctgccgtcagactctggcagggctcccagaggtaggcctccagaggcatccgccttcccatccacactgcctttagtggtacgtccgtcatctttttccctggaagtgactttcctcttttgcatcctggtggatgctaatcctgctccctttccctgcacttagtatctgtgcggctgtgtgttggatacatttagactcaggcctcattctaccaactccctacatctccatttctttttttttttgagacagagtcttgctctgtcacccaggctggagtgcaatgatgcaatctcagctcactgcaacttccgcctcctgggttcaagtgattcttctgcctcagcctcccaagtagctgggattacaggcacgcgccaccatgcccggctaatttttgtatttttagtagagacggggtttccccatgttggccaagatggtctcaaactcctgacctcatgatccaccagcctcagcctcccaaagtgctgggaatacaggcgtgagccaccacgcccagctcctgtttttctgcatagaatgtgctccctctgacagcctatactttttccctctttatctcgttgaacgtctgtctttcctcaacaggagcatcaactccaggagaacagggatttctatcaatgtcattcactgctgcatccccagtgcctagaacagggctggcaggtggtaggcgcctgacagatgcttgtctgatgcctgaatgtctccttacccatgcccacggcacaggatagatgtgctatagggcaaagaactttgagggtcgagcagcaggggcccattcagtcccagggagcagagacccccccaaccccttcacaaaccccaacacccctgacttggcccccacagagagaggtcctacagctgtcataaattaaatttattctctgg

SEQ ID NO: 246939 - DNA, 1854 bp, Artificial Sequence
  derived and/or modified sequence
atgaacagaaaggacagcaagagaaagagccaccaggagtgcaccggcaagatcggcggcagaggcagacccagacaggtgagaagacacaagacctgccccagccccagagagatcagcaaggtgatggccagcatgaacctgggcctgctgagcgagggcggctgcagcgaggacgagctgctggagaagtgcatccagagcttcgacagcgccggcagcctgtgccacgaggaccacatgctgaacatggtgctggccatgcacagctgggtgctgcccagcgccgacctggccgccagactgctgaccagctaccagaaggccaccggcgacacccaggagctgagaagactgcagatctgccacctggtgagatactggctgatgagacaccccgaggtgatgcaccaggacccccagctggaggaggtgatcggcagattctgggccaccgtggccagagagggcaacagcgcccagagaagactgggcgacagcagcgacctgctgagccccggcggccccggcccccccctgcccatgagcagccccggcctgggcaagaagagaaaggtgagcctgctgttcgaccacctggagaccggcgagctggcccagcacctgacctacctggagttcagaagcttccaggccatcaccccccaggacctgagaagctacgtgctgcagggcagcgtgagaggctgccccgccctggagggcagcgtgggcctgagcaacagcgtgagcagatgggtgcaggtgatggtgctgagcagacccggccccctgcagagagcccaggtgctggacaagttcatccacgtggcccagagactgcaccagctgcagaacttcaacaccctgatggccgtgaccggcggcctgtgccacagcgccatcagcagactgaaggacagccacgcccacctgagccccgacagcaccaaggccctgctggagctgaccgagctgctggccagccacaacaactacgccagatacagaagaacctgggccggctgcgccggcttcagactgcccgtgctgggcgtgcacctgaaggacctggtgagcctgcacgaggcccagcccgacagactgcccgacggcagactgcacctgcccaagctgaacaacctgtacctgagactgcaggagctggtggccctgcagggccagcaccccccctgcagcgccaacgaggacctgctgcacctgctgaccctgagcctggacctgttctacaccgaggacgagatctacgagctgagctacgccagagagcccagatgccccaagagcctgccccccagccccttcaacgcccccctggtggtggagtgggcccccggcgtgacccccaagcccgacagagtgaccctgggcagacacgtggagcagctggtggagagcgtgttcaagaactacgaccccgagggcagaggcaccatcagccaggaggacttcgagagactgagcggcaacttccccttcgcctgccacggcctgcaccccccccccagacagggcagaggcagcttcagcagagaggagctgaccggctacctgctgagagccagcgccatctgcagcaagctgggcctggccttcctgcacaccttccacgaggtgaccttcagaaagcccaccttctgcgacagctgcagcggcttcctgtggggcgtgaccaagcagggctacagatgcagaggcgagtggggcgtgagcgagtgggagggcagcctgggcccccaggccggcagaatggacgacaccgacagaacccccgccgccgccttcccccagagcgccggctgcgtggccaccaacaccgccgagaccagatag

SEQ ID NO: 246940 - DNA, 2022 bp, Artificial Sequence
  derived and/or modified sequence
atgaacagaaaggacagcaagagaaagagccaccaggagtgcaccggcaagatcggcggcagaggcagacccagacaggtgagaagacacaagacctgccccagccccagagagatcagcaaggtgatggccagcatgaacctgggcctgctgagcgagggcggctgcagcgaggacgagctgctggagaagtgcatccagagcttcgacagcgccggcagcctgtgccacgaggaccacatgctgaacatggtgctggccatgcacagctgggtgctgcccagcgccgacctggccgccagactgctgaccagctaccagaaggccaccggcgacacccaggagctgagaagactgcagatctgccacctggtgagatactggctgatgagacaccccgaggtgatgcaccaggacccccagctggaggaggtgatcggcagattctgggccaccgtggccagagagggcaacagcgcccagagaagactgggcgacagcagcgacctgctgagccccggcggccccggcccccccctgcccatgagcagccccggcctgggcaagaagagaaaggtgagcctgctgttcgaccacctggagaccggcgagctggcccagcacctgacctacctggagttcagaagcttccaggccatcaccccccaggacctgagaagctacgtgctgcagggcagcgtgagaggctgccccgccctggagggcagcgtgggcctgagcaacagcgtgagcagatgggtgcaggtgatggtgctgagcagacccggccccctgcagagagcccaggtgctggacaagttcatccacgtggcccagagactgcaccagctgcagaacttcaacaccctgatggccgtgaccggcggcctgtgccacagcgccatcagcagactgaaggacagccacgcccacctgagccccgacagcaccaaggccctgctggagctgaccgagctgctggccagccacaacaactacgccagatacagaagaacctgggccggctgcgccggcttcagactgcccgtgctgggcgtgcacctgaaggacctggtgagcctgcacgaggcccagcccgacagactgcccgacggcagactgcacctgcccaagctgaacaacctgtacctgagactgcaggagctggtggccctgcagggccagcaccccccctgcagcgccaacgaggacctgctgcacctgctgaccctgagcctggacctgttctacaccgaggacgagatctacgagctgagctacgccagagagcccagatgccccaagagcctgccccccagccccttcaacgcccccctggtggtggagtgggcccccggcgtgacccccaagcccgacagagtgaccctgggcagacacgtggagcagctggtggagagcgtgttcaagaactacgaccccgagggcagaggcaccatcagccaggaggacttcgagagactgagcggcaacttccccttcgcctgccacggcctgcaccccccccccagacagggcagaggcagcttcagcagagaggagctgaccggctacctgctgagagccagcgccatctgcagcaagctgggcctggccttcctgcacaccttccacgaggtgaccttcagaaagcccaccttctgcgacagctgcagcggcttcctgtggggcgtgaccaagcagggctacagatgcagagagtgcggcctgtgctgccacaagcactgcagagaccaggtgaaggtggagtgcaagaagagacccggcgccaagggcgacgccggcccccccggcgcccccgtgcccagcacccccgccccccacgccagctgcggcagcgaggagaaccacagctacaccctgagcctggagcccgagaccggctgccagctgagacacgcctggacccagaccgagagcccccaccccagctgggagaccgacaccgtgccctgccccgtgatggacccccccagcaccgccagcagcaagctggacagctag

SEQ ID NO: 246941 - protein, 4911 aa, Artificial Sequence
  derived and/or modified sequence
MSSEEDKSVEQPQPPPPPPEEPGAPAPSPAAADKRPRGRPRKDGASPFQRARKKPRSRGKTAVEDEDSMDGLETTETETIVETEIKEQSAEEDAEAEVDNSKQLIPTLQRSVSEESANSLVSVGVEAKISEQLCAFCYCGEKSSLGQGDLKQFRITPGFILPWRNQPSNKKDIDDNSNGTYEKMQNSAPRKQRGQRKERSPQQNIVSCVSVSTQTASDDQAGKLWDELSLVGLPDAIDIQALFDSTGTCWAHHRCVEWSLGVCQMEEPLLVNVDKAVVSGSTERCAFCKHLGATIKCCEEKCTQMYHYPCAAGAGTFQDFSHIFLLCPEHIDQAPERSKEDANCAVCDSPGDLLDQFFCTTCGQHYHGMCLDIAVTPLKRAGWQCPECKVCQNCKQSGEDSKMLVCDTCDKGYHTFCLQPVMKSVPTNGWKCKNCRICIECGTRSSSQWHHNCLICDNCYQQQDNLCPFCGKCYHPELQKDMLHCNMCKRWVHLECDKPTDHELDTQLKEEYICMYCKHLGAEMDRLQPGEEVEIAELTTDYNNEMEVEGPEDQMVFSEQAANKDVNGQESTPGIVPDAVQVHTEEQQKSHPSESLDTDSLLIAVSSQHTVNTELEKQISNEVDSEDLKMSSEVKHICGEDQIEDKMEVTENIEVVTHQITVQQEQLQLLEEPETVVSREESRPPKLVMESVTLPLETLVSPHEESISLCPEEQLVIERLQGEKEQKENSELSTGLMDSEMTPTIEGCVKDVSYQGGKSIKLSSETESSFSSSADISKADVSSSPTPSSDLPSHDMLHNYPSALSSSAGNIMPTTYISVTPKIGMGKPAITKRKFSPGRPRSKQGAWSTHNTVSPPSWSPDISEGREIFKPRQLPGSAIWSIKVGRGSGFPGKRRPRGAGLSGRGGRGRSKLKSGIGAVVLPGVSTADISSNKDDEENSMHNTVVLFSSSDKFTLNQDMCVVCGSFGQGAEGRLLACSQCGQCYHPYCVSIKITKVVLSKGWRCLECTVCEACGKATDPGRLLLCDDCDISYHTYCLDPPLQTVPKGGWKCKWCVWCRHCGATSAGLRCEWQNNYTQCAPCASLSSCPVCYRNYREEDLILQCRQCDRWMHAVCQNLNTEEEVENVADIGFDCSMCRPYMPASNVPSSDCCESSLVAQIVTKVKELDPPKTYTQDGVCLTESGMTQLQSLTVTVPRRKRSKPKLKLKIINQNSVAVLQTPPDIQSEHSRDGEMDDSREGELMDCDGKSESSPEREAVDDETKGVEGTDGVKKRKRKPYRPGIGGFMVRQRSRTGQGKTKRSVIRKDSSGSISEQLPCRDDGWSEQLPDTLVDESVSVTESTEKIKKRYRKRKNKLEETFPAYLQEAFFGKDLLDTSRQSKISLDNLSEDGAQLLYKTNMNTGFLDPSLDPLLSSSSAPTKSGTHGPADDPLADISEVLNTDDDILGIISDDLAKSVDHSDIGPVTDDPSSLPQPNVNQSSRPLSEEQLDGILSPELDKMVTDGAILGKLYKIPELGGKDVEDLFTAVLSPANTQPTPLPQPPPPTQLLPIHNQDAFSRMPLMNGLIGSSPHLPHNSLPPGSGLGTFSAIAQSSYPDARDKNSAFNPMASDPNNSWTSSAPTVEGENDTMSNAQRSTLKWEKEEALGEMATVAPVLYTNINFPNLKEEFPDWTTRVKQIAKLWRKASSQERAPYVQKARDNRAALRINKVQMSNDSMKRQQQQDSIDPSSRIDSELFKDPLKQRESEHEQEWKFRQQMRQKSKQQAKIEATQKLEQVKNEQQQQQQQQFGSQHLLVQSGSDTPSSGIQSPLTPQPGNGNMSPAQSFHKELFTKQPPSTPTSTSSDDVFVKPQAPPPPPAPSRIPIQDSLSQAQTSQPPSPQVFSPGSSNSRPPSPMDPYAKMVGTPRPPPVGHSFSRRNSAAPVENCTPLSSVSRPLQMNETTANRPSPVRDLCSSSTTNNDPYAKPPDTPRPVMTDQFPKSLGLSRSPVVSEQTAKGPIAAGTSDHFTKPSPRADVFQRQRIPDSYARPLLTPAPLDSGPGPFKTPMQPPPSSQDPYGSVSQASRRLSVDPYERPALTPRPIDNFSHNQSNDPYSQPPLTPHPAVNESFAHPSRAFSQPGTISRPTSQDPYSQPPGTPRPVVDSYSQSSGTARSNTDPYSQPPGTPRPTTVDPYSQQPQTPRPSTQTDLFVTPVTNQRHSDPYAHPPGTPRPGISVPYSQPPATPRPRISEGFTRSSMTRPVLMPNQDPFLQAAQNRGPALPGPLVRPPDTCSQTPRPPGPGLSDTFSRVSPSAARDPYDQSPMTPRSQSDSFGTSQTAHDVADQPRPGSEGSFCASSNSPMHSQGQQFSGVSQLPGPVPTSGVTDTQNTVNMAQADTEKLRQRQKLREIILQQQQQKKIAGRQEKGSQDSPAVPHPGPLQHWQPENVNQAFTRPPPPYPGNIRSPVAPPLGPRYAVFPKDQRGPYPPDVASMGMRPHGFRFGFPGGSHGTMPSQERFLVPPQQIQGSGVSPQLRRSVSVDMPRPLNNSQMNNPVGLPQHFSPQSLPVQQHNILGQAYIELRHRAPDGRQRLPFSAPPGSVVEASSNLRHGNFIPRPDFPGPRHTDPMRRPPQGLPNQLPVHPDLEQVPPSQQEQGHSVHSSSMVMRTLNHPLGGEFSEAPLSTSVPSETTSDNLQITTQPSDGLEEKLDSDDPSVKELDVKDLEGVEVKDLDDEDLENLNLDTEDGKVVELDTLDNLETNDPNLDDLLRSGEFDIIAYTDPELDMGDKKSMFNEELDLPIDDKLDNQCVSVEPKKKEQENKTLVLSDKHSPQKKSTVTNEVKTEVLSPNSKVESKCETEKNDENKDNVDTPCSQASAHSDLNDGEKTSLHPCDPDLFEKRTNRETAGPSANVIQASTQLPAQDVINSCGITGSTPVLSSLLANEKSDNSDIRPSGSPPPPTLPASPSNHVSSLPPFIAPPGRVLDNAMNSNVTVVSRVNHVFSQGVQVNPGLIPGQSTVNHSLGTGKPATQTGPQTSQSGTSSMSGPQQLMIPQTLAQQNRERPLLLEEQPLLLQDLLDQERQEQQQQRQMQAMIRQRSEPFFPNIDFDAITDPIMKAKMVALKGINKVMAQNNLGMPPMVMSRFPFMGQVVTGTQNSEGQNLGPQAIPQDGSITHQISRPNPPNFGPGFVNDSQRKQYEEWLQETQQLLQMQQKYLEEQIGAHRKSKKALSAKQRTAKKAGREFPEEDAEQLKHVTEQQSMVQKQLEQIRKQQKEHAELIEDYRIKQQQQCAMAPPTMMPSVQPQPPLIPGATPPTMSQPTFPMVPQQLQHQQHTTVISGHTSPVRMPSLPGWQPNSAPAHLPLNPPRIQPPIAQLPIKTCTPAPGTVSNANPQSGPPPRVEFDDNNPFSESFQERERKERLREQQERQRIQLMQEVDRQRALQQRMEMEQHGMVGSEISSSRTSVSQIPFYSSDLPCDFMQPLGPLQQSPQHQQQMGQVLQQQNIQQGSINSPSTQTFMQTNERRQVGPPSFVPDSPSIPVGSPNFSSVKQGHGNLSGTSFQQSPVRPSFTPALPAAPPVANSSLPCGQDSTITHGHSYPGSTQSLIQLYSDIIPEEKGKKKRTRKKKRDDDAESTKAPSTPHSDITAPPTPGISETTSTPAVSTPSELPQQADQESVEPVGPSTPNMAAGQLCTELENKLPNSDFSQATPNQQTYANSEVDKLSMETPAKTEEIKLEKAETESCPGQEEPKLEEQNGSKVEGNAVACPVSSAQSPPHSAGAPAAKGDSGNELLKHLLKNKKSSSLLNQKPEGSICSEDDCTKDNKLVEKQNPAEGLQTLGAQMQGGFGCGNQLPKTDGGSETKKQRSKRTQRTGEKAAPRSKKRKKDEEEKQAMYSSTDTFTHLKQQNNLSNPPTPPASLPPTPPPMACQKMANGFATTEELAGKAGVLVSHEVTKTLGPKPFQLPFRPQDDLLARALAQGPKTVDVPASLPTPPHNNQEELRIQDHCGDRDTPDSFVPSSSPESVVGVEVSRYPDLSLVKEEPPEPVPSPIIPILPSTAGKSSESRRNDIKTEPGTLYFASPFGPSPNGPRSGLISVAITLHPTAAENISSVVAAFSDLLHVRIPNSYEVSSAPDVPSMGLVSSHRINPGLEYRQHLLLRGPPPGSANPPRLVSSYRLKQPNVPFPPTSNGLSGYKDSSHGIAESAALRPQWCCHCKVVILGSGVRKSFKDLTLLNKDSRESTKRVEKDIVFCSNNCFILYSSTAQAKNSENKESIPSLPQSPMRETPSKAFHQYSNNISTLDVHCLPQLPEKASPPASPPIAFPPAFEAAQVEAKPDELKVTVKLKPRLRAVHGGFEDCRPLNKKWRGMKWKKWSIHIVIPKGTFKPPCEDEIDEFLKKLGTSLKPDPVPKDYRKCCFCHEEGDGLTDGPARLLNLDLDLWVHLNCALWSTEVYETQAGALINVELALRRGLQMKCVFCHKTGATSGCHRFRCTNIYHFTCAIKAQCMFFKDKTMLCPMHKPKGIHEQELSYFAVFRRVYVQRDEVRQIASIVQRGERDHTFRVGSLIFHTIGQLLPQQMQAFHSPKALFPVGYEASRLYWSTRYANRRCRYLCSIEEKDGRPVFVIRIVEQGHEDLVLSDISPKGVWDKILEPVACVRKKSEMLQLFPAYLKGEDLFGLTVSAVARIAESLPGVEACENYTFRYGRNPLMELPLAVNPTGCARSEPKMSAHVKRFVLRPHTLNSTSTSKSFQSTVTGELNAPYSKQFVHSKSSQYRKMKTEWKSNVYLARSRIQGLGLYAARDIEKHTMVIEYIGTIIRNEVANRKEKLYESQNRGVYMFRMDNDHVIDATLTGGPARYINHSCAPNCVAEVVTFERGHKIIISSSRRIQKGEELCYDYKFDFEDDQHKIPCHCGAVNCRKWMN

SEQ ID NO: 246942 - DNA, 14736 bp, Artificial Sequence
  derived and/or modified sequence
atgtcatctgaggaagacaaaagtgttgaacagccacagcctcctcctccgccccctgaggagccaggcgcccctgctcccagtcccgcagccgcagacaagaggccgagaggccggccacgcaaggatggcgcttccccatttcaacgggcccgaaaaaagccccggagtcggggcaaaacagctgtagaggacgaggactctatggatggtctcgagacaaccgagaccgaaacgatcgtagagaccgagatcaaagagcagtccgcagaagaagatgcggaagccgaggtggacaacagcaagcagctcattcccactctacagcgttctgtgagcgaggaatctgctaacagcctcgtctctgtgggggtggaagccaagatttcagagcagctatgcgcattttgctattgtggcgagaaaagctcccttggccagggggatctcaaacaatttcggatcacccccggcttcatcctcccctggcgaaatcagccttccaataaaaaggacattgatgacaatagtaacggtacatacgagaaaatgcagaactcagcgcccagaaaacagagaggacagagaaaagagcgcagtccccagcagaatatcgtttcgtgcgtttctgtctcgacccagaccgcaagtgacgatcaggcgggtaagctttgggacgaactttctttagtgggcttgcccgatgcgatcgatattcaggctctcttcgatagcacaggtacctgctgggcccatcaccgctgcgtggagtggtctctcggggtttgccaaatggaagagccccttcttgtgaatgtcgacaaggctgtcgtgtccggatcgactgaacgctgcgcgttctgcaagcatcttggagctacaattaagtgttgcgaagagaagtgtacccagatgtatcactacccgtgcgcagcgggcgccggaacctttcaggacttcagtcatatctttttgctctgccccgagcatatcgatcaagcccccgagcgcagcaaggaggacgctaactgcgcagtgtgcgactcacccggagatttgctggaccagttcttttgcaccacctgtggccagcattaccatggaatgtgcctggatatcgcagtcacaccacttaaacgcgctgggtggcagtgcccggagtgcaaggtgtgtcagaattgcaagcaatccggggaggattctaagatgctggtttgtgacacttgcgataaaggatatcatacattttgtctgcagcccgtcatgaagtccgtacctaccaatggctggaaatgcaagaattgtaggatctgtatcgagtgcgggacccgatccagttcccagtggcaccacaattgcctgatttgcgataattgttatcagcagcaggacaacctctgtccattttgtgggaagtgctaccacccagagctgcagaaagacatgttgcactgtaatatgtgtaagcgctgggtacacctagagtgcgacaagccaacggaccacgaactggacactcaattgaaggaggaatatatctgcatgtattgtaagcatctaggcgccgagatggatcgcctgcagcctggcgaagaagtggaaatcgctgagctgacaactgactataataacgagatggaagtggagggtcccgaggaccagatggtcttttccgaacaagctgcaaataaggatgtgaatgggcaggaatcaacccccgggatcgtcccagacgctgtgcaggtgcataccgaggagcagcagaaaagtcacccctctgagagcttggatactgactcactactcattgccgtgagttcccagcacacagtgaacacggagctggaaaagcagattagcaatgaggtagattcggaggacctcaagatgagcagcgaggtgaagcatatctgcggagaggatcagatcgaggataaaatggaggtgacggagaatatcgaagtggtgacccatcagattacggtgcagcaggaacagctccaactcctggaggagccagagactgtcgtttcgcgagaggagagtaggcccccaaaactcgtcatggagagcgtgacgctgccgctggaaacccttgtttcccctcacgaagaatcaatttctctgtgtcctgaggagcagctggtgatagagaggctccagggcgagaaggaacagaaggaaaacagcgagctctccacaggcttaatggactcggagatgacaccaactattgaaggctgcgttaaagacgtcagctaccagggtggtaagagtatcaaactgtcatccgagaccgaatctagctttagctcctctgccgacatctcaaaagccgatgtttccagtagtcctactccctcttccgacttgccctctcatgatatgctgcataactaccccagtgccttgtcttcctccgcaggaaatatcatgccaactacttacatcagtgttacacctaaaatcggtatggggaaacctgccataaccaagaggaaattctctcccgggcggccaaggtcgaagcaaggcgcttggagtacccataacacggtgagccctcccagctggtccccagacatctccgaggggagagagatttttaagcccagacagctccctggatccgctatatggagcataaaggtgggaagggggtctggattcccaggaaagcggcgaccacggggcgcgggcctgtcagggcggggcggcaggggacgtagcaaactgaagtcgggaatcggcgcagttgtcctacccggcgtttctacagccgatatcagttctaataaagacgatgaggagaatagcatgcataataccgtggtgctcttctctagctcggacaaatttacgctgaaccaggacatgtgcgtcgtttgtggatcattcgggcagggtgcggaaggcagattgctagcctgttctcagtgtggccagtgttaccacccatattgcgtaagtataaagatcaccaaggttgtgcttagtaagggatggagatgtctggaatgcacagtgtgtgaagcttgtggtaaggcaacggacccgggaagactcctgctgtgcgatgattgtgacatatcttaccacacttactgcctggatccacctttgcagaccgtgcctaaaggtggttggaaatgcaagtggtgtgtttggtgcagacattgcggagcaacctccgcggggcttcgatgcgagtggcagaataactacactcagtgcgccccatgcgctagcctgtcttcctgcccggtctgttaccggaactatcgtgaggaagaccttatcctccagtgtcggcagtgcgacaggtggatgcacgccgtgtgccagaatctgaatacagaggaagaggtagaaaacgttgcagacattggttttgattgttccatgtgccgcccctatatgcctgcttccaacgtgccctccagcgactgctgcgaaagcagcctggtagcgcagatcgtcaccaaagtgaaagaattagatcccccaaagacctatacccaggacggagtgtgcctcacagagtcaggcatgacacagctgcaatccctgacggtaaccgtgccacgccggaagagaagtaaaccgaagctgaaactcaaaataattaatcagaatagcgtggccgttttacagacccctcctgatatccagtctgaacacagcagagatggggagatggatgattcaagggaaggggagctgatggattgtgatgggaagtccgagtcatcgcccgaacgcgaggctgtggatgacgagactaaaggagtggagggaaccgacggcgtgaagaaacgcaagcgcaagccttacaggcctggcattggcggattcatggttcggcagcgtagtcggacaggtcagggtaagaccaaaaggtctgtgatccgcaaggactcttcaggctccatttcagaacaactgccctgtcgggacgacggctggtctgagcagctgcctgatacgttagtcgacgaaagcgtttccgtcacagaatccaccgagaaaatcaaaaagcggtataggaagcgcaaaaacaaattggaggagacattccccgcttacctgcaggaagctttcttcgggaaggatctgttagacacaagtagacagtccaagatcagcctggataatttatccgaggatggtgcacaacttctttataaaacaaacatgaatactggatttcttgatccaagcttggatcccctattgagcagtagtagcgcaccaaccaagtctgggactcacggccccgccgacgatcccctggctgatatcagtgaggtgctgaataccgatgacgatatattgggaattatcagtgatgacctggcaaaatctgtggaccactctgatatcggccccgttaccgatgacccaagttccctcccgcaacctaacgtcaatcagtcatcaagaccactgagtgaagagcaactggacggaatactcagcccagagctagataaaatggtgacagatggggccatcctgggcaagctgtacaaaattcctgagctggggggcaaagacgttgaggacctgttcactgccgtgctgtctcccgccaatactcagcccaccccactgcctcagcccccaccccccacccagcttctgcctattcataatcaagatgcctttagtcggatgcctctcatgaatggcctgatagggtctagccctcatttgcctcacaactctctgccacccggatccggcctgggaacattttcagctattgctcagtccagctacccagacgcaagggataaaaactccgcctttaatccgatggccagcgatccgaataacagttggacgtcttcggcacccaccgttgaaggagagaacgataccatgtccaacgcccagcgctcgacactgaagtgggaaaaagaagaagcactgggcgagatggctactgtggcgccggtgctgtacacgaacattaatttccctaacttaaaagaggaattcccagactggaccactcgggtgaagcagatcgcaaagctgtggcgtaaggccagctcccaagagcgggcgccgtacgtccagaaagccagggacaacagggcggcattgcgaattaacaaagtccagatgtccaatgatagcatgaaacgccagcaacagcaggactccatcgatccaagctccaggatagattccgagctcttcaaagatccgctgaaacagcgggagtccgagcatgaacaggagtggaaatttcgacagcagatgcggcagaaatctaagcagcaggcgaagatagaagctacacagaaactggaacaagtaaaaaacgagcaacaacagcagcagcaacagcagttcggcagccagcacctgctagtgcaatccggctcagatacgccatccagtgggattcagtcccccctgacaccccagcctgggaatggtaacatgagcccagctcagagctttcacaaggagctctttaccaagcagcctccctcgacccctacctccacatcgagtgacgatgtgtttgtgaagccgcaggccccacccccccctcctgcccccagcaggatccctattcaggactctctgtcacaggcacagactagccagcccccaagtccgcaggtcttctctcctggctccagcaatagtcggcccccgtccccgatggatccgtacgcaaagatggttggcactcctcggcccccacccgttggacattccttctcccgtaggaacagcgcggctcctgtcgagaactgcactcctttgagttcggtctcccgccccttacagatgaacgaaacgactgccaaccggccctcccctgttcgagatctctgttcaagctcgactacgaataatgacccatacgctaaaccaccagacacaccacgccctgtgatgacagatcagttccctaaatccctgggtctctcaaggagtcccgtggtgagcgagcagacggcaaaggggcccattgctgccggaacttccgaccatttcactaagccctcacctcgggctgacgtatttcaacggcaaagaattccagacagttatgctaggccattactgacaccagctcctttggattccggacccgggccttttaaaacccctatgcagccaccgccctccagccaggacccctatggatcagtcagtcaagccagcaggaggctctctgtcgatccttacgaaagacccgcgttgacacctcggcctatcgacaactttagtcataatcagtctaatgacccctactctcagccaccactgacacctcacccagcagtgaacgagagcttcgctcacccttcgcgcgcatttagtcaacccggaactatcagtcggccaacatcccaggacccatattctcagcctcctggtacgccgcggcccgtggtggactcgtattcacagagctctggcaccgcacgtagtaacacagatccctactctcaaccacccgggacccctcgacccaccacggtcgacccatattctcagcagccccaaactcctcggccaagtacacagacagatctgtttgtcacacctgtaaccaatcagcgccattctgacccctatgcgcaccccccgggcacaccccgcccaggaatctctgtgccatacagccagccgcctgccaccccgcgcccgcggatatctgaaggatttactcgaagctcaatgacacgcccagtgctgatgcctaatcaggaccctttcctccaggcggctcagaacaggggacctgccttgcctggccctctggtgagacccccagacacctgctctcagacaccacgtccgccgggtccgggactgagtgacacttttagcagggtaagtcctagtgctgccagagatccctatgaccagtctcccatgacccctcggtcccaatcggactcattcggcaccagccaaacagcgcacgacgtagcggaccagcctaggcccggttccgagggtagcttttgcgccagttccaactcccctatgcattcccaggggcagcagttctctggcgttagccagctgcctgggcctgtgcccacaagtggagttaccgatacacagaacaccgtcaacatggcacaagccgacactgagaagctaagacagcgacagaaattacgggagatcattctgcagcagcagcaacagaagaagatcgcggggagacaggagaaaggaagccaagattcccccgccgttccacaccccggcccccttcagcattggcagccagagaacgtcaaccaagcctttactcggccccccccaccatatcccggcaatatccgttcgcctgtagcacctcctctcggtccaagatacgctgtctttccaaaggatcagaggggaccctaccctccagatgtggctagtatgggcatgcgaccacatggatttcggtttggattcccgggaggctcacacggcactatgccctcccaggagcgctttctcgtgccgccgcagcagatccagggatccggggtctcccctcagctgcggagaagcgtatctgtcgatatgccgcgtccactgaataattcccagatgaataatcctgttggactcccgcagcacttcagcccacagtctctgcccgtccagcagcataacatcctaggtcaggcgtatattgaactaaggcatagggcgccagacggccggcagagactgccctttagcgcgccgccgggtagcgtggtggaggcttctagcaatctgagacacggaaacttcattccgagacccgacttcccaggcccgagacacaccgatccgatgaggcggccaccacagggattgcccaaccagctgccagtccaccctgacctggagcaggtccccccatctcaacaagaacagggacactcggtgcattctagctccatggtcatgcgcactcttaatcaccctctgggcggggagttttctgaagccccactttccacttcggtgccttccgaaaccactagcgacaacctccagataaccacccagcctagcgacggtctggaggaaaagctcgattcagacgacccgtcagtgaaggaattggatgtgaaggaccttgagggggtggaggtgaaggatctcgatgatgaggatctcgaaaatctcaatctggacaccgaagatggcaaagtggtggagctggacactctggataatctagagacaaacgatccaaacctggacgatctgctgcgatctggagagtttgatattatcgcctacaccgatccagagttggacatgggggataagaagagtatgtttaacgaggaacttgacctgccaattgacgacaaactggataaccagtgtgtctcggttgagccaaagaaaaaggaacaggagaacaagacccttgtgttgtcagataagcacagtccgcagaaaaagtcgactgtgacaaacgaagtgaaaaccgaagtcctgagcccaaatagtaaagtggaaagtaaatgcgagacagagaaaaatgacgaaaacaaagacaatgtggacaccccatgctcccaggcctctgctcattcggacctgaatgacggagagaagacatccctccatccttgtgatcccgatttgtttgagaaacggaccaacagggagaccgcaggacctagcgccaatgtcatccaggcttcaacccagctccctgcacaagatgtgatcaactcatgtggcattacaggctccacacctgtcctgtcctctctgctggctaatgaaaagtccgacaatagcgatatccgaccttctgggagcccccccccacctaccctacccgcctccccgagcaatcacgtcagtagtttacccccctttatagcgcccccaggcagggtgctagacaacgctatgaactcaaacgtgacagtggtgagtagggtgaatcatgttttctcccagggagttcaggtcaatcctgggctgattcctggacagtcaaccgtgaatcatagcctcggcactgggaaaccagccacccagaccggcccccagacgtcccagtcgggcactagctccatgtctggtcctcaacagctcatgattccccagacacttgcccagcagaatcgcgagagaccattattgctggaggagcaacctctactgctacaggatctgcttgatcaggagcggcaggagcaacagcagcagcgtcagatgcaggctatgataagacaacggagcgaacccttcttcccaaacattgactttgacgcgatcaccgaccctatcatgaaagcaaagatggtggccttgaagggtatcaacaaagtcatggcacagaataatctcggtatgccacccatggtcatgtcacgttttccattcatgggccaggttgtgaccggcacacagaattctgaagggcagaatctcggcccgcaggctatcccccaagacggctcaatcactcaccagatcagccggcccaacccgcccaacttcggccctggcttcgtgaatgattctcaaaggaagcagtatgaggaatggttacaggagacccagcaactactccaaatgcagcaaaaatacttggaagagcagataggagcccacaggaaatctaaaaaggctcttagcgccaagcagaggacagctaaaaaggctggaagggaatttccggaagaagacgctgaacagctcaagcatgtgactgagcagcaatcaatggttcagaaacagctcgagcagataagaaagcaacagaaagagcacgcggaactcatagaggattatcgaataaagcagcagcagcaatgcgccatggccccgccaacaatgatgcccagtgtgcagccccagccccctctgattccaggagccaccccccccacgatgagccagcctacgtttcctatggttcctcaacagctgcagcatcaacagcacacaactgttatcagcggccacacctcgcccgtaagaatgccctccctgccgggttggcaacccaatagcgctcccgctcacttacctctgaatcccccacggatccagcctccaatcgcgcaactccccataaaaacatgcaccccagctccgggcacggttagcaacgctaatcctcagagcggtcccccgccccgggtggagtttgacgacaacaatcctttttccgaaagcttccaagaaagagagcggaaggaacgcctccgggaacagcaggaaaggcaaaggattcagctcatgcaagaagtagataggcagagagccctgcagcaacggatggagatggagcagcacggcatggtggggtcagagatatcctccagtcgaacatccgtctctcagatccctttctattccagcgacctgccatgtgactttatgcagcccctgggccccctgcagcagagcccccagcaccaacagcagatgggtcaagtgcttcagcagcaaaacattcagcaaggctctatcaactctccctcgacacagacattcatgcagaccaacgagcggcgccaggtgggtccaccctccttcgttccggactcgccatcgattcctgttggtagtccaaacttctcatccgtgaagcagggccatggcaacctatcaggtacctcatttcagcagagccctgttagaccctcatttacaccggcgcttcccgcagcaccgccagtcgccaattcttctctgccttgtgggcaagacagcacaatcacccacggacactcctacccaggatccacgcagagcttgatccaactttactccgacatcatcccggaggaaaaaggaaaaaagaaacggactcgaaaaaaaaagagggatgacgatgctgagtccacaaaggcaccgtctacccctcactcggatattacagccccaccaacccccggtatctcagagacaacgagcacgcctgctgtgtccacgccctctgaactgcctcagcaagcagaccaggagagcgtggagcctgtgggcccctcaacacccaatatggccgccgggcaattatgtacagaactcgaaaacaagctgcccaactctgatttctctcaggctacaccaaaccagcagacatacgcgaattccgaggtcgacaaactcagtatggagacccctgcaaagaccgaagagatcaagctcgagaaggccgagaccgaatcttgtcctggccaagaggaacctaaactcgaggagcagaacgggagcaaggtagagggcaacgctgtggcctgcccagtgagctcagctcagtcccctcctcactcggctggagccccagcggccaagggtgattccggcaacgagctgttgaagcatctgctgaaaaataaaaagtccagcagcctgttaaaccagaagccggaggggtccatttgctcagaggatgactgcactaaggacaataaactggtcgaaaaacagaacccggcagaaggtttgcagaccctgggggctcaaatgcaggggggcttcggatgcggcaatcagctccctaagacggatggaggcagcgagactaagaagcagcgatccaaacgcacacagagaaccggcgagaaggcggcaccacgtagcaagaagaggaaaaaggacgaggaggagaaacaagctatgtactcttccactgacaccttcactcacctgaagcagcagaacaacctatcaaaccctccaacgcctccagctagcttacctccaacccctccaccaatggcctgtcagaagatggccaacggcttcgctaccaccgaggagcttgcaggcaaggcaggcgtgctcgtcagtcacgaagttaccaaaacgcttggccctaaaccttttcagctgcccttccggcctcaagacgacttgctcgcccgcgctctcgcccagggtcccaagactgtagacgtgccagcctccctcccgacccctcctcacaacaaccaggaagaactgagaattcaggaccactgcggagatcgggataccccggacagctttgtcccatcttcctcccctgagtcagtcgttggagtggaagtgtcacggtatcctgatctgtcactggtaaaggaagaacctccagaacctgtacctagccctatcatccccattttacccagtacggcgggaaagtcctcagaaagtcgcagaaatgacataaaaactgaaccagggaccctgtatttcgccagtccttttggccccagcccaaacgggcctcgaagcggcttaatttcagtcgccataaccctccatcccactgctgccgaaaacatcagcagcgtggtagccgcttttagtgatctactgcatgtgaggatacccaactcatatgaagtgtccagtgcccccgatgtcccttctatggggctcgtctcatcccatcgtatcaaccccggtctggagtatcgccagcatttgctgttgaggggcccaccccccggatccgcaaaccctccacgcctagttagctcgtaccggcttaagcagcccaacgtccccttcccacccactagcaatggcctgtctgggtataaagattctagtcacgggatcgcggagagcgctgccctcagaccacaatggtgttgccactgcaaggtggttatccttggcagtggggtacggaagagtttcaaagacctgactctgctcaacaaggattcaagagagtccaccaagcgagttgagaaagatattgtcttctgtagcaacaattgtttcatactctactcctcaactgctcaggcgaaaaatagtgaaaataaagagagcatcccaagcctcccacagtcccccatgcgcgagactccaagcaaggctttccaccagtattcaaacaacattagtacactggatgtacattgtttacctcagctgcctgagaaggcgtccccaccagctagccctccgatagccttcccacccgccttcgaggccgcacaggtggaggccaagccagacgaactgaaggtcactgtgaagctgaagcctcgacttagagcggttcatggcgggtttgaggattgcaggccgttgaacaaaaagtggcgaggcatgaagtggaagaaatggtcaattcatattgttattcccaaaggcacatttaagccaccttgtgaagatgagatcgatgagttcctaaagaaactgggaacctcccttaagcctgatccagtcccaaaggactaccgcaaatgctgtttctgccatgaggagggagacgggctcaccgatgggccggcaagactccttaatctggatctggatctgtgggtgcaccttaactgcgccctgtggagtactgaagtgtacgaaacgcaggcgggtgcactgatcaacgtcgagctggccctaagaaggggactacaaatgaagtgtgtattttgccacaaaactggcgccaccagcggctgtcaccgcttccgttgtaccaacatttatcattttacttgcgccatcaaggcacaatgcatgttctttaaggacaaaaccatgctgtgccctatgcacaagcctaaggggatacatgaacaagaattgtcttactttgctgtgttccgccgggtgtacgtgcaacgcgatgaggtccgtcaaatcgcctctattgtccagcgcggagagcgagaccacacattcagagtcggatctctaatcttccacactatcgggcagctgctgccacaacagatgcaggcctttcacagccctaaggccctcttccccgtggggtatgaggctagcaggctgtactggagcacaaggtacgccaatcgccgttgccgctacctgtgcagcatagaagaaaaggacggcaggcccgtgttcgtgataaggatcgtcgaacaggggcatgaagatcttgtcctgtcagacatctccccgaaaggcgtgtgggataaaatcctagagcctgtggcctgcgttaggaagaaatccgaaatgctgcagctctttccagcctacttgaaaggagaggacttattcggcttaacagtttctgcagttgcgcgaatcgcagaaagcctgccgggggtggaagcctgcgagaactataccttccggtacgggagaaatcccctcatggagctccccctagccgtgaatcctaccggctgtgcccgatctgagcccaagatgtcagcccatgtgaaacgctttgtcctgcgtcctcataccctcaacagcacttccacctccaagagttttcagtctaccgtgaccggtgaactcaatgccccatactccaaacagtttgtacactctaaatctagccagtacaggaagatgaaaaccgaatggaagagcaacgtgtaccttgcaaggtcccgtatacaggggctgggcctgtatgcagcccgagatatcgaaaaacataccatggttattgaatacataggaactatcatccgtaacgaggtggccaacaggaaggaaaagctgtacgagagtcagaacaggggagtgtacatgtttagaatggataatgatcatgttatcgatgctaccctgacaggaggaccagcgcgatacatcaatcattcgtgtgcccctaattgcgtggctgaggtggtgacgttcgagcggggccataagatcattatctcctcctcacggcggattcagaagggcgaagagttgtgttatgattacaagttcgattttgaggacgatcaacataaaattccctgccattgcggtgccgtgaactgtcggaaatggatgaactag

SEQ ID NO: 246943 - DNA, 14736 bp, Artificial Sequence
  derived and/or modified sequence
atgagcagcgaggaggacaagtctgtggagcagccccagcccccacctcctcctcctgaggagcccggggccccagcccccagccctgctgctgctgacaagaggccccggggccggcccaggaaggatggagccagccccttccagagggccaggaagaagcccaggagccggggcaagacagctgtggaggatgaggacagcatggatggcctggagaccacagaaacagagaccatcgtggagacagagatcaaggagcagagcgctgaggaggatgctgaggccgaggtggacaacagcaagcagctgatccccaccctgcagaggtctgtgtctgaggagagcgccaacagcctggtgtctgtgggcgtggaggccaagatcagcgagcagctgtgtgccttctgctactgtggggagaagagcagcctgggccagggcgacctgaagcagttccgcatcaccccaggcttcatcctgccctggaggaaccagcccagcaacaagaaggacattgatgacaacagcaatggcacctatgagaagatgcagaacagcgcccccaggaagcagaggggccagaggaaggagaggagcccccagcagaacatcgtgtcctgtgtgtctgtgtccacccagacagccagtgatgaccaggccggcaagctgtgggatgagctgagcctggtgggcctgcctgatgccatcgacatccaggccctgtttgacagcacaggcacctgctgggcccaccaccgctgtgtggagtggagcctgggcgtgtgccagatggaggagcccctgctggtgaatgtggacaaggctgtggtgtctggcagcacagagcgctgtgccttctgcaagcacctgggcgccaccatcaagtgctgtgaggagaagtgcacccagatgtaccactacccctgtgccgccggggccggcaccttccaggacttcagccacatcttcctgctgtgcccagagcacatcgaccaggcccctgagaggagcaaggaggatgccaactgtgctgtgtgtgacagccctggggacctgctggaccagttcttctgcaccacctgtggccagcactaccacggcatgtgcctggacattgctgtgacccccctgaagagagctggctggcagtgcccagagtgcaaggtgtgccagaactgcaagcagagcggggaggacagcaagatgctggtgtgtgacacctgtgacaagggctaccacaccttctgcctgcagcctgtgatgaagtctgtgcccaccaacggctggaagtgcaagaactgccgcatctgcattgaatgtggcaccaggagcagcagccagtggcaccacaactgcctgatctgtgacaactgctaccagcagcaggacaacctgtgccccttctgtgggaagtgctaccaccctgagctgcagaaggacatgctgcactgcaacatgtgcaagcgctgggtgcacctggagtgtgacaagcccacagaccacgagctggacacccagctgaaggaggagtacatctgcatgtactgcaagcacctgggcgctgagatggaccggctgcagcctggagaggaggtggagattgctgagctgaccacagactacaacaatgagatggaggtggagggccctgaggaccagatggtgttcagcgagcaggccgccaacaaggatgtgaatggccaggagagcaccccaggcatcgtgcctgatgctgtgcaggtgcacacagaggagcagcagaagagccaccccagcgagagcctggacacagacagcctgctgattgctgtgagcagccagcacacagtgaacacagagctggagaagcagatcagcaatgaggtggacagcgaggacctgaagatgagcagcgaggtgaagcacatctgtggggaggaccagatcgaggacaagatggaggtgacagaaaatattgaggtggtgacccaccagatcaccgtgcagcaggagcagctgcagctgctggaggagcctgagaccgtggtgtcccgggaggagagccggccccccaagctggtgatggagagcgtgaccctgcccctggagaccctggtgagcccccatgaggagagcatcagcctgtgcccagaggagcagctggtgattgagcggctgcagggcgagaaggagcagaaggagaacagcgagctgagcacaggcctgatggattctgagatgacccccaccatcgagggctgtgtgaaggatgtgtcctaccagggcggcaagagcatcaagctgagcagcgagacagagagcagcttcagcagcagcgctgacatcagcaaggcagatgtgagcagcagccccacccccagcagtgacctgcccagccatgacatgctgcacaactaccccagcgccctgagcagcagcgctggcaacatcatgcccaccacctacatctctgtgacccccaagattggcatgggcaagccagccatcaccaagaggaagttcagccctggccggcccaggagcaagcagggcgcctggagcacccacaacacagtgtccccacccagctggagcccagacatcagcgagggccgggagatcttcaagccccggcagctgcccggcagcgccatctggagcatcaaggtgggccggggcagcggcttccctgggaagaggcggcccagaggagctggcctgagcggccggggcggccggggccgcagcaagctgaagagcggcatcggggctgtggtgctgcccggggtgtccacagctgacatcagcagcaacaaggatgatgaagaaaattccatgcacaacacagtggtgctcttcagcagcagtgacaagttcaccctgaaccaggacatgtgtgtggtgtgtggcagctttggccagggcgctgagggccgcctgctggcctgcagccagtgtggccagtgctaccacccctactgtgtgtccatcaagatcaccaaggtggtgctgagcaagggctggcgctgcctggagtgcaccgtgtgtgaggcctgtgggaaggccacagatcctggccgcctgctgctgtgtgatgactgtgacatctcctaccacacctactgcctggacccccccctgcagacagtgcccaagggcggctggaagtgcaagtggtgtgtgtggtgccgccactgtggggccaccagcgctggcctgcgctgtgagtggcagaacaactacacccagtgtgccccctgtgccagcctgagcagctgccctgtgtgctacagaaactaccgggaggaggacctgatcctgcagtgccggcagtgtgaccgctggatgcatgctgtgtgccagaacctgaacacagaggaggaggtggagaatgtggccgacattggatttgactgcagcatgtgccggccctacatgcctgccagcaatgtgcccagcagtgactgctgtgagagcagcctggtggcccagatcgtgaccaaggtgaaggagctggacccccccaagacctacacccaggatggagtgtgcctgacagagagcggcatgacccagctgcagagcctgactgtgacagtgcccaggaggaagaggagcaagcccaagctgaagctgaagatcatcaaccagaacagcgtggccgtgctgcagaccccaccagacatccagagcgagcacagcagagatggagagatggatgacagccgggagggggagctgatggactgtgatggcaagtctgagagcagccctgagcgggaggccgtggatgatgagaccaagggcgtggagggcacagatggagtgaagaagaggaagaggaagccctaccggcccggcatcggcggcttcatggtgcggcagaggagcaggacaggccagggcaagaccaagaggagcgtcatcaggaaggacagcagcggcagcatcagcgagcagctgccctgcagagatgatggctggagcgagcagctgcctgacaccctggtggatgagagcgtgtctgtgacagagagcacagagaagatcaagaagcgctacaggaagaggaagaacaagctggaggagaccttccctgcctacctgcaggaggccttcttcggcaaggacctgctggacaccagccggcagagcaagatcagcctggacaacctgtctgaagatggagcccagctgctgtacaagaccaacatgaacacaggcttcctggaccccagcctggaccccctgctgagcagcagcagcgcccccaccaagagcggcacccacggccctgcagatgaccccctggccgacatcagcgaggtgctgaacacagatgatgacatcctgggcatcatcagtgatgacctggccaagtctgtggaccacagcgacatcggccctgtgacagatgaccccagcagcctgccccagcccaacgtgaaccagagcagccggcccctgtctgaggagcagctggatggcatcctgagccctgagctggacaagatggtgacagatggagccatcctgggcaagctgtacaagatccctgagctgggcggcaaggatgtggaggacctcttcaccgctgtgctgagccctgccaacacccagcccacccccctgccccagcccccaccacccacccagctgctgcccatccacaaccaggatgccttcagcaggatgcccctgatgaatggcctcatcggcagcagcccccacctgccccacaacagcctgcccccaggcagcggcctgggcaccttcagcgccatcgcccagagcagctacccagatgcccgggacaagaacagcgccttcaaccccatggccagtgaccccaacaacagctggaccagcagcgcccccaccgtggagggagaaaatgacaccatgagcaatgcccagaggagcaccctgaagtgggagaaggaggaggccctgggggagatggccaccgtggcccctgtgctgtacaccaacatcaacttccccaacctgaaggaggagttcccagactggaccaccagggtgaagcagatcgccaagctgtggaggaaggccagcagccaggagcgggccccctacgtgcagaaggcccgggacaacagagctgccctgcgcatcaacaaggtgcagatgagcaatgacagcatgaagaggcagcagcagcaggacagcattgaccccagcagcagaattgattctgagctgttcaaggaccccctgaagcagcgggagagcgagcacgagcaggagtggaagttccggcagcagatgaggcagaagagcaagcagcaggccaagattgaggccacccagaagctggagcaggtgaagaatgagcagcagcagcagcagcagcagcagtttggcagccagcacctgctggtgcagagcggcagtgacacccccagcagcggcatccagagccccctgaccccccagcctggaaatggaaacatgagccctgcccagagcttccacaaggagctgttcaccaagcagccccccagcacccccaccagcaccagcagtgatgatgtgtttgtgaagccccaggcccctcctcctcctccagcccccagccgcatccccatccaggacagcctgagccaggcccagaccagccagccccccagcccccaggtgttcagccctggcagcagcaacagcaggcctcccagccccatggacccctatgccaagatggtgggcacccccaggcctcctcctgtgggccacagcttcagcagaagaaattctgctgcccctgtggagaactgcacccccctgagctctgtgtcccggcccctgcagatgaatgagaccacagccaaccggcccagccctgtgcgggacctgtgcagcagcagcaccaccaacaatgacccctatgccaagcccccagacacccccaggcctgtgatgacagaccagttccccaagagcctgggcctgagccgcagccctgtggtgtctgagcagacagccaagggccccatcgctgctggcaccagtgaccacttcaccaagcccagccccagggcagatgtgttccagaggcagaggatcccagacagctatgcccggcccctgctgaccccagcccccctggacagcggccctggccccttcaagacccccatgcagcccccacccagcagccaggacccctacggctctgtgtcccaggccagccggcggctgtctgtggacccctatgaaagacctgccctgaccccccggcccatcgacaacttcagccacaaccagagcaatgacccctacagccagccccccctgaccccccaccctgctgtgaatgaaagctttgcccaccccagccgggccttcagccagcccggcaccatcagccggcccaccagccaggacccctacagccagcccccaggcacccccaggcctgtggtggacagctacagccagagcagcggcacagcccggagcaacacagacccctacagccagcccccaggcaccccccggcccaccaccgtggacccctacagccagcagccccagaccccccggcccagcacccagacagacctgtttgtgacccctgtgaccaaccagaggcacagcgacccctatgcccaccccccaggcaccccccggcccggcatctctgtgccctacagccagcccccagccaccccccggccccgcatcagcgagggcttcaccaggagctccatgaccaggcctgtgctgatgcccaaccaggaccccttcctgcaggccgcccagaacagaggccctgccctgcccggccccctggtgcggcccccagacacctgcagccagaccccccggcccccaggccctggcctgagtgacaccttcagccgggtgagccccagcgctgcccgggacccctatgaccagagccccatgacccccaggagccagagcgacagctttggcaccagccagacagcccatgatgtggccgaccagccccggcccggcagcgagggcagcttctgtgccagcagcaacagccccatgcacagccagggccagcagttcagcggcgtgtcccagctgcccggccctgtgcccaccagcggcgtgacagacacccagaacacagtgaacatggcccaggccgacacagagaagctgcggcagaggcagaagctgcgggagatcatcctgcagcagcagcagcagaagaagattgctggccggcaggagaagggcagccaggacagccctgctgtgccccaccctggccccctgcagcactggcagccagaaaatgtgaaccaggccttcaccaggcctcctccaccctacccaggcaacatccgcagccctgtggccccacccctgggccccaggtatgctgtgttccccaaggaccagaggggcccctaccccccagatgtggcctccatgggcatgaggccccacggcttccgcttcggcttccctgggggcagccacggcaccatgcccagccaggagcgcttcctggtgcccccccagcagatccagggcagcggcgtgagcccccagctgcggcgctctgtgtctgtggacatgccccggcccctgaacaacagccagatgaacaaccctgtgggcctgccccagcacttcagcccccagagcctgcctgtgcagcagcacaacatcctgggccaggcctacatcgagctgcggcaccgggccccagatggccggcagaggctgcccttcagcgcccctcctggctctgtggtggaggccagcagcaacctgcggcacggcaacttcatccccaggccagacttccctggccccaggcacacagaccccatgagaagaccaccccagggcctgcccaaccagctgcctgtgcacccagacctggagcaggtgccccccagccagcaggagcagggccacagcgtgcacagcagctccatggtgatgaggaccctgaaccaccccctgggcggggagttcagcgaggcccccctgagcacctctgtgcccagcgagaccaccagtgacaacctgcagatcaccacccagcccagtgatggcctggaggagaagctggacagtgatgaccccagcgtgaaggagctggatgtgaaggacctggagggcgtggaggtgaaggacctggatgatgaggacctggagaacctgaacctggacacagaagatggcaaggtggtggagctggacaccctggacaacctggagaccaatgaccccaacctggatgacctgctgcggtctggagaatttgacatcatcgcctacacagatcctgagctggacatgggagacaagaagtccatgtttaatgaggagctggacctgcccattgatgacaagctggacaaccagtgtgtgtctgtggagcccaagaagaaggagcaggagaacaagaccctggtgctgagtgacaagcacagcccccagaagaagagcacagtgaccaatgaggtgaagacagaggtgctgagccccaacagcaaggtggagagcaaatgtgaaacagagaagaatgatgagaacaaggacaacgtggacaccccctgcagccaggccagcgcccacagcgacctgaatgatggagagaagaccagcctgcacccctgtgaccctgacctgtttgagaagaggaccaaccgggagacagctggccccagcgccaacgtcatccaggccagcacccagctgcctgcccaggacgtcatcaacagctgtggcatcaccggcagcacccctgtgctgagcagcctgctggccaatgagaagagtgacaacagcgacatccggcccagcggcagccccccaccacccaccctgcctgccagccccagcaaccacgtgagcagcctgccccccttcatcgcccctcctggccgggtgctggacaatgccatgaacagcaatgtgacagtggtgtcccgggtgaaccacgtgttcagccagggcgtgcaggtgaaccctggcctcatccctggccagagcacagtgaaccacagcctgggcaccgggaagccagccacccagacaggcccccagaccagccagagcggcaccagctccatgagcggcccccagcagctgatgatcccccagaccctggcccagcagaaccgggagcggcccctgctgctggaggagcagcccctgctgctgcaggacctgctggaccaggagcggcaggagcagcagcagcagaggcagatgcaggccatgatccggcagaggtctgagcccttcttccccaacatcgactttgatgccatcacagaccccatcatgaaggccaagatggtggccctgaagggcatcaacaaggtgatggcccagaacaacctgggcatgccacccatggtgatgagccgcttccccttcatgggccaggtggtgacaggcacccagaacagcgagggccagaacctgggcccccaggccatcccccaggacggcagcatcacccaccagatcagccggcccaacccccccaactttggacctggctttgtgaatgacagccagaggaagcagtatgaggagtggctgcaggagacccagcagctgctgcagatgcagcagaagtacctggaggagcagatcggggcccacaggaagagcaagaaggccctgagcgccaagcagaggacagccaagaaggccggccgggagttcccagaagaagatgctgagcagctgaagcacgtgacagagcagcagagcatggtgcagaagcagctggagcagatcaggaagcagcagaaggagcacgccgagctgattgaggactaccgcatcaagcagcagcagcagtgtgccatggccccacccaccatgatgcccagcgtgcagccccagcccccactcatccctggggccaccccacccaccatgagccagcccaccttccccatggtgccccagcagctgcagcaccagcagcacaccaccgtcatcagcggccacaccagccctgtgaggatgcccagcctgcccggctggcagcccaacagcgccccagcccacctgcccctgaaccccccacgcatccagccccccatcgcccagctgcccatcaagacctgcaccccagcccctggcaccgtgtccaatgccaacccccagagcggccccccaccccgggtggagtttgatgacaacaaccccttcagcgagagcttccaggagcgggagaggaaggagcggctgcgggagcagcaggagcggcagaggatccagctgatgcaggaggtggaccggcagagggccctgcagcagaggatggagatggagcagcacggcatggtgggcagcgagatcagcagcagcaggacctctgtgtcccagatccccttctacagcagtgacctgccctgtgacttcatgcagcccctgggccccctgcagcagagcccccagcaccagcagcagatgggccaggtgctgcagcagcagaacatccagcagggcagcatcaacagccccagcacccagaccttcatgcagaccaatgaaagacggcaggtgggcccccccagctttgtgcctgacagccccagcatccctgtgggcagccccaacttcagctctgtgaagcagggccacggcaacctgagcggcaccagcttccagcagagccctgtgcggcccagcttcaccccagccctgcctgctgcccctcctgtggccaacagcagcctgccctgtggccaggacagcaccatcacccacggccacagctacccaggcagcacccagagcctcatccagctgtacagcgacatcatccctgaggagaagggcaagaagaagaggaccaggaagaagaagagagatgatgatgctgagagcaccaaggcccccagcaccccccacagcgacatcacagccccacccaccccaggcatcagcgagaccaccagcaccccagctgtgtccacccccagcgagctgccccagcaggccgaccaggagagcgtggagcctgtgggccccagcacccccaacatggctgctggccagctgtgcacagagctggagaacaagctgcccaacagcgacttcagccaggccacccccaaccagcagacctacgccaacagcgaggtggacaagctgtccatggagaccccagccaagacagaggagatcaagctggagaaggccgagacagagagctgccccggccaggaggagcccaagctggaggagcagaatggcagcaaggtggagggcaatgctgtggcctgccctgtgtcctctgcccagagccccccccacagcgctggggccccagctgccaagggggacagcggaaatgagctgctgaagcacctgctgaagaacaagaagagcagcagcctgctgaaccagaagccagagggcagcatctgcagtgaagatgactgcaccaaggacaacaagctggtggagaagcagaacccagctgagggcctgcagaccctgggcgcccagatgcagggcggcttcggctgcggcaaccagctgcccaagacagatggcggcagcgagaccaagaagcagaggagcaagaggacccagaggactggagagaaggccgcccccaggagcaagaagaggaagaaggatgaggaggagaagcaggccatgtacagcagcacagacaccttcacccacctgaagcagcagaacaacctgagcaacccccccaccccaccagccagcctgccccccaccccaccacccatggcctgccagaagatggccaacggctttgccaccacagaggagctggccggcaaggccggcgtgctggtgtcccatgaggtgaccaagaccctgggccccaagcccttccagctgcccttccggccccaggatgacctgctggcccgggccctggcccagggccccaagacagtggatgtgcctgccagcctgcccaccccaccccacaacaaccaggaggagctgcgcatccaggaccactgtggggaccgggacaccccagacagctttgtgcccagcagcagccctgagagcgtggtgggcgtggaggtgagccgctacccagacctgagcctggtgaaggaggagcccccagagcctgtgcccagccccatcatccccatcctgcccagcacagctgggaagagcagcgagagcagaagaaatgacatcaagacagagcccggcaccctgtactttgccagccccttcggccccagccccaacggccccaggagcggcctcatctctgtggccatcaccctgcaccccacagctgctgagaacatcagctctgtggtggccgccttcagtgacctgctgcacgtgcgcatccccaacagctatgaggtgtcctctgccccagatgtgcccagcatgggcctggtgagcagccaccgcatcaaccctggcctggagtaccggcagcacctgctgctgcggggccccccacctggcagcgccaaccccccccggctggtgagcagctaccgcctgaagcagcccaacgtgcccttcccccccaccagcaatggcctgagcggctacaaggacagcagccatggaattgctgagagcgctgccctgcggccccagtggtgctgccactgcaaggtggtgatcctgggcagcggcgtgaggaagagcttcaaggacctgaccctgctgaacaaggacagccgggagagcaccaagagggtggagaaggacatcgtgttctgcagcaacaactgcttcatcctgtacagcagcacagcccaggccaagaacagcgagaacaaggagagcatccccagcctgccccagagccccatgagggagacccccagcaaggccttccaccagtacagcaacaacatcagcaccctggatgtgcactgcctgccccagctgcctgagaaggccagccccccagccagcccccccatcgccttccccccagcctttgaagctgcccaggtggaggccaagccagatgagctgaaggtgacagtgaagctgaagccccggctgcgggctgtgcatggaggctttgaggactgccggcccctgaacaagaagtggaggggcatgaagtggaagaagtggagcatccacatcgtcatccccaagggcaccttcaagccaccctgtgaagatgaaattgatgagttcctgaagaagctgggcaccagcctgaagccagaccctgtgcccaaggactacaggaagtgctgcttctgccacgaggagggagatggcctgacagatggccctgcccggctgctgaacctggacctggacctgtgggtgcacctgaactgtgccctgtggagcacagaggtgtatgagacccaggccggggccctgatcaacgtggagctggccctgcggcggggcctgcagatgaagtgtgtgttctgccacaagacaggagccaccagcggctgccaccgcttccgctgcaccaacatctaccacttcacctgtgccatcaaggcccagtgcatgttcttcaaggacaagaccatgctgtgccccatgcacaagcccaagggcatccacgagcaggagctgagctactttgctgtgttcagaagagtgtatgtgcagagagatgaggtgcggcagatcgccagcatcgtgcagagaggagagcgggaccacaccttccgggtgggcagcctcatcttccacaccatcggccagctgctgccccagcagatgcaggccttccacagccccaaggccctcttccctgtgggctatgaggccagccggctgtactggagcaccaggtatgccaacagacgctgccgctacctgtgcagcattgaggagaaggatggccggcctgtgtttgtgatcagaattgtggagcagggccacgaggacctggtgctgagtgacatcagccccaagggcgtgtgggacaagatcctggagcctgtggcctgtgtgaggaagaagtctgagatgctgcagctgtttcctgcctacctgaagggggaggacctgtttggcctgactgtgtctgctgtggccagaattgctgagagcctgcccggggtggaggcctgtgagaactacaccttccgctatggaagaaaccccctgatggagctgcccctggccgtgaaccccaccggctgtgcccggtctgagcccaagatgtctgcccacgtgaagagatttgtgctgcggccccacaccctgaacagcaccagcaccagcaagagcttccagagcacagtgactggagagctgaatgccccctacagcaagcagtttgtgcacagcaagagcagccagtacaggaagatgaagacagagtggaagagcaatgtgtacctggcccggagccgcatccagggcctgggcctgtatgctgcccgggacatcgagaagcacaccatggtgattgagtacatcggcaccatcatcagaaatgaggtggccaacaggaaggagaagctgtatgagagccagaacagaggagtgtacatgttcaggatggacaatgaccacgtgattgatgccaccctgaccggcggccctgcccgctacatcaaccacagctgtgcccccaactgtgtggccgaggtggtgacctttgagcggggccacaagatcatcatcagcagcagccgccgcatccagaagggggaggagctgtgctatgactacaagtttgattttgaagatgaccagcacaagatcccctgccactgtggggctgtgaactgcaggaagtggatgaactag

SEQ ID NO: 246944 - DNA, 16862 bp, Artificial Sequence
  derived and/or modified sequence
gaggtgcgcgcgcccgcgccgatgtgtgtgagtgcgtgtcctgctcgctccatgttgccgcctctcccggtacctgctgctgctcccggggctgcgggaaatgcgagaggctgagccggggaggaggaacccgagcagcagcggcggcggcggcggccgcggcggcgggagccccccaggaggaggaccgggatccatgtgtctttcctggtgactaggatgtcgtcggaggaggacaagagcgtggagcagccgcagccgccgccaccaccccccgaggagcctggagccccggccccgagccccgcagccgcagacaaaagacctcggggccggcctcgcaaagatggcgcttcccctttccagagagccagaaagaaacctcgaagtagggggaaaactgcagtggaagatgaggacagcatggatgggctggagacaacagaaacagaaacgattgtggaaacagaaatcaaagaacaatctgcagaagaggatgctgaagcagaagtggataacagcaaacagctaattccaactcttcagcgatctgtgtctgaggaatcggcaaactccctggtctctgttggtgtagaagccaaaatcagtgaacagctctgcgctttttgttactgtggggaaaaaagttccttaggacaaggagacttaaaacaattcagaataacgcctggatttatcttgccatggagaaaccaaccttctaacaagaaggacattgatgacaacagcaatggaacctatgagaaaatgcaaaactcagcaccacgaaaacaaagaggacagagaaaagaacgatctcctcagcagaatatagtatcttgtgtaagtgtaagcacccagacagcttcagatgatcaagctggtaaactgtgggatgaactcagtctggttgggcttccagatgccattgatatccaagccttatttgattctacaggcacttgttgggctcatcaccgttgtgtggagtggtcactaggagtatgccagatggaagaaccattgttagtgaacgtggacaaagctgttgtctcagggagcacagaacgatgtgcattttgtaagcaccttggagccactatcaaatgctgtgaagagaaatgtacccagatgtatcattatccttgtgctgcaggagccggcacctttcaggatttcagtcacatcttcctgctttgtccagaacacattgaccaagctcctgaaagatcgaaggaagatgcaaactgtgcagtgtgcgacagcccgggagacctcttagatcagttcttttgtactacttgtggtcagcactatcatggaatgtgcctggatatagcggttactccattaaaacgtgcaggttggcaatgtcctgagtgcaaagtgtgccagaactgcaaacaatcgggagaagatagcaagatgctagtgtgtgatacgtgtgacaaagggtatcatactttttgtcttcaaccagttatgaaatcagtaccaaccaatggctggaaatgcaaaaattgcagaatatgtatagagtgtggcacacggtctagttctcagtggcaccacaattgcctgatatgtgacaattgttaccaacagcaggataacttatgtcccttctgtgggaagtgttatcatccagaattgcagaaagacatgcttcattgtaatatgtgcaaaaggtgggttcacctagagtgtgacaaaccaacagatcatgaactggatactcagctcaaagaagagtatatctgcatgtattgtaaacacctgggagctgagatggatcgtttacagccaggtgaggaagtggagatagctgagctcactacagattataacaatgaaatggaagttgaaggccctgaagatcaaatggtattctcagagcaggcagctaataaagatgtcaacggtcaggagtccactcctggaattgttccagatgcggttcaagtccacactgaagagcaacagaagagtcatccctcagaaagtcttgacacagatagtcttcttattgctgtatcatcccaacatacagtgaatactgaattggaaaaacagatttctaatgaagttgatagtgaagacctgaaaatgtcttctgaagtgaagcatatttgtggcgaagatcaaattgaagataaaatggaagtgacagaaaacattgaagtcgttacacaccagatcactgtgcagcaagaacaactgcagttgttagaggaacctgaaacagtggtatccagagaagaatcaaggcctccaaaattagtcatggaatctgtcactcttccactagaaaccttagtgtccccacatgaggaaagtatttcattatgtcctgaggaacagttggttatagaaaggctacaaggagaaaaggaacagaaagaaaattctgaactttctactggattgatggactctgaaatgactcctacaattgagggttgtgtgaaagatgtttcataccaaggaggcaaatctataaagttatcatctgagacagagtcatcattttcatcatcagcagacataagcaaggcagatgtgtcttcctccccaacaccttcttcagacttgccttcgcatgacatgctgcataattacccttcagctcttagttcctctgctggaaacatcatgccaacaacttacatctcagtcactccaaaaattggcatgggtaaaccagctattactaagagaaaattttctcctggtagacctcggtccaaacagggggcttggagtacccataatacagtgagcccaccttcctggtccccagacatttcagaaggtcgggaaatttttaaacccaggcagcttcctggcagtgccatttggagcatcaaagtgggccgtgggtctggatttccaggaaagcggagacctcgaggtgcaggactgtcggggcgaggtggccgaggcaggtcaaagctgaaaagtggaatcggagctgttgtattacctggggtgtctactgcagatatttcatcaaataaggatgatgaagaaaactctatgcacaatacagttgtgttgttttctagcagtgacaagttcactttgaatcaggatatgtgtgtagtttgtggcagttttggccaaggagcagaaggaagattacttgcctgttctcagtgtggtcagtgttaccatccatactgtgtcagtattaagatcactaaagtggttcttagcaaaggttggaggtgtcttgagtgcactgtgtgtgaggcctgtgggaaggcaactgacccaggaagactcctgctgtgtgatgactgtgacataagttatcacacctactgcctagaccctccattgcagacagttcccaaaggaggctggaagtgcaaatggtgtgtttggtgcagacactgtggagcaacatctgcaggtctaagatgtgaatggcagaacaattacacacagtgcgctccttgtgcaagcttatcttcctgtccagtctgctatcgaaactatagagaagaagatcttattctgcaatgtagacaatgtgatagatggatgcatgcagtttgtcagaacttaaatactgaggaagaagtggaaaatgtagcagacattggttttgattgtagcatgtgcagaccctatatgcctgcgtctaatgtgccttcctcagactgctgtgaatcttcacttgtagcacaaattgtcacaaaagtaaaagagctagacccacccaagacttatacccaggatggtgtgtgtttgactgaatcagggatgactcagttacagagcctcacagttacagttccaagaagaaaacggtcaaaaccaaaattgaaattgaagattataaatcagaatagcgtggccgtccttcagacccctccagacatccaatcagagcattcaagggatggtgaaatggatgatagtcgagaaggagaacttatggattgtgatggaaaatcagaatctagtcctgagcgggaagctgtggatgatgaaactaagggagtggaaggaacagatggtgtcaaaaagagaaaaaggaaaccatacagaccaggtattggtggatttatggtgcggcaaagaagtcgaactgggcaagggaaaaccaaaagatctgtgatcagaaaagattcctcaggctctatttccgagcagttaccttgcagagatgatggctggagtgagcagttaccagatactttagttgatgaatctgtttctgttactgaaagcactgaaaaaataaagaagagataccgaaaaaggaaaaataagcttgaagaaactttccctgcctatttacaagaagctttctttggaaaagatcttctagatacaagtagacaaagcaagataagtttagataatctgtcagaagatggagctcagcttttatataaaacaaacatgaacacaggtttcttggatccttccttagatccactacttagttcatcctcggctccaacaaaatctggaactcacggtcctgctgatgacccattagctgatatttctgaagttttaaacacagatgatgacattcttggaataatttcagatgatctagcaaaatcagttgatcattcagatattggtcctgtcactgatgatccttcctctttgcctcagccaaatgtcaatcagagttcacgaccattaagtgaagaacagctagatgggatcctcagtcctgaactagacaaaatggtcacagatggagcaattcttggaaaattatataaaattccagagcttggcggaaaagatgttgaagacttatttacagctgtacttagtcctgcgaacactcagccaactccattgccacagcctcccccaccaacacagctgttgccaatacacaatcaggatgctttttcacggatgcctctcatgaatggccttattggatccagtcctcatctcccacataattctttgccacctggaagcggactgggaactttctctgcaattgcacaatcctcttatcctgatgccagggataaaaattcagcctttaatccaatggcaagtgatcctaacaactcttggacatcatcagctcccactgtggaaggagaaaatgacacaatgtcgaatgcccagagaagcacgcttaagtgggagaaagaggaggctctgggtgaaatggcaactgttgccccagttctctacaccaatattaatttccccaacttaaaggaagaattccctgattggactactagagtgaagcaaattgccaaattgtggagaaaagcaagctcacaagaaagagcaccatatgtgcaaaaagccagagataacagagctgctttacgcattaataaagtacagatgtcaaatgattccatgaaaaggcagcaacagcaagatagcattgatcccagctctcgtattgattcggagctttttaaagatcctttaaagcaaagagaatcagaacatgaacaggaatggaaatttagacagcaaatgcgtcagaaaagtaagcagcaagctaaaattgaagccacacagaaacttgaacaggtgaaaaatgagcagcagcagcagcaacaacagcaatttggttctcagcatcttctggtgcagtctggttcagatacaccaagtagtgggatacagagtcccttgacacctcagcctggcaatggaaatatgtctcctgcacagtcattccataaagaactgtttacaaaacagccacccagtacccctacgtctacatcttcagatgatgtgtttgtaaagccacaagctccacctcctcctccagccccatcccggattcccatccaggatagtctttctcaggctcagacttctcagccaccctcaccgcaagtgttttcacctgggtcctctaactcacgaccaccatctccaatggatccatatgcaaaaatggttggtacccctcgaccacctcctgtgggccatagtttttccagaagaaattctgctgcaccagtggaaaactgtacacctttatcatcggtatctaggccccttcaaatgaatgagacaacagcaaataggccatcccctgtcagagatttatgttcttcttccacgacaaataatgacccctatgcaaaacctccagacacacctaggcctgtgatgacagatcaatttcccaaatccttgggcctatcccggtctcctgtagtttcagaacaaactgcaaaaggccctatagcagctggaaccagtgatcactttactaaaccatctcctagggcagatgtgtttcaaagacaaaggatacctgactcatatgcacgacccttgttgacacctgcacctcttgatagtggtcctggaccttttaagactccaatgcaacctcctccatcctctcaggatccttatggatcagtgtcacaggcatcaaggcgattgtctgttgacccttatgaaaggcctgctttgacaccaagacctatagataatttttctcataatcagtcaaatgatccatatagtcagcctccccttaccccacatccagcagtgaatgaatcttttgcccatccttcaagggctttttcccagcctggaaccatatcaaggccaacatctcaggacccatactcccaacccccaggaactccacgacctgttgtagattcttattcccaatcttcaggaacagctaggtccaatacagacccttactctcaacctcctggaactccccggcctactactgttgacccatatagtcagcagccccaaaccccaagaccatctacacaaactgacttgtttgttacacctgtaacaaatcagaggcattctgatccatatgctcatcctcctggaacaccaagacctggaatttctgtcccttactctcagccaccagcaacaccaaggccaaggatttcagagggttttactaggtcctcaatgacaagaccagtcctcatgccaaatcaggatcctttcctgcaagcagcacaaaaccgaggaccagctttacctggcccgttggtaaggccacctgatacatgttcccagacacctaggccccctggacctggtctttcagacacatttagccgtgtttccccatctgctgcccgtgatccctatgatcagtctccaatgactccaagatctcagtctgactcttttggaacaagtcaaactgcccatgatgttgctgatcagccaaggcctggatcagaggggagcttctgtgcatcttcaaactctccaatgcactcccaaggccagcagttctctggtgtctcccaacttcctggacctgtgccaacttcaggagtaactgatacacagaatactgtaaatatggcccaagcagatacagagaaattgagacagcggcagaagttacgtgaaatcattctccagcagcaacagcagaagaagattgcaggtcgacaggagaaggggtcacaggactcacccgcagtgcctcatccagggcctcttcaacactggcaaccagagaatgttaaccaggctttcaccagacccccacctccctatcctgggaacattaggtctcctgttgcccctcctttaggacctagatatgctgttttcccaaaagatcagcgtggaccctatcctcctgatgttgctagtatggggatgagacctcatggatttagatttggatttccaggaggtagtcatggtaccatgccgagtcaagagcgcttccttgtgcctcctcagcaaatacagggatctggagtttctccacagctaagaagatcagtatctgtagatatgcctaggcctttaaataactcacaaatgaataatccagttggacttcctcagcatttttcaccacagagcttgccagttcagcagcacaacatactgggccaagcatatattgaactgagacatagggctcctgacggaaggcaacggctgcctttcagtgctccacctggcagcgttgtagaggcatcttctaatctgagacatggaaacttcattccccggccagactttccgggccctagacacacagaccccatgcgacgacctccccagggtctacctaatcagctacctgtgcacccagatttggaacaagtgccaccatctcaacaagagcaaggtcattctgtccattcatcttctatggtcatgaggactctgaaccatccactaggtggtgaattttcagaagctcctttgtcaacatctgtaccgtctgaaacaacgtctgataatttacagataaccacccagccttctgatggtctagaggaaaaacttgattctgatgacccttctgtgaaggaactggatgttaaagaccttgagggggttgaagtcaaagacttagatgatgaagatcttgaaaacttaaatttagatacagaggatggcaaggtagttgaattggatactttagataatttggaaactaatgatcccaacctggatgacctcttaaggtcaggagagtttgatatcattgcatatacagatccagaacttgacatgggagataagaaaagcatgtttaatgaggaactagaccttccaattgatgataagttagataatcagtgtgtatctgttgaaccaaaaaaaaaggaacaagaaaacaaaactctggttctctctgataaacattcaccacagaaaaaatccactgttaccaatgaggtaaaaacggaagtactgtctccaaattctaaggtggaatccaaatgtgaaactgaaaaaaatgatgagaataaagataatgttgacactccttgctcacaggcttctgctcactcagacctaaatgatggagaaaagacttctttgcatccttgtgatccagatctatttgagaaaagaaccaatcgagaaactgctggccccagtgcaaatgtcattcaggcatccactcaactacctgctcaagatgtaataaactcttgtggcataactggatcaactccagttctctcaagtttacttgctaatgagaaatctgataattcagacattaggccatcggggtctccaccaccaccaactctgccggcctccccatccaatcatgtgtcaagtttgcctcctttcatagcaccgcctggccgtgttttggataatgccatgaattctaatgtgacagtagtctctagggtaaaccatgttttttctcagggtgtgcaggtaaacccagggctcattccaggtcaatcaacagttaaccacagtctggggacaggaaaacctgcaactcaaactgggcctcaaacaagtcagtctggtaccagtagcatgtctggaccccaacagctaatgattcctcaaacattagcacagcagaatagagagaggccccttcttctagaagaacagcctctacttctacaggatcttttggatcaagaaaggcaagaacagcagcagcaaagacagatgcaagccatgattcgtcagcgatcagaaccgttcttccctaatattgattttgatgcaattacagatcctataatgaaagccaaaatggtggcccttaaaggtataaataaagtgatggcacaaaacaatctgggcatgccaccaatggtgatgagcaggttcccttttatgggccaggtggtaactggaacacagaacagtgaaggacagaaccttggaccacaggccattcctcaggatggcagtataacacatcagatttctaggcctaatcctccaaattttggtccaggctttgtcaatgattcacagcgtaagcagtatgaagagtggctccaggagacccaacagctgcttcaaatgcagcagaagtatcttgaagaacaaattggtgctcacagaaaatctaagaaggccctttcagctaaacaacgtactgccaagaaagctgggcgtgaatttccagaggaagatgcagaacaactcaagcatgttactgaacagcaaagcatggttcagaaacagctagaacagattcgtaaacaacagaaagaacatgctgaattgattgaagattatcggatcaaacagcagcagcaatgtgcaatggccccacctaccatgatgcccagtgtccagccccagccacccctaattccaggtgccactccacccaccatgagccaacccacctttcccatggtgccacagcagcttcagcaccagcagcacacaacagttatttctggccatactagccctgttagaatgcccagtttacctggatggcaacccaacagtgctcctgcccacctgcccctcaatcctcctagaattcagcccccaattgcccagttaccaataaaaacttgtacaccagccccagggacagtctcaaatgcaaatccacagagtggaccaccacctcgggtagaatttgatgacaacaatccctttagtgaaagttttcaagaacgggaacgtaaggaacgtttacgagaacagcaagagagacaacggatccaactcatgcaggaggtagatagacaaagagctttgcagcagaggatggaaatggagcagcatggtatggtgggctctgagataagtagtagtaggacatctgtgtcccagattcccttctacagttccgacttaccttgtgattttatgcaacctctaggaccccttcagcagtctccacaacaccaacagcaaatggggcaggttttacagcagcagaatatacaacaaggatcaattaattcaccctccacccaaactttcatgcagactaatgagcgaaggcaggtaggccctccttcatttgttcctgattcaccatcaatccctgttggaagcccaaatttttcttctgtgaagcagggacatggaaatctttctgggaccagcttccagcagtccccagtgaggccttcttttacacctgctttaccagcagcacctccagtagctaatagcagtctcccatgtggccaagattctactataacccatggacacagttatccgggatcaacccaatcgctcattcagttgtattctgatataatcccagaggaaaaagggaaaaagaaaagaacaagaaagaagaaaagagatgatgatgcagaatccaccaaggctccatcaactccccattcagatataactgccccaccgactccaggcatctcagaaactacctctactcctgcagtgagcacacccagtgagcttcctcaacaagccgaccaagagtcggtggaaccagtcggcccatccactcccaatatggcagcaggccagctatgtacagaattagagaacaaactgcccaatagtgatttctcacaagcaactccaaatcaacagacgtatgcaaattcagaagtagacaagctctccatggaaacccctgccaaaacagaagagataaaactggaaaaggctgagacagagtcctgcccaggccaagaggagcctaaattggaggaacagaatggtagtaaggtagaaggaaacgctgtagcctgtcctgtctcctcagcacagagtcctccccattctgctggggcccctgctgccaaaggagactcagggaatgaacttctgaaacacttgttgaaaaataaaaagtcatcttctcttttgaatcaaaaacctgagggcagtatttgttcagaagatgactgtacaaaggataataaactagttgagaagcagaacccagctgaaggactgcaaactttgggggctcaaatgcaaggtggttttggatgtggcaaccagttgccaaaaacagatggaggaagtgaaaccaagaaacagcgaagcaaacggactcagaggacgggtgagaaagcagcacctcgctcaaagaaaaggaaaaaggacgaagaggagaaacaagctatgtactctagcactgacacgtttacccacttgaaacagcagaataatttaagtaatcctccaacaccccctgcctctcttcctcctacaccacctcctatggcttgtcagaagatggccaatggttttgcaacaactgaagaacttgctggaaaagccggagtgttagtgagccatgaagttaccaaaactctaggacctaaaccatttcagctgcccttcagaccccaggacgacttgttggcccgagctcttgctcagggccccaagacagttgatgtgccagcctccctcccaacaccacctcataacaatcaggaagaattaaggatacaggatcactgtggtgatcgagatactcctgacagttttgttccctcatcctctcctgagagtgtggttggggtagaagtgagcaggtatccagatctgtcattggtcaaggaggagcctccagaaccggtgccgtcccccatcattccaattcttcctagcactgctgggaaaagttcagaatcaagaaggaatgacatcaaaactgagccaggcactttatattttgcgtcaccttttggtccttccccaaatggtcccagatcaggtcttatatctgtagcaattactctgcatcctacagctgctgagaacattagcagtgttgtggctgcattttccgaccttcttcacgtccgaatccctaacagctatgaggttagcagtgctccagatgtcccatccatgggtttggtcagtagccacagaatcaacccgggtttggagtatcgacagcatttacttctccgtgggcctccgccaggatctgcaaaccctcccagattagtgagctcttaccggctgaagcagcctaatgtaccatttcctccaacaagcaatggtctttctggatataaggattctagtcatggtattgcagaaagcgcagcactcagaccacagtggtgttgtcattgtaaagtggttattcttggaagtggtgtgcggaaatctttcaaagatctgacccttttgaacaaggattcccgagaaagcaccaagagggtagagaaggacattgtcttctgtagtaataactgctttattctttattcatcaactgcacaagcgaaaaactcagaaaacaaggaatccattccttcattgccacaatcacctatgagagaaacgccttccaaagcatttcatcagtacagcaacaacatctccactttggatgtgcactgtctcccccagctcccagagaaagcttctccccctgcctcaccacccatcgccttccctcctgcttttgaagcagcccaagtcgaggccaagccagatgagctgaaggtgacagtcaagctgaagcctcggctaagagctgtccatggtgggtttgaagattgcaggccgctcaataaaaaatggagaggaatgaaatggaagaagtggagcattcatattgtaatccctaaggggacatttaaaccaccttgtgaggatgaaatagatgaatttctaaagaaattgggcacttcccttaaacctgatcctgtgcccaaagactatcggaaatgttgcttttgtcatgaagaaggtgatggattgacagatggaccagcaaggctactcaaccttgacttggatctgtgggtccacttgaactgcgctctgtggtccacggaggtctatgagactcaggctggtgccttaataaatgtggagctagctctgaggagaggcctacaaatgaaatgtgtcttctgtcacaagacgggtgccactagtggatgccacagatttcgatgcaccaacatttatcacttcacttgcgccattaaagcacaatgcatgttttttaaggacaaaactatgctttgccccatgcacaaaccaaagggaattcatgagcaagaattaagttactttgcagtcttcaggagggtctatgttcagcgtgatgaggtgcgacagattgctagcatcgtgcaacgaggagaacgggaccatacctttcgcgtgggtagcctcatcttccacacaattggtcagctgcttccacagcagatgcaagcattccattctcctaaagcactcttccctgtgggctatgaagccagccggctgtactggagcactcgctatgccaataggcgctgccgctacctgtgctccattgaggagaaggatgggcgcccagtgtttgtcatcaggattgtggaacaaggccatgaagacctggttctaagtgacatctcacctaaaggtgtctgggataagattttggagcctgtggcatgtgtgagaaaaaagtctgaaatgctccagcttttcccagcgtatttaaaaggagaggatctgtttggcctgaccgtctctgcagtggcacgcatagcggaatcacttcctggggttgaggcatgtgaaaattataccttccgatacggccgaaatcctctcatggaacttcctcttgccgttaaccccacaggttgtgcccgttctgaacctaaaatgagtgcccatgtcaagaggtttgtgttaaggcctcacaccttaaacagcaccagcacctcaaagtcatttcagagcacagtcactggagaactgaacgcaccttatagtaaacagtttgttcactccaagtcatcgcagtaccggaagatgaaaactgaatggaaatccaatgtgtatctggcacggtctcggattcaggggctgggcctgtatgctgctcgagacattgagaaacacaccatggtcattgagtacatcgggactatcattcgaaacgaagtagccaacaggaaagagaagctttatgagtctcagaaccgtggtgtgtacatgttccgcatggataacgaccatgtgattgacgcgacgctcacaggagggcccgcaaggtatatcaaccattcgtgtgcacctaattgtgtggctgaagtggtgacttttgagagaggacacaaaattatcatcagctccagtcggagaatccagaaaggagaagagctctgctatgactataagtttgactttgaagatgaccagcacaagattccgtgtcactgtggagctgtgaactgccggaagtggatgaactgaaatgcattccttgctagctcagcgggcggcttgtccctaggaagaggcgattcaacacaccattggaattttgcagacagaaagagatttttgttttctgttttatgactttttgaaaaagcttctgggagttctgatttcctcagtcctttaggttaaagcagcgccaggaggaagctgacagaagcagcgttcctgaagtggccgaggttaaacggaatcacagaatggtccagcacttttgcttttttttcttttccttttcttttttttttgtttgttttttgttttgtttttcccttgtgggtgggtttcattgttttggttttctagtctcactaaggagaaacttttactggggcaaagagccgatggctgccctgccccgggcaggggccttcctatgaatgtaagactgaaatcaccagcgagggggacagagagtgctggccacggccttattaaaaaggggcaggccctctaacttcaaaatgtttttaaataaagtagacaccactgaacaaggaatgtactgaaatgacttccttagggatagagctaagggataataacttgcactaaatacatttaaatacttgattccatgagtcagtttattgtagtttttgatttctgtaaaataagagaaacttttgtatttattattgaataagtgaatgaagctatttttaaataaagttagaagaaagccaagctgctgctgttacctgcagaactaacaaaccctgttactttgtacagatatgtaaatattttgagaaaaaatacagtataaaaatagttattgaccaaatgctaccaggctctgcagcagctcgggggcttataaaatgttcatagggatgttacaatataattttgtgttataaaatatgccattataattatgtaataaccaaaatttcaacctagagtgttgggggttttttggaaaccgcagtctattagtactcaatggttttatacaccttacttctgacagagcggggcgtatgctacgactacaacttttatagctgttttggtaatttaaactaattttttcatattatattgttgcatccctacttcttcagtcaggtttttttgtgcttacaatttgtgataactgtgaataactgcttaaaaatacacccaaatggaggctgaattttttcttcagcaaaagtagttttgattagaactttgtttcagccacagagaatcatgtaaacgtaataggatcatgtagcagaaacttaaatctaaccctttagccttctatttaacacaaaaatttgaaaaagttaaaaaaaaaaaggagatgtgattatgcttacagctgcaggactctggcaatagggtttttggaagatgtaattttaaaatgtgtttgtatgaactgtttgtttacatttctttaataaaaaaaacactgttttgtgtttgcttgtagaaacttaatcagcattttgaaccaggttagctttttattttgtacttaaaattctggtactgacacttcacaggctaagtataaaatgaagttttgtgtgcacaattcaagtggactgtaaactgttggtatattcagtgatgcagttctgaacttgtatatggcatgatgtatttttatcttacagaataaatcaattgtatatatttttctcttgataaatagctgtatgaaatttgtttcctgaatatttttcttctcttgtacaatatcctgacatcctaccagtatttgtcctaccgggtttttgttgttttctgttctgtataatagtatctaatgttggcaaaaattgaattttttgaagtatacagagtgttatgggttttggaatttgtggacacagatttagaagatcaccatttacaaataaaatattttacatctataa

SEQ ID NO: 246945 - DNA, 14736 bp, Artificial Sequence
  derived and/or modified sequence
atgagcagcgaggaggacaagagcgtggagcagccccagcccccccctccacccccagaagagcctggggctccagcgccatcacctgctgccgcggacaaaagaccacggggcagaccacggaaggacggagcatctccgtttcagcgcgcccgtaaaaagcctcgcagccgaggcaagaccgccgtggaagatgaagacagcatggacggtctagaaaccaccgagacagagactattgtggagacagagattaaagaacagtcagccgaggaggacgccgaggctgaagttgataattccaaacagctcattcccaccctccaacgttctgtgtctgaggagagtgccaactctctcgtgagcgtgggcgtggaagcaaagattagtgagcagctatgtgctttttgttactgtggggagaaatcttccctcggccagggagacctcaaacagttcagaatcactccaggcttcattctgccttggaggaaccagccatcgaacaaaaaagacatagatgacaactcaaatgggacctacgaaaaaatgcaaaacagtgccccacggaagcaaagaggccagaggaaggaacgaagtccccagcagaacatcgtctcctgtgtatcagtttctacacagaccgcctcggatgaccaggcaggcaaactctgggatgagctctctctcgtgggactcccagatgccatcgatatacaggccttatttgattcaaccggcacatgctgggcccaccatcggtgcgtggagtggtctctgggagtttgccaaatggaggaacctctcctcgtgaatgtggacaaggctgttgtgagcggtagtacagaacgctgcgccttctgcaagcacctgggagcaaccatcaagtgttgtgaggaaaaatgcactcagatgtaccactacccatgtgcagccggtgctggtaccttccaggacttcagtcacatcttccttctatgccctgagcacatcgaccaggcaccagaaaggtcgaaagaagacgcaaattgcgctgtgtgtgattctcccggtgatctgctagaccaattcttttgcaccacctgcggacagcattaccatggtatgtgcttggacattgcagtgacgccactgaaaagggcgggatggcaatgcccggagtgtaaggtgtgtcaaaattgtaagcagagcggtgaggattccaagatgttggtctgtgacacttgtgataaaggctatcacacattttgtctccaaccagtgatgaagtcggtcccaaccaatggttggaaatgcaaaaactgcagaatctgcattgagtgtgggacgagatcctccagccagtggcatcacaactgcctgatctgcgacaactgctaccagcagcaagacaatctgtgcccattctgtgggaagtgctaccacccagagctgcaaaaagatatgctgcactgcaacatgtgcaagcgttgggtgcacctagaatgcgacaagcctacggatcacgaattggacactcagttgaaggaagagtatatttgtatgtattgtaaacatcttggtgccgaaatggaccggctccagccgggtgaagaagtagaaatcgccgagctgacgacagattataataatgagatggaggtcgagggccccgaagatcagatggtgttctcggagcaggccgccaacaaagatgtaaatggacaagagtccactcctgggattgtccccgatgccgtgcaggtgcacaccgaagagcagcagaagagtcatccaagcgagtccttggacacagactctctgcttatagctgtgagtagtcagcataccgtcaataccgaattagagaagcagatttctaacgaggtcgatagcgaagacttgaagatgagtagcgaggtgaaacatatttgcggagaggatcagattgaagacaagatggaagttacagagaacattgaagttgtgactcatcagatcacagtgcaacaagagcagctgcagctactggaggaacctgagacagtagtgagcagggaggaatctagacccccaaagctggtcatggagagtgtgactctgcccctggaaaccctcgtgtctccccacgaagagtctatcagtctctgtcccgaagagcagctcgttatcgagcgattgcagggcgagaaggaacagaaagagaatagcgagctcagcacggggctgatggactctgagatgactcccaccattgaggggtgcgtgaaggacgtgagctaccaaggaggaaagtccattaaactttcatctgagaccgagagcagcttctcatccagtgccgatattagtaaggcggatgtgtccagctctcccacaccttcttccgacttaccaagccacgacatgctgcacaattacccttccgccttgtcatcttctgctgggaatattatgccaacaacctatatatctgtcactccgaaaataggcatgggcaaacccgccatcaccaaaagaaaattttccccagggagacctcgaagtaagcagggggcctggtccacccacaacaccgtctcaccgccctcctggtcaccagacatatcagaaggtcgcgaaatcttcaagcccaggcaactccccggcagtgctatttggtcaatcaaagtgggacgcggcagtggatttcccggtaaaaggaggcccagaggcgcagggctgagtggaagaggaggtagggggaggtccaaactgaagagcggaatcggcgcagtggtcttgcccggcgtgtccactgcggacatttcgagcaacaaggatgacgaagagaactccatgcataacaccgtggtgttattttccagttcagacaaattcaccctgaaccaagacatgtgtgtggtttgcggatctttcggccagggagctgaagggcgcctactggcctgcagccagtgtggacagtgttatcatccatattgcgtgagcatcaaaattaccaaggtggttttaagcaaagggtggaggtgcctggagtgcacggtgtgcgaggcctgcggtaaagcaacagatcccggtcgtctgctcctctgtgacgattgcgacatcagctatcacacctactgccttgaccctcctttgcagacagttcccaagggaggctggaaatgcaagtggtgcgtttggtgcaggcattgtggtgccaccagtgctggccttaggtgcgagtggcagaacaactatacacaatgcgctccttgtgcatctctcagtagttgtccagtgtgctatcgaaactacagagaagaggaccttatcctgcaatgccgacagtgcgatagatggatgcacgctgtgtgccagaacctgaatactgaagaagaggtagagaatgtagctgacatcggattcgattgctccatgtgtcgcccatatatgcccgcatccaacgtgccgtcctccgattgttgtgagagcagtctggtggcacagatcgtgaccaaagttaaggagcttgatcctccaaaaacatacacacaggacggggtgtgtcttactgagagcggaatgactcagctgcaatcgctcacggtaactgtaccaagaaggaagcgcagtaaacctaagctgaagctcaaaattatcaaccaaaatagtgtagcagtgttgcagacgccccctgacatccagagcgaacacagtagggatggggaaatggatgatagcagggagggagaactgatggactgcgatggtaagtcagaatcctctcccgagcgcgaagctgtcgacgatgaaaccaagggagtggagggcactgatggagtaaaaaaacgaaaacgcaagccctacagacccgggattggaggctttatggtgcgccagaggagcaggacaggccagggaaaaactaaaaggtccgtcattcgcaaggatagctccggtagtattagcgaacaactgccgtgtagagatgatggctggtctgagcagctccctgacactttggtggatgagagcgtttccgtgactgagagtactgagaagattaaaaagcgttatcggaagcgaaagaacaagctcgaagaaactttccctgcctaccttcaggaagcctttttcggaaaggaccttctggacactagccgacagtccaagattagccttgataatctcagcgaagacggagcccagctgctctataagactaacatgaataccgggttccttgacccatccctcgaccccctgctgtcaagctctagcgcccctacaaaatctggaacacatgggccggctgacgaccccttggctgatatttcagaggtgttaaataccgatgatgacatcctggggatcattagtgacgatctggccaaaagtgtggaccacagtgatatcgggcccgtgactgatgacccaagctctctgccccaaccaaacgttaatcagagttcccgcccgctctctgaagagcaactggacggcatcctgtctcctgaactcgacaaaatggtgactgacggtgcaattttgggaaaactatacaagatccctgaactcggaggaaaggacgttgaggaccttttcaccgctgttctatctcccgccaacacacagccgactcccctgcctcagccccctccccccacacagctgctcccaatccacaaccaggacgcattctcccgcatgcctttgatgaacgggctgatcggcagttctccacacctaccccataattctctgccgccagggtcgggacttggcaccttctcagctattgcccagtctagctatccggacgcccgggataagaatagtgccttcaacccaatggcaagcgatccaaataactcttggacaagttcagcccccacagtggagggcgagaatgatacaatgtctaatgcccagcgctcaactttaaaatgggaaaaagaagaggccctaggtgagatggctaccgtggcaccagtcctttatacaaacatcaacttcccaaatttaaaggaagagtttcccgactggacaactcgggtgaaacagatagcaaagttgtggcggaaggcgtcatcccaggaacgggccccatacgtccaaaaagccagagacaacagagccgccctgcgtatcaacaaggttcagatgagcaatgacagcatgaagcgtcagcaacaacaggactccatagatccatctagtagaatcgacagtgagttgtttaaggatccactgaaacagcgcgaatctgaacacgaacaggagtggaaattccgccagcaaatgcgacagaaatccaagcaacaggctaagatcgaggcgactcagaaactcgagcaggtcaaaaatgagcaacaacaacaacaacagcagcagttcggtagccagcatctgctggttcaatctggctctgatacaccttctagcggcatccagtcccctcttaccccccagcctggtaatggaaatatgtcaccggcccaaagttttcacaaagagttattcacgaaacaacccccatccactcccacaagtactagcagcgacgacgtctttgtgaagccacaggcaccccccccaccgccagcccctagtaggattccaatccaggacagtttaagccaggcacagacgtcccagccacccagcccccaggttttctcaccaggctcatccaactcccgccccccaagcccgatggacccttatgccaaaatggtaggcactccaaggcccccacccgtgggccacagtttttcaaggcgaaattcggctgctcctgtggagaattgcacccctctttccagcgtcagccgacccctgcagatgaatgaaactactgcaaatcggccaagtcccgtccgggacctatgctcctcctcaacgaccaacaacgacccctatgccaaaccacctgatactcctaggcccgtgatgactgaccagttcccaaagtccctcggactctcccggtcccccgttgtgtcagagcaaacagctaagggtcctatcgcagcaggaacatcagaccacttcacgaaaccttctcctcgcgctgacgtcttccagcggcagagaattcccgattcttacgcgagacctctgctgaccccggcaccattggacagcggcccgggcccctttaagactcccatgcagccccccccatcctcgcaggacccctatggctcagtatcacaggcaagtcgtagactttccgtggacccatacgaaagacccgcgctgactccaagacctattgataacttttctcacaatcagagcaatgacccttacagtcaaccaccactgaccccacacccagccgttaacgaatcttttgcccaccctagtcgggccttctcgcagccaggaaccatctcacggcctacttctcaagatccatacagtcagccgccgggaacccctaggcctgttgttgacagctatagccagtcttctggtacagcgcgatctaacaccgatccgtacagtcagcctccaggcaccccacggcccacaacggtcgacccttactcccagcagccgcagaccccgcggcccagtacccagaccgatctgtttgtgactccggttacgaaccagagacattccgacccttacgcccacccacccgggactccacggcccgggattagtgtgccttactcacagcctcctgccacacccagaccgcggataagcgaagggttcacaaggtcctctatgacccgaccagtcctgatgcctaaccaggacccattcttgcaagcagcgcagaatcgcgggcccgccttaccagggcctctggtccgcccccccgacacttgctctcagactccgaggccacccggccctggcctgtccgataccttctcacgtgtgagcccctcagcagccagagacccctacgatcaatctccgatgaccccgaggtctcagagcgactctttcggaaccagtcagacagcccatgacgtggcagaccagccccggcctggaagtgagggctccttctgtgccagttctaacagccccatgcattctcaggggcaacagttcagcggcgtgtcccagctcccagggccagtacctacctcaggggtgaccgacactcaaaacacggtgaacatggctcaggcagacacggagaagctcaggcagcgccaaaagttgcgtgagatcatcctgcagcaacagcagcaaaagaagatcgcaggacgtcaggagaagggcagtcaggattctccagccgtgccccacccggggccactccagcattggcaacccgaaaatgtcaaccaggctttcactcgaccacctcctccatacccaggaaatatccgcagcccagtcgccccacctctgggcccacggtacgcagtgtttccaaaggatcagaggggtccctaccccccagacgtggcctctatgggcatgaggccacatgggtttcgctttgggtttcccgggggatcacacgggactatgccatctcaggaacgctttctggtgcctccccaacagatccaggggtccggtgtttcgccgcagctccggcgttccgtctccgtggacatgcctcgaccactcaataactcccagatgaacaatcctgtaggactccctcagcactttagcccgcagtcgctcccagtgcagcagcacaacattttagggcaggcttacatagagctgaggcatcgagctcctgacggaaggcagagattgccgttcagcgcaccgccgggctctgtcgtggaggccagctcaaatctacgccacggcaatttcataccgagacctgactttccaggccctcgtcataccgaccctatgagacgaccacctcaagggctgcctaatcagctgccggtgcaccctgatctcgagcaggtacccccaagccagcaagagcaaggacattctgtgcattcctcttctatggtgatgagaacactgaatcatcctcttgggggtgaattcagcgaggccccattaagcacatcagtcccctctgagaccacgtcagataacttgcagattaccactcaaccatctgacggtctggaagagaagctggactccgatgatccttcggtaaaggagctggatgtgaaggatctggagggggttgaagtgaaagacctggatgatgaggacttggaaaacctcaacctggatacggaggatggtaaagtggtggaattggacacactggataacctggaaacaaatgacccaaatctagacgacctcttgagaagcggtgaattcgatatcattgcttacacggaccctgagctggatatgggcgataagaaaagcatgtttaatgaggagttggacctgcctatcgatgacaagttagacaatcagtgtgtgtccgtggagcccaaaaaaaaagagcaggaaaataagacactggtgcttagcgataaacacagcccccagaaaaaaagtacggtgaccaatgaagtgaaaactgaagtcttgagtcccaattcaaaggtggagagtaagtgcgagacagagaagaacgacgaaaacaaagataacgttgacaccccctgctcccaagctagcgcacatagcgatctaaacgacggagaaaaaactagtctgcacccgtgtgaccccgatcttttcgaaaaaagaacaaatagagaaacggctggcccctcggcaaacgtgattcaggcttcgacacagctaccagcacaggacgtcatcaattcttgtggcataacgggaagcaccccggttctctccagcctgctggcgaatgagaaaagtgataattctgatatccgaccttccgggtctcctccaccgccaacgctgcctgccagcccctcgaatcacgtaagctcactgcctcctttcatcgcacccccaggccgggttctcgacaatgccatgaattctaatgtgaccgtggttagtagggtcaatcatgtcttcagccaaggagtacaggtaaaccccggtctcatcccagggcaatcaacagtaaaccactctctcggaactggaaagccagccactcagacaggaccccagacaagtcagagcggtacttcctccatgtccgggccacagcagctcatgatcccccagactttggctcagcagaatagggaacgccctctgcttttagaggaacagccactgttgctccaggacctgctggaccaggagcgacaggagcagcagcagcagcgtcagatgcaggcaatgattcggcaacggagcgagccatttttcccaaatatcgattttgatgctatcaccgatcctattatgaaggccaaaatggtggctctaaagggaataaacaaggtgatggcgcagaacaaccttggcatgcccccaatggtgatgtctcggttcccttttatgggtcaggtggtgactggaacgcagaactcggagggacaaaaccttgggcctcaagccattcctcaggatgggtcaatcactcaccaaatatctcgccctaatccccccaacttcggccctggattcgtgaacgactcacagaggaagcagtatgaggaatggctgcaagagacccagcagctgttgcaaatgcaacaaaaataccttgaggagcagataggcgcccaccgaaaaagcaagaaagcactgtcagccaagcagaggaccgcaaagaaggcaggccgggaatttcccgaagaagatgccgagcagctgaagcacgtgactgagcagcagagtatggttcagaaacagctggagcagattcgaaagcagcagaaggagcacgccgagctgatagaggactatagaatcaagcagcagcaacagtgtgctatggctccccctacaatgatgccctccgtacagccacagccacccttgataccgggagccactccacccactatgtcacagccaacctttcctatggtgcctcagcagttgcagcatcaacagcacacgactgtaatctccggacatacctcacccgtgcgcatgcctagcctgcccgggtggcaacctaactcagctccggcacacctgccactaaacccacctaggatacagcccccgattgcccagctgccaattaaaacctgtacaccagcacccgggacggtgagtaacgctaaccctcagtccgggccacctccccgggtggaatttgacgacaataaccccttttcagagtccttccaagagcgcgagaggaaggagaggctccgtgagcaacaagagcgccagcggattcaactcatgcaagaagtggaccggcagagagccctgcaacagcgaatggagatggaacagcacggcatggtaggatcagaaatctctagctcaagaaccagcgtgagccagatccccttttattcgtccgacctgccttgtgatttcatgcaacccctcgggcccctccagcaaagcccacaacaccaacaacagatgggccaggtgttgcagcaacagaacatacagcagggttccatcaattccccaagcacacagaccttcatgcagaccaatgagaggagacaggtggggccgcctagctttgttcctgactccccttcaatccccgttggctcacccaatttttcgagtgtaaagcaggggcatggcaacctgtccggaaccagttttcagcagtcccccgtacgaccttcgtttactcccgctctgcccgcagcaccacctgttgccaattcttctctcccctgcggccaggacagcacaataactcacgggcactcttatcctgggagtacccagtccctaatccagctctatagcgatataattccggaagagaaaggaaaaaagaagagaaccaggaagaaaaagagagacgatgacgcagagtctaccaaggcccccagcacaccacattccgatatcaccgctccccccacgcccggtatttcagagacaacctccactcctgcagtaagcactcctagcgaactgccgcagcaagccgaccaggaaagtgtggagccggtcggaccgtccacccccaatatggccgcaggccagctgtgcactgagctggagaacaaacttccaaactctgactttagccaggccactccaaatcagcagacctacgctaattccgaagtggataaacttagtatggaaacacccgctaagacagaggaaattaaactggagaaggccgagaccgagtcttgtcctggacaagaagagcccaaactggaggaacagaatgggagtaaagtcgaagggaatgcagtcgcttgcccggtgagttcggctcagtctcccccacactcagccggagctcccgctgctaagggcgattccgggaatgagcttctcaaacacttattaaagaacaagaagtctagctctctcctgaaccaaaaacctgaaggatccatatgttcagaagatgattgcacaaaagacaacaaactcgtggagaaacagaatcctgctgaagggttacaaaccttaggagcacagatgcagggaggcttcggatgcggtaaccagctcccaaaaaccgatggcgggagcgaaactaaaaagcaacgttctaagcggacacagaggactggcgagaaggcagcgccaagaagtaagaaacggaagaaagacgaagaagagaaacaggcaatgtactcttccaccgatacatttacacaccttaaacagcagaataacctgtcgaatcctcccacccctcctgccagccttccccctacgccccccccaatggcctgccaaaaaatggccaacggtttcgctaccaccgaggaactcgccggaaaggcaggcgtcttggtgtcccacgaggtgaccaaaaccctggggcccaagccattccagttaccttttaggccccaggatgatttgctcgctcgtgcgctggcacaaggacccaaaactgtggatgtccccgccagcctgcctacccccccacacaataatcaggaggagctccgcattcaagaccactgcggcgatagggatacgcctgactcttttgtccctagctcgagccctgagtccgtcgtgggagttgaggtgagcaggtatccagacctgagcctggtaaaggaagaaccgcctgagcccgtcccctcccccattatccccattctgcccagcaccgccggaaagagtagtgaatcgcgtaggaacgatatcaaaacagagcctggtacgttatactttgcaagccctttcggccctagcccgaatgggcccagaagtgggctaatcagtgtggcaattaccttgcatccgaccgccgccgagaatataagctccgtggtggcagccttctccgatctgttgcatgtccggatcccaaattcttatgaggtatcttccgctcccgatgtgccatccatggggcttgttagcagtcataggatcaaccccggcctggagtaccggcagcacctgttactgagaggaccgccaccagggtccgcaaatccgcctagactcgtgagctcctaccgcttgaagcagcccaacgtgccgtttccccctaccagtaacggactcagcggatataaggactccagccatggcatagccgaaagcgcagctttgcgcccacagtggtgctgccactgcaaggtagtcatcttaggatcaggagtgcgcaagtcatttaaggacttaactctgttgaacaaggactcacgggagtccactaaacgggtcgaaaaggacatcgtgttctgctctaataattgcttcatactgtacagctctaccgcccaagccaaaaacagcgaaaacaaagaatccataccctcactcccccagtcccctatgagagaaacaccctcaaaagccttccatcagtattctaacaacatttcgacgctcgatgttcactgtctgccacagctgccagaaaaggcttctcctccagcaagtccgccaatcgcatttcctcctgctttcgaggctgctcaggttgaggctaagcctgatgagttgaaggtaaccgtgaaattgaagcctaggctgcgagccgtgcatgggggattcgaggattgtaggccattaaataagaagtggcggggcatgaagtggaagaaatggtccatccatatcgtcatcccaaaggggacttttaaacccccttgtgaagacgaaatcgacgagttcttaaaaaagttggggaccagcttaaagcctgacccagtccccaaagattaccgaaaatgctgcttttgccacgaagagggcgacgggcttacagacggaccggctcgtctgctcaatctggatttggatttatgggtgcatctgaactgtgctctgtggagtacagaggtgtatgagacacaggccggcgctctcatcaacgtagagctggctctcagacgcggcctccagatgaaatgcgtgttctgtcacaagaccggcgctacctccggctgccacagatttaggtgtactaacatctaccacttcacctgtgcaatcaaagcacagtgcatgttctttaaggataaaactatgctctgtcctatgcataagcctaaagggattcatgagcaggagctgagttatttcgccgtcttcagacgcgtgtatgtacagagggacgaagtgaggcaaatcgcttcaatcgtccagaggggagaacgcgatcacacgtttcgggtgggctctctcattttccacacgatcgggcagctgctgccccagcaaatgcaagcgtttcacagcccaaaggctctcttccccgtcggctatgaagcttcccgcctctactggagcacacgctacgccaaccgtagatgtaggtatttatgctctatcgaagagaaggacggtcgtccggtgtttgtcatcagaatcgtggagcagggacacgaagacctcgtgctctcggatatttctcccaagggtgtgtgggataaaatcttggagcccgttgcgtgtgtgcgcaagaagtccgagatgttgcagctttttcctgcctacctgaaaggtgaagatctatttgggttgacagtctccgcagtagcccgaatcgcagagagtctgcccggcgttgaggcctgcgagaactacacgttccggtacggaaggaaccctctgatggaattgcccttggcggtcaaccctaccggctgcgctagatccgagcctaagatgagcgcacatgttaagcgctttgtcctaagacctcacactttgaacagcactagcacctctaagtcatttcagtctactgtcactggtgaactgaatgccccctactctaaacagtttgtgcactctaaaagctcccagtatcgaaagatgaagacagagtggaagagcaacgtgtacctggcgcgtagtcggattcaaggcttgggactgtacgccgccagggacattgaaaaacatactatggtgattgagtatatcgggaccatcatcaggaacgaggtggctaaccgtaaagaaaaattgtatgagtctcaaaatcgtggcgtttatatgttcaggatggataacgatcacgtaatcgatgccacgttaactggcggccccgcacgatatattaaccacagctgcgcccccaactgcgtggctgaagtggtgacctttgagagggggcacaagattatcatttcctcgtctaggaggatacagaaaggtgaagaactttgctacgattataaattcgactttgaagacgaccagcataaaatcccttgccattgcggggcagtgaattgcagaaagtggatgaactag

SEQ ID NO: 246946 - DNA, 14736 bp, Artificial Sequence
  derived and/or modified sequence
atgtccagcgaggaggacaagtctgtggagcagccacagccccctcctccccctccagaggaacctggcgcacccgctcccagcccagctgccgctgataagcggccaagaggtagaccacgcaaagatggagccagtccctttcaaagggcccgaaaaaagcccagatccagagggaagaccgctgtggaagatgaagattccatggatggcttggaaacaacggagaccgaaaccatagtggagaccgagatcaaggagcagagcgcagaggaagacgccgaggcagaagtggataattccaagcaactaattccgactctgcagcggagtgtttccgaggagtctgcgaactcgcttgtcagtgtaggtgttgaagccaaaatctccgaacagctttgtgcattctgttattgcggggaaaagagtagtctgggacaaggcgatctcaagcagttccgaattaccccaggattcatactcccatggaggaatcaaccttcaaacaagaaggatatcgacgataactccaacggtacatacgagaagatgcagaattcggctccccgaaaacagcggggacagcgaaaggaaaggagccctcagcaaaacatagtcagctgcgtgtccgtgtccacccagaccgcctcagatgaccaggcaggaaagctgtgggacgagctcagcctggtcggcctgccggatgccattgatatacaagcgctgtttgattctacgggcacctgctgggcccaccatcgttgtgtggagtggtctctgggcgtctgccagatggaggagcccctgcttgtgaacgttgataaagctgttgtttctggctctacagagcggtgtgccttctgtaagcatctgggcgctacaataaagtgttgtgaggaaaagtgtactcaaatgtaccactacccttgtgctgcaggtgctggaacgtttcaagacttcagtcacatctttctgctgtgtcccgagcacatagatcaggcgcctgagaggagcaaggaagatgctaactgtgctgtgtgcgattctcctggtgatttgttagaccaattcttttgtaccacatgtggccaacattaccacggtatgtgtctggacatcgcggttacaccactgaaacgtgccggttggcaatgtcctgagtgcaaggtctgccaaaactgcaagcagagcggtgaggactccaaaatgttggtgtgcgacacttgtgacaagggataccacacattctgcttacaacctgtgatgaaatcagtcccaacgaatggttggaagtgcaagaattgtcgaatctgcatcgaatgcggaactcggtcgtcctcacaatggcaccacaactgtctcatttgtgacaattgctaccagcaacaggataacctgtgcccattctgcggcaagtgctatcatcctgaactgcagaaggacatgctgcactgcaatatgtgcaagcggtgggtgcaccttgaatgcgacaagccaacagatcacgaactggacacccagttaaaggaggagtacatttgcatgtactgtaagcacctgggggcagagatggataggctccagccaggagaggaggtcgaaattgcagagctcacaacagactataacaacgagatggaagtagagggcccagaggaccagatggtcttctccgagcaagccgctaataaggacgtgaatggccaagaaagcactccaggcattgtccctgatgccgttcaggtgcacactgaagagcagcagaaatcccatccgagcgagtccctagatactgatagcctactaatcgctgtgagctcccagcacacagtgaatacggagttggaaaaacagatctctaacgaagtggatagcgaggatctgaagatgtcttcggaggtcaagcacatctgcggggaagaccagattgaagacaagatggaggtcaccgagaacattgaggtggtgacacaccagatcaccgtgcagcaggagcaactgcagctgctggaagagcctgaaacagttgtttcacgggaggaaagccgccctcccaagctagtcatggagagtgtgacactccccctggagacgctagtttcccctcacgaagaatctattagtctctgtcctgaagagcagctggtaattgaaagactgcagggggaaaaggaacaaaaagaaaactccgaattatcaacaggtctgatggattccgagatgacgcctacgatcgaaggctgtgtaaaagacgtgtcctaccagggtggtaagagtatcaaactatcttcagagactgagtctagcttcagctcttccgcagatattagcaaggcagacgttagttcatcccccaccccatcctctgatctcccttcccacgacatgctacacaactatccttctgccctgtccagcagcgcagggaatattatgcccaccacctacatctcagttaccccaaagatcggcatgggcaaaccggctatcaccaaacgcaagttttcacctgggaggccacgatcaaaacagggcgcttggtccactcataacaccgtcagtcctccgtcatggagccctgatatcagcgaggggagagaaatcttcaagcccagacaactgcccggaagcgcaatatggtccataaaggtgggcagaggctctgggtttcctggcaagcgaagacctagaggagcaggcctctctggtcgtggcggaagagggcgaagcaagctgaagtccggcattggtgctgtagtcctgcccggtgttagtacggcagacatcagttctaataaggatgacgaggagaactctatgcacaacaccgtggtgcttttttcctcgtccgacaaatttactctgaatcaggatatgtgcgtggtctgtggttcattcgggcagggagctgaaggtcgactgttagcctgctcccaatgtgggcagtgttatcacccctattgtgtcagcatcaaaatcaccaaagtagtgctgagtaagggctggcgctgcttggaatgtactgtctgcgaagcctgtggcaaagccaccgatcctgggagactgctgctgtgtgacgactgcgatatttcttaccacacatactgtctggaccccccactccagaccgtgccgaaaggagggtggaagtgcaagtggtgtgtgtggtgtcggcactgcggtgccacgagcgcagggctgagatgcgaatggcagaacaactatactcaatgcgcaccctgtgcatccctgtcctcttgcccagtatgttaccgcaactaccgggaagaggatctgatcctccagtgccgtcagtgcgatcggtggatgcacgctgtttgccagaacctgaacactgaagaagaggtagagaatgtggcggatattggcttcgattgtagcatgtgccgaccttacatgcctgcgagtaacgtccctagcagcgactgctgcgagtcttccctcgtcgctcagatcgtgacaaaagtgaaggaactggaccccccaaaaacctacacacaggatggggtgtgcctgacagaatctggaatgactcagctccagtcacttacggtaacagtcccacgcaggaaacggagcaagcccaagctgaagctgaaaataattaatcagaacagtgttgcggtgcttcagacaccgcctgatattcagtctgagcacagtcgggacggcgagatggacgattcgcgagaaggagaactgatggactgcgacgggaagtctgagtcttcacctgagcgtgaagccgtcgatgatgaaacaaaaggcgtggagggaacagatggcgttaagaaacgaaagcgcaaaccatatagacctggtatcggaggctttatggtgagacaaaggtcccgaacaggtcagggaaagaccaagcgatccgttatccgcaaagattctagcggtagcatcagtgagcagctgccatgtcgggatgatggttggtcggaacagctgccggatacactcgtggacgagtctgtgtctgtaactgagtctacggagaagattaagaagcgatacagaaaacggaaaaacaagttggaggaaacctttccggcttatctgcaagaagccttttttgggaaagacctgctggatacctctagacagagtaagatctcactggataacctttccgaggacggcgcacaactgctgtacaagaccaacatgaatacgggctttttagaccctagtcttgatcccctactctcgtcttcgtccgcaccaacaaaatcaggcactcacgggcctgctgatgaccccctggctgacattagcgaagtactgaacacggacgatgatatactgggcatcatctcagacgacttagctaagtccgtagaccattccgatatcggtcccgtcaccgatgatccgagctcattgccgcagcccaatgtgaaccagtccagcagaccgctgagcgaagaacaactcgatggtatactttcccctgaactagacaagatggtcactgacggtgcgattctgggcaaactttataagatccccgaactaggtggaaaagatgttgaggacctgttcacagcagtgttgtcaccagctaacacacaaccaacgcctttgccccaaccccctccacctacccaactgctgccaatccataatcaggatgctttctccagaatgcccttgatgaacgggctaattggctcctcaccccacctgccccacaactcacttccgcctggctcaggcctggggacattctcagccatcgctcagagcagctacccagatgccagggataaaaattctgccttcaatcccatggcctccgacccaaataactcctggactagctccgcccctacagtggagggggagaatgacaccatgtctaacgcccagcggagtacactgaaatgggaaaaagaggaagccctaggagaaatggcaaccgttgctcccgtgctgtacactaatattaactttcccaaccttaaagaggagttcccagattggaccactagagtgaagcaaattgccaagctgtggcggaaagcttcaagtcaggaacgggctccatacgtacaaaaagcgcgtgacaaccgagccgcactgcggattaacaaggtccaaatgtcgaacgattccatgaagcggcaacaacagcaagatagcatagatccatcgagcaggatcgactccgagctgttcaaggatcccctcaagcagagagagtccgaacacgaacaagaatggaaattccggcaacagatgagacagaaatctaaacagcaggcaaagatcgaggctactcagaagttagagcaggtcaaaaatgagcagcagcagcagcagcagcagcaatttggatctcagcacttgctagtgcagagcgggtctgacactcccagctctgggattcagtcccccctcacgcctcaaccaggcaacggcaatatgtctccggcacagtcttttcataaagagctgttcacgaagcagcctcctagtaccccaacctcgaccagctcagatgacgtgtttgtgaaaccacaggcgccacctccacccccagctccttcccgaatccccattcaggactccctgtctcaggcccagactagtcagcctcccagccctcaggtgtttagtccaggatcgtctaatagccgcccaccaagtccaatggacccctatgctaaaatggtgggtacacccaggcctccgcctgtgggccacagtttctcgcgccgtaatagcgccgctccagtggaaaactgcacccccttgagttctgtgagtagaccattgcagatgaatgagaccactgcaaatagacccagcccagtgcgagacctgtgtagttcgtctacaaccaacaacgatccatatgcaaagccacccgatacacctcgcccagtgatgactgaccagttccccaaaagtctagggctctcacggagccccgtggtgtctgagcagactgccaagggtccgattgctgcaggcacctctgaccattttacaaagccttctccgcgagctgacgtgtttcaacgccagaggatcccggatagttatgcccgtcctctgctgacaccagcgccactggattcaggcccagggcctttcaagacgccaatgcagccgcctccatcatctcaggatccttatggtagcgtgagccaagccagcagaagactgtccgtggatccttacgagcggcctgcacttacgcctcgaccaattgacaattttagtcacaatcaatctaatgatccctacagccagccacccttaacccctcacccagctgtaaacgagtcattcgcacatcccagtcgcgctttttctcaacctggcacaattagtagacctacgagtcaggatccatattcgcaacctcctggaactcccagaccggtggtggactcctacagccaatccagcggcaccgcacgcagcaataccgacccatacagccagcccccagggactccccgtcctacaaccgtggacccatactctcaacagccccaaactccacgcccttctacccagacagatcttttcgtgacacctgtcaccaatcagaggcacagcgacccctacgcccatccacctggtaccccacggcctggtatctccgtcccttattcccagcctcccgctacccccaggccccgaataagcgagggatttacaaggagttcaatgacgcgcccagtgctgatgcccaatcaggaccctttccttcaggccgctcaaaatcgagggcctgccctgcccggacctctggtcaggccccctgacacatgctcccagacacccaggccgccaggcccaggactgtcagacacctttagtcgcgtcagccccagcgccgcacgggacccttatgaccagtcaccgatgactccacgatcacaatccgacagctttggcacaagccagactgcacacgatgtagcagatcaaccacgccctgggtctgaaggctctttttgcgcatcctccaatagtccaatgcactctcaggggcagcagtttagcggggtgtctcagctacctggtccagtccctacctccggcgtcaccgacacccagaatacggtgaatatggcgcaggctgacacggaaaaactgagacagaggcagaagcttcgtgagattatcttacagcagcaacaacaaaagaaaatcgctgggagacaggagaaaggctctcaggacagtccggcagtgccccatccaggtcccttgcagcattggcagccagagaacgtcaaccaagcctttacccgccctccgccaccttaccccggaaatatacgcagcccggttgctcctcctttaggaccacgatacgccgtctttcccaaggaccagaggggcccttatccacctgacgttgcttctatgggcatgcgtccacatggattccggttcgggttcccaggtggaagtcacggcaccatgccttcacaagagcggtttttggtcccaccccaacagatacaggggtctggcgtgtctcctcagcttcggagaagcgtgtccgtcgatatgcccagacccctcaacaactcccaaatgaataaccccgtagggttaccacagcacttttcgcctcaatccttgccagttcaacagcataatatcctgggccaagcttacatcgagctcaggcatagagcccctgatggacggcagaggctgcctttctccgctcccccaggatccgtagtggaggctagttctaacctgcgtcacggcaacttcatccctaggcctgacttccctgggcctcggcacacggacccgatgcgccgaccccctcagggactaccaaatcaactccctgtgcacccagatcttgaacaagtcccacccagtcagcaggagcagggtcacagcgtgcacagcagctcaatggtgatgagaaccctcaatcatccactcggaggggagttcagtgaagcccctctcagcacctcagtcccttccgaaaccacctctgacaatttgcaaattaccactcaaccctcagacggattggaggaaaagttggattccgacgatccaagtgtgaaggagctcgatgtcaaagacttagaaggcgtagaagtgaaagacctggatgatgaggacctggagaatctgaacctggatacagaagatggaaaggtcgtggagctagacacgctcgataatctggaaaccaacgatccaaatttagatgatctcctcagatctggagaattcgatattatcgcatacacagatcccgagctggacatgggagataagaagtccatgttcaatgaggagctggacctcccaatcgacgataaactggacaatcaatgcgtgagcgtggagcccaaaaagaaagaacaggaaaataagacgttagtcttaagcgacaaacactccccacaaaaaaagtctacggtgactaatgaagtcaaaaccgaagtactgtctccaaactcgaaggttgaaagtaaatgtgaaactgagaagaacgacgagaataaggataatgtagacacaccctgctctcaggcaagcgctcattcagatcttaacgatggggaaaaaacaagcttacatccgtgtgatcccgatctttttgaaaagcgcacaaacagggaaactgccggaccttcagcgaacgtgattcaagcttcaacccagctgcctgctcaggatgtgattaactcctgcggcattacagggagcacaccggtcctgagctcgctgctcgcaaatgagaagagtgataattcagacataagaccaagcggaagcccaccccctcctaccttgcctgcctccccctcgaaccatgtcagcagcctccccccttttatagcaccacctggaagggtgctggataatgccatgaattctaacgtgacagtggtcagcagggtgaatcacgttttttcacagggagtgcaagtaaaccctggcctgatcccaggacagagcactgtgaaccattctcttggcaccggaaagcctgcaacccagaccgggcctcagacctctcaatccggcacttctagtatgagcggccctcagcagttaatgattccccaaacactggcgcagcagaaccgggaaaggcctctcttgttggaggaacaaccactgttgctccaagacctgctggatcaagaaaggcaggaacagcaacagcagcgacaaatgcaggccatgatccgacagagaagcgagccattttttccaaacattgactttgatgccattactgaccccattatgaaagccaagatggtcgcactgaaaggcatcaacaaggtgatggcccagaataacttgggcatgcctcccatggtcatgtcaagatttccttttatgggccaggtcgtgaccggaacccagaactctgaaggccagaatctaggcccacaggcaatccctcaagacggttccatcactcatcagatcagtcgacccaatcctccaaatttcggacctgggtttgtgaatgatagtcagagaaagcagtacgaggagtggcttcaggaaacccagcaactgctccagatgcagcaaaaatatttggaagagcagatcggagcgcacagaaagtctaaaaaagctctgtccgccaaacagaggaccgctaagaaggccggtagggagtttcccgaagaggacgccgagcagttgaagcatgttacagagcaacagtctatggtccaaaagcagctggagcaaataaggaagcagcagaaggaacacgccgagctgatcgaagattacaggatcaaacagcagcagcagtgtgccatggccccaccaacgatgatgccctcagtgcagccccagccaccacttatcccgggagccaccccccctacaatgtcccagcctacttttcccatggttcctcagcagctgcagcaccagcagcatacaaccgttataagcgggcacacaagtcctgtgaggatgccttcactgccaggttggcaaccgaactctgcacccgcacaccttcccctgaatcctcccaggatccagccacccattgcgcagctcccgatcaaaacatgcacaccagcacctgggaccgtgtcaaacgccaatcctcagtcagggcctcctccccgagtggaattcgatgataacaatccattcagcgagagctttcaggagagagaaagaaaggagcgcctgagagaacagcaagagagacagcgcatacaacttatgcaagaggtggacaggcaaagggctctgcagcagcggatggagatggaacagcatgggatggtcggatctgaaatctcctccagtagaacatccgttagtcagattcccttctattcctctgatctgccctgtgactttatgcagccactggggcctctccagcaatccccccaacaccagcagcaaatggggcaggtgctccagcagcagaacatccagcagggttctattaactctccatccacgcagaccttcatgcagactaatgagaggcggcaagtagggccaccttcattcgtgcccgattctccgagcattccggttggctctccgaatttctcatccgttaagcagggacatgggaacctcagtggcacgtcttttcagcagtcccctgtccggcctagcttcacccccgcactgcctgccgctcccccagtagctaactcaagcctgccttgtggccaggactccactatcactcatggacattcatacccaggcagcactcagtctctcattcagttatattccgatataatcccagaggagaaaggcaagaaaaaacggactaggaaaaagaagagagatgatgacgctgagtctactaaggctcctagcactccacatagtgatatcacagcccctccaactcccggtatctctgagaccaccagcacaccggcagtgagcacaccatccgagctccctcagcaggcagatcaggagagcgtcgaacctgtgggaccctccactccgaatatggcagccggacagctctgcactgagttagagaacaagctgcctaattccgacttttctcaagccacaccaaaccaacagacctatgctaacagtgaagtagataagttgtcaatggagacccccgcaaaaaccgaagaaataaagttggagaaggcagagacagagagttgtcctggacaggaagagcccaagttggaggagcagaacggtagcaaggtcgaagggaacgccgtggcctgtccagtgagcagcgcacaatccccccctcacagcgcaggtgccccagcggctaagggcgacagcggtaatgagttgctgaaacacttactgaaaaacaagaagtcatctagcctgctgaaccagaagcccgaagggtccatctgctccgaggatgactgcacgaaagacaacaagctggtagaaaaacagaaccctgcggagggtttacagaccctcggcgctcagatgcagggcggatttgggtgtggcaatcagctacccaaaaccgatggtgggtccgagacaaagaagcagcgctccaagcgcacccagcggacaggtgagaaggctgcacctaggtccaaaaagcggaagaaagatgaggaggagaagcaggccatgtacagttcaaccgacacattcacccacctgaaacaacaaaacaacctttccaatcccccaactccgcctgcctcactgccacctacaccccctccaatggcatgtcagaagatggcaaacggctttgctaccaccgaggagcttgctggtaaagccggtgtcctggtaagccatgaggtcactaagaccctgggtccgaagccctttcagctaccattccggccacaggatgacctcttggccagagcactggcccagggtccaaagaccgtcgacgttccagcctcactcccgacgccacctcacaacaatcaagaggagctgagaattcaggaccactgcggcgatcgggacacacccgacagctttgtcccttctagttcacctgagagcgtggtgggggtggaagtttcacgatatcccgatctttccctagttaaggaagagcccccagagccagtgccttccccaatcattcccatcctgccctcaacagctggaaaatctagtgaaagccgcaggaatgacataaagacagagcctggcacgctctatttcgcaagccccttcgggcctagcccgaacggccctagatcaggcttgatttccgtggccatcaccctgcatcctacagctgccgagaatatttccagtgtggtcgctgctttctctgatttgctacacgtcaggattcccaacagctatgaagtaagcagcgcacccgacgtgcccagcatgggactggtctcaagccatcgtatcaaccctggcctggagtaccggcaacatctcctgctgagaggacctccacctggcagcgccaatcctcccaggctcgtgtccagctaccgacttaaacaacccaatgtgccattccctcccacaagtaatgggttgagcgggtataaggacagctcacacggcattgcggagagtgccgcactgcggcctcagtggtgctgtcattgtaaggtcgttatccttggatctggagtgaggaaaagtttcaaggatctcactttgctcaataaagattccagagaatccaccaagcgggttgaaaaggatatagtgttttgttctaacaattgcttcatcctttacagctcaacagcccaggcaaaaaattctgagaacaaggagagtatcccatctctcccacaatctccaatgcgggagacaccgtcaaaagcattccaccagtacagcaataacatctccaccctggacgttcactgcctccctcagctccccgagaaggcatctccacctgcaagcccgccaatagcctttccacctgctttcgaggccgcacaggtcgaagctaaaccagatgaattgaaggtgacagtgaagctgaagccaagactccgcgcagttcatgggggttttgaggattgccggccactgaacaagaaatggagaggcatgaaatggaaaaaatggtccattcatatcgtgattccaaaaggtacatttaaaccaccctgcgaagacgagatcgacgagttcttaaagaagctcggcacttccctgaagccagaccccgttcctaaagattaccgcaaatgttgcttttgccacgaagagggtgatggactaaccgatggccctgcccgactcctgaacctagatcttgatctttgggtgcatttaaattgtgcactgtggagtacagaggtttatgagacccaagccggagctctgatcaatgtggagctcgcgttacgcagaggtttacagatgaaatgcgtcttctgtcacaaaactggcgctaccagcggctgtcatcggtttagatgtaccaacatttatcacttcacctgtgcaataaaggctcagtgtatgttcttcaaggataagacaatgttgtgcccgatgcacaagccaaagggaatccatgagcaggaactctcctatttcgctgtgttccgaagagtgtacgtgcaaagagacgaggtccgtcagatcgcaagcattgtgcagaggggcgaaagggaccacacatttcgggtgggcagcttgatctttcacacaatcggtcagttgctaccacaacaaatgcaggcgtttcactcccccaaagcccttttccctgtcgggtatgaggcctctcggctttattggtcaacacggtatgccaatcggagatgccggtacctgtgtagtatcgaggagaaggatggtcgcccagtgttcgtgattcgcatcgttgagcaggggcacgaggacctcgtcctttcagatatttccccgaagggagtttgggacaaaatattggaacccgttgcatgtgttaggaagaagtccgagatgctgcaactgttccccgcttatttaaagggagaggaccttttcggcctgaccgtgtctgcggtggccagaattgccgaatcgctgccaggcgttgaagcttgcgaaaattacacattccgttatggaagaaaccccctgatggaactgcccttggcagtgaaccctacagggtgtgccaggtccgagccaaagatgagcgcccatgtgaagagatttgtcctgagaccacataccctgaattctacgtctacctccaaaagtttccagtccacggtgactggagaactgaatgccccatatagcaagcaatttgtccacagcaaatcaagccagtaccggaaaatgaagaccgagtggaaatccaacgtctacctagctaggagtcgcatccaaggtctgggcctgtatgccgctagagatatcgagaaacatacgatggtaattgagtatatcggcaccattatcagaaacgaagtggctaatcgcaaggaaaaactatacgagtcacagaacaggggcgtgtatatgtttaggatggacaacgatcacgtcattgatgctactcttaccggcggacccgcaagatatatcaaccatagttgcgccccaaactgtgttgccgaggtcgttacgtttgaaagaggccacaagattatcatctcctcctcaaggcgcattcagaagggcgaggagctctgttatgactacaaattcgatttcgaggacgatcagcataaaattccttgccattgtggggcagtgaactgtagaaagtggatgaattat

SEQ ID NO: 246947 - DNA, 14736 bp, Artificial Sequence
  derived and/or modified sequence
atgagcagcgaggaggacaagagcgtggagcagccccagccccccccccccccccccgaggagcccggcgcccccgcccccagccccgccgccgccgacaagagacccagaggcagacccagaaaggacggcgccagccccttccagagagccagaaagaagcccagaagcagaggcaagaccgccgtggaggacgaggacagcatggacggcctggagaccaccgagaccgagaccatcgtggagaccgagatcaaggagcagagcgccgaggaggacgccgaggccgaggtggacaacagcaagcagctgatccccaccctgcagagaagcgtgagcgaggagagcgccaacagcctggtgagcgtgggcgtggaggccaagatcagcgagcagctgtgcgccttctgctactgcggcgagaagagcagcctgggccagggcgacctgaagcagttcagaatcacccccggcttcatcctgccctggagaaaccagcccagcaacaagaaggacatcgacgacaacagcaacggcacctacgagaagatgcagaacagcgcccccagaaagcagagaggccagagaaaggagagaagcccccagcagaacatcgtgagctgcgtgagcgtgagcacccagaccgccagcgacgaccaggccggcaagctgtgggacgagctgagcctggtgggcctgcccgacgccatcgacatccaggccctgttcgacagcaccggcacctgctgggcccaccacagatgcgtggagtggagcctgggcgtgtgccagatggaggagcccctgctggtgaacgtggacaaggccgtggtgagcggcagcaccgagagatgcgccttctgcaagcacctgggcgccaccatcaagtgctgcgaggagaagtgcacccagatgtaccactacccctgcgccgccggcgccggcaccttccaggacttcagccacatcttcctgctgtgccccgagcacatcgaccaggcccccgagagaagcaaggaggacgccaactgcgccgtgtgcgacagccccggcgacctgctggaccagttcttctgcaccacctgcggccagcactaccacggcatgtgcctggacatcgccgtgacccccctgaagagagccggctggcagtgccccgagtgcaaggtgtgccagaactgcaagcagagcggcgaggacagcaagatgctggtgtgcgacacctgcgacaagggctaccacaccttctgcctgcagcccgtgatgaagagcgtgcccaccaacggctggaagtgcaagaactgcagaatctgcatcgagtgcggcaccagaagcagcagccagtggcaccacaactgcctgatctgcgacaactgctaccagcagcaggacaacctgtgccccttctgcggcaagtgctaccaccccgagctgcagaaggacatgctgcactgcaacatgtgcaagagatgggtgcacctggagtgcgacaagcccaccgaccacgagctggacacccagctgaaggaggagtacatctgcatgtactgcaagcacctgggcgccgagatggacagactgcagcccggcgaggaggtggagatcgccgagctgaccaccgactacaacaacgagatggaggtggagggccccgaggaccagatggtgttcagcgagcaggccgccaacaaggacgtgaacggccaggagagcacccccggcatcgtgcccgacgccgtgcaggtgcacaccgaggagcagcagaagagccaccccagcgagagcctggacaccgacagcctgctgatcgccgtgagcagccagcacaccgtgaacaccgagctggagaagcagatcagcaacgaggtggacagcgaggacctgaagatgagcagcgaggtgaagcacatctgcggcgaggaccagatcgaggacaagatggaggtgaccgagaacatcgaggtggtgacccaccagatcaccgtgcagcaggagcagctgcagctgctggaggagcccgagaccgtggtgagcagagaggagagcagaccccccaagctggtgatggagagcgtgaccctgcccctggagaccctggtgagcccccacgaggagagcatcagcctgtgccccgaggagcagctggtgatcgagagactgcagggcgagaaggagcagaaggagaacagcgagctgagcaccggcctgatggacagcgagatgacccccaccatcgagggctgcgtgaaggacgtgagctaccagggcggcaagagcatcaagctgagcagcgagaccgagagcagcttcagcagcagcgccgacatcagcaaggccgacgtgagcagcagccccacccccagcagcgacctgcccagccacgacatgctgcacaactaccccagcgccctgagcagcagcgccggcaacatcatgcccaccacctacatcagcgtgacccccaagatcggcatgggcaagcccgccatcaccaagagaaagttcagccccggcagacccagaagcaagcagggcgcctggagcacccacaacaccgtgagcccccccagctggagccccgacatcagcgagggcagagagatcttcaagcccagacagctgcccggcagcgccatctggagcatcaaggtgggcagaggcagcggcttccccggcaagagaagacccagaggcgccggcctgagcggcagaggcggcagaggcagaagcaagctgaagagcggcatcggcgccgtggtgctgcccggcgtgagcaccgccgacatcagcagcaacaaggacgacgaggagaacagcatgcacaacaccgtggtgctgttcagcagcagcgacaagttcaccctgaaccaggacatgtgcgtggtgtgcggcagcttcggccagggcgccgagggcagactgctggcctgcagccagtgcggccagtgctaccacccctactgcgtgagcatcaagatcaccaaggtggtgctgagcaagggctggagatgcctggagtgcaccgtgtgcgaggcctgcggcaaggccaccgaccccggcagactgctgctgtgcgacgactgcgacatcagctaccacacctactgcctggacccccccctgcagaccgtgcccaagggcggctggaagtgcaagtggtgcgtgtggtgcagacactgcggcgccaccagcgccggcctgagatgcgagtggcagaacaactacacccagtgcgccccctgcgccagcctgagcagctgccccgtgtgctacagaaactacagagaggaggacctgatcctgcagtgcagacagtgcgacagatggatgcacgccgtgtgccagaacctgaacaccgaggaggaggtggagaacgtggccgacatcggcttcgactgcagcatgtgcagaccctacatgcccgccagcaacgtgcccagcagcgactgctgcgagagcagcctggtggcccagatcgtgaccaaggtgaaggagctggacccccccaagacctacacccaggacggcgtgtgcctgaccgagagcggcatgacccagctgcagagcctgaccgtgaccgtgcccagaagaaagagaagcaagcccaagctgaagctgaagatcatcaaccagaacagcgtggccgtgctgcagaccccccccgacatccagagcgagcacagcagagacggcgagatggacgacagcagagagggcgagctgatggactgcgacggcaagagcgagagcagccccgagagagaggccgtggacgacgagaccaagggcgtggagggcaccgacggcgtgaagaagagaaagagaaagccctacagacccggcatcggcggcttcatggtgagacagagaagcagaaccggccagggcaagaccaagagaagcgtgatcagaaaggacagcagcggcagcatcagcgagcagctgccctgcagagacgacggctggagcgagcagctgcccgacaccctggtggacgagagcgtgagcgtgaccgagagcaccgagaagatcaagaagagatacagaaagagaaagaacaagctggaggagaccttccccgcctacctgcaggaggccttcttcggcaaggacctgctggacaccagcagacagagcaagatcagcctggacaacctgagcgaggacggcgcccagctgctgtacaagaccaacatgaacaccggcttcctggaccccagcctggaccccctgctgagcagcagcagcgcccccaccaagagcggcacccacggccccgccgacgaccccctggccgacatcagcgaggtgctgaacaccgacgacgacatcctgggcatcatcagcgacgacctggccaagagcgtggaccacagcgacatcggccccgtgaccgacgaccccagcagcctgccccagcccaacgtgaaccagagcagcagacccctgagcgaggagcagctggacggcatcctgagccccgagctggacaagatggtgaccgacggcgccatcctgggcaagctgtacaagatccccgagctgggcggcaaggacgtggaggacctgttcaccgccgtgctgagccccgccaacacccagcccacccccctgccccagccccccccccccacccagctgctgcccatccacaaccaggacgccttcagcagaatgcccctgatgaacggcctgatcggcagcagcccccacctgccccacaacagcctgccccccggcagcggcctgggcaccttcagcgccatcgcccagagcagctaccccgacgccagagacaagaacagcgccttcaaccccatggccagcgaccccaacaacagctggaccagcagcgcccccaccgtggagggcgagaacgacaccatgagcaacgcccagagaagcaccctgaagtgggagaaggaggaggccctgggcgagatggccaccgtggcccccgtgctgtacaccaacatcaacttccccaacctgaaggaggagttccccgactggaccaccagagtgaagcagatcgccaagctgtggagaaaggccagcagccaggagagagccccctacgtgcagaaggccagagacaacagagccgccctgagaatcaacaaggtgcagatgagcaacgacagcatgaagagacagcagcagcaggacagcatcgaccccagcagcagaatcgacagcgagctgttcaaggaccccctgaagcagagagagagcgagcacgagcaggagtggaagttcagacagcagatgagacagaagagcaagcagcaggccaagatcgaggccacccagaagctggagcaggtgaagaacgagcagcagcagcagcagcagcagcagttcggcagccagcacctgctggtgcagagcggcagcgacacccccagcagcggcatccagagccccctgaccccccagcccggcaacggcaacatgagccccgcccagagcttccacaaggagctgttcaccaagcagccccccagcacccccaccagcaccagcagcgacgacgtgttcgtgaagccccaggcccccccccccccccccgcccccagcagaatccccatccaggacagcctgagccaggcccagaccagccagccccccagcccccaggtgttcagccccggcagcagcaacagcagaccccccagccccatggacccctacgccaagatggtgggcacccccagacccccccccgtgggccacagcttcagcagaagaaacagcgccgcccccgtggagaactgcacccccctgagcagcgtgagcagacccctgcagatgaacgagaccaccgccaacagacccagccccgtgagagacctgtgcagcagcagcaccaccaacaacgacccctacgccaagccccccgacacccccagacccgtgatgaccgaccagttccccaagagcctgggcctgagcagaagccccgtggtgagcgagcagaccgccaagggccccatcgccgccggcaccagcgaccacttcaccaagcccagccccagagccgacgtgttccagagacagagaatccccgacagctacgccagacccctgctgacccccgcccccctggacagcggccccggccccttcaagacccccatgcagcccccccccagcagccaggacccctacggcagcgtgagccaggccagcagaagactgagcgtggacccctacgagagacccgccctgacccccagacccatcgacaacttcagccacaaccagagcaacgacccctacagccagccccccctgaccccccaccccgccgtgaacgagagcttcgcccaccccagcagagccttcagccagcccggcaccatcagcagacccaccagccaggacccctacagccagccccccggcacccccagacccgtggtggacagctacagccagagcagcggcaccgccagaagcaacaccgacccctacagccagccccccggcacccccagacccaccaccgtggacccctacagccagcagccccagacccccagacccagcacccagaccgacctgttcgtgacccccgtgaccaaccagagacacagcgacccctacgcccacccccccggcacccccagacccggcatcagcgtgccctacagccagccccccgccacccccagacccagaatcagcgagggcttcaccagaagcagcatgaccagacccgtgctgatgcccaaccaggaccccttcctgcaggccgcccagaacagaggccccgccctgcccggccccctggtgagaccccccgacacctgcagccagacccccagaccccccggccccggcctgagcgacaccttcagcagagtgagccccagcgccgccagagacccctacgaccagagccccatgacccccagaagccagagcgacagcttcggcaccagccagaccgcccacgacgtggccgaccagcccagacccggcagcgagggcagcttctgcgccagcagcaacagccccatgcacagccagggccagcagttcagcggcgtgagccagctgcccggccccgtgcccaccagcggcgtgaccgacacccagaacaccgtgaacatggcccaggccgacaccgagaagctgagacagagacagaagctgagagagatcatcctgcagcagcagcagcagaagaagatcgccggcagacaggagaagggcagccaggacagccccgccgtgccccaccccggccccctgcagcactggcagcccgagaacgtgaaccaggccttcaccagacccccccccccctaccccggcaacatcagaagccccgtggccccccccctgggccccagatacgccgtgttccccaaggaccagagaggcccctacccccccgacgtggccagcatgggcatgagaccccacggcttcagattcggcttccccggcggcagccacggcaccatgcccagccaggagagattcctggtgcccccccagcagatccagggcagcggcgtgagcccccagctgagaagaagcgtgagcgtggacatgcccagacccctgaacaacagccagatgaacaaccccgtgggcctgccccagcacttcagcccccagagcctgcccgtgcagcagcacaacatcctgggccaggcctacatcgagctgagacacagagcccccgacggcagacagagactgcccttcagcgccccccccggcagcgtggtggaggccagcagcaacctgagacacggcaacttcatccccagacccgacttccccggccccagacacaccgaccccatgagaagacccccccagggcctgcccaaccagctgcccgtgcaccccgacctggagcaggtgccccccagccagcaggagcagggccacagcgtgcacagcagcagcatggtgatgagaaccctgaaccaccccctgggcggcgagttcagcgaggcccccctgagcaccagcgtgcccagcgagaccaccagcgacaacctgcagatcaccacccagcccagcgacggcctggaggagaagctggacagcgacgaccccagcgtgaaggagctggacgtgaaggacctggagggcgtggaggtgaaggacctggacgacgaggacctggagaacctgaacctggacaccgaggacggcaaggtggtggagctggacaccctggacaacctggagaccaacgaccccaacctggacgacctgctgagaagcggcgagttcgacatcatcgcctacaccgaccccgagctggacatgggcgacaagaagagcatgttcaacgaggagctggacctgcccatcgacgacaagctggacaaccagtgcgtgagcgtggagcccaagaagaaggagcaggagaacaagaccctggtgctgagcgacaagcacagcccccagaagaagagcaccgtgaccaacgaggtgaagaccgaggtgctgagccccaacagcaaggtggagagcaagtgcgagaccgagaagaacgacgagaacaaggacaacgtggacaccccctgcagccaggccagcgcccacagcgacctgaacgacggcgagaagaccagcctgcacccctgcgaccccgacctgttcgagaagagaaccaacagagagaccgccggccccagcgccaacgtgatccaggccagcacccagctgcccgcccaggacgtgatcaacagctgcggcatcaccggcagcacccccgtgctgagcagcctgctggccaacgagaagagcgacaacagcgacatcagacccagcggcagcccccccccccccaccctgcccgccagccccagcaaccacgtgagcagcctgccccccttcatcgccccccccggcagagtgctggacaacgccatgaacagcaacgtgaccgtggtgagcagagtgaaccacgtgttcagccagggcgtgcaggtgaaccccggcctgatccccggccagagcaccgtgaaccacagcctgggcaccggcaagcccgccacccagaccggcccccagaccagccagagcggcaccagcagcatgagcggcccccagcagctgatgatcccccagaccctggcccagcagaacagagagagacccctgctgctggaggagcagcccctgctgctgcaggacctgctggaccaggagagacaggagcagcagcagcagagacagatgcaggccatgatcagacagagaagcgagcccttcttccccaacatcgacttcgacgccatcaccgaccccatcatgaaggccaagatggtggccctgaagggcatcaacaaggtgatggcccagaacaacctgggcatgccccccatggtgatgagcagattccccttcatgggccaggtggtgaccggcacccagaacagcgagggccagaacctgggcccccaggccatcccccaggacggcagcatcacccaccagatcagcagacccaacccccccaacttcggccccggcttcgtgaacgacagccagagaaagcagtacgaggagtggctgcaggagacccagcagctgctgcagatgcagcagaagtacctggaggagcagatcggcgcccacagaaagagcaagaaggccctgagcgccaagcagagaaccgccaagaaggccggcagagagttccccgaggaggacgccgagcagctgaagcacgtgaccgagcagcagagcatggtgcagaagcagctggagcagatcagaaagcagcagaaggagcacgccgagctgatcgaggactacagaatcaagcagcagcagcagtgcgccatggccccccccaccatgatgcccagcgtgcagccccagccccccctgatccccggcgccaccccccccaccatgagccagcccaccttccccatggtgccccagcagctgcagcaccagcagcacaccaccgtgatcagcggccacaccagccccgtgagaatgcccagcctgcccggctggcagcccaacagcgcccccgcccacctgcccctgaacccccccagaatccagccccccatcgcccagctgcccatcaagacctgcacccccgcccccggcaccgtgagcaacgccaacccccagagcggccccccccccagagtggagttcgacgacaacaaccccttcagcgagagcttccaggagagagagagaaaggagagactgagagagcagcaggagagacagagaatccagctgatgcaggaggtggacagacagagagccctgcagcagagaatggagatggagcagcacggcatggtgggcagcgagatcagcagcagcagaaccagcgtgagccagatccccttctacagcagcgacctgccctgcgacttcatgcagcccctgggccccctgcagcagagcccccagcaccagcagcagatgggccaggtgctgcagcagcagaacatccagcagggcagcatcaacagccccagcacccagaccttcatgcagaccaacgagagaagacaggtgggcccccccagcttcgtgcccgacagccccagcatccccgtgggcagccccaacttcagcagcgtgaagcagggccacggcaacctgagcggcaccagcttccagcagagccccgtgagacccagcttcacccccgccctgcccgccgccccccccgtggccaacagcagcctgccctgcggccaggacagcaccatcacccacggccacagctaccccggcagcacccagagcctgatccagctgtacagcgacatcatccccgaggagaagggcaagaagaagagaaccagaaagaagaagagagacgacgacgccgagagcaccaaggcccccagcaccccccacagcgacatcaccgccccccccacccccggcatcagcgagaccaccagcacccccgccgtgagcacccccagcgagctgccccagcaggccgaccaggagagcgtggagcccgtgggccccagcacccccaacatggccgccggccagctgtgcaccgagctggagaacaagctgcccaacagcgacttcagccaggccacccccaaccagcagacctacgccaacagcgaggtggacaagctgagcatggagacccccgccaagaccgaggagatcaagctggagaaggccgagaccgagagctgccccggccaggaggagcccaagctggaggagcagaacggcagcaaggtggagggcaacgccgtggcctgccccgtgagcagcgcccagagccccccccacagcgccggcgcccccgccgccaagggcgacagcggcaacgagctgctgaagcacctgctgaagaacaagaagagcagcagcctgctgaaccagaagcccgagggcagcatctgcagcgaggacgactgcaccaaggacaacaagctggtggagaagcagaaccccgccgagggcctgcagaccctgggcgcccagatgcagggcggcttcggctgcggcaaccagctgcccaagaccgacggcggcagcgagaccaagaagcagagaagcaagagaacccagagaaccggcgagaaggccgcccccagaagcaagaagagaaagaaggacgaggaggagaagcaggccatgtacagcagcaccgacaccttcacccacctgaagcagcagaacaacctgagcaacccccccaccccccccgccagcctgccccccacccccccccccatggcctgccagaagatggccaacggcttcgccaccaccgaggagctggccggcaaggccggcgtgctggtgagccacgaggtgaccaagaccctgggccccaagcccttccagctgcccttcagaccccaggacgacctgctggccagagccctggcccagggccccaagaccgtggacgtgcccgccagcctgcccacccccccccacaacaaccaggaggagctgagaatccaggaccactgcggcgacagagacacccccgacagcttcgtgcccagcagcagccccgagagcgtggtgggcgtggaggtgagcagataccccgacctgagcctggtgaaggaggagccccccgagcccgtgcccagccccatcatccccatcctgcccagcaccgccggcaagagcagcgagagcagaagaaacgacatcaagaccgagcccggcaccctgtacttcgccagccccttcggccccagccccaacggccccagaagcggcctgatcagcgtggccatcaccctgcaccccaccgccgccgagaacatcagcagcgtggtggccgccttcagcgacctgctgcacgtgagaatccccaacagctacgaggtgagcagcgcccccgacgtgcccagcatgggcctggtgagcagccacagaatcaaccccggcctggagtacagacagcacctgctgctgagaggccccccccccggcagcgccaacccccccagactggtgagcagctacagactgaagcagcccaacgtgcccttcccccccaccagcaacggcctgagcggctacaaggacagcagccacggcatcgccgagagcgccgccctgagaccccagtggtgctgccactgcaaggtggtgatcctgggcagcggcgtgagaaagagcttcaaggacctgaccctgctgaacaaggacagcagagagagcaccaagagagtggagaaggacatcgtgttctgcagcaacaactgcttcatcctgtacagcagcaccgcccaggccaagaacagcgagaacaaggagagcatccccagcctgccccagagccccatgagagagacccccagcaaggccttccaccagtacagcaacaacatcagcaccctggacgtgcactgcctgccccagctgcccgagaaggccagcccccccgccagcccccccatcgccttcccccccgccttcgaggccgcccaggtggaggccaagcccgacgagctgaaggtgaccgtgaagctgaagcccagactgagagccgtgcacggcggcttcgaggactgcagacccctgaacaagaagtggagaggcatgaagtggaagaagtggagcatccacatcgtgatccccaagggcaccttcaagcccccctgcgaggacgagatcgacgagttcctgaagaagctgggcaccagcctgaagcccgaccccgtgcccaaggactacagaaagtgctgcttctgccacgaggagggcgacggcctgaccgacggccccgccagactgctgaacctggacctggacctgtgggtgcacctgaactgcgccctgtggagcaccgaggtgtacgagacccaggccggcgccctgatcaacgtggagctggccctgagaagaggcctgcagatgaagtgcgtgttctgccacaagaccggcgccaccagcggctgccacagattcagatgcaccaacatctaccacttcacctgcgccatcaaggcccagtgcatgttcttcaaggacaagaccatgctgtgccccatgcacaagcccaagggcatccacgagcaggagctgagctacttcgccgtgttcagaagagtgtacgtgcagagagacgaggtgagacagatcgccagcatcgtgcagagaggcgagagagaccacaccttcagagtgggcagcctgatcttccacaccatcggccagctgctgccccagcagatgcaggccttccacagccccaaggccctgttccccgtgggctacgaggccagcagactgtactggagcaccagatacgccaacagaagatgcagatacctgtgcagcatcgaggagaaggacggcagacccgtgttcgtgatcagaatcgtggagcagggccacgaggacctggtgctgagcgacatcagccccaagggcgtgtgggacaagatcctggagcccgtggcctgcgtgagaaagaagagcgagatgctgcagctgttccccgcctacctgaagggcgaggacctgttcggcctgaccgtgagcgccgtggccagaatcgccgagagcctgcccggcgtggaggcctgcgagaactacaccttcagatacggcagaaaccccctgatggagctgcccctggccgtgaaccccaccggctgcgccagaagcgagcccaagatgagcgcccacgtgaagagattcgtgctgagaccccacaccctgaacagcaccagcaccagcaagagcttccagagcaccgtgaccggcgagctgaacgccccctacagcaagcagttcgtgcacagcaagagcagccagtacagaaagatgaagaccgagtggaagagcaacgtgtacctggccagaagcagaatccagggcctgggcctgtacgccgccagagacatcgagaagcacaccatggtgatcgagtacatcggcaccatcatcagaaacgaggtggccaacagaaaggagaagctgtacgagagccagaacagaggcgtgtacatgttcagaatggacaacgaccacgtgatcgacgccaccctgaccggcggccccgccagatacatcaaccacagctgcgcccccaactgcgtggccgaggtggtgaccttcgagagaggccacaagatcatcatcagcagcagcagaagaatccagaagggcgaggagctgtgctacgactacaagttcgacttcgaggacgaccagcacaagatcccctgccactgcggcgccgtgaactgcagaaagtggatgaactag

SEQ ID NO: 246948 - protein, 298 aa, Artificial Sequence
  derived and/or modified sequence
MTEPGASPEDPWVKASPVGAHAGEGRAGRARARRGAGRRGASLLSPKSPTLSVPRGCREDSSHPACAKVEYAYSDNSLDPGLFVESTRKGSVVSRANSIGSTSASSVPNTDDEDSDYHQEAYKESYKDRRRRAHTQAEQKRRDAIKRGYDDLQTIVPTCQQQDFSIGSQKLSKAIVLQKTIDYIQFLHKEKKKQEEEVSTLRKDVTALKIMKVNYEQIVKAHQDNPHEGEDQVSDQVKFNVFQGIMDSLFQSFNASISVASFQELSACVFSWIEEHCKPQTLREIVIGVLHQLKNQLY

SEQ ID NO: 246949 - DNA, 897 bp, Artificial Sequence
  derived and/or modified sequence
atgactgagccaggggccagcccggaagatccttgggtcaaagcaagcccagtcggtgctcacgcaggggaaggccgcgctgggagagcacgggccaggcgcggagcaggccgcagaggcgccagtctcctgtctcctaagtctcccactctgtccgtgccccgaggctgccgtgaagactcgagccatccagcctgcgccaaggtcgagtacgcttacagtgataatagtttagacccggggttgttcgttgaaagcacacggaaaggaagcgtcgtgagtcgcgctaattctatcggcagcacaagtgctagctcggtaccaaacactgacgatgaggatagtgactatcatcaagaagcctacaaggaatcctataaagatcgcaggcggagggcccatacccaggccgaacagaagcgccgcgacgctataaagagaggctatgacgatctgcagaccatagtgccaacgtgtcagcagcaagatttctccatcggatcccagaagctgagcaaagccatcgtgttgcagaagaccatcgactacatccagttcctgcataaggagaaaaagaaacaggaggaggaagtgtccacccttcgtaaggacgtaaccgccctcaagatcatgaaagtgaactatgaacaaatcgttaaagcacaccaggacaatccacacgaaggagaggaccaggtgtcagatcaagtgaaatttaatgtctttcaggggattatggatagtctgtttcaaagttttaacgcttccattagcgtagcaagcttccaggagttaagtgcctgtgtctttagctggatagaggaacactgcaaaccccagactctgagggaaatcgtgatcggggttctgcaccagctcaaaaaccaactgtattag

SEQ ID NO: 246950 - DNA, 897 bp, Artificial Sequence
  derived and/or modified sequence
atgacagagcccggggccagccctgaggacccctgggtgaaggccagccctgtgggcgcccacgccggggagggccgggccggccgggcccgggccaggagaggagctggccggcggggggccagcctgctgagccccaagagccccaccctgtctgtgccccggggctgccgggaggacagcagccacccagcctgtgccaaggtggagtatgcctacagcgacaacagcctggaccccggcctgtttgtggagagcaccaggaaaggatctgtggtgtcccgggccaacagcatcggcagcaccagcgccagctctgtgcccaacacagatgatgaagattctgactaccaccaggaggcctacaaggagagctacaaggacagaagaagaagagcccacacccaggccgagcagaagagaagagatgccatcaagaggggctatgatgacctgcagaccatcgtgcccacctgccagcagcaggacttcagcatcggcagccagaagctgagcaaggccatcgtgctgcagaagaccatcgactacatccagttcctgcacaaggagaagaagaagcaggaggaggaggtgtccaccctgaggaaggatgtgacagccctgaagatcatgaaggtgaactatgagcagatcgtgaaggcccaccaggacaacccccatgaaggagaggaccaggtgtctgaccaggtgaagttcaacgtgttccagggcatcatggacagcctcttccagagcttcaatgccagcatctctgtggccagcttccaggagctgagcgcctgtgtgttctcctggattgaggagcactgcaagccccagaccctgcgggagatcgtgattggagtgctgcaccagctgaagaaccagctgtactag

SEQ ID NO: 246951 - DNA, 2561 bp, Artificial Sequence
  derived and/or modified sequence
cgccacccgcttcctcgccgcagggggcccgcccgctggcccgtttccggtccggtgggtacaagatgacggagccgggcgcctctcccgaggacccttgggtcaaggcaagccccgtgggcgcgcacgccggcgaggggagggcgggtcgggctcgtgcacgtaggggggccggaagacgaggggcttccctcctgtccccaaagtcccccacgctctccgtgccccggggctgcagagaagacagctctcaccccgcgtgtgccaaggtggagtatgcctacagcgacaacagcctggaccccgggctttttgtagaaagcacccgcaaggggagtgtagtgtccagagctaatagcatcggttccaccagtgcctcttctgtccccaacacagatgatgaggacagtgattaccaccaggaggcctacaaggagtcctacaaagaccggcggcggcgcgcacacactcaggctgagcagaagaggagggacgccatcaagagaggctatgatgaccttcagaccatcgtccccacttgccagcagcaggacttctccattggctcccaaaagctcagcaaagccatcgttctacaaaagaccattgactacattcagtttttgcacaaggagaagaaaaagcaggaggaggaggtgtccacgttacgcaaggatgtcaccgccctaaagatcatgaaagtgaactatgagcagattgtgaaggcacaccaggacaacccccatgaaggggaggaccaggtctctgaccaggtcaagttcaacgtgtttcaaggcatcatggattccctgttccagtccttcaatgcctccatctcagtggccagcttccaggagctgtcagcgtgtgtcttcagctggatcgaggagcactgtaagcctcagaccctgcgggagattgtgattggcgtcctgcaccaattgaaaaaccagctttactgaccggttcttggaaacctggagaacagccaacaagaggcccttgaatctctacgtggccactgaactgctgggcccgggagactggactacaacacctcacactggtcagctggtttctacttggtgtttggtttttcccagccccattttatcttcagcggagccgcggtgtttgttttgtgaaagcttctgattaatttattatattgacgataaaactcaaacctacccagccttccccccactccatggaagtccttgggatgggcgtctgctctggacaccccaaagagctcctgccctctcagccctttattcaagcctcagatttctgctcatgatctacatagatttggaaactgttttcctctgttttggtctcttgggcaacatttttggcccaagtttgggcaacatttggcccaagtttgggcattttggcagtagctgtatgggagaaaaagagtaagaggaaatattcccacagccatgaagggtgaaagggcaccttgtgcctagactagggctgcctggtcagtcccaggtgaggccaagggctttctggccatctcagggaggggccaccaggttcctcccctcaccccatattccatcaccttcctcctctgctctgggtggtaagggaagccctcccggttcccacaggctatgatgctgcatggcagaggcaggtataacacagcactacatattggaaattttttatttttctaaataccaatgcagttttgctacggttacaattttgaaatattaactgagcctcaaaatcaccctttctgtcaagcatatcttggcctctcccatgtctcagtgttgcctgcatttctcccaggacttgggggtggggtgaaaagcgtacaaaagatacttaaaagggctcctggggtacacaagcccagcaggtcctgagtgaagccgtgggccctccaaatgctcgttttatagcaacctctctctaccctagttctccaaattcacttctgccttcctcaggtttgatatctggcaggtttgactatccagaggaaattaaatatttttatataaaattaaattataataaatattgccaaatgctttcctttagcattgttccaagtctaaatgttaacctcaagctactgcaatttagacaatgaaatgggctgggtctacccccagccaccagccctcatcctctctacccagtgctctggtttatgcttgtctcctgactgctctgcttaaaggtgaaagtagcaggaacaacaacaaaagccaaccaaaaacaaggtagccagtgcaagacatctcactcttctgacatcctgcagtccccaccagtcctgaccgtgggcccctcaggggtctgggagtgtgacgttgtaatcttcatccgtctctatcccaacttcctcctgtgagacagggagacaagtgaatgagatgtcaccaggataagaccacagggaagcaaagaaggaagagagctccacttacaaagaactgcttcttgctcttggggtatccttcaagtattgcatcagacagctctgtagcctgacaagaaataaaaccacccgttttcagatgggc

SEQ ID NO: 246952 - DNA, 897 bp, Artificial Sequence
  derived and/or modified sequence
atgaccgagcccggcgccagccccgaggacccctgggtgaaggcctctcctgttggggctcacgccggggaggggagggctggtagggctagagcacgtaggggggctggtagaaggggagcgtccctgctatccccaaaatcacctaccctgagcgtgcccagaggctgtagagaagacagcagtcaccctgcctgcgccaaggtcgagtacgcttacagcgataattctttagatcccgggttattcgtcgagagcacacgaaaaggcagcgttgtgtcaagagcaaattcgatagggtcgacatctgcgtcctcagttcccaataccgatgatgaggacagtgactatcatcaggaggcttataaggaatcctacaaagatcgccgcagacgcgcgcatacccaggctgagcaaaagaggcgggacgcaatcaaaagagggtacgacgatttgcaaacaattgttccaacctgtcagcagcaggatttctccattggttcgcagaagctttccaaggccatcgtgctccagaagactattgattacatccagtttctgcacaaggaaaagaaaaagcaggaagaggaagtctcgacattgagaaaggatgtaaccgcactgaagattatgaaagtgaattacgagcagattgttaaagctcatcaggacaatcctcatgagggagaggatcaagtgtccgaccaggttaaattcaacgtattccaaggaataatggactccttgttccagtccttcaacgcatccatttccgtggctagcttccaggagctgtctgcctgtgtctttagttggatcgaagaacattgcaaaccacagacccttagagagatagtgattggagtgcttcaccagctcaagaaccagctgtattag

SEQ ID NO: 246953 - DNA, 897 bp, Artificial Sequence
  derived and/or modified sequence
atgaccgaacccggtgccagccctgaagatccatgggtgaaggctagccctgtcggggctcacgctggggaggggagagctggcagagcacgcgcacggaggggagcgggacgtcgaggcgcttccttactatctcctaaatcaccaaccctcagcgtgcctagaggatgccgggaagactcctcacaccctgcatgcgccaaagtggaatacgcttacagcgacaactctttagatcccggactattcgtggagtctacccgtaaggggtcagttgtgtcccgggcaaacagtataggatctacgtcagcgtcctccgtccccaacacagacgacgaggattctgactatcaccaggaggcctataaggaatcttacaaagaccgccgtagaagagctcacacacaggctgagcagaaaagaagggatgcgattaagcggggttacgacgacctacagactatagtccctacttgtcagcagcaggatttctccattggctcccaaaagctaagcaaggccatcgtcctccagaaaaccatcgattacatccagttcctgcacaaggaaaagaagaagcaggaagaggaggttagcaccctccggaaagatgtaaccgccttgaaaatcatgaaggttaactatgagcaaattgtgaaggcacatcaggacaacccccacgagggtgaggaccaggtgagtgaccaggtgaaattcaatgtttttcagggcattatggactcccttttccagtcgttcaatgcatcaatatctgtagcttcattccaggaactgtccgcctgcgtattctcttggattgaggagcactgtaaaccacagactcttagggaaatcgtgataggcgtgcttcaccagttaaagaatcaattgtactag

SEQ ID NO: 246954 - DNA, 897 bp, Artificial Sequence
  derived and/or modified sequence
atgaccgagcccggcgccagccccgaggacccctgggtgaaggccagccccgtgggcgcccacgccggcgagggcagagccggcagagccagagccagaagaggcgccggcagaagaggcgccagcctgctgagccccaagagccccaccctgagcgtgcccagaggctgcagagaggacagcagccaccccgcctgcgccaaggtggagtacgcctacagcgacaacagcctggaccccggcctgttcgtggagagcaccagaaagggcagcgtggtgagcagagccaacagcatcggcagcaccagcgccagcagcgtgcccaacaccgacgacgaggacagcgactaccaccaggaggcctacaaggagagctacaaggacagaagaagaagagcccacacccaggccgagcagaagagaagagacgccatcaagagaggctacgacgacctgcagaccatcgtgcccacctgccagcagcaggacttcagcatcggcagccagaagctgagcaaggccatcgtgctgcagaagaccatcgactacatccagttcctgcacaaggagaagaagaagcaggaggaggaggtgagcaccctgagaaaggacgtgaccgccctgaagatcatgaaggtgaactacgagcagatcgtgaaggcccaccaggacaacccccacgagggcgaggaccaggtgagcgaccaggtgaagttcaacgtgttccagggcatcatggacagcctgttccagagcttcaacgccagcatcagcgtggccagcttccaggagctgagcgcctgcgtgttcagctggatcgaggagcactgcaagccccagaccctgagagagatcgtgatcggcgtgctgcaccagctgaagaaccagctgtactag

SEQ ID NO: 246955 - protein, 178 aa, Artificial Sequence
  derived and/or modified sequence
MEIKHLLFLVAAACLLPMLSMKKKSARDQFNKLVTDLPNVQEEIVNIHNALRRRVVPPASNMLKMSWSEEAAQNARIFSKYCDMTESNPLERRLPNTFCGENMHMTSYPVSWSSVIGVWYSESTSFKHGEWTTTDDDITTDHYTQIVWATSYLIGCAIASCRQQGSPRYLYVCHYCHD

SEQ ID NO: 246956 - DNA, 537 bp, Artificial Sequence
  derived and/or modified sequence
atggaaataaagcatctcctgttcctggtggcagctgcctgcttgcttcctatgttgtctatgaagaagaaatcagcaagagaccagtttaacaaactggtcacagacctacccaatgtgcaggaggagattgtcaatattcacaacgccctccggcggagggtggtgccacctgcctcaaacatgctgaagatgagctggtccgaggaggcagcacagaacgctaggatatttagtaaatattgcgacatgactgagagcaaccctctggagagaaggctcccaaataccttctgtggcgagaacatgcatatgaccagctatcccgtcagctggagcagcgtcatcggcgtctggtacagtgagtccacctctttcaaacacggagagtggacgactaccgatgacgacatcacaaccgaccactacacacaaattgtgtgggccacttcttaccttatcggctgtgctattgcgagttgtagacaacaaggatcaccaaggtacctttacgtgtgtcattattgccatgattag

SEQ ID NO: 246957 - DNA, 537 bp, Artificial Sequence
  derived and/or modified sequence
atggagataaagcatctcctttttctggtcgcagcagcatgtctgctgccgatgttaagcatgaagaagaaaagtgcccgcgaccagttcaataagctcgtgaccgaccttcctaacgtacaagaagaaatcgtcaacatccataacgctctgagacgcagggttgttccaccggcctctaatatgttgaaaatgtcctggtctgaggaagccgctcaaaatgctaggatcttctcgaagtactgcgatatgacagaatccaatccacttgagcggaggctgcccaataccttttgtggggagaatatgcacatgacgagctatcccgtttcctggagctcagtgattggagtgtggtactccgagtctacctcctttaaacatggggaatggacaactaccgatgacgatattaccacggatcattatactcagatcgtatgggccacctcatacctgattggctgcgcaattgcaagctgccgccagcagggctcacctcggtacctgtacgtttgtcattattgtcacgactag

SEQ ID NO: 246958 - DNA, 537 bp, Artificial Sequence
  derived and/or modified sequence
atggagataaaacacttgttgtttttagtggctgcagcatgtctgctgccaatgttgagcatgaagaagaagagtgcacgagaccagttcaacaaactagtgactgatctgcctaatgtacaagaggaaattgtgaacattcataatgccttgcgtagaagagtggtgccacccgctagcaatatgctcaaaatgagctggtctgaagaggccgcacagaacgctagaatcttttccaaatactgcgatatgacagaatctaatcccttagaaagaaggctgccaaacacattctgtggggaaaacatgcacatgacttcttaccccgtcagttggtcttctgtcatcggggtgtggtattccgaatccacctctttcaaacacggagaatggacaacaacggatgatgatatcacaaccgatcattatacacaaatcgtgtgggcaacttcctatttgatcggttgcgctatcgccagttgccgccaacagggctccccacggtacctgtacgtctgtcattattgtcacgactag

SEQ ID NO: 246959 - DNA, 537 bp, Artificial Sequence
  derived and/or modified sequence
atggagatcaagcacctgctcttcctggtggccgccgcctgcctgctgcccatgctgtccatgaagaagaagagcgcccgggaccagttcaacaagctggtgacagacctgcccaacgtgcaggaggagatcgtgaacatccacaatgccctgcggaggagagtggtgcccccagccagcaacatgctgaagatgtcctggagcgaggaggccgcccagaatgcccgcatcttcagcaagtactgtgacatgacagagagcaaccccctggagcggcggctgcccaacaccttctgtggggagaacatgcacatgaccagctaccctgtgtcctggagcagcgtcatcggcgtgtggtacagcgagagcaccagcttcaagcacggggagtggaccaccacagatgatgacatcaccacagaccactacacccagatcgtgtgggccaccagctacctgattggctgtgccatcgccagctgccggcagcagggcagcccccgctacctgtatgtgtgccactactgccacgactag

SEQ ID NO: 246960 - DNA, 537 bp, Artificial Sequence
  derived and/or modified sequence
atggagatcaagcacctgctgttcctggtggccgccgcctgcctgctgccaatgctgtctatgaaaaaaaaaagtgctcgggatcagttcaataaactggtcacagaccttcccaatgttcaggaggagatcgtgaacattcacaacgctctgcgaaggagggtagtgccacctgccagcaatatgcttaaaatgtcttggtcagaggaagccgctcagaacgctaggatattctctaaatactgcgacatgaccgaaagtaatcctctggaaagacgccttcctaacactttctgtggagagaatatgcacatgacctcttatcccgtgtcctggtccagcgtgataggggtgtggtacagcgagtcaacatcattcaagcacggtgaatggacaacaacagatgacgatattacgactgatcactacacgcagatcgtttgggctaccagttacttgattggctgtgctatcgcaagctgtcggcagcagggcagtcctagatatctgtatgtatgccactattgccatgattag

SEQ ID NO: 246961 - DNA, 537 bp, Artificial Sequence
  derived and/or modified sequence
atggagatcaagcacctgctgttcctggtggccgccgcctgcctgctccccatgctgtcgatgaaaaagaaatcagcccgggaccagttcaacaagctggttacggacctgcccaatgtccaggaggaaatcgtgaacatccataatgccttgcgcaggcgggtggtccccccagcttccaatatgctgaagatgtcttggtccgaagaggccgcccaaaatgccagaatcttctccaagtattgcgacatgactgagtcgaacccattagagaggaggctgcctaacacattttgtggcgaaaatatgcatatgacgtcataccctgtgtcctggagctcagtgattggagtatggtatagcgaatccacaagttttaagcatggcgagtggaccacgacagatgacgatattacaaccgaccattacacacagatagtatgggctacaagctaccttatagggtgtgcgatcgcgtcatgccgacagcaggggagtcctaggtatctctacgtgtgccactattgtcacgactag

SEQ ID NO: 246962 - DNA, 537 bp, Artificial Sequence
  derived and/or modified sequence
atggagatcaagcacctgctgttcctggtggccgccgcctgcctgctgcccatgttaagcatgaaaaagaagagtgctagagatcagtttaataagctcgtgactgatctgcccaacgtgcaagaagagatcgtgaacatccacaatgcgcttagacgtagggtggtgccccccgcttccaacatgctcaaaatgagttggagcgaagaggccgctcagaatgctcgaattttttcaaagtactgtgatatgacagaaagcaaccctctggaacgccgtttaccaaataccttctgcggcgaaaatatgcatatgacgtcatatcccgtcagctggtcctctgtgattggtgtgtggtacagtgagtcaacatcattcaaacacggagagtggaccactacggacgacgacattacaacagaccactatacccaaatagtttgggctacatcctatttaatcggatgtgcaattgcttcctgtcgtcaacagggctcacctaggtacttgtacgtctgccactattgccacgattag

SEQ ID NO: 246963 - DNA, 537 bp, Artificial Sequence
  derived and/or modified sequence
atggaaataaaacatcttctctttctggtggccgcagcgtgtctcctgccgatgctcagcatgaaaaagaaatccgctcgcgaccagtttaataagctggtcacagatctgcccaacgtgcaggaagaaatcgtcaacatccataacgctcttcgcaggcgcgtagtgccgcctgcctccaacatgctgaagatgagttggtccgaagaggccgctcagaacgccaggattttctccaagtattgcgatatgacagaaagcaatcccttggagcgcagactccccaatacattctgcggtgaaaatatgcacatgacaagctaccccgtttcctggtcatctgtcatcggagtgtggtactccgaaagtacctcttttaagcatggagagtggacaactaccgatgacgacattaccacagatcactacacacaaatagtctgggcaacatcataccttattggttgtgctatcgcatcctgtcgtcagcaagggtcccctaggtacctgtacgtctgccactactgccatgactag

SEQ ID NO: 246964 - DNA, 537 bp, Artificial Sequence
  derived and/or modified sequence
atggaaatcaaacacctgctgtttctagtggccgcagcctgtctgctcccaatgctgtcaatgaaaaaaaagagcgcaagagatcaattcaataaacttgtgactgacctgccaaatgttcaggaggaaattgtgaacatacacaatgccctccgacgcagggtggtgcctccagcctctaacatgctgaaaatgtcctggagcgaagaggccgcacagaacgctcgcatattttccaaatactgcgacatgacggaatcaaaccctcttgagcggaggctgcccaataccttttgcggtgagaacatgcacatgacaagctaccccgtaagctggagctcagtgattggcgtctggtatagcgagtctacctcattcaagcatggagagtggacaaccacagacgacgacattactactgatcactacacacagatcgtgtgggcaacgagttatttaatcggctgcgccattgctagctgcaggcaacagggttctcctcgatacctgtacgtatgtcattactgtcacgattag

SEQ ID NO: 246965 - DNA, 537 bp, Artificial Sequence
  derived and/or modified sequence
atggaaatcaaacacctacttttcctggtggccgcagcgtgcttgctccccatgctgtcaatgaagaaaaaaagtgcaagagaccagtttaacaagttagtgacagaccttccaaacgttcaagaggagattgtgaatatccacaatgcactgagaaggcgtgtggtgccgcctgcttctaacatgctgaaaatgtcctggtcagaggaggcagcccagaacgcaagaattttctctaagtattgcgatatgacagagtctaatccactggagaggaggttgccaaataccttttgtggagaaaacatgcacatgacatcttatccagtaagttggtcttccgtcataggggtctggtactctgaatccacttcctttaaacatggcgagtggaccactaccgatgacgatataaccacggatcactacacccagatcgtgtgggcaactagttatttaatcggatgtgctattgcatcctgcagacaacagggtagtccacgctatctctacgtatgccattattgtcatgattag

SEQ ID NO: 246966 - DNA, 1709 bp, Artificial Sequence
  derived and/or modified sequence
gggatggaaattaaacacctcttgtttttggttgctgctgcttgcttactgcctatgttgtccatgaaaaagaaatcagctagagaccaatttaataagctcgtcaccgacttgccaaatgtacaagaagagatcgttaatatacacaacgccctcaggagaagagtagttccaccagccagcaacatgctgaagatgagttggagtgaagaggctgcacaaaatgccagaattttttcaaagtattgtgatatgacagagagcaacccccttgagaggagacttccaaataccttttgtggagaaaatatgcatatgacatcttatcctgtatcatggtcaagtgtaattggagtctggtacagtgagtctacaagtttcaaacatggagaatggacaacaacggatgatgacataactactgaccactacactcagattgtttgggccacatcttacctgattggctgtgccattgcatcttgccgccaacaaggatcacctcgatatctctacgtttgtcactattgtcatgactaacccctgcatctactatgatgaatacttcgactgtgacatacaagtccattatctgggatgcaaccactcaacaactatcctattctgtaaagccacttgtctgtgtgacactgagataaaataggtctttgttattttcaactgttctatgctgtgacgatgaggaggagatgtctgttggattcatgtcttttgctatagttcagtagcttctgctaaatttcactgattttaatcatgctggagaccttaactcccatcctgatacatcctgaagtaacactgttttaaactttcttagtgctggagtaaaaggtcaagtccaacacctgccttaaatttaaatcatgtgatttatagtttttaagttggcataattcaacttatggtataactgggtccctcaacagtaacctgggctaaaataggtcttatgtggttcaactcccacccccgccttccccatattttcaaccactctgattatcttccctgcacaactaacatccagtaataattcttcacttttaaaattttacttctactttaaatcaatcattaaaggaatccacaaagcaaacagagttcagtctcatcttgcaaggtaaatatcatttaattggaagtagtttaaatgtctcattgttttattgacacatctatatatacatttgtgaagcaagaaacaataaaaaagcttcgtatgccattaatttaacaaaatatgtattcagtactgattgcatacaagatgcatgtttatatatatggaaggaatatagtttcatttcattgcaaaggcagtataaaagatatataaaatagcataatatgagaaattaagtccctaaagacatataggtcacatattattattgccagatgagcataaatagcttctgtttggagattcaggaaagccttagggtggaatgaggaacatcttctgagtaaacagggttgcaaaggttatgattatttcaacacaatggaagagcacagttaaggccaactaacgtaaaatgcactgaagccttagggaatattgaagggcctgacatggggaaagggaaggctaaaaatacttggtcaaattttaacattataccaaagttatacccagttctacctacttgtatatttctttactcatttcaataaagtgtttg

SEQ ID NO: 246967 - DNA, 1204 bp, Artificial Sequence
  derived and/or modified sequence
agtttctttgcagctaccaggacagagcttggtgagataattcttttattcttcaacttttattttaacttcaatggtacatgtgcagggatggaaattaaacacctcttgtttttggttgctgctgcttgcttactgcctatgttgtccatgaaaaagaaatcagctagagaccaatttaataagctcgtcaccgacttgccaaatgtacaagaagagatcgttaatatacacaacgccctcaggagaagagtagttccaccagccagcaacatgctgaagatgagttggagtgaagaggctgcacaaaatgccagaattttttcaaagtattgtgatatgacagagagcaacccccttgagaggagacttccaaataccttttgtggagaaaatatgcatatgacatcttatcctgtatcatggtcaagtgtaattggagtctggtacagtgagtctacaagtttcaaacatggagaatggacaacaacggatgatgacataactactgaccactacactcagattgtttgggccacatcttacctgattggctgtgccattgcatcttgccgccaacaaggatcacctcgatatctctacgtttgtcactattgtcatgactaacccctgcatctactatgatgaatacttcgactgtgacatacaagtccattatctgggatgcaaccactcaacaactatcctattctgtaaagccacttgtctgtgtgacactgagataaaataggtctttgttattttcaactgttctatgctgtgacgatgaggaggagatgtctgttggattcatgtcttttgctatagttcagtagcttctgctaaatttcactgattttaatcatgctggagaccttaactcccatcctgatacatcctgaagtaacactgttttaaactttcttagtgctggagtaaaaggtcaagtccaacacctgccttaaatttaaatcatgtgatttatagtttttaagttggcataattcaacttatggtataactgggtccctcaacagtaacctgggctaaaataggtcttatgtggttcaactcccacccccgccttccccatattttcaaccactctgattatcttccctgcacaactaacatccagtaataattcttcacttttaaaattttacttctactttaaatcaatcattaaaggaatccacaaagc

SEQ ID NO: 246968 - DNA, 537 bp, Artificial Sequence
  derived and/or modified sequence
atggagatcaagcacctgctgttcctggtggccgccgcctgcctgctgcccatgctgagcatgaagaagaagagcgccagagaccagttcaacaagctggtgaccgacctgcccaacgtgcaggaggagatcgtgaacatccacaacgccctgagaagaagagtggtgccccccgccagcaacatgctgaagatgagctggagcgaggaggccgcccagaacgccagaatcttcagcaagtactgcgacatgaccgagagcaaccccctggagagaagactgcccaacaccttctgcggcgagaacatgcacatgaccagctaccccgtgagctggagcagcgtgatcggcgtgtggtacagcgagagcaccagcttcaagcacggcgagtggaccaccaccgacgacgacatcaccaccgaccactacacccagatcgtgtgggccaccagctacctgatcggctgcgccatcgccagctgcagacagcagggcagccccagatacctgtacgtgtgccactactgccacgactag

SEQ ID NO: 246969 - protein, 982 aa, Artificial Sequence [sequence omitted]

SEQ ID NO: 246970 - protein, 139 aa, Artificial Sequence
  derived and/or modified sequence
MANSMNGRNPGGRGGNPRKGRILGIIDAIQDAVGPPKQAAADRRTVEKTWKLMDKVVRLCQNPKLQLKNSPPYILDILPDTYQHLRLILSKYDDNQKLAQLSENEYFKIYIDSLMKKSKRAIRLFKEGKERMYEEQSQD

SEQ ID NO: 246971 - protein, 227 aa, Artificial Sequence
  derived and/or modified sequence
MALAPGPDAHAHLPPLIELKFQMANSMNGRNPGGRGGNPRKGRILGIIDAIQDAVGPPKQAAADRRTVEKTWKLMDKVVRLCQNPKLQLKNSPPYILDILPDTYQHLRLILSKYDDNQKLAQLSENEYFKIYIDSLMKKSKRAIRLFKEGKERMYEEQSQDRTIVPWKVFRQCLHEVHQISSGLEAMALKSTIDLTCNDYISVFEFDIFTRLFQVSDNFTEYLIYLT

SEQ ID NO: 246972 - DNA, 2949 bp, Artificial Sequence
  derived and/or modified sequence
atggcgaattccatgaacggcaggaaccccggcgggcgcggagggaatcccaggaagggccgcatcctcggcattattgatgcaatccaagatgcagtgggaccgcccaagcaggctgctgccgaccgacgaaccgtggaaaagacatggaaactgatggataaagttgtacgcctttgccagaatccaaagctccagctgaagaacagtccgccatacatcttagatatcctgccggatacataccaacacctgcgcctaatcttgtccaaatacgatgacaaccagaagctggctcagctttctgaaaacgagtactttaaaatatatattgactctctgatgaaaaagtctaagcgcgcaattaggctgttcaaggaaggtaaagaacgcatgtacgaggaacaaagtcaggaccggaggaacctcaccaagctgtcgctgattttctcccacatgcttgcggaaataaaggcgatttttccaaatggacaattccagggtgacaactttcggattactaaggctgacgccgcagagttttggcgcaaattttttggagataaaacaatcgtaccctggaaagtgttcaggcaatgcctccatgaggtccaccagatcagctccggcctggaggccatggcgctaaaaagtactattgacctcacctgtaatgattatatctcagtttttgagttcgatatttttacaaggctgttccagccctggggctcaattctgcgtaattggaactttcttgccgtcacccaccccggctatatggctttcctgacgtacgacgaggtgaaagctcgcctccagaaatactctaccaaacccgggtcttacattttccggctgtcctgtactagactggggcagtgggctatcggttatgtcacaggtgacggcaatatcctccagaccatcccccacaacaagcctttatttcaagctctcatcgacggctcccgcgaggggttctacttataccccgatgggcgctcatataatcccgacctcactgggttgtgtgaaccgacaccccatgaccacatcaaggtgacccaagagcagtatgagctgtattgcgaaatggggagtaccttccagctgtgcaaaatctgcgcagaaaacgacaaggatgttaagatcgagccttgcggtcatctaatgtgtacttcctgcctgacagcatggcaagagagcgacggccagggctgccccttctgtaggtgcgagatcaagggcaccgagcctatcatcgtagacccttttgatcctcgggacgagggctctagatgctgctccatcatcgatccatttgggatgcccatgctggacctcgatgacgatgatgatcgagaggaatcgcttatgatgaatagattagccaatgtccgaaaatgcaccgatagacagaatagccctgtgaccagcccaggctcttcgcctttggcccaacgtcggaagccccagcccgatcctctgcagatccctcacctcagtttacctcctgtacccccaagactggacttgattcagaaaggcatagttcgaagtccttgtggctctcctaccgggtcaccgaagtcctccccctgcatggtcaggaagcaagacaaaccactcccagccccacccccccccctccgcgacccaccccccccccccccggaacgccctccgccgatccctcccgacaatcggctctcccggcatattcatcacgtcgagtccgtcccgtcacgtgacccaccaatgccgttagaggcctggtgcccccgcgacgtcttcggcacgaaccagcttgtgggatgtcggctcctaggagagggtagtccgaagcccggaatcacagccagcagcaatgtgaatgggcgccactcacgggtaggctccgatcctgtattgatgaggaagcacagaagacacgacctaccactggagggggcgaaagtctttagcaacggccatctggggtctgaggaatacgatgtgccgccgcgtctgtcgcccccacctccagtaacaaccctgctgccaagtatcaagtgtactggaccgctcgcaaactcactgtcagagaagactcgtgacccggttgaggaggacgacgacgagtacaagatcccttcatcacaccccgtttcgctcaacagtcagccgagtcactgccataatgtgaagcctccggtacgttcctgtgacaacggacactgcatgctcaacgggacccatggaccaagcagcgagaaaaagtcaaatatccccgacctaagcatttaccttaagggcgacgtgtttgactctgccagcgaccccgtgccgcttccacccgctagacccccaactcgtgacaacccgaagcatggctccagcctgaaccgaaccccatcagattatgatcttctgattccacccctgggcgaggatgccttcgacgccctgccgccctctctgcccccgcccccgcctccagctcggcactccttgatcgagcactctaagcccccaggatcatcttccaggcctagtagtggtcaagacttattcctgctgccaagcgaccctttcgtggatcttgcttccggtcaagtgcctctgcctccagcacggagactgcctggggagaacgttaagaccaacaggacttcacaggactatgatcagcttcctagttgctctgacggttcacaggcaccagctaggcccccgaagcctaggccaaggagaacggctcccgaaatacatcaccgcaaaccccatgggcctgaagcagccttagagaatgtggatgccaagattgccaaactcatgggggagggctatgcattcgaagaggtgaaaagagcccttgagatagcccagaacaacgtagaggtggcaagaagcatcctgagagaattcgcttttccccctcctgtgtcaccccggctgaatctgtag

SEQ ID NO: 246973 - DNA, 2313 bp, Artificial Sequence
  derived and/or modified sequence
atggccaattcaatgaatggcaggaacccaggaggtcgcggcgggaaccccaggaaaggcagaattctggggataatcgacgcgatccaggacgctgtcggacctcctaagcaggctgccgccgaccggcgaaccgtcgaaaagacctggaagcttatggacaaagtcgtgaggttgtgtcaaaatcccaaactacaactgaagaactcaccgccatacattctcgatattttgcccgatacatatcagcatctgcggcttatcttgtctaagtacgacgataaccagaaactggcacaactttccgaaaatgaatattttaaaatttacattgattctctcatgaaaaaaagtaaaagagcaatcagacttttcaaagaggggaaggaaaggatgtatgaagagcagtctcaggaccgcaggaacttgaccaagctgtccttgatctttagtcatatgctggccgaaattaaagcaatttttcctaacggacaattccagggggataactttcgaatcaccaaggccgatgccgcggagttctggcgtaagttcttcggggataaaactatcgtgccatggaaggtgtttcgccagtgcttgcatgaggtgcaccagatttcctcagggcttgaggccatggctctcaaaagcactatagatctgacgtgtaacgactacattagcgtatttgagttcgatatctttacgaggctgttccagccatggggaagcattctccgaaactggaacttcctggccgtgacgcacccagggtatatggcctttctcacatacgacgaagtgaaagcccgattgcagaagtactcaaccaaacccggcagttacattttcagactgtcctgtactcggctcggacaatgggctatagggtacgtgactggggatgggaatatcctccagaccattccccacaataagcccctgtttcaagcactgatcgacggcagtcgggagggcttctatctgtaccccgacggacgctcttacaacccagatctgacggggctgtgtgaaccaacaccccacgaccacataaaagttactcaggagcagtacgaactctactgtgagatgggctcaacttttcagttgtgcaaaatatgtgctgagaatgacaaggatgttaagatagaaccctgcggccatcttatgtgcacctcctgcttaactgcgtggcaggagagtgatggacaggggtgccccttctgtagatgtgagattaaggggaccgaaccgattatcgtagacccttttgaccctcgtgatgaagggagtaggtgctgctcgataatcgatccctttggtatgcccatgctagacctagatgatgatgacgaccgggaggagtccctaatgatgaacagattagcgaacgtgagaaagtgtaccgaccggcagaatagcccagtcacctccccagggtcgtctccactggcgcaacgcagaaaacctcagcctgacccactgcaaatcccacacctgtcactgcctcccgtgcccccacgactggacctgatacagaagggcattgtgcggagtccatgcggctcacccacgggcagccctaagagttcaccatgcatggtgaggaagcaggacaaacccttgcctgcccccccaccccctctgcgtgacccaccccctcccccacccgaacggccccctcccatccctcctgataaccgtctaagccggcatattcatcatgtcgagagcgtgccaagtagagatccccctatgcccctggaggcttggtgccccagagatgtatttggaacaaatcagctggtggggtgcagactactcggggaagggtcaccaaagcctgggatcaccgcctccagcaatgtcaacggcagacactcaagggtcggttcagaccccgttctaatgcgcaaacaccggcgccatgacctgcccctggagggtgctaaagtgttttccaatggccatttgggatccgaggaatatgatgtgcctccccgtttaagccctcctcccccggtgaccaccttgttgccatctatcaagtgtaccggcccactggcaaatagcctgtcggaaaagacccgagatcccgtcgaggaggacgacgatgaatacaaaattccttctagccacccagtcagcttgaactcccagcccagccactgtcataatgtgaaaccgccagtcagatcatgcgacaacggtcactgtatgctcaatggaacacatgggccaagttctgaaaaaaaaagcaacattcccgatctgtccatttacctaaagggcacctaccgaatctag

SEQ ID NO: 246974 - DNA, 2433 bp, Artificial Sequence
  derived and/or modified sequence
atggctaactccatgaacggtcggaatcctggcgggaggggaggcaatccgcgtaagggccggattctgggaattatcgacgccattcaagacgccgtggggcctcccaaacaggccgccgctgataggcgtacagtggaaaagacttggaaactgatggacaaggttgtgcgcttgtgccagaatcctaaacttcagctgaaaaattcaccaccatatattctggatatacttcccgacacatatcaacatctgaggctcatcctgtctaagtatgacgacaatcagaaattggcccagctgtccgagaacgagtactttaaaatctacatcgattcgctcatgaagaaaagcaaaagggccatacggctgttcaaggaaggaaaggaaaggatgtatgaggagcagagccaggataggcggaatctgacgaagctgtctctgattttctcacatatgctggctgagatcaaggcaatctttcccaatggtcagtttcagggcgacaacttccggattaccaaagcagacgctgccgaattttggagaaagttcttcggggacaagaccatagtgccttggaaggtgttcaggcagtgcctccatgaggtccatcaaattagttccgggctcgaggccatggctctgaaatcaactatcgatcttacctgcaacgattatatatcagtcttcgagtttgacatctttacacgcctatttcagccatggggctcaatcctaaggaattggaactttctggccgttactcacccagggtatatggctttcttgacctacgatgaagtgaaggcaagactacagaagtactctacaaaaccaggttcctatatctttcgcctgagttgtacccgcttaggacaatgggcaatcgggtatgtgaccggagacggcaatatactgcaaacgattcctcacaacaagccattgtttcaggccttgattgacggcagtagagaaggcttttatttgtaccccgacggacgctcctacaatcccgatctaaccggactatgcgagcctacaccgcatgatcacatcaaggtcacgcaagagcaatacgagctgtattgcgagatgggatccactttccagctgtgcaagatctgcgccgagaacgacaaggacgtcaaaattgagccctgcgggcacctgatgtgcacgtcctgcttgaccgcgtggcaggagagtgatggccagggatgccccttttgtaggtgtgaaattaagggcacggaacctattattgttgatcctttcgatcctagggatgaggggtctagatgttgctcaattattgatccttttggaatgccgatgctggacctggacgacgatgacgatagagaagaaagtcttatgatgaataggctcgctaacgttaggaagtgtaccgaccggcagaatagtccagtgacgagcccgggcagctcccccctggcccagaggagaaagccacaacccgacccgttgcagataccacacctttccctgccccctgtacccccaaggctagatctgatccagaagggcatagtgagatcaccatgcggcagtcctaccggaagcccaaagtcttccccgtgcatggtgaggaagcaggacaaacctctacccgctcctccaccgccccttcgcgaccctcctcctcctccacccgagcgcccaccgccaatcccccccgataatagactttctcggcacattcatcacgtagagtcagtgcccagccgcgacccaccaatgccattggaagcctggtgccctcgcgatgtgttcggaactaaccagctggtggggtgtcggctgctgggagagggttcgcctaagcccggaatcactgcttcttctaacgtgaatggcagacacagccgcgtgggctcagaccctgtactcatgagaaaacataggcggcacgacttacctctcgaaggagcaaaggtgttcagtaacggccacttaggaagcgaggaatacgacgtgccgcctcgcttatccccaccgccgcccgtgaccacccttttacccagcatcaaatgcacaggtccactggccaattcactgtctgagaagacccgggatcccgtggaggaggatgacgacgaatacaagattccaagcagccatccggtcagcttgaattcacagcccagtcattgccataatgtgaagcctcctgtgcgctcttgtgataacggtcattgtatgctaaacgggacccacggcccctcatccgaaaagaagagcaacatacccgatctcagcatctatcttaaaggcgacgtgttcgactcagcctcggatcccgttcctctgcctcccgcccggccaccaactagagacaatcccaagcatggaagttcactcaaccggaccccatctgattacgaccttctgatcccacctctgggctag

SEQ ID NO: 246975 - DNA, 2949 bp, Artificial Sequence
  derived and/or modified sequence
atggccaacagcatgaatggaagaaatcctgggggccggggcggcaaccccaggaagggccgcatcctgggcatcattgatgccatccaggatgctgtgggcccccccaagcaggccgctgctgacagaagaacagtggagaagacctggaagctgatggacaaggtggtgcggctgtgccagaaccccaagctgcagctgaagaacagccccccctacatcctggacatcctgcctgacacctaccagcacctgcggctcatcctgagcaaatatgatgacaaccagaagctggcccagctgtctgaaaatgagtacttcaagatctacatcgacagcctgatgaagaagagcaagagggccatccgcctcttcaaggagggcaaggagaggatgtatgaggagcagagccaggacagaagaaacctgaccaagctgagcctcatcttcagccacatgctggccgagatcaaggccatcttccccaacggccagttccagggcgacaacttccgcatcaccaaggcagatgctgctgagttctggaggaagttcttcggggacaagaccatcgtgccctggaaggtgttccggcagtgcctgcacgaggtgcaccagatcagcagcggcctggaggccatggccctgaagagcaccatcgacctgacctgcaatgactacatctctgtgtttgaatttgacatcttcaccaggctcttccagccctggggcagcatcctgaggaactggaacttcctggccgtgacccaccctggctacatggccttcctgacctatgatgaggtgaaggcccggctgcagaagtacagcaccaagccaggcagctacatcttccggctgagctgcacccggctgggccagtgggccatcggctacgtgactggagatggcaacatcctgcagaccatcccccacaacaagcccctcttccaggccctgattgatggcagccgggagggcttctacctgtacccagatggccgcagctacaacccagacctgaccggcctgtgtgagcccacccctcatgaccacatcaaggtgacccaggagcagtatgagctgtactgtgagatgggcagcaccttccagctgtgcaagatctgtgccgagaatgacaaggatgtgaagattgagccctgtggccacctgatgtgcaccagctgcctgacagcctggcaggagagtgatggccagggctgccccttctgccgctgtgagatcaagggcacagagcccatcatcgtggacccctttgaccccagagatgagggcagccgctgctgcagcatcatcgaccccttcggcatgcccatgctggacctggatgatgatgatgaccgggaggagagcctgatgatgaaccggctggccaacgtgaggaaatgtacagaccggcagaacagccctgtgaccagccctggcagcagccccctggcccagaggaggaagccccagcctgaccccctgcagatcccccacctgagcctgccccctgtgcccccccggctggacctgatccagaagggcatcgtgcgcagcccctgtggcagccccaccggcagccccaagagcagcccctgcatggtgaggaagcaggacaagcccctgcctgcccctcctccacccctgcgggaccccccacctcctcctcctgagcggcccccacccatccccccagacaaccggctgagccgccacatccaccacgtggagagcgtgcccagccgggacccccccatgcccctggaggcctggtgccccagagatgtgtttggcaccaaccagctggtgggctgccgcctgctgggggagggcagccccaagccaggcatcacagccagcagcaatgtgaatggccgccacagccgggtgggcagtgaccctgtgctgatgaggaagcacagaagacatgacctgcccctggagggcgccaaggtgttcagcaatggccacctgggcagcgaggagtatgatgtgcccccccggctgagccccccacctcctgtgaccaccctgctgcccagcatcaagtgcaccggccccctggccaacagcctgtctgagaagacccgggaccctgtggaggaggatgatgatgagtacaagatccccagcagccaccctgtgtccctgaacagccagcccagccactgccacaacgtgaagccccctgtgcgcagctgtgacaatggccactgcatgctgaatggcacccacggccccagcagcgagaagaagagcaacatcccagacctgagcatctacctgaagggagatgtgtttgattctgccagtgaccctgtgcccctgcccccagcccggccccccacccgggacaaccccaagcacggcagcagcctgaacagaacacccagcgactatgacctgctgatcccccccctgggagaagatgcctttgatgccctgccccccagcctgcccccacctcctcctccagcccggcacagcctgattgagcacagcaagcccccaggcagcagcagccggcccagcagcggccaggacctcttcctgctgcccagcgacccctttgtggacctggccagcggccaggtgcccctgcccccagcccggcggctgcccggggagaatgtgaagaccaacagaaccagccaggactatgaccagctgcccagctgcagtgatggcagccaggccccagcccggccccccaagccccggcccaggagaacagcccctgagatccaccacaggaagccccacggccctgaggccgccctggagaatgtggatgccaagatcgccaagctgatgggagagggctacgcctttgaggaggtgaagagggccctggagatcgcccagaacaacgtggaggtggcccggagcatcctgcgggagtttgccttccccccacctgtgagcccccggctgaacctgtag

SEQ ID NO: 246976 - DNA, 2313 bp, Artificial Sequence
  derived and/or modified sequence
atggccaacagcatgaatggaagaaatcctgggggccggggcggcaaccccaggaagggccgcatcctgggcatcattgatgccatccaggatgctgtgggcccccccaagcaggccgctgctgacagaagaacagtggagaagacctggaagctgatggacaaggtggtgcggctgtgccagaaccccaagctgcagctgaagaacagccccccctacatcctggacatcctgcctgacacctaccagcacctgcggctcatcctgagcaaatatgatgacaaccagaagctggcccagctgtctgaaaatgagtacttcaagatctacatcgacagcctgatgaagaagagcaagagggccatccgcctcttcaaggagggcaaggagaggatgtatgaggagcagagccaggacagaagaaacctgaccaagctgagcctcatcttcagccacatgctggccgagatcaaggccatcttccccaacggccagttccagggcgacaacttccgcatcaccaaggcagatgctgctgagttctggaggaagttcttcggggacaagaccatcgtgccctggaaggtgttccggcagtgcctgcacgaggtgcaccagatcagcagcggcctggaggccatggccctgaagagcaccatcgacctgacctgcaatgactacatctctgtgtttgaatttgacatcttcaccaggctcttccagccctggggcagcatcctgaggaactggaacttcctggccgtgacccaccctggctacatggccttcctgacctatgatgaggtgaaggcccggctgcagaagtacagcaccaagccaggcagctacatcttccggctgagctgcacccggctgggccagtgggccatcggctacgtgactggagatggcaacatcctgcagaccatcccccacaacaagcccctcttccaggccctgattgatggcagccgggagggcttctacctgtacccagatggccgcagctacaacccagacctgaccggcctgtgtgagcccacccctcatgaccacatcaaggtgacccaggagcagtatgagctgtactgtgagatgggcagcaccttccagctgtgcaagatctgtgccgagaatgacaaggatgtgaagattgagccctgtggccacctgatgtgcaccagctgcctgacagcctggcaggagagtgatggccagggctgccccttctgccgctgtgagatcaagggcacagagcccatcatcgtggacccctttgaccccagagatgagggcagccgctgctgcagcatcatcgaccccttcggcatgcccatgctggacctggatgatgatgatgaccgggaggagagcctgatgatgaaccggctggccaacgtgaggaaatgtacagaccggcagaacagccctgtgaccagccctggcagcagccccctggcccagaggaggaagccccagcctgaccccctgcagatcccccacctgagcctgccccctgtgcccccccggctggacctgatccagaagggcatcgtgcgcagcccctgtggcagccccaccggcagccccaagagcagcccctgcatggtgaggaagcaggacaagcccctgcctgcccctcctccacccctgcgggaccccccacctcctcctcctgagcggcccccacccatccccccagacaaccggctgagccgccacatccaccacgtggagagcgtgcccagccgggacccccccatgcccctggaggcctggtgccccagagatgtgtttggcaccaaccagctggtgggctgccgcctgctgggggagggcagccccaagccaggcatcacagccagcagcaatgtgaatggccgccacagccgggtgggcagtgaccctgtgctgatgaggaagcacagaagacatgacctgcccctggagggcgccaaggtgttcagcaatggccacctgggcagcgaggagtatgatgtgcccccccggctgagccccccacctcctgtgaccaccctgctgcccagcatcaagtgcaccggccccctggccaacagcctgtctgagaagacccgggaccctgtggaggaggatgatgatgagtacaagatccccagcagccaccctgtgtccctgaacagccagcccagccactgccacaacgtgaagccccctgtgcgcagctgtgacaatggccactgcatgctgaatggcacccacggccccagcagcgagaagaagagcaacatcccagacctgagcatctacctgaagggcacctaccgcatctag

SEQ ID NO: 246977 - DNA, 2433 bp, Artificial Sequence
  derived and/or modified sequence
atggccaacagcatgaatggaagaaatcctgggggccggggcggcaaccccaggaagggccgcatcctgggcatcattgatgccatccaggatgctgtgggcccccccaagcaggccgctgctgacagaagaacagtggagaagacctggaagctgatggacaaggtggtgcggctgtgccagaaccccaagctgcagctgaagaacagccccccctacatcctggacatcctgcctgacacctaccagcacctgcggctcatcctgagcaaatatgatgacaaccagaagctggcccagctgtctgaaaatgagtacttcaagatctacatcgacagcctgatgaagaagagcaagagggccatccgcctcttcaaggagggcaaggagaggatgtatgaggagcagagccaggacagaagaaacctgaccaagctgagcctcatcttcagccacatgctggccgagatcaaggccatcttccccaacggccagttccagggcgacaacttccgcatcaccaaggcagatgctgctgagttctggaggaagttcttcggggacaagaccatcgtgccctggaaggtgttccggcagtgcctgcacgaggtgcaccagatcagcagcggcctggaggccatggccctgaagagcaccatcgacctgacctgcaatgactacatctctgtgtttgaatttgacatcttcaccaggctcttccagccctggggcagcatcctgaggaactggaacttcctggccgtgacccaccctggctacatggccttcctgacctatgatgaggtgaaggcccggctgcagaagtacagcaccaagccaggcagctacatcttccggctgagctgcacccggctgggccagtgggccatcggctacgtgactggagatggcaacatcctgcagaccatcccccacaacaagcccctcttccaggccctgattgatggcagccgggagggcttctacctgtacccagatggccgcagctacaacccagacctgaccggcctgtgtgagcccacccctcatgaccacatcaaggtgacccaggagcagtatgagctgtactgtgagatgggcagcaccttccagctgtgcaagatctgtgccgagaatgacaaggatgtgaagattgagccctgtggccacctgatgtgcaccagctgcctgacagcctggcaggagagtgatggccagggctgccccttctgccgctgtgagatcaagggcacagagcccatcatcgtggacccctttgaccccagagatgagggcagccgctgctgcagcatcatcgaccccttcggcatgcccatgctggacctggatgatgatgatgaccgggaggagagcctgatgatgaaccggctggccaacgtgaggaaatgtacagaccggcagaacagccctgtgaccagccctggcagcagccccctggcccagaggaggaagccccagcctgaccccctgcagatcccccacctgagcctgccccctgtgcccccccggctggacctgatccagaagggcatcgtgcgcagcccctgtggcagccccaccggcagccccaagagcagcccctgcatggtgaggaagcaggacaagcccctgcctgcccctcctccacccctgcgggaccccccacctcctcctcctgagcggcccccacccatccccccagacaaccggctgagccgccacatccaccacgtggagagcgtgcccagccgggacccccccatgcccctggaggcctggtgccccagagatgtgtttggcaccaaccagctggtgggctgccgcctgctgggggagggcagccccaagccaggcatcacagccagcagcaatgtgaatggccgccacagccgggtgggcagtgaccctgtgctgatgaggaagcacagaagacatgacctgcccctggagggcgccaaggtgttcagcaatggccacctgggcagcgaggagtatgatgtgcccccccggctgagccccccacctcctgtgaccaccctgctgcccagcatcaagtgcaccggccccctggccaacagcctgtctgagaagacccgggaccctgtggaggaggatgatgatgagtacaagatccccagcagccaccctgtgtccctgaacagccagcccagccactgccacaacgtgaagccccctgtgcgcagctgtgacaatggccactgcatgctgaatggcacccacggccccagcagcgagaagaagagcaacatcccagacctgagcatctacctgaagggagatgtgtttgattctgccagtgaccctgtgcccctgcccccagcccggccccccacccgggacaaccccaagcacggcagcagcctgaacagaacacccagcgactatgacctgctgatcccccccctgggctag

SEQ ID NO: 246978 - DNA, 2949 bp, Artificial Sequence
  derived and/or modified sequence
atggccaacagcatgaacggccggaaccccggcggccggggcggcaacccgcgcaagggaagaatcctgggcatcattgatgccatacaggacgcagtgggccccccaaaacaagccgccgctgatagaagaactgtggaaaagacttggaagctgatggataaagtcgttaggctgtgtcaaaacccaaaattgcaactcaaaaattccccgccttatatcctggatatccttccagacacatatcagcacttgcgtctgatactgagcaagtatgatgacaaccagaagctcgctcagctgtctgaaaatgagtacttcaagatatatatagattcacttatgaagaagagtaaacgggccataagactattcaaagagggaaaggaaagaatgtatgaagagcagagccaagacagacgcaatttgaccaaactgtcgctaattttcagccatatgctcgccgaaattaaagccatcttccctaacggccagttccagggggacaactttaggattaccaaggcagatgccgccgagttttggcgcaaatttttcggggacaagacaattgtcccatggaaggtgtttcgccagtgtctacacgaagtgcatcagataagttcagggctagaggcaatggctttaaagagcactattgacttaacgtgtaacgactatatctcagtctttgaatttgacatttttactcgtttgttccagccatggggtagtatcttaagaaattggaacttcctagccgttacacaccctgggtacatggccttcctgacctacgacgaggtcaaggctcgcttgcaaaaatactccactaagccaggaagttatatcttccggctctcttgtactcgccttggacagtgggcgataggctacgttacgggcgacgggaacatcctgcagacaataccccataataagcctttgtttcaagctcttattgacggcagcagagagggtttttacctgtatccagacgggaggagctataaccccgatttgaccggtttgtgcgagcccactccccatgaccatatcaaagttacccaggagcagtatgagctatattgtgagatgggttccacctttcagctgtgcaagatttgtgccgagaacgataaagatgtaaaaatagaaccctgcggccatttgatgtgtacatcttgccttacagcctggcaggaatcagacgggcagggatgccccttctgtcgttgtgagatcaagggcaccgaacctattatcgtggatccttttgacccccgggacgaggggtctagatgctgctccataatagaccctttcggcatgcccatgctggacctggatgacgatgacgaccgagaggaatccctgatgatgaaccgactcgcaaacgtgcgcaagtgcactgaccggcagaattctccggtcacctctccaggcagtagccccttggcacagagacggaagccccagccggacccactgcagattcctcatctgagtctaccgcccgtgccacccagactcgacctcattcagaagggaatcgtgagatctccttgcggatctcccaccggctcccctaaaagctccccttgtatggtgagaaagcaggacaaacccctgccggctcctccaccaccactgcgcgatccccccccccctccacccgagagaccgcctcctataccccccgataaccgcctgagccgtcatattcaccacgtggaaagcgtaccgtctcgggatccaccaatgccgctggaggcgtggtgtccacgagatgtgttcggcactaatcagctcgtggggtgtaggttgctgggcgaggggagtcccaaaccggggatcaccgcatcatctaatgtgaatggcagacactccagagtcgggtctgatcccgtgctcatgcgaaagcaccggaggcacgacttgcccctggaaggcgcaaaagtgttcagcaatggtcatcttgggagtgaggagtatgacgtgcctccccgcctatccccaccacccccagtgacgacccttctaccatccatcaaatgcacggggcctcttgccaattctctgagcgaaaaaactcgcgaccctgtcgaagaagacgatgacgaatataaaataccttccagtcatcctgtgagcttgaacagtcagccatcacattgtcataatgttaagcctccggtgaggagctgcgataatggacattgcatgctgaacggtacacacggccccagttctgagaagaaatccaatatacccgatcttagtatatacctcaagggagatgtgttcgactcagccagtgatccggtacccttgccccccgctagacctccaaccagggacaacccgaaacacggaagttccttgaacagaacgccttccgactacgacctcctgattccacctttaggtgaggacgcctttgacgccctaccacctagcctaccgcctccccccccccccgcccgccatagtctgattgagcacagtaaaccccctggaagctctagcaggccatcttccggccaggatctcttcttactgccatcagacccttttgtcgatcttgcttccggccaggttccccttccgcccgctagacggctcccaggcgagaacgtaaagacaaatcgtacaagccaggactatgaccaattgccatcctgctccgatggaagccaggccccagctcgcccgcccaagcctcgaccacgaaggacagcccccgagattcatcataggaagccccatggccctgaggcagcattggaaaacgttgacgccaaaatagcgaaattgatgggcgaaggatacgcttttgaggaggtaaagcgtgccctggagatcgcacagaacaatgtggaagtcgctcgaagcatcctcagagaattcgccttccctccacccgtcagtccacggctcaacctttag

SEQ ID NO: 246979 - DNA, 2313 bp, Artificial Sequence
  derived and/or modified sequence
atggccaacagcatgaacggccggaaccccggcggccggggcggcaatcctaggaaaggacggatccttgggatcatcgatgctatccaggacgcagtgggaccacccaaacaggccgccgccgacagacggacggtggagaagacttggaagctgatggataaagtggtccgcctgtgccagaaccctaagctacaactaaagaactcccccccctatatacttgacatcctgcccgacacctaccagcatctgcggctcattctaagcaaatatgatgacaaccagaagttggcccagctcagtgagaacgaatacttcaagatctacatcgacagcttgatgaaaaagagtaagagggccatccggctgttcaaagaaggaaaggagagaatgtacgaggagcagagtcaagatcgccgaaacctcactaagctgagtttgattttttctcacatgctagcggaaattaaagccatattccctaatgggcagttccagggtgataacttccggatcacaaaggcggatgctgcagagttctggaggaagtttttcggcgacaagacaatcgttccatggaaagtgttcaggcagtgtctgcacgaagtccaccagatttcttccgggctggaagccatggctctgaagtcaacgattgacctgacttgcaacgattacatttccgtattcgaattcgatatcttcacacggctgttccaaccctggggcagtatactgaggaattggaatttcctggccgtgacccaccccggctatatggccttcttaacctacgacgaagtcaaagcgcgcttgcagaaatactctacaaaacctggtagttatatattcagactgtcgtgtacaagactcggccagtgggccatcggctatgtcaccggcgacggcaacattctgcagaccatcccccataacaaacctctctttcaggcactgatcgatgggtctcgcgaaggtttttacctgtatccggacggacgatcctataaccccgatctaacaggcctctgtgagcctacccctcacgaccacattaaagtcacacaagagcaatatgaactgtactgcgagatgggtagcactttccagctgtgtaaaatttgtgcggaaaacgacaaggatgtaaagatagagccctgcgggcatctcatgtgcactagttgcctgacagcgtggcaggagtctgacgggcaaggctgccccttttgtaggtgtgaaatcaaggggacagagccaatcatcgtcgatcctttcgaccctcgcgacgaggggtctcggtgctgctccattatcgacccctttgggatgccaatgctcgacctggatgacgatgacgatcgcgaagaatcacttatgatgaaccgtctcgccaacgtccgcaagtgcactgatcgacagaattcaccagtaacaagtccggggtcttcaccattagctcaacggcggaagccccagccagaccctctccagatcccccacctctccctacctcccgttccacccagattagacttgattcagaaagggattgtgcggtcaccatgcggcagtccaacaggatccccaaaaagctctccctgtatggtgcgtaaacaggacaagcctcttccagcccctccacctcccctgcgagaccctccccctccccctcctgaaagaccaccgccgattccccccgataatcggctcagccgacacattcaccatgtcgagtcagttccaagtagagaccctcccatgcccctagaggcatggtgccccagagatgtgttcggcacaaaccaactggttggatgccggttactcggggaaggctcaccaaaaccaggaattacagcttcttccaacgtaaatgggaggcactctcgcgtgggcagtgaccccgtgttgatgagaaagcatcgccgtcatgatcttcctcttgagggagcaaaggtgttcagcaatggccacctggggtcagaagaatacgacgtgccaccccggttgtcacctcctcccccggtgaccacactactgccatccattaagtgcaccggtccccttgctaactctctgtctgagaagacaagagatcctgttgaggaagacgacgacgagtataagattcccagtagtcacccagtatccctgaacagccagccatcccattgccataatgtaaaaccgcccgtgcgctcctgtgataatggccactgcatgctcaatggcacacacgggcccagctcagaaaaaaagagcaacatccccgacctgtccatatatttaaagggtacttataggatctag

SEQ ID NO: 246980 - DNA, 2433 bp, Artificial Sequence
  derived and/or modified sequence
atggccaacagcatgaacggccggaaccccggcggccggggcggcaatccccgtaaagggcgaatcctgggtataattgatgccattcaggacgccgtgggaccccccaagcaagctgccgccgataggcggacagtcgagaaaacttggaagcttatggacaaggtcgtgaggctgtgtcagaatccaaaactccaactcaagaacagccctccatacatccttgacatcttacccgatacctaccagcatcttcgtctgattctttcaaagtacgacgataatcagaagcttgcacagcttagtgaaaatgaatactttaagatttatatcgactcactcatgaaaaaatctaaacgggctatccgactgtttaaagagggcaaggagcggatgtacgaagaacagagccaggatagaagaaatttgacaaagctttcattgatattctctcacatgctggcggagatcaaggctattttccctaatgggcagtttcagggcgacaactttcggattaccaaagcggacgccgccgagttttggcggaaatttttcggtgataagacaatcgtgccttggaaagttttcagacagtgtctgcacgaggtgcatcagatcagcagtgggttagaggccatggccctgaagagcaccattgatctaacctgcaacgattacatctcagtgttcgagttcgacattttcacccggttattccagccctggggaagcattctgaggaattggaactttttggcggtcacgcaccccgggtacatggcctttctgacttatgatgaagttaaggcaagactgcagaaatactcgactaaacctggctcttacatttttaggctgtcatgcacaagactgggacagtgggcaattggctatgtgacaggggatggaaatatccttcagaccatcccccacaataagcccctgtttcaggcgctgatcgatggatctcgtgaaggcttctatttgtatcccgacggcaggtcctataatccagacctgaccggactgtgcgaacctactccgcacgatcacattaaagtcacacaagagcagtacgagctctactgcgagatggggtccaccttccaattgtgtaaaatttgcgcagagaatgataaagacgtcaagattgaaccctgcggtcatcttatgtgcaccagctgtttaaccgcctggcaggaatctgacgggcagggctgtcctttttgtcgctgtgaaattaagggaacagaaccaatcatcgttgatccctttgacccacgcgacgaggggagcagatgctgcagcatcatagacccgtttggcatgccaatgttagatctggatgacgacgacgatagagaggagagcctaatgatgaaccgcctggccaatgtgagaaaatgcactgaccggcaaaatagccctgtcaccagcccagggagcagccctctcgcgcaacgacggaaaccgcaacctgacccgcttcaaatcccacatctgagtcttccccctgtccctcctagactcgacctgatccagaagggcatagtccggtccccatgcgggtcccctacaggcagccctaaaagcagtccgtgtatggtgagaaaacaggataagccattgcctgctcccccacccccccttcgggacccaccgccaccccctcctgaaagaccacccccaattccccccgataatcggttatcacgccacatccatcacgtcgagtccgtgccaagccgagacccgcccatgccactagaggcctggtgtcctagagacgtgttcggcactaatcagctcgtgggttgtcgactcctgggcgaggggtcacctaaacccggaatcaccgcttcatccaatgtaaacgggcgccacagcagggtgggctctgaccctgttctaatgcgaaagcataggcgccatgacctccccttagaaggagctaaagtattttctaacggccatctcggcagcgaagagtatgatgtgcctcctaggctctctccaccaccccccgtcacaaccctcctaccatctatcaagtgcaccggcccactggccaattcactgtcagaaaaaaccagggatccagttgaggaagatgacgatgagtacaagatacctagcagccatccagtcagtctgaacagtcagccctcgcattgccacaacgtgaaaccaccagtcagatcgtgtgataacggacattgcatgctgaacggcactcacgggcctagctctgagaaaaagtccaacataccggatctcagtatttacctgaaaggcgatgtgttcgattcagcctcagacccagtccctttgccccccgcccgcccaccgacccgagacaacccaaagcacggctcaagtctcaacaggaccccatccgattacgacctgctgatacctccacttggttag

SEQ ID NO: 246981 - DNA, 2949 bp, Artificial Sequence
  derived and/or modified sequence
atggccaactcaatgaatgggcgaaatccaggtggtcggggtggcaacccgagaaaaggccgaattctcggcattatcgacgctatccaagacgcagttggcccacccaagcaggcagccgctgacaggcgaacagtcgagaagacatggaagctcatggacaaggtagtacggctgtgccagaacccaaaactccagctgaagaactcccccccatacattcttgatatcctgcctgacacctaccaacacctgaggctgatcctttccaaatacgatgataatcaaaagctagcgcagttgagtgaaaatgagtattttaagatctatattgattcgcttatgaaaaagtccaagcgagccattcgactgttcaaggagggaaaagaacggatgtacgaggaacagtcgcaagataggcgcaacctgactaagttgtcactgatcttctcgcacatgctcgccgaaatcaaagcaattttccccaatggtcaatttcagggtgacaacttcaggatcacaaaagcagacgccgcagagttttggaggaagtttttcggagacaagacaattgtgccttggaaagtttttcggcaatgtctccacgaagtccaccagatatcctcaggtttggaagccatggctctcaagtctacaatagacttaacgtgtaacgattacatcagcgtgttcgagttcgacatcttcactagactcttccagccgtggggctccatattgaggaattggaacttcttagctgttacacatccagggtacatggccttcctcacttacgacgaggtcaaagcccgactccagaaatacagtaccaaacccggaagttacatctttcggctttcgtgtactaggctaggacagtgggctatcgggtatgtgacgggcgacggcaatatcttacagacaattccccacaataagcccctttttcaagctctgattgacgggtctcgagaaggcttctacctttatccggacggacggtcatacaaccccgatttgaccggactgtgcgagccaacaccacatgaccacattaaggttactcaagaacagtatgaactgtactgtgagatggggagcaccttccagttatgtaaaatttgcgctgagaacgataaggatgtcaagatcgaaccatgcggacacctgatgtgcacctcatgtttgacagcttggcaggagtccgacggacagggctgtcccttctgtcggtgtgagattaaaggcactgagccgatcattgtggacccttttgatcccagggacgaggggtctcggtgttgctccattattgacccttttggcatgccgatgcttgatcttgacgacgatgacgatcgcgaggagagcctaatgatgaacagacttgccaatgtgaggaaatgtaccgataggcagaattctcctgtgacttcacctggatcctcaccgctcgctcagcgacggaaacctcagccagaccctctgcagattccacacctgagtctgccccctgtaccccctagactcgatttaatccaaaaaggcatagtgaggtctccatgcggaagcccgactgggtcccccaagagctctccttgcatggtccgcaaacaggacaaacctctccctgcgcctccaccgcctttgagggacccacccccaccaccacccgaacgtccaccaccgatccccccagacaatcgtctcagccggcatatccaccatgttgagagcgttccatccagagaccctccgatgcctctggaagcctggtgccctcgagacgtgttcggcacgaaccaattggttggatgtaggctgctcggagaggggtcacccaaaccagggatcaccgcctcctcgaacgtgaatggccgacactctagggtgggcagcgacccggtactaatgcggaagcatcgccgtcacgatctaccactcgaaggcgctaaagtgttcagcaatgggcatctggggtccgaggaatacgatgtgccgccaagactgagtcctcctcctccggtgaccactctgctgcctagcatcaaatgcacgggacctcttgcaaactcccttagcgaaaaaacaagggatcctgttgaagaggacgatgatgaatacaagattccgtcttcccatcccgtgtccctgaactcccaaccctctcactgtcacaacgtaaaacctcccgtgaggtcttgcgacaatggtcactgcatgcttaatggcacccacggcccttcaagcgaaaaaaagagcaacatacccgacttgtctatttacctgaagggcgatgtttttgactctgctagtgacccagtacccctgcctcccgctagaccaccaacgcgcgataaccccaagcacggctcgtcattgaaccgcacacccagtgactacgacctgctgattccacccttgggggaagacgcgtttgatgccctccctccgtccctcccacccccacccccaccagcacgccattccctgatcgagcattcaaagccaccaggcagcagttccagaccttcctctggtcaggatttattcctgctgcccagtgacccctttgtcgacctggcctccgggcaggtacctctcccacccgctcgtaggcttcctggagagaacgtgaaaacaaatcgcacgtcccaggactacgaccagttgccctcgtgctccgatggatcccaagcgcctgcccgtcccccaaaaccacgtccaaggcgcaccgcccctgagatccatcacagaaaaccccatgggcctgaagccgctctagagaacgtagacgccaagattgctaagttgatgggcgaaggctacgctttcgaagaggtgaagagagccttggagattgcccaaaacaacgtggaggtcgcaaggtccatcctgcgagagttcgcgttcccccctccagtgagtccgaggctgaatttgtag

SEQ ID NO: 246982 - DNA, 2313 bp, Artificial Sequence
  derived and/or modified sequence
atggccaatagtatgaacggaaggaaccctggcggaagaggcggaaatccacgcaaggggagaatccttggaataatcgacgctatccaggacgcggtgggcccacccaagcaggcagccgctgatcggagaacagtggagaagacctggaaattgatggacaaagtggtccgactctgtcagaaccctaaactccaactgaagaattcacctccttatattctggacatcctgcctgacacatatcaacatctgcgtctgatcctgagtaaatatgacgacaaccagaagcttgcccagctgagtgaaaatgagtactttaaaatttatatcgactccctgatgaagaaaagcaaacgggctatccgtctgtttaaagagggcaaagaaagaatgtatgaggagcaatcccaggaccgtaggaatctcacaaaactaagccttatcttctcccatatgttggccgagattaaagccattttccccaacggtcagttccagggcgacaatttcaggattaccaaggcggatgctgctgagttttggcggaagttttttggtgataagaccatagtcccctggaaagtttttaggcagtgccttcacgaggtccaccaaatttcttctggcctggaggcaatggccctgaaaagtactatcgatctcacttgcaacgattatatctctgtattcgaattcgacattttcacacgtctttttcagccctggggaagcattctcaggaattggaattttctggcagtgactcaccccggttatatggctttcctaacctacgatgaggttaaggcacgcctgcagaaatacagtaccaaaccaggtagctacatatttcgcctctcatgtacacgcctcggccaatgggctattggctatgtgactggagatggtaacatactgcagacgatccctcataataaacctctgttccaggcactgatcgatggttcccgcgagggcttttacctttaccccgacgggaggtcgtacaacccggacctgaccgggctctgtgagccaaccccacacgatcacattaaggtgacccaggagcagtacgagctttactgcgagatgggcagcactttccagctgtgcaaaatttgcgccgagaatgacaaggacgtcaagatcgagccttgcggacacctaatgtgtacaagctgtttgaccgcatggcaggaaagcgacggccagggatgccctttctgtagatgtgaaattaaaggcacagaacctatcatcgtggacccgtttgaccctcgggacgaagggtctcgatgttgcagcataattgatcccttcggaatgcccatgctggatttggacgatgacgatgatcgtgaagagtcactgatgatgaatcggcttgcgaatgttcgcaagtgtacagatagacagaatagcccggtcacatctccaggatcatctccgttggcccagaggaggaaacctcagcctgatccgctccagatcccccacttgtcactgccacccgtgccaccacggctggacttgatccaaaagggaatcgtgcgcagtccatgcggaagcccgacaggttccccaaagtcatctccctgcatggtgcgcaagcaggataaaccacttcccgctcctccaccgcctctcagggaccccccacctcccccacctgaacgacctcctcccataccgcctgacaaccgtctatctcgccatatccatcatgtggagtccgtgcccagcagagatcccccaatgccattggaggcttggtgccccagagatgtatttgggacgaatcaactagtgggatgtcgactgcttggtgaagggtcaccaaagcccggtatcaccgcttccagcaacgtaaacggaagacacagtcgtgttggctctgatcccgtgctgatgaggaagcatcgaagacacgatcttcccctggaaggggcaaaagtgttcagtaatggtcatcttggctcggaggagtacgacgtcccccctagactgtctcctccgcctccggtgacgacactcctgccttcaataaaatgcacgggaccacttgccaattcattgtcagagaaaaccagagaccctgtcgaagaggacgatgacgaatataagatcccttccagccaccctgtttcgttgaactcgcagccatcccactgtcataatgtgaagccaccagttagaagttgtgacaacggtcactgtatgctcaacggaacgcacgggcctagttctgagaagaaaagcaacattcccgatctgtctatttacttgaagggtacttacagaatctag

SEQ ID NO: 246983 - DNA, 2433 bp, Artificial Sequence
  derived and/or modified sequence
atggcaaactcaatgaatggccgtaaccctgggggtcgcggtggtaatcctcggaaaggtagaattctcggtattatcgatgcaattcaggatgccgtcggtcctcccaagcaggccgctgcggaccgcagaacagttgaaaagacctggaagctgatggataaggtggtgaggctgtgccagaacccaaagctgcagctgaaaaactctccaccatatattcttgacatccttcccgatacctatcagcacctgcggttgattctatccaagtacgacgataaccagaagcttgcacaactttcagaaaatgaatatttcaagatttatatcgattcactgatgaaaaaaagcaaacgggcaattcggctgttcaaagagggaaaggaacgcatgtatgaagagcaatcacaggaccgcagaaacttaactaaattgtctttaatcttcagtcacatgctggccgaaatcaaagccatcttccccaatggtcaatttcagggagataattttcggataaccaaagcagatgctgctgagttctggagaaaattcttcggtgataagacaatagtgccttggaaggtgtttcggcagtgtttgcatgaggttcaccagatctctagtggattagaagccatggcattaaaatccaccatcgacttgacttgcaatgactatatttctgttttcgagtttgacatctttactcgactgtttcagccttggggcagcatcctacgcaactggaactttctcgctgtcacgcacccaggttacatggctttcttgacttacgatgaggtgaaagcaaggctgcagaaatactcaactaagccaggctcatacatatttcgcttaagctgtacccgcctggggcagtgggcaatcggatacgtcacaggggatgggaatatcctccagactatcccccataataaacctttatttcaagccctgatagatgggagtcgcgagggattttatctgtatcctgatgggcgatcctacaatcccgatctgaccggactgtgcgagcccactcctcatgaccacataaaagtcacccaggaacagtacgaattgtattgtgagatgggttctacattccagctgtgcaagatttgcgccgagaatgacaaagatgttaaaatcgaaccctgcggccatctgatgtgtactagctgccttaccgcctggcaggagagtgacggtcagggctgtccattttgcagatgcgagatcaaagggaccgaaccgattatcgtggatccatttgacccgagggacgaaggatctaggtgttgcagcattatcgatccattcggcatgcccatgctggatctggatgatgacgatgatcgagaggagagtctcatgatgaatcgactcgccaacgttagaaagtgcacggatagacagaactcaccagtgacatctcctggatccagtcctctcgcacaacgccgtaaaccacaacctgatcccctccagatccctcatctttccctgccaccggtgccaccaagacttgacctgattcaaaaagggattgtgcggagcccatgcgggtccccgacaggcagtccaaagagcagcccctgcatggtgcgcaaacaggataaaccacttccagctccgcctccgcctctcagagacccccctcccccaccgccagagagacctcccccaatacctcccgataaccgcctatcccgccatattcatcatgtggagtctgtcccatcccgggatcctcctatgccattagaggcatggtgcccccgagatgtgtttggaacgaaccagctcgtgggctgtcgcctgctcggtgaaggatcgccaaaacctggcattactgctagttctaatgttaatggtcgccactcaagggttgggtccgaccctgtactgatgcgcaagcataggcgtcacgaccttcctttggagggagccaaagtgttctcaaatggacacctaggaagcgaagagtacgacgtcccaccaagacttagccctcctcccccagtgactaccctgctgcccagcattaagtgtactggtccccttgctaacagtttgtccgaaaagacacgcgaccccgtggaggaggatgacgatgagtacaagattccgagctcccatcccgtttccctcaattcccagccctcacactgccataatgtgaagcctcccgttagatcctgtgacaacggacactgcatgctgaatggcacacacggccctagttccgagaagaagagcaacatcccagacctgtcaatctacctgaagggagacgtcttcgatagcgcttctgatccagttcctctcccacccgcacgccctcccacaagagataatcccaagcatgggtcttccctgaatcgcactccatccgactacgatctgctcatcccccctcttggatag

SEQ ID NO: 246984 - DNA, 6780 bp, Artificial Sequence
  derived and/or modified sequence
ctgggtcctgtgtgtgccacaggggtggggtgtccagcgagcggtctcctcctcctgctagtgctgctgcggcgtcccgcggcctccccgagtcgggcgggaggggagagcgggtgtggatttgtcttgacggtaattgttgcgtttccacgtctcggaggcctgcgcgctgggttgctccttcttcgggagcgagctgttctcagcgatcccactcccagccggggctccccacacacactgggctgcgtgcgtgtggagtgggacccgcgcacacgcgtgtctctggacagctacggcgccgaaagaactaaaattccagatggcaaactcaatgaatggcagaaaccctggtggtcgaggaggaaatccccgaaaaggtcgaattttgggtattattgatgctattcaggatgcagttggaccccctaagcaagctgccgcagatcgcaggaccgtggagaagacttggaagctcatggacaaagtggtaagactgtgccaaaatcccaaacttcagttgaaaaatagcccaccatatatacttgatattttgcctgatacatatcagcatttacgacttatattgagtaaatatgatgacaaccagaaacttgcccaactcagtgagaatgagtactttaaaatctacattgatagccttatgaaaaagtcaaaacgggcaataagactctttaaagaaggcaaggagagaatgtatgaagaacagtcacaggacagacgaaatctcacaaaactgtcccttatcttcagtcacatgctggcagaaatcaaagcaatctttcccaatggtcaattccagggagataactttcgtatcacaaaagcagatgctgctgaattctggagaaagttttttggagacaaaactatcgtaccatggaaagtattcagacagtgccttcatgaggtccaccagattagctctggcctggaagcaatggctctaaaatcaacaattgatttaacttgcaatgattacatttcagtttttgaatttgatatttttaccaggctgtttcagccttggggctctattttgcggaattggaatttcttagctgtgacacatccaggttacatggcatttctcacatatgatgaagttaaagcacgactacagaaatatagcaccaaacccggaagctatattttccggttaagttgcactcgattgggacagtgggccattggctatgtgactggggatgggaatatcttacagaccatacctcataacaagcccttatttcaagccctgattgatggcagcagggaaggattttatctttatcctgatgggaggagttataatcctgatttaactggattatgtgaacctacacctcatgaccatataaaagttacacaggaacaatatgaattatattgtgaaatgggctccacttttcagctctgtaagatttgtgcagagaatgacaaagatgtcaagattgagccttgtgggcatttgatgtgcacctcttgccttacggcatggcaggagtcggatggtcagggctgccctttctgtcgttgtgaaataaaaggaactgagcccataatcgtggacccctttgatccaagagatgaaggctccaggtgttgcagcatcattgacccctttggcatgccgatgctagacttggacgacgatgatgatcgtgaggagtccttgatgatgaatcggttggcaaacgtccgaaagtgcactgacaggcagaactcaccagtcacatcaccaggatcctctccccttgcccagagaagaaagccacagcctgacccactccagatcccacatctaagcctgccacccgtgcctcctcgcctggatctaattcagaaaggcatagttagatctccctgtggcagcccaacgggttcaccaaagtcttctccttgcatggtgagaaaacaagataaaccactcccagcaccacctcctcccttaagagatcctcctccaccgccacctgaaagacctccaccaatcccaccagacaatagactgagtagacacatccatcatgtggaaagcgtgccttccagagacccgccaatgcctcttgaagcatggtgccctcgggatgtgtttgggactaatcagcttgtgggatgtcgactcctaggggagggctctccaaaacctggaatcacagcgagttcaaatgtcaatggaaggcacagtagagtgggctctgacccagtgcttatgcggaaacacagacgccatgatttgcctttagaaggagctaaggtcttttccaatggtcaccttggaagtgaagaatatgatgttcctccccggctttctcctcctcctccagttaccaccctcctccctagcataaagtgtactggtccgttagcaaattctctttcagagaaaacaagagacccagtagaggaagatgatgatgaatacaagattccttcatcccaccctgtttccctgaattcacaaccatctcattgtcataatgtaaaacctcctgttcggtcttgtgataatggtcactgtatgctgaatggaacacatggtccatcttcagagaagaaatcaaacatccctgacttaagcatatatttaaagggagatgtttttgattcagcctctgatcccgtgccattaccacctgccaggcctccaactcgggacaatccaaagcatggttcttcactcaacaggacgccctctgattatgatcttctcatccctccattaggtgaagatgcttttgatgccctccctccatctctcccacctcccccacctcctgcaaggcatagtctcattgaacattcaaaacctcctggctccagtagccggccatcctcaggacaggatctttttcttcttccttcagatccctttgttgatctagcaagtggccaagttcctttgcctcctgctagaaggttaccaggtgaaaatgtcaaaactaacagaacatcacaggactatgatcagcttccttcatgttcagatggttcacaggcaccagccagaccccctaaaccacgaccgcgcaggactgcaccagaaattcaccacagaaaaccccatgggcctgaggcggcattggaaaatgtcgatgcaaaaattgcaaaactcatgggagagggttatgcctttgaagaggtgaagagagccttagagatagcccagaataatgtcgaagttgcccggagcatcctccgagaatttgccttccctcctccagtatccccacgtctaaatctatagcagccagaactgtagacaccaaaatggaaagcaatcgatgtattccaagagtgtggaaataaagagaactgagatggaattcaagagagaagtgtctcctcctcgtgtagcagcttgagaagaggcttgggagtgcagcttctcaaaggagaccgatgcttgctcaggatgtcgacagctgtggcttccttgtttttgctagccatatttttaaatcagggttgaactgacaaaaataatttaaagacgtttacttcccttgaactttgaacctgtgaaatgctttaccttgtttacagtttggcaaagttgcagtttgttcttgtttttagtttagttttgttttggtgttttgatacctgtactgtgttcttcacagaccctttgtagcgtggtcaggtctgctgtaacatttcccaccaactctcttgctgtccacatcaacagctaaatcatttattcatatggatctctaccatccccatgccttgcccaggtccagttccatttctctcattcacaagatgctttgaaggttctgattttcaactgatcaaactaatgcaaaaaaaaaaaagtatgtattcttcactactgagtttcttctttggaaaccatcactattgagagatgggaaaaacctgaatgtataaagcatttatttgtcaataaactgccttttgtaaggggttttcacataacatagaggagcttcccttttttgtttaagttttgtaacctttaatcctccatattctcatgtctgtcatcccaggggtgtcacaactgtaaaaatctacaatattagaaagcagctactacagatgtggaagagagaacacttgtataagacaatgctgtactgaagttatataacaaggtcccctgatacttatgcctgcattactttgagggatgctgaatgagaggaccatctccctgaaatatattaataattttcagataaaattatgaacataacataccttttctcaagtggaattagagttcatttcccatttaagtgattacactctatctcctaagagctgtgggaaccagttcatattgcagtggaaacattaactcttcgttgcactgttgagtgtcaaggctactgtggcaatgttttttgcaaagttctcagtaattttctctctgcaatcaaattagagttcatatttaatttgcagattctctcattcattgctccacactgctttatcaaatcaggtgaaagaaattaatgtagttttgcctattttacaaaatggtggttggttctttaaacaccatgttattactcttaataaatctacaaatatttattgagcatctatgatatgcttggtgctgttaggcactgtgtttttaaagcacaaactctcaaaagctgattccagcgtaatgttttatttttgtttttctgtgttttttatgacaaagtctgtctgatagacaaagcctggaaggtttcccccagggctttagaatttagaattagctggttttcatttcaaatgggaaattaatggagaaatgagataaaatcatctctgtgtaaatgcttgaacccacagaaagttttctaaatatggactaattgtgggtttgtgcatatttctgtgtctcctcttttcacttcacacccaccatgatataaaaagatgcatcagagagtgagcctgccttcaggacctgaaaggacatgactgaacatctagtagatctggtggaaattaatgttatacaaaagacacgtagactaagttgaccctgggagaggagttaatacattcctttgcaaagtgacatgtgccctttttttgacagtctggctttcatggtatgagatgaggactcacaggccttgggtaatttctgcttttgtatgaattttttcagatggttctgagctggttatgtccctggaggggaatttttcatttgccttagatgttcttcccatgagtaggtacatgagtgaagtttcttacacttttaaaattgcattggcaaattttcttttgctttatgaacccctgttttgtcattatgatttttcacttgttttaacagtttcagatgtcaccttggaatagcactgtttattttggcctttttatgattgctgatgataggtacagtctaaaggccaaaagttgccacttcattgtgataacattgttgcaacattcctaatatattagagaatgatgtaaaataagaatgttagagaacatagcacattctcattcagtttataaacaatatttgaaaatttccagtgagaattaaaaaaggactagtgatgatatagcaaacctggacctgaaatttgggggtggggggtggggggatatctgttttgcagagaaaatttaccagcctccagcaaaatctctgcatcttgtactcaatagcaaccattagtattgtcatttaaaaagaatgaatcaaaaattcatacgtaatggaatgaaaagaggaaaactttctattaaacactgtcaagaaagacccattgctatctatcacctatgaaattaaacctaaaaaaatttttttttattgtaaaagcgactgctcgttgatgtctggaagtgatccagactttgtttcactgtgatccaaaaagttagacattccttccatttctcaagatttggtaacaatttttttttaagtcagcatttcatataatacataaaattaagacaaattaacttactgatatgtggccaatatcaacccttctcacccaacccaaacatgttctggagatagaaggacttatcctcaattatattccagtaaatttatctccataatctgttttatcccctaatgtatgatatatctcaccaaatttttctagaattgaataaaagcagtttttgcttaacttgaatttccttccacaaatacaaccttcagctcttccctctctgtttcccttttgcccacattgcaaatagtcttcataatagaaccctcactgcaacttaaaagggtcccatttcttaactcagcatttcatataccaagaacacttgcaaagatttcttcataatgtgattttttaatttttcagttccagaagcatttcctacagttcgaacgttattttttctctcagattttcaacttgaagctttgatttgcactgaattaacttggataaaattttagtttctctcttcagctaacagatttggaagcaaattacagtatacttgaataattcaggtactacctgttgacctggaattttagtgattctgggaaagttttccagacaaagacaccaatagagtgaagggttttttccccaattactattttattgttttttaaaatgcctttttaaaacttgtgtgatgtggcaaaatagtcatatgttcaattaatttatattttattcattccttttcaattctggttattatgtaacctcaagtactttatctgttcttttaaagtattttataaaatgaacgttaactaaa

SEQ ID NO: 246985 - DNA, 3350 bp, Artificial Sequence
  derived and/or modified sequence
ctgggtcctgtgtgtgccacaggggtggggtgtccagcgagcggtctcctcctcctgctagtgctgctgcggcgtcccgcggcctccccgagtcgggcgggaggggagagcgggtgtggatttgtcttgacggtaattgttgcgtttccacgtctcggaggcctgcgcgctgggttgctccttcttcgggagcgagctgttctcagcgatcccactcccagccggggctccccacacacactgggctgcgtgcgtgtggagtgggacccgcgcacacgcgtgtctctggacagctacggcgccgaaagaactaaaattccagatggcaaactcaatgaatggcagaaaccctggtggtcgaggaggaaatccccgaaaaggtcgaattttgggtattattgatgctattcaggatgcagttggaccccctaagcaagctgccgcagatcgcaggaccgtggagaagacttggaagctcatggacaaagtggtaagactgtgccaaaatcccaaacttcagttgaaaaatagcccaccatatatacttgatattttgcctgatacatatcagcatttacgacttatattgagtaaatatgatgacaaccagaaacttgcccaactcagtgagaatgagtactttaaaatctacattgatagccttatgaaaaagtcaaaacgggcaataagactctttaaagaaggcaaggagagaatgtatgaagaacagtcacaggacagacgaaatctcacaaaactgtcccttatcttcagtcacatgctggcagaaatcaaagcaatctttcccaatggtcaattccagggagataactttcgtatcacaaaagcagatgctgctgaattctggagaaagttttttggagacaaaactatcgtaccatggaaagtattcagacagtgccttcatgaggtccaccagattagctctggcctggaagcaatggctctaaaatcaacaattgatttaacttgcaatgattacatttcagtttttgaatttgatatttttaccaggctgtttcagccttggggctctattttgcggaattggaatttcttagctgtgacacatccaggttacatggcatttctcacatatgatgaagttaaagcacgactacagaaatatagcaccaaacccggaagctatattttccggttaagttgcactcgattgggacagtgggccattggctatgtgactggggatgggaatatcttacagaccatacctcataacaagcccttatttcaagccctgattgatggcagcagggaaggattttatctttatcctgatgggaggagttataatcctgatttaactggattatgtgaacctacacctcatgaccatataaaagttacacaggaacaatatgaattatattgtgaaatgggctccacttttcagctctgtaagatttgtgcagagaatgacaaagatgtcaagattgagccttgtgggcatttgatgtgcacctcttgccttacggcatggcaggagtcggatggtcagggctgccctttctgtcgttgtgaaataaaaggaactgagcccataatcgtggacccctttgatccaagagatgaaggctccaggtgttgcagcatcattgacccctttggcatgccgatgctagacttggacgacgatgatgatcgtgaggagtccttgatgatgaatcggttggcaaacgtccgaaagtgcactgacaggcagaactcaccagtcacatcaccaggatcctctccccttgcccagagaagaaagccacagcctgacccactccagatcccacatctaagcctgccacccgtgcctcctcgcctggatctaattcagaaaggcatagttagatctccctgtggcagcccaacgggttcaccaaagtcttctccttgcatggtgagaaaacaagataaaccactcccagcaccacctcctcccttaagagatcctcctccaccgccacctgaaagacctccaccaatcccaccagacaatagactgagtagacacatccatcatgtggaaagcgtgccttccagagacccgccaatgcctcttgaagcatggtgccctcgggatgtgtttgggactaatcagcttgtgggatgtcgactcctaggggagggctctccaaaacctggaatcacagcgagttcaaatgtcaatggaaggcacagtagagtgggctctgacccagtgcttatgcggaaacacagacgccatgatttgcctttagaaggagctaaggtcttttccaatggtcaccttggaagtgaagaatatgatgttcctccccggctttctcctcctcctccagttaccaccctcctccctagcataaagtgtactggtccgttagcaaattctctttcagagaaaacaagagacccagtagaggaagatgatgatgaatacaagattccttcatcccaccctgtttccctgaattcacaaccatctcattgtcataatgtaaaacctcctgttcggtcttgtgataatggtcactgtatgctgaatggaacacatggtccatcttcagagaagaaatcaaacatccctgacttaagcatatatttaaagggtacgtatagaatataatttcctttgtgatgtacatcttaatggtcagaatttaaaggcaaaatttcatgccattgtactgaaaatacattaaggttttgtgttatcctctaggagatgtttttgattcagcctctgatcccgtgccattaccacctgccaggcctccaactcgggacaatccaaagcatggttcttcactcaacaggacgccctctgattatgatcttctcatccctccattaggttgaaacctttaaaaaagttttgaacaacccacccctccttcttttaatttcagaattttcagaattcagagttcagtataacacagactcactgggttgtgaatttgcctgaaatttgaatgggttctccaggtgccggtgactcccaagttcacgagaccattactccatgtagatgattaaggtagtagtgtagtagttgggcatcagtcaggttttaagcaagttgttttgtccatactaaatgtagtctaaaaacacatgagagctttgtgctctagtagttttgaagtgatgacttgaagtgttgagattttctttaagtataataattcttaataaatatgaacttgcttttcttgcagcatgagcaccagttccacttacgctaattaaattatgcaaaattaaatagttgtatgtagagaactgataataaattctgttttattctaatcattacaactgtaacacattcaaaaaaa

SEQ ID NO: 246986 - DNA, 3237 bp, Artificial Sequence
  derived and/or modified sequence
ctgggtcctgtgtgtgccacaggggtggggtgtccagcgagcggtctcctcctcctgctagtgctgctgcggcgtcccgcggcctccccgagtcgggcgggaggggagagcgggtgtggatttgtcttgacggtaattgttgcgtttccacgtctcggaggcctgcgcgctgggttgctccttcttcgggagcgagctgttctcagcgatcccactcccagccggggctccccacacacactgggctgcgtgcgtgtggagtgggacccgcgcacacgcgtgtctctggacagctacggcgccgaaagaactaaaattccagatggcaaactcaatgaatggcagaaaccctggtggtcgaggaggaaatccccgaaaaggtcgaattttgggtattattgatgctattcaggatgcagttggaccccctaagcaagctgccgcagatcgcaggaccgtggagaagacttggaagctcatggacaaagtggtaagactgtgccaaaatcccaaacttcagttgaaaaatagcccaccatatatacttgatattttgcctgatacatatcagcatttacgacttatattgagtaaatatgatgacaaccagaaacttgcccaactcagtgagaatgagtactttaaaatctacattgatagccttatgaaaaagtcaaaacgggcaataagactctttaaagaaggcaaggagagaatgtatgaagaacagtcacaggacagacgaaatctcacaaaactgtcccttatcttcagtcacatgctggcagaaatcaaagcaatctttcccaatggtcaattccagggagataactttcgtatcacaaaagcagatgctgctgaattctggagaaagttttttggagacaaaactatcgtaccatggaaagtattcagacagtgccttcatgaggtccaccagattagctctggcctggaagcaatggctctaaaatcaacaattgatttaacttgcaatgattacatttcagtttttgaatttgatatttttaccaggctgtttcagccttggggctctattttgcggaattggaatttcttagctgtgacacatccaggttacatggcatttctcacatatgatgaagttaaagcacgactacagaaatatagcaccaaacccggaagctatattttccggttaagttgcactcgattgggacagtgggccattggctatgtgactggggatgggaatatcttacagaccatacctcataacaagcccttatttcaagccctgattgatggcagcagggaaggattttatctttatcctgatgggaggagttataatcctgatttaactggattatgtgaacctacacctcatgaccatataaaagttacacaggaacaatatgaattatattgtgaaatgggctccacttttcagctctgtaagatttgtgcagagaatgacaaagatgtcaagattgagccttgtgggcatttgatgtgcacctcttgccttacggcatggcaggagtcggatggtcagggctgccctttctgtcgttgtgaaataaaaggaactgagcccataatcgtggacccctttgatccaagagatgaaggctccaggtgttgcagcatcattgacccctttggcatgccgatgctagacttggacgacgatgatgatcgtgaggagtccttgatgatgaatcggttggcaaacgtccgaaagtgcactgacaggcagaactcaccagtcacatcaccaggatcctctccccttgcccagagaagaaagccacagcctgacccactccagatcccacatctaagcctgccacccgtgcctcctcgcctggatctaattcagaaaggcatagttagatctccctgtggcagcccaacgggttcaccaaagtcttctccttgcatggtgagaaaacaagataaaccactcccagcaccacctcctcccttaagagatcctcctccaccgccacctgaaagacctccaccaatcccaccagacaatagactgagtagacacatccatcatgtggaaagcgtgccttccagagacccgccaatgcctcttgaagcatggtgccctcgggatgtgtttgggactaatcagcttgtgggatgtcgactcctaggggagggctctccaaaacctggaatcacagcgagttcaaatgtcaatggaaggcacagtagagtgggctctgacccagtgcttatgcggaaacacagacgccatgatttgcctttagaaggagctaaggtcttttccaatggtcaccttggaagtgaagaatatgatgttcctccccggctttctcctcctcctccagttaccaccctcctccctagcataaagtgtactggtccgttagcaaattctctttcagagaaaacaagagacccagtagaggaagatgatgatgaatacaagattccttcatcccaccctgtttccctgaattcacaaccatctcattgtcataatgtaaaacctcctgttcggtcttgtgataatggtcactgtatgctgaatggaacacatggtccatcttcagagaagaaatcaaacatccctgacttaagcatatatttaaagggagatgtttttgattcagcctctgatcccgtgccattaccacctgccaggcctccaactcgggacaatccaaagcatggttcttcactcaacaggacgccctctgattatgatcttctcatccctccattaggttgaaacctttaaaaaagttttgaacaacccacccctccttcttttaatttcagaattttcagaattcagagttcagtataacacagactcactgggttgtgaatttgcctgaaatttgaatgggttctccaggtgccggtgactcccaagttcacgagaccattactccatgtagatgattaaggtagtagtgtagtagttgggcatcagtcaggttttaagcaagttgttttgtccatactaaatgtagtctaaaaacacatgagagctttgtgctctagtagttttgaagtgatgacttgaagtgttgagattttctttaagtataataattcttaataaatatgaacttgcttttcttgcagcatgagcaccagttccacttacgctaattaaattatgcaaaattaaatagttgtatgtagagaactgataataaattctgttttattctaatcattacaactgtaacacattcaaaaaaa

SEQ ID NO: 246987 - DNA, 2949 bp, Artificial Sequence
  derived and/or modified sequence
atggccaacagcatgaacggcagaaaccccggcggcagaggcggcaaccccagaaagggcagaatcctgggcatcatcgacgccatccaggacgccgtgggcccccccaagcaggccgccgccgacagaagaaccgtggagaagacctggaagctgatggacaaggtggtgagactgtgccagaaccccaagctgcagctgaagaacagccccccctacatcctggacatcctgcccgacacctaccagcacctgagactgatcctgagcaagtacgacgacaaccagaagctggcccagctgagcgagaacgagtacttcaagatctacatcgacagcctgatgaagaagagcaagagagccatcagactgttcaaggagggcaaggagagaatgtacgaggagcagagccaggacagaagaaacctgaccaagctgagcctgatcttcagccacatgctggccgagatcaaggccatcttccccaacggccagttccagggcgacaacttcagaatcaccaaggccgacgccgccgagttctggagaaagttcttcggcgacaagaccatcgtgccctggaaggtgttcagacagtgcctgcacgaggtgcaccagatcagcagcggcctggaggccatggccctgaagagcaccatcgacctgacctgcaacgactacatcagcgtgttcgagttcgacatcttcaccagactgttccagccctggggcagcatcctgagaaactggaacttcctggccgtgacccaccccggctacatggccttcctgacctacgacgaggtgaaggccagactgcagaagtacagcaccaagcccggcagctacatcttcagactgagctgcaccagactgggccagtgggccatcggctacgtgaccggcgacggcaacatcctgcagaccatcccccacaacaagcccctgttccaggccctgatcgacggcagcagagagggcttctacctgtaccccgacggcagaagctacaaccccgacctgaccggcctgtgcgagcccaccccccacgaccacatcaaggtgacccaggagcagtacgagctgtactgcgagatgggcagcaccttccagctgtgcaagatctgcgccgagaacgacaaggacgtgaagatcgagccctgcggccacctgatgtgcaccagctgcctgaccgcctggcaggagagcgacggccagggctgccccttctgcagatgcgagatcaagggcaccgagcccatcatcgtggaccccttcgaccccagagacgagggcagcagatgctgcagcatcatcgaccccttcggcatgcccatgctggacctggacgacgacgacgacagagaggagagcctgatgatgaacagactggccaacgtgagaaagtgcaccgacagacagaacagccccgtgaccagccccggcagcagccccctggcccagagaagaaagccccagcccgaccccctgcagatcccccacctgagcctgccccccgtgccccccagactggacctgatccagaagggcatcgtgagaagcccctgcggcagccccaccggcagccccaagagcagcccctgcatggtgagaaagcaggacaagcccctgcccgccccccccccccccctgagagacccccccccccccccccccgagagacccccccccatcccccccgacaacagactgagcagacacatccaccacgtggagagcgtgcccagcagagacccccccatgcccctggaggcctggtgccccagagacgtgttcggcaccaaccagctggtgggctgcagactgctgggcgagggcagccccaagcccggcatcaccgccagcagcaacgtgaacggcagacacagcagagtgggcagcgaccccgtgctgatgagaaagcacagaagacacgacctgcccctggagggcgccaaggtgttcagcaacggccacctgggcagcgaggagtacgacgtgccccccagactgagcccccccccccccgtgaccaccctgctgcccagcatcaagtgcaccggccccctggccaacagcctgagcgagaagaccagagaccccgtggaggaggacgacgacgagtacaagatccccagcagccaccccgtgagcctgaacagccagcccagccactgccacaacgtgaagccccccgtgagaagctgcgacaacggccactgcatgctgaacggcacccacggccccagcagcgagaagaagagcaacatccccgacctgagcatctacctgaagggcgacgtgttcgacagcgccagcgaccccgtgcccctgccccccgccagaccccccaccagagacaaccccaagcacggcagcagcctgaacagaacccccagcgactacgacctgctgatcccccccctgggcgaggacgccttcgacgccctgccccccagcctgccccccccccccccccccgccagacacagcctgatcgagcacagcaagccccccggcagcagcagcagacccagcagcggccaggacctgttcctgctgcccagcgaccccttcgtggacctggccagcggccaggtgcccctgccccccgccagaagactgcccggcgagaacgtgaagaccaacagaaccagccaggactacgaccagctgcccagctgcagcgacggcagccaggcccccgccagaccccccaagcccagacccagaagaaccgcccccgagatccaccacagaaagccccacggccccgaggccgccctggagaacgtggacgccaagatcgccaagctgatgggcgagggctacgccttcgaggaggtgaagagagccctggagatcgcccagaacaacgtggaggtggccagaagcatcctgagagagttcgccttccccccccccgtgagccccagactgaacctgtag

SEQ ID NO: 246988 - DNA, 2313 bp, Artificial Sequence
  derived and/or modified sequence
atggccaacagcatgaacggcagaaaccccggcggcagaggcggcaaccccagaaagggcagaatcctgggcatcatcgacgccatccaggacgccgtgggcccccccaagcaggccgccgccgacagaagaaccgtggagaagacctggaagctgatggacaaggtggtgagactgtgccagaaccccaagctgcagctgaagaacagccccccctacatcctggacatcctgcccgacacctaccagcacctgagactgatcctgagcaagtacgacgacaaccagaagctggcccagctgagcgagaacgagtacttcaagatctacatcgacagcctgatgaagaagagcaagagagccatcagactgttcaaggagggcaaggagagaatgtacgaggagcagagccaggacagaagaaacctgaccaagctgagcctgatcttcagccacatgctggccgagatcaaggccatcttccccaacggccagttccagggcgacaacttcagaatcaccaaggccgacgccgccgagttctggagaaagttcttcggcgacaagaccatcgtgccctggaaggtgttcagacagtgcctgcacgaggtgcaccagatcagcagcggcctggaggccatggccctgaagagcaccatcgacctgacctgcaacgactacatcagcgtgttcgagttcgacatcttcaccagactgttccagccctggggcagcatcctgagaaactggaacttcctggccgtgacccaccccggctacatggccttcctgacctacgacgaggtgaaggccagactgcagaagtacagcaccaagcccggcagctacatcttcagactgagctgcaccagactgggccagtgggccatcggctacgtgaccggcgacggcaacatcctgcagaccatcccccacaacaagcccctgttccaggccctgatcgacggcagcagagagggcttctacctgtaccccgacggcagaagctacaaccccgacctgaccggcctgtgcgagcccaccccccacgaccacatcaaggtgacccaggagcagtacgagctgtactgcgagatgggcagcaccttccagctgtgcaagatctgcgccgagaacgacaaggacgtgaagatcgagccctgcggccacctgatgtgcaccagctgcctgaccgcctggcaggagagcgacggccagggctgccccttctgcagatgcgagatcaagggcaccgagcccatcatcgtggaccccttcgaccccagagacgagggcagcagatgctgcagcatcatcgaccccttcggcatgcccatgctggacctggacgacgacgacgacagagaggagagcctgatgatgaacagactggccaacgtgagaaagtgcaccgacagacagaacagccccgtgaccagccccggcagcagccccctggcccagagaagaaagccccagcccgaccccctgcagatcccccacctgagcctgccccccgtgccccccagactggacctgatccagaagggcatcgtgagaagcccctgcggcagccccaccggcagccccaagagcagcccctgcatggtgagaaagcaggacaagcccctgcccgccccccccccccccctgagagacccccccccccccccccccgagagacccccccccatcccccccgacaacagactgagcagacacatccaccacgtggagagcgtgcccagcagagacccccccatgcccctggaggcctggtgccccagagacgtgttcggcaccaaccagctggtgggctgcagactgctgggcgagggcagccccaagcccggcatcaccgccagcagcaacgtgaacggcagacacagcagagtgggcagcgaccccgtgctgatgagaaagcacagaagacacgacctgcccctggagggcgccaaggtgttcagcaacggccacctgggcagcgaggagtacgacgtgccccccagactgagcccccccccccccgtgaccaccctgctgcccagcatcaagtgcaccggccccctggccaacagcctgagcgagaagaccagagaccccgtggaggaggacgacgacgagtacaagatccccagcagccaccccgtgagcctgaacagccagcccagccactgccacaacgtgaagccccccgtgagaagctgcgacaacggccactgcatgctgaacggcacccacggccccagcagcgagaagaagagcaacatccccgacctgagcatctacctgaagggcacctacagaatctag

SEQ ID NO: 246989 - DNA, 2433 bp, Artificial Sequence
  derived and/or modified sequence
atggccaacagcatgaacggcagaaaccccggcggcagaggcggcaaccccagaaagggcagaatcctgggcatcatcgacgccatccaggacgccgtgggcccccccaagcaggccgccgccgacagaagaaccgtggagaagacctggaagctgatggacaaggtggtgagactgtgccagaaccccaagctgcagctgaagaacagccccccctacatcctggacatcctgcccgacacctaccagcacctgagactgatcctgagcaagtacgacgacaaccagaagctggcccagctgagcgagaacgagtacttcaagatctacatcgacagcctgatgaagaagagcaagagagccatcagactgttcaaggagggcaaggagagaatgtacgaggagcagagccaggacagaagaaacctgaccaagctgagcctgatcttcagccacatgctggccgagatcaaggccatcttccccaacggccagttccagggcgacaacttcagaatcaccaaggccgacgccgccgagttctggagaaagttcttcggcgacaagaccatcgtgccctggaaggtgttcagacagtgcctgcacgaggtgcaccagatcagcagcggcctggaggccatggccctgaagagcaccatcgacctgacctgcaacgactacatcagcgtgttcgagttcgacatcttcaccagactgttccagccctggggcagcatcctgagaaactggaacttcctggccgtgacccaccccggctacatggccttcctgacctacgacgaggtgaaggccagactgcagaagtacagcaccaagcccggcagctacatcttcagactgagctgcaccagactgggccagtgggccatcggctacgtgaccggcgacggcaacatcctgcagaccatcccccacaacaagcccctgttccaggccctgatcgacggcagcagagagggcttctacctgtaccccgacggcagaagctacaaccccgacctgaccggcctgtgcgagcccaccccccacgaccacatcaaggtgacccaggagcagtacgagctgtactgcgagatgggcagcaccttccagctgtgcaagatctgcgccgagaacgacaaggacgtgaagatcgagccctgcggccacctgatgtgcaccagctgcctgaccgcctggcaggagagcgacggccagggctgccccttctgcagatgcgagatcaagggcaccgagcccatcatcgtggaccccttcgaccccagagacgagggcagcagatgctgcagcatcatcgaccccttcggcatgcccatgctggacctggacgacgacgacgacagagaggagagcctgatgatgaacagactggccaacgtgagaaagtgcaccgacagacagaacagccccgtgaccagccccggcagcagccccctggcccagagaagaaagccccagcccgaccccctgcagatcccccacctgagcctgccccccgtgccccccagactggacctgatccagaagggcatcgtgagaagcccctgcggcagccccaccggcagccccaagagcagcccctgcatggtgagaaagcaggacaagcccctgcccgccccccccccccccctgagagacccccccccccccccccccgagagacccccccccatcccccccgacaacagactgagcagacacatccaccacgtggagagcgtgcccagcagagacccccccatgcccctggaggcctggtgccccagagacgtgttcggcaccaaccagctggtgggctgcagactgctgggcgagggcagccccaagcccggcatcaccgccagcagcaacgtgaacggcagacacagcagagtgggcagcgaccccgtgctgatgagaaagcacagaagacacgacctgcccctggagggcgccaaggtgttcagcaacggccacctgggcagcgaggagtacgacgtgccccccagactgagcccccccccccccgtgaccaccctgctgcccagcatcaagtgcaccggccccctggccaacagcctgagcgagaagaccagagaccccgtggaggaggacgacgacgagtacaagatccccagcagccaccccgtgagcctgaacagccagcccagccactgccacaacgtgaagccccccgtgagaagctgcgacaacggccactgcatgctgaacggcacccacggccccagcagcgagaagaagagcaacatccccgacctgagcatctacctgaagggcgacgtgttcgacagcgccagcgaccccgtgcccctgccccccgccagaccccccaccagagacaaccccaagcacggcagcagcctgaacagaacccccagcgactacgacctgctgatcccccccctgggctag

SEQ ID NO: 246990 - protein, 1303 aa, Artificial Sequence
  derived and/or modified sequence
MGDPAPARSLDDIDLSALRDPAGIFELVEVVGNGTYGQVYKGRHVKTGQLAAIKVMDVTEDEEEEIKQEINMLKKYSHHRNIATYYGAFIKKSPPGNDDQLWLVMEFCGAGSVTDLVKNTKGNALKEDCIAYICREILRGLAHLHAHKVIHRDIKGQNVLLTENAEVKLVDFGVSAQLDRTVGRRNTFIGTPYWMAPEVIACDENPDATYDYRSDIWSLGITAIEMAEGAPPLCDMHPMRALFLIPRNPPPRLKSKKWSKKFIDFIDTCLIKTYLSRPPTEQLLKFPFIRDQPTERQVRIQLKDHIDRSRKKRGEKEETEYEYSGSEEEDDSHGEEGEPSSIMNVPGESTLRREFLRLQQENKSNSEALKQQQQLQQQQQRDPEAHIKHLLHQRQRRIEEQKEERRRVEEQQRREREQRKLQEKEQQRRLEDMQALRREEERRQAEREQEYKRKQLEEQRQSERLQRQLQQEHAYLKSLQQQQQQQQLQKQQQQQLLPGDRKPLYHYGRGMNPADKPAWAREVEERTRMNKQQNSPLAKSKPGSTGPEPPIPQASPGPPGPLSQTPPMQRPVEPQEGPHKSLVAHRVPLKPYAAPVPRSQSLQDQPTRNLAAFPASHDPDPAIPAPTATPSARGAVIRQNSDPTSEGPGPSPNPPAWVRPDNEAPPKVPQRTSSIATALNTSGAGGSRPAQAVRASNPDLRRSDPGWERSDSVLPASHGHLPQAGSLERNRVGVSSKPDSSPVLSPGNKAKPDDHRSRPGRPASYKRAIGEDFVLLKERTLDEAPRPPKKAMDYSSSSEEVESSEDDEEEGEGGPAEGSRDTPGGRSDGDTDSVSTMVVHDVEEITGTQPPYGGGTMVVQRTPEEERNLLHADSNGYTNLPDVVQPSHSPTENSKGQSPPSKDGSGDYQSRGLVKAPGKSSFTMFVDLGIYQPGGSGDSIPITALVGGEGTRLDQLQYDVRKGSVVNVNPTNTRAHSETPEIRKYKKRFNSEILCAALWGVNLLVGTENGLMLLDRSGQGKVYGLIGRRRFQQMDVLEGLNLLITISGKRNKLRVYYLSWLRNKILHNDPEVEKKQGWTTVGDMEGCGHYRVVKYERIKFLVIALKSSVEVYAWAPKPYHKFMAFKSFADLPHRPLLVDLTVEEGQRLKVIYGSSAGFHAVDVDSGNSYDIYIPVHIQSQITPHAIIFLPNTDGMEMLLCYEDEGVYVNTYGRIIKDVVLQWGEMPTSVAYICSNQIMGWGEKAIEIRSVETGHLDGVFMHKRAQRLKFLCERNDKVFFASVRSGGSSQVYFMTLNRNCIMNW

SEQ ID NO: 246991 - DNA, 3912 bp, Artificial Sequence
  derived and/or modified sequence
atgggcgaccccgctccagcacggtctctggatgacattgacctttccgctctcagggatcccgccgggatattcgaactggtggaggtggttggtaatggcacctacgggcaggtgtataaagggcgacacgtcaagaccggccaactggcagctattaaagttatggatgtgacggaagatgaagaagaagaaatcaaacaggagattaacatgctgaagaagtactcccaccatcgcaacatcgcgacatattatggcgccttcattaagaaatctccgcccgggaacgacgaccaattgtggctcgtcatggagttctgcggggcaggcagcgtaaccgatttagtgaagaatacgaagggcaacgcccttaaggaagattgcattgcctacatctgtcgagaaattcttcggggtctggcccacctgcacgctcacaaagtgatacaccgcgacatcaaggggcaaaatgtgcttctaaccgagaacgctgaagtgaagttagtggactttggcgtgagtgcccagctagacaggaccgtgggacgccgcaatacatttatcggaactccctattggatggctccagaagtcatcgcttgtgatgagaacccggatgctacctatgattacaggtcagatatctggtcccttggcatcactgccattgaaatggctgaaggagcgccaccactctgtgacatgcaccctatgcgggccctgtttctcataccccgtaacccaccacctcggttaaagagtaagaagtggagtaagaaatttatagattttattgacacttgtctgattaagacttacttgtccagaccaccaactgaacagctgctcaagttcccattcattagagaccagcctaccgaaagacaagtgcgcatccagcttaaagatcatatagatcgctcacgtaagaagcgaggcgagaaggaggaaaccgaatatgagtatagcgggagcgaggaggaagacgactcacacggcgaagagggtgagccatcttctattatgaacgtgcctggcgagagcaccttgagacgagagtttctcagactgcagcaggagaataaaagtaactccgaggctttaaagcagcagcagcaactgcagcagcagcaacagcgtgatccggaggcccacatcaagcaccttttgcaccaacgccagcgcaggatcgaggaacagaaggaagaacgacgcagagtggaggagcagcagcggcgcgaacgagaacagcggaaactacaagagaaggagcagcagagacgtcttgaagacatgcaagccctcaggagagaagaagagcggcgtcaggctgagcgcgagcaggaatacaagagaaagcagcttgaagagcagcgccagagtgagaggttgcagcgccagttgcagcaggagcacgcctatctgaaaagtttacagcagcagcagcagcagcagcaactgcagaagcagcagcagcaacaacttcttcccggagatagaaaaccgttatatcattatggcaggggaatgaatcctgcggataaaccggcttgggccagagaagttgaggagaggacacggatgaacaagcagcagaactctcccctggccaagagcaaacctggatccacaggacccgagccgcccatcccccaggcttcacctgggccccccgggccgctttcccaaacacccccgatgcagcgccctgttgagcctcaggagggcccacacaagagtctggtcgctcatagggtgcctctgaaaccttatgccgcccccgtcccgcgctcacagtccctgcaggatcagcccacgcgcaatctcgctgcgtttcccgccagtcatgatcctgaccctgcaatacccgcccccacagctacgcccagtgccaggggcgccgttatccggcaaaacagcgaccctactagcgagggtccagggccttctccgaaccctccagcgtgggtgcgcccagataacgaggcaccgccgaaggttcctcagcggaccagctctatcgccaccgcccttaacaccagcggcgccgggggcagcagacccgcgcaggccgtgagagcgtccaatcccgatctccgccgatctgatcccggctgggagcgaagtgattcagttctaccagcgtcccatggtcacctgccgcaggctggaagtctggagagaaatagagtgggtgtctcttccaaacctgactcatcgccagtgttgagtcctggaaacaaggctaagccggatgaccatcgaagccggccgggcaggcctgcgtcatataaaagagccatcggcgaggatttcgttcttcttaaagagaggacactggatgaagcacctcgccctccaaaaaaggctatggactactcttcttcctccgaagaggtggaaagcagtgaggatgatgaggaagaaggcgaaggagggcctgcagagggctcccgggatacaccagggggtcggagcgacggtgatactgattcggtgtctacaatggtggtgcacgatgtggaggaaatcaccggtactcaacctccttatggcggcgggacaatggttgttcagcgcactcctgaggaggagcggaatctcctgcacgcggactccaatggatacacaaatttgcccgacgtcgttcagccttcccattctcctactgagaatagtaaaggacaaagcccaccctcaaaagacggatctggtgactaccagtcaaggggtctcgtgaaagccccaggaaaaagttcatttacaatgttcgttgatctgggaatctaccaaccagggggatctggagatagcattccaatcaccgcgcttgtggggggagagggaacaagattagaccagctccagtatgacgtgcggaaggggtcggtggttaatgtaaaccccaccaataccagggctcattctgaaactccggagatccgcaaatataagaagcgttttaattcggagatcctgtgtgccgcactgtggggagtgaacctactagtgggcactgagaacggcctgatgctcctcgaccgatctggtcaaggcaaggtctacgggctgatcgggaggagacgcttccagcagatggacgttttggagggcctcaatctgctgattacaataagcggaaagagaaataagcttcgcgtatactatctgtcttggctaagaaacaagatcctgcataacgaccccgaggtggagaagaagcaaggttggaccactgtgggcgatatggaaggatgtggccactatcgcgtggtaaagtatgagagaatcaagtttctcgtgattgcactcaagagctccgtcgaggtgtatgcgtgggctccaaaaccgtatcataaatttatggcctttaaaagtttcgccgacctccctcaccggcctcttctggtagacctcactgtggaggaaggccagcgtctgaaagtgatctacggctcctcagctgggtttcacgcagtggacgtggattccggtaatagctatgacatctatataccggtgcacattcagtctcagataaccccacatgcaatcatttttcttccaaacacagacgggatggagatgcttctctgttatgaggacgaaggagtctatgtgaacacctacgggagaattatcaaagacgtggtgctacagtggggggagatgccgacctcagtagcgtacatttgttccaatcagattatgggttggggcgagaaggctattgagattcggtctgttgaaaccggtcaccttgacggggtgttcatgcataaacgggcacaacgactaaaattcctgtgtgagagaaacgacaaggtcttttttgcaagtgtgaggtcagggggaagctctcaagtctactttatgacactcaaccgcaattgcatcatgaactggtag

SEQ ID NO: 246992 - DNA, 3912 bp, Artificial Sequence
  derived and/or modified sequence
atgggagaccctgccccagcccggagcctggatgacatcgacctgagcgccctgcgggaccctgctggcatctttgagctggtggaggtggtgggcaatggcacctacggccaggtgtacaagggccgccacgtgaagacaggccagctggccgccatcaaggtgatggatgtgacagaagatgaggaggaggagatcaagcaggagatcaacatgctgaagaagtacagccaccacaggaacatcgccacctactacggggccttcatcaagaagagccccccaggaaatgatgaccagctgtggctggtgatggagttctgtggggccggctctgtgacagacctggtgaagaacaccaagggaaatgccctgaaggaggactgcatcgcctacatctgccgggagatcctgcggggcctggcccacctgcacgcccacaaggtgatccaccgggacatcaagggccagaatgtgctgctgacagaaaatgctgaggtgaagctggtggactttggagtgtctgcccagctggacagaacagtgggcagaagaaacaccttcatcggcaccccctactggatggcccctgaggtgattgcctgtgatgagaacccagatgccacctatgactacagaagtgacatctggagcctgggcatcacagccatcgagatggccgagggcgccccacccctgtgtgacatgcaccccatgagggccctcttcctgatccccagaaatcctccaccccggctgaagagcaagaagtggagcaagaagttcatcgacttcatcgacacctgcctgatcaagacctacctgagccggcccccaacagagcagctgctgaagttccccttcatccgggaccagcccacagagcggcaggtgcgcatccagctgaaggaccacatcgacaggagcaggaagaagagaggagagaaggaggagacagaatatgagtacagcggcagcgaggaggaggatgacagccatggagaggagggggagcccagcagcatcatgaatgtgcctggagagagcaccctgcggcgggagttcctgcggctgcagcaggagaacaagagcaacagcgaggccctgaagcagcagcagcagctgcagcagcagcagcagagggaccctgaggcccacatcaagcacctgctgcaccagaggcagaggcgcatcgaggagcagaaggaggagcggcggcgggtggaggagcagcagaggcgggagcgggagcagaggaagctgcaggagaaggagcagcagaggcggctggaggacatgcaggccctgcggcgggaggaggagcggcggcaggccgagcgggagcaggagtacaagaggaagcagctggaggagcagaggcagagcgagcggctgcagaggcagctgcagcaggagcacgcctacctgaagagcctgcagcagcagcagcagcagcagcagctgcagaagcagcagcagcagcagctgctgcccggggacaggaagcccctgtaccactacggccggggcatgaacccagctgacaagccagcctgggcccgggaggtggaggagaggaccaggatgaacaagcagcagaacagccccctggccaagagcaagccaggcagcactggacctgagccccccatcccccaggccagccctggccccccaggccccctgagccagaccccacccatgcagaggcctgtggagccccaggagggcccccacaagagcctggtggcccaccgggtgcccctgaagccctatgctgcccctgtgcccaggagccagagcctgcaggaccagcccaccaggaacctggccgccttccctgccagccatgaccctgaccctgccatcccagcccccacagccaccccatctgcccggggagctgtgatccggcagaacagcgaccccaccagcgagggccctggccccagccccaaccccccagcctgggtgcggccagacaatgaggccccacccaaggtgccccagaggaccagcagcatcgccacagccctgaacaccagcggggccggcggcagcaggcctgcccaggccgtgcgggccagcaacccagacctgcggcggagtgaccccggctgggagaggagtgacagcgtgctgcctgccagccacggccacctgccccaggccggcagcctggagaggaacagagtgggcgtgagcagcaagccagacagcagccctgtgctgagccctggcaacaaggccaagccagatgaccacaggagcaggcctggccggcctgccagctacaagagggccatcggagaagattttgtgctgctgaaggagaggaccctggatgaggcccccaggcctcccaagaaggccatggactacagcagcagcagcgaggaggtggagagcagtgaagatgatgaggaggagggggagggcggccctgctgagggcagccgggacaccccaggcggccgcagtgatggagacacagattctgtgtccaccatggtggtgcatgatgtggaggagatcaccggcacccagcccccctacggcggcggcaccatggtggtgcagaggaccccagaggaggagaggaacctgctgcacgccgacagcaatggctacaccaacctgcctgatgtggtgcagcccagccacagccccacagagaacagcaagggccagagcccccccagcaaggatggcagcggggactaccagagccggggcctggtgaaggcccctgggaagagcagcttcaccatgtttgtggacctgggcatctaccagcccggcggcagcggggacagcatccccatcacagccctggtgggcggggagggcacccggctggaccagctgcagtatgatgtgaggaagggctctgtggtgaatgtgaaccccaccaacacccgggcccacagcgagaccccagagatcaggaagtacaagaagcgcttcaacagcgagatcctgtgtgccgccctgtggggcgtgaacctgctggtgggcacagaaaatggcctgatgctgctggacagaagtggccagggcaaggtgtatggcctcatcggcagaagacgcttccagcagatggatgtgctggagggcctgaacctgctgatcaccatcagcggcaagaggaacaagctgcgggtgtactacctgtcctggctgaggaacaagatcctgcacaatgaccctgaggtggagaagaagcagggctggaccaccgtgggggacatggagggctgcggccactacagagtggtgaagtatgagcgcatcaagttcctggtgattgccctgaagagctctgtggaggtgtatgcctgggcccccaagccctaccacaagttcatggccttcaagagctttgctgacctgccccaccggcccctgctggtggacctgactgtggaggagggccagaggctgaaggtgatctacggcagcagcgctggcttccacgctgtggatgtggacagcggcaacagctatgacatctacatccctgtgcacatccagagccagatcaccccccacgccatcatcttcctgcccaacacagatggcatggagatgctgctgtgctatgaagatgaaggagtgtatgtgaacacctacggccgcatcatcaaggatgtggtgctgcagtggggcgagatgcccacctctgtggcctacatctgcagcaaccagatcatgggctggggcgagaaggccatcgagatccgctctgtggagaccggccacctggatggagtcttcatgcacaagagggcccagaggctgaagttcctgtgtgaaagaaatgacaaggtgttctttgcctctgtgcgcagcggcggcagcagccaggtgtacttcatgaccctgaacagaaactgcatcatgaactggtag

SEQ ID NO: 246993 - DNA, 4929 bp, Artificial Sequence
  derived and/or modified sequence
agtgcgcggtcgctccgcgcctgcgcaggagaggtggtaggctcgggtggctggctccggggagatagcgcctgtcagtcggtgggtcggtcctcgcgccggccctccccctccccggtctccgggggaggcgcggtggagtccgcccccggggttctccgatgggggagaagcggcgacggcggcagtggagtaaccgagccggagcgtgagcggccccggtgccccgttccccacggaggccatgggcgacccagcccccgcccgcagcctggacgacatcgacctgtccgccctgcgggaccctgctgggatctttgagcttgtggaggtggtcggcaatggaacctacggacaggtgtacaagggtcggcatgtcaagacggggcagctggctgccatcaaggtcatggatgtcacggaggacgaggaggaagagatcaaacaggagatcaacatgctgaaaaagtactctcaccaccgcaacatcgccacctactacggagccttcatcaagaagagccccccgggaaacgatgaccagctctggctggtgatggagttctgtggtgctggttcagtgactgacctggtaaagaacacaaaaggcaacgccctgaaggaggactgtatcgcctatatctgcagggagatcctcaggggtctggcccatctccatgcccacaaggtgatccatcgagacatcaaggggcagaatgtgctgctgacagagaatgctgaggtcaagctagtggattttggggtgagtgctcagctggaccgcaccgtgggcagacggaacactttcattgggactccctactggatggctccagaggtcatcgcctgtgatgagaaccctgatgccacctatgattacaggagtgatatttggtctctaggaatcacagccatcgagatggcagagggagccccccctctgtgtgacatgcaccccatgcgagccctcttcctcattcctcggaaccctccgcccaggctcaagtccaagaagtggtctaagaagttcattgacttcattgacacatgtctcatcaagacttacctgagccgcccacccacggagcagctactgaagtttcccttcatccgggaccagcccacggagcggcaggtccgcatccagcttaaggaccacattgaccgatcccggaagaagcggggtgagaaagaggagacagaatatgagtacagcggcagcgaggaggaagatgacagccatggagaggaaggagagccaagctccatcatgaacgtgcctggagagtcgactctacgccgggagtttctccggctccagcaggaaaataagagcaactcagaggctttaaaacagcagcagcagctgcagcagcagcagcagcgagaccccgaggcacacatcaaacacctgctgcaccagcggcagcggcgcatagaggagcagaaggaggagcggcgccgcgtggaggagcaacagcggcgggagcgggagcagcggaagctgcaggagaaggagcagcagcggcggctggaggacatgcaggctctgcggcgggaggaggagcggcggcaggcggagcgcgagcaggaatacaagcggaagcagctggaggagcagcggcagtcagaacgtctccagaggcagctgcagcaggagcatgcctacctcaagtccctgcagcagcagcaacagcagcagcagcttcagaaacagcagcagcagcagctcctgcctggggacaggaagcccctgtaccattatggtcggggcatgaatcccgctgacaaaccagcctgggcccgagaggtagaagagagaacaaggatgaacaagcagcagaactctcccttggccaagagcaagccaggcagcacggggcctgagccccccatcccccaggcctccccagggcccccaggacccctttcccagactcctcctatgcagaggccggtggagccccaggagggaccgcacaagagcctggtggcacaccgggtcccactgaagccatatgcagcacctgtaccccgatcccagtccctgcaggaccagcccacccgaaacctggctgccttcccagcctcccatgaccccgaccctgccatccccgcacccactgccacgcccagtgcccgaggagctgtcatccgccagaattcagaccccacctctgaaggacctggccccagcccgaatcccccagcctgggtccgcccagataacgaggccccacccaaggtgcctcagaggacctcatctatcgccactgcccttaacaccagtggggccggagggtcccggccagcccaggcagtccgtgccagtaaccccgacctcaggaggagcgaccctggctgggaacgctcggacagcgtccttccagcctctcacgggcacctcccccaggctggctcactggagcggaaccgcgtgggagtctcctccaaaccggacagctcccctgtgctctcccctgggaataaagccaagcccgacgaccaccgctcacggccaggccggcccgcaagctataagcgagcaattggtgaggactttgtgttgctgaaagagcggactctggacgaggcccctcggcctcccaagaaggccatggactactcgtcgtccagcgaggaggtggaaagcagtgaggacgacgaggaggaaggcgaaggcgggccagcagaggggagcagagatacccctgggggccgcagcgatggggatacagacagcgtcagcaccatggtggtccacgacgtcgaggagatcaccgggacccagcccccatacgggggcggcaccatggtggtccagcgcacccctgaagaggagcggaacctgctgcatgctgacagcaatgggtacacaaacctgcctgacgtggtccagcccagccactcacccaccgagaacagcaaaggccaaagcccaccctcgaaggatgggagtggtgactaccagtctcgtgggctggtaaaggcccctggcaagagctcgttcacgatgtttgtggatctagggatctaccagcctggaggcagtggggacagcatccccatcacagccctagtgggtggagagggcactcggctcgaccagctgcagtacgacgtgaggaagggttctgtggtcaacgtgaatcccaccaacacccgggcccacagtgagacccctgagatccggaagtacaagaagcgattcaactccgagatcctctgtgcagccctttggggggtcaacctgctggtgggcacggagaacgggctgatgttgctggaccgaagtgggcagggcaaggtgtatggactcattgggcggcgacgcttccagcagatggatgtgctggaggggctcaacctgctcatcaccatctcagggaaaaggaacaaactgcgggtgtattacctgtcctggctccggaacaagattctgcacaatgacccagaagtggagaagaagcagggctggaccaccgtgggggacatggagggctgcgggcactaccgtgttgtgaaatacgagcggattaagttcctggtcatcgccctcaagagctccgtggaggtgtatgcctgggcccccaaaccctaccacaaattcatggccttcaagtcctttgccgacctcccccaccgccctctgctggtcgacctgacagtagaggaggggcagcggctcaaggtcatctatggctccagtgctggcttccatgctgtggatgtcgactcggggaacagctatgacatctacatccctgtgcacatccagagccagatcacgccccatgccatcatcttcctccccaacaccgacggcatggagatgctgctgtgctacgaggacgagggtgtctacgtcaacacgtacgggcgcatcattaaggatgtggtgctgcagtggggggagatgcctacttctgtggcctacatctgctccaaccagataatgggctggggtgagaaagccattgagatccgctctgtggagacgggccacctcgacggggtcttcatgcacaaacgagctcagaggctcaagttcctgtgtgagcggaatgacaaggtgttttttgcctcagtccgctctgggggcagcagccaagtttacttcatgactctgaaccgtaactgcatcatgaactggtgacggggccctgggctggggctgtcccacactggacccagctctccccctgcagccaggcttcccgggccgcccctctttcccctccctgggcttttgcttttactggtttgatttcactggagcctgctgggaacgtgacctctgacccctgatgctttcgtgatcacgtgaccatcctcttccccaacatgtcctcttcccaaaactgtgcctgtccccagcttctggggagggacacagcttccccttcccaggaattgagtgggcctagcccctccccccttttctccatttgagaggagagtgcttggggcttgaaccccttaccccactgctgctgactgggcagggccctggacccctttatttgcacgtcaggggagccggctccccccttgaatgtaccagaccctggggggggtcactgggccctagatttttggggggtcaccagccactccaggggcagggaccatttcttcattttctgaaagcactttaatgattccccttcccccaaactccagggaatggaggggggaccccgccagccaaaacattccccccattcccgacccccctctcctcttctagcccatgcccttccccggtggagggagggagcagggagccctcactctccacgccccttgcttgcatctgtatatagtgtgagcagcaagtaacccttctccctccccccccacccctcctcaatgtagtggccttggatatcctgtttgttaataaagacaattcaaccagctcccacc

SEQ ID NO: 246994 - DNA, 3912 bp, Artificial Sequence
  derived and/or modified sequence
atgggcgaccccgcccccgcccggagcctggacgacatcgacctgtctgcactgagggaccccgccgggatatttgagctggtggaagtggttggcaacgggacctacggccaggtctacaagggcagacatgtgaaaaccggccaactcgctgccatcaaagtaatggatgtcacagaagacgaggaagaagagatcaaacaggagattaacatgcttaaaaaatactcacatcatcgtaacattgcaacctattacggagccttcattaaaaagtctccccccgggaacgatgaccagctgtggctggtcatggagttttgcggtgccggatccgtgaccgatctggtgaagaataccaagggcaatgcactcaaagaggattgtattgcgtacatctgtcgcgaaatactgcgcggactggcccacctccatgcccacaaggtcattcacagggacattaagggacagaatgtactgttgactgagaatgccgaggtgaaattggttgatttcggggtgtctgcacagttggacagaacagtgggtcgaagaaacacttttattggcacaccatactggatggcacccgaagtgatcgcgtgcgatgagaatcctgacgctacctatgactatcgcagtgatatatggagtctcggcattacagcaatcgaaatggccgagggcgcaccaccactgtgtgatatgcatccgatgagggcccttttcctgataccgcggaacccacctccaagactcaagtccaagaagtggtcaaagaaatttatcgatttcatcgatacctgtctgataaagacctacctcagtagaccgccgacggagcaactgttaaaattccctttcatacgggaccagcccacagagcgacaggtgaggatccagttaaaagatcacattgatcggtccaggaagaagcgcggagagaaggaagaaactgaatatgagtactccggatcagaggaggaagatgactcacatggagaggagggtgaaccttcctctataatgaatgttcctggagagagcacactcaggagggaattcctgcgcctgcaacaggagaataagagcaattcagaggctctgaagcagcagcagcaattgcagcagcagcaacaaagggaccctgaggcccacattaagcatctgttacaccaacgtcagcggaggattgaagaacagaaggaggagcggaggagagtggaagagcagcagagacgcgaaagggaacagcgaaagctgcaagaaaaggagcagcaaaggaggctcgaggatatgcaggctttgcgccgggaggaggaacgcaggcaggccgagagggaacaggagtacaaaaggaaacagttagaggagcagcggcagtctgagagactccagagacaactgcagcaggaacatgcctatttaaagtccctccaacagcagcagcagcagcagcagctgcagaagcagcagcagcagcagctgctaccaggcgaccgcaagcctctctatcattatgggcgggggatgaaccccgccgataagccagcttgggcccgggaggtagaagaacgaacacgcatgaacaagcagcaaaatagtccactggccaaaagtaaacctggatccactggccctgagcctcccatccctcaggccagtcctggtccaccaggacccctcagccagacccctcctatgcaaagaccagtcgagccgcaagaaggcccgcataagtctcttgtggctcacagggtcccccttaaaccgtatgcagcccctgtccctcggtctcaaagtctccaggatcagcccaccaggaatctggcagcttttcccgcgtcacacgaccctgatccagctattcccgccccaacagctacgccgtcagcgagaggtgccgtgattcgccaaaacagcgatccaacaagtgaggggcctggcccctcccctaatcctccggcctgggtccggccagacaacgaagcaccgcccaaggtgccccaacgaacttcgagcattgctacggcgctgaataccagcggggccggcgggagccgcccagcacaggccgtacgcgctagcaatccggatctgaggagatctgatccggggtgggagaggagcgacagcgtcttgcctgcctcgcatgggcatctcccacaggctggctccttagagaggaacagagtgggagtgagcagtaaacctgacagctccccagttttgagcccagggaacaaggcaaagccggacgaccacaggagcagacctggaagacctgcgtcatacaagcgggcaatcggggaggatttcgtcctccttaaagagcgcactcttgacgaagcccccaggcctcccaaaaaagctatggactacagttcaagcagtgaggaagtggaaagctccgaggacgatgaagaggaaggtgaaggcggaccagccgaaggatccagggacactccgggcggccgcagtgatggggacacagacagtgtttccactatggtggttcatgacgtcgaggagattaccggcacccagccaccatacgggggagggactatggtcgtacaacgaacacctgaggaggaaagaaaccttttgcatgcggactcgaacgggtacactaatctgcccgacgtggttcagcctagccacagcccaacagagaatagcaagggacaaagtcctccatcaaaagacggctctggtgattatcaatctcgcgggctggtcaaggcccctggtaaatcttcctttactatgttcgtcgatctgggtatatatcagcccggaggatcgggagattcaatacccattacagcgttggtggggggtgagggtactcggctggatcaacttcagtatgacgtgcggaaggggagcgtggtcaatgttaaccctaccaacaccagagcccattcagagactccggagattcggaagtacaaaaaacgattcaactctgaaatcttatgcgcggcattgtggggggttaacctactggtgggaacggagaatggactgatgctgttggaccggtccggacagggaaaggtctacggcctgatcgggcgaaggaggtttcagcagatggacgtactggaagggttaaatttactcatcacaatcagtggcaagagaaataagctcagagtctactatttgagttggttgagaaataagatactacacaatgaccccgaagtagagaagaaacagggctggaccactgtgggagatatggaggggtgcggacactacagggtagtgaaatacgaacgcatcaaattccttgtcatcgctctcaaatcaagcgttgaagtttatgcttgggctccaaagccataccacaaattcatggcttttaaatcttttgctgatctgccccatcggcctctgctggtggaccttacggtcgaggaaggccaacgtctgaaggttatttatgggagtagcgcaggatttcacgcggtcgatgtggatagcggaaacagttatgacatctacatcccagtccatatccagtcccagatcacacctcacgccatcatcttcctgcccaatacagatggcatggaaatgctgttatgctacgaggacgaaggcgtctatgtgaatacatacgggcgtataattaaagatgtcgtgttgcagtggggcgaaatgcccactagtgtggcgtatatttgctccaatcagatcatggggtggggggagaaggccattgaaatccgctctgttgagacgggtcacctcgacggagtctttatgcataagcgggctcagaggctcaaatttctctgtgagcgcaatgacaaggtgttttttgcttctgtgaggagcggcggtagcagccaggtctactttatgaccttgaaccggaattgcatcatgaattggtag

SEQ ID NO: 246995 - DNA, 3912 bp, Artificial Sequence
  derived and/or modified sequence
atgggcgatcctgcacctgctcgtagtttagacgatatcgatctgagtgccctgagggatccggctggtattttcgaacttgttgaggtggttggcaacggcacatacgggcaagtttataaaggcaggcatgtgaagacgggccagctcgccgcaattaaggtgatggacgtgactgaagacgaagaagaggaaattaagcaggaaatcaatatgttgaaaaagtatagccatcaccggaatatcgcaacctactatggagcctttatcaaaaaatccccaccaggaaatgatgaccagctgtggctagtgatggagttttgcggggctggaagcgtgaccgatttagtcaagaacacaaaaggaaacgcactgaaagaagactgcatcgcttacatttgtcgcgaaattttgaggggcttggcccatctccacgcacataaggtcatacacagggacattaagggtcagaatgtgctgctcaccgagaatgcggaggtgaagctagttgattttggggtttcagcacagctggatagaaccgtgggcaggcgcaatacatttataggcaccccttattggatggctccggaggttattgcttgcgacgaaaatcccgatgccacatatgactatcggtctgacatttggtccctcggtatcacagcaatcgagatggccgagggtgcccctcctctgtgcgacatgcaccctatgcgagcactgttcctgatcccacggaacccgccaccaaggctaaagtccaaaaaatggtccaaaaagttcattgactttatagacacctgcctgattaagacttacttgtcccgcccacccactgagcagctgctgaagtttccctttattcgcgaccagccaaccgaacgccaggtgcggatccagctcaaggatcatatcgaccgcagtcggaagaaacgtggtgagaaggaggaaactgagtatgagtactccggatccgaagaagaagatgattcacacggagaggaaggcgaaccgtcttccatcatgaacgttcctggggagagcaccctaagacgcgaattcctgcggttacagcaggaaaacaaatctaactccgaagcactcaagcagcagcaacagctacagcagcaacaacagagagatccggaggctcatatcaaacatttgttgcaccagcgccagcgcaggattgaagagcagaaagaggaacgtcggagggtagaagagcagcagcgcagagaaagagaacaacggaagcttcaggaaaaggagcagcagaggaggctggaggacatgcaggctctgcggcgtgaagaggagaggagacaggcggagcgtgaacaggaatacaagcgcaagcagttggaagaacagaggcagtcggagaggctgcagcgacagctgcaacaagagcacgcctacctcaagtcgctgcaacagcagcagcagcagcaacagttgcagaaacagcagcagcaacagctattgcctggtgataggaagcctttgtatcattacggaagaggaatgaatcccgctgacaaaccagcatgggctagggaggtagaggagagaacaaggatgaataaacaacagaattctccacttgctaaatcaaaacctgggtcgacaggtcccgaaccgcctatcccccaagcatccccaggccctcccggaccactaagccagactccccctatgcagcgcccagtcgagccacaggaaggcccacacaaaagtcttgtggcccatcgtgtacctctgaagccgtatgctgccccagttccacgtagccagtccctgcaggaccagcctacccgcaacctcgcggcatttccagcctcacacgaccctgaccccgctatccccgctccaactgcaacaccctctgcccgtggcgcagtgatcaggcagaatagcgatccaacatcagaagggccaggcccttctcctaatcctccagcctgggtgcgacctgacaacgaggcccctcctaaggtgccgcagcgcacttccagcatcgcaacagccctgaatacgagtggcgcaggagggagtaggccagcacaggctgttagagctagcaaccctgatctaagacggagcgacccaggctgggaacggtcagattccgttctccccgcttcacatgggcatttaccccaggccggatcgctcgagaggaaccgcgtcggagtttcatctaaacccgactccagtcctgtgctttctccgggaaacaaggctaaaccagatgaccatagatctcgacccggacgccctgccagctataaacgggcaattggtgaggattttgtgttgctcaaggagagaacactggatgaggcaccacgacctcctaagaaggctatggattacagttcaagctccgaagaggtggagtcctcagaagatgacgaagaggagggcgagggaggacctgcagaaggatcccgcgacacaccgggaggcagatcagatggcgacaccgactcagtgtccacgatggtggttcatgacgtcgaagaaataacagggacacagcccccttacggtgggggtacaatggtagtgcagaggaccccagaggaagaaagaaatctgcttcatgctgatagcaatggctacaccaatctccctgacgtggtccaaccaagtcactcccccacagagaacagcaagggtcaaagccctccttccaaagatggaagcggcgattatcaatcgagaggactggtaaaggctcctgggaagagcagttttacaatgttcgtggacctaggcatctaccagcccggtggatctggcgattctatccctattacagccctcgtgggtggggagggcacccgtttagaccaattgcaatacgacgtgaggaaaggaagtgtagttaacgtcaatccaacaaacacccgggcacatagtgagaccccagaaattcgcaaatacaagaagcggtttaacagtgaaattttgtgtgcggcactttggggagtcaacctgctagtcggaactgagaatgggctgatgttactcgaccgctctgggcaggggaaggtttatggcctgatcggtaggcgaaggtttcagcaaatggatgtgctcgaagggttgaacctactgattaccatctctggtaaaaggaacaaactgcgggtctactacttgtcctggctgcgaaataagatactgcataacgatccagaagtcgaaaaaaagcaagggtggaccaccgtgggggacatggaaggatgtggacattatcgcgtcgtaaagtacgagagaattaaattcttggttatcgcactgaagagttccgtggaagtatacgcctgggctccaaaaccataccacaaatttatggcgttcaagtcatttgcggacttgcctcaccggccattacttgttgatttaacagtggaggagggacagcgcctgaaagtcatctacggctccagcgcgggtttccacgccgttgacgtcgactcaggcaattcttatgacatctacatacctgtgcacattcagagtcagatcacacctcacgccatcatctttctccccaacactgacgggatggagatgttgctctgctacgaggacgaaggcgtctatgtgaatacgtatggccgtattattaaggatgtggtgctccagtggggcgaaatgccgactagcgttgcgtacatctgttccaaccagatcatgggatggggagagaaggcgatcgaaattcggagtgtcgaaactggccaccttgatggtgtcttcatgcacaaaagagcccagcggctcaaattcctgtgtgagcgtaatgacaaagtcttctttgcctcggtacgaagcggagggtcttcacaggtttacttcatgacattgaaccgcaattgcattatgaactggtag

SEQ ID NO: 246996 - DNA, 3912 bp, Artificial Sequence
  derived and/or modified sequence
atgggcgaccccgcccccgccagaagcctggacgacatcgacctgagcgccctgagagaccccgccggcatcttcgagctggtggaggtggtgggcaacggcacctacggccaggtgtacaagggcagacacgtgaagaccggccagctggccgccatcaaggtgatggacgtgaccgaggacgaggaggaggagatcaagcaggagatcaacatgctgaagaagtacagccaccacagaaacatcgccacctactacggcgccttcatcaagaagagcccccccggcaacgacgaccagctgtggctggtgatggagttctgcggcgccggcagcgtgaccgacctggtgaagaacaccaagggcaacgccctgaaggaggactgcatcgcctacatctgcagagagatcctgagaggcctggcccacctgcacgcccacaaggtgatccacagagacatcaagggccagaacgtgctgctgaccgagaacgccgaggtgaagctggtggacttcggcgtgagcgcccagctggacagaaccgtgggcagaagaaacaccttcatcggcaccccctactggatggcccccgaggtgatcgcctgcgacgagaaccccgacgccacctacgactacagaagcgacatctggagcctgggcatcaccgccatcgagatggccgagggcgccccccccctgtgcgacatgcaccccatgagagccctgttcctgatccccagaaaccccccccccagactgaagagcaagaagtggagcaagaagttcatcgacttcatcgacacctgcctgatcaagacctacctgagcagaccccccaccgagcagctgctgaagttccccttcatcagagaccagcccaccgagagacaggtgagaatccagctgaaggaccacatcgacagaagcagaaagaagagaggcgagaaggaggagaccgagtacgagtacagcggcagcgaggaggaggacgacagccacggcgaggagggcgagcccagcagcatcatgaacgtgcccggcgagagcaccctgagaagagagttcctgagactgcagcaggagaacaagagcaacagcgaggccctgaagcagcagcagcagctgcagcagcagcagcagagagaccccgaggcccacatcaagcacctgctgcaccagagacagagaagaatcgaggagcagaaggaggagagaagaagagtggaggagcagcagagaagagagagagagcagagaaagctgcaggagaaggagcagcagagaagactggaggacatgcaggccctgagaagagaggaggagagaagacaggccgagagagagcaggagtacaagagaaagcagctggaggagcagagacagagcgagagactgcagagacagctgcagcaggagcacgcctacctgaagagcctgcagcagcagcagcagcagcagcagctgcagaagcagcagcagcagcagctgctgcccggcgacagaaagcccctgtaccactacggcagaggcatgaaccccgccgacaagcccgcctgggccagagaggtggaggagagaaccagaatgaacaagcagcagaacagccccctggccaagagcaagcccggcagcaccggccccgagccccccatcccccaggccagccccggcccccccggccccctgagccagaccccccccatgcagagacccgtggagccccaggagggcccccacaagagcctggtggcccacagagtgcccctgaagccctacgccgcccccgtgcccagaagccagagcctgcaggaccagcccaccagaaacctggccgccttccccgccagccacgaccccgaccccgccatccccgcccccaccgccacccccagcgccagaggcgccgtgatcagacagaacagcgaccccaccagcgagggccccggccccagccccaacccccccgcctgggtgagacccgacaacgaggccccccccaaggtgccccagagaaccagcagcatcgccaccgccctgaacaccagcggcgccggcggcagcagacccgcccaggccgtgagagccagcaaccccgacctgagaagaagcgaccccggctgggagagaagcgacagcgtgctgcccgccagccacggccacctgccccaggccggcagcctggagagaaacagagtgggcgtgagcagcaagcccgacagcagccccgtgctgagccccggcaacaaggccaagcccgacgaccacagaagcagacccggcagacccgccagctacaagagagccatcggcgaggacttcgtgctgctgaaggagagaaccctggacgaggcccccagaccccccaagaaggccatggactacagcagcagcagcgaggaggtggagagcagcgaggacgacgaggaggagggcgagggcggccccgccgagggcagcagagacacccccggcggcagaagcgacggcgacaccgacagcgtgagcaccatggtggtgcacgacgtggaggagatcaccggcacccagcccccctacggcggcggcaccatggtggtgcagagaacccccgaggaggagagaaacctgctgcacgccgacagcaacggctacaccaacctgcccgacgtggtgcagcccagccacagccccaccgagaacagcaagggccagagcccccccagcaaggacggcagcggcgactaccagagcagaggcctggtgaaggcccccggcaagagcagcttcaccatgttcgtggacctgggcatctaccagcccggcggcagcggcgacagcatccccatcaccgccctggtgggcggcgagggcaccagactggaccagctgcagtacgacgtgagaaagggcagcgtggtgaacgtgaaccccaccaacaccagagcccacagcgagacccccgagatcagaaagtacaagaagagattcaacagcgagatcctgtgcgccgccctgtggggcgtgaacctgctggtgggcaccgagaacggcctgatgctgctggacagaagcggccagggcaaggtgtacggcctgatcggcagaagaagattccagcagatggacgtgctggagggcctgaacctgctgatcaccatcagcggcaagagaaacaagctgagagtgtactacctgagctggctgagaaacaagatcctgcacaacgaccccgaggtggagaagaagcagggctggaccaccgtgggcgacatggagggctgcggccactacagagtggtgaagtacgagagaatcaagttcctggtgatcgccctgaagagcagcgtggaggtgtacgcctgggcccccaagccctaccacaagttcatggccttcaagagcttcgccgacctgccccacagacccctgctggtggacctgaccgtggaggagggccagagactgaaggtgatctacggcagcagcgccggcttccacgccgtggacgtggacagcggcaacagctacgacatctacatccccgtgcacatccagagccagatcaccccccacgccatcatcttcctgcccaacaccgacggcatggagatgctgctgtgctacgaggacgagggcgtgtacgtgaacacctacggcagaatcatcaaggacgtggtgctgcagtggggcgagatgcccaccagcgtggcctacatctgcagcaaccagatcatgggctggggcgagaaggccatcgagatcagaagcgtggagaccggccacctggacggcgtgttcatgcacaagagagcccagagactgaagttcctgtgcgagagaaacgacaaggtgttcttcgccagcgtgagaagcggcggcagcagccaggtgtacttcatgaccctgaacagaaactgcatcatgaactggtag

SEQ ID NO: 246997 - protein, 815 aa, Artificial Sequence
  derived and/or modified sequence
MFRLGLLVCFYNDLELLDATVAQVLLYQMIKCSHLRGFQAGVQKLKAELLDIAMENQTLNETLGSLSDAVVGLTYSQLESLSPEAVHGAISTLNQVSGWAKSQVIILSAKYLAHEKVLSFYNVSQMGALLAGVSTQAFCSMKRKDISQVLRSAVSQYVSDLSPAQQQGILSKMVQAEDTAPGIVEIQGAFFKEVSLFDLRRQPGFNSTVLKDKELGRSQALFLYELLLKTTRRPEELLSAGQLVKGVTCSHIDAMSTDFFLAHFQDFQNNFALLSPYQVNCLAWKYWEVSRLSMPPFLLAALPARYLASVPASQCVPFLISLGKSWLDSLVLDSHKKTSVLRKVQQCLDDSIADEYTVDIMGNLLCHLPAAIIDRGISPRAWATALHGLRDCPDLNPEQKAAVRLKLLGQYGLPQHWTAETTKDLGPFLVLFSGDELSSIATKFPEILLQAASKMARTLPTKEFLWAVFQSVRNSSDKIPSYDPMPGCHGVVAPSSDDIFKLAEANACWALEDLRCMEEDTFIRTVELLGAVQGFSRPQLMTLKEKAIQVWDMPSYWREHHIVSLGRIALALNESELEQLDLSSIDTVASLSWQTEWTPGQAESILQGYLDDSGYSIQDLKSFHLVGLGATLCAINITEIPLIKISEFRVVVARIGTLLCSTHVLAEFKRKAEVVFGDPTEWTSSVLQELGTIAAGLTKAELRMLDKDLMPYFQPSAIKCLPDEIFKELSAEQIASLGPENAAAVTHAQRRRLSPLQLQSLQQALDGAKTHSWQDAPASAGPTRTSSSRSPAGALQSWGLWLGCPLLVLMAKLLW

SEQ ID NO: 246998 - DNA, 2448 bp, Artificial Sequence
  derived and/or modified sequence
atgtttagattgggtctcttggtgtgcttctataatgatctggaactgcttgacgctactgtcgcgcaagtgctgctctaccagatgatcaagtgttcccaccttcgaggtttccaggctggtgtgcagaaacttaaggccgagttgctggatattgccatggaaaaccagaccttaaatgaaactctcgggtctttgtctgacgccgtggtggggttgacatactctcagctggagtccctgagtcccgaggctgtccacggggccatctcaacacttaatcaggtttcaggatgggccaaatcgcaggtgattatcctcagcgcaaaatacctagcgcacgagaaggtgttaagcttctacaacgtttcccaaatgggggctttgctggcaggggtgagcacgcaggctttctgcagtatgaagcgaaaggacatcagccaggtgttacgctcagccgtgagccagtatgtgtcagatctgtctcctgctcagcaacaggggatcttgagtaaaatggtgcaagccgaagatacagcccccggaatagttgaaattcagggcgccttctttaaggaggtgtccctgttcgatctccggagacagcccgggttcaacagcacagttcttaaggacaaagagctgggacgctctcaggccttattcctctatgagctactgcttaagacaaccagaagaccagaggagctgctttcagctggccaactggtgaagggagtgacctgcagccatattgacgccatgagcactgactttttccttgcgcatttccaggattttcagaacaatttcgctctgctcagcccatatcaagtcaactgtcttgcctggaagtactgggaggtaagtaggctgtcaatgcctccctttctgctcgcggctttacccgctcggtacctggctagcgtgccggcttcccagtgcgtgcccttcttgatttcattgggcaaaagctggctcgactccctcgtcttggactctcataagaagaccagcgtgttgagaaaagtgcaacagtgcctcgatgacagtattgccgatgagtacaccgttgatattatgggcaacctgttgtgtcacctgccagcggccattatcgaccgtgggattagtcccagagcctgggctactgccttgcacggtctgcgtgactgtccggacttgaatcctgagcaaaaggcagctgtccggctgaaactgttgggccaatacggcttgccgcagcactggactgcagaaactaccaaggatctgggccctttcctagtcctgttcagtggtgatgaattgagtagcatcgccacaaaattcccagagatcttactgcaagccgccagcaagatggctcggacacttcctactaaagaatttctgtgggccgtttttcagtctgtgcggaatagctccgacaagatccctagctatgacccaatgccgggatgtcacggagtcgtggcccctagctcggacgatattttcaagctggctgaagccaatgcatgttgggcgttagaggatttgagatgtatggaagaggatactttcattaggaccgtggagcttctaggggccgtacagggatttagcaggccccaactgatgactctgaaggaaaaggccattcaggtatgggacatgccttcctattggagggaacaccacatcgttagtctgggaagaattgccctggccctgaatgagagcgagctggagcagctagacttgagctccatagacaccgtggcttcactgtcgtggcagactgaatggacaccaggacaggccgaatccatcctccagggatatttggatgatagcgggtactccattcaagatctgaaatccttccatctagtcggcctgggagctacgctgtgtgcgatcaacattacggagatcccacttatcaagatttccgaattcagggtggtcgtagctcggatcggcacattgctgtgcagtacacacgtcctggccgagtttaagcggaaggctgaagtagtgttcggcgaccccaccgagtggacttccagcgtgttgcaagagctggggaccatcgcagcgggactcaccaaggccgagttgagaatgctggacaaggacctaatgccctactttcagccttcagccatcaagtgcctgcccgatgaaatcttcaaggagctgtcagccgagcagatcgcctccctcggacccgaaaatgccgccgctgtgacccatgcccagcggcgcagattaagtcccctccaactgcagtcccttcagcaggccctcgacggtgctaagacacattcgtggcaggacgcccccgctagtgccggacccaccaggaccagtagctcccggagtcccgccggcgctctgcagtcctggggcctttggcttggatgtccactcctggtcctgatggccaaactcctgtggtag

SEQ ID NO: 246999 - DNA, 2448 bp, Artificial Sequence
  derived and/or modified sequence
atgttccggctgggcctgctggtgtgcttctacaatgacctggagctgctggatgccaccgtggcccaggtgctgctgtaccagatgatcaagtgcagccacctgcggggcttccaggccggcgtgcagaagctgaaggccgagctgctggacatcgccatggagaaccagaccctgaatgagaccctgggcagcctgagtgatgctgtggtgggcctgacctacagccagctggagagcctgagccctgaggccgtgcatggagccatcagcaccctgaaccaggtgtctggctgggccaagagccaggtgatcatcctgagcgccaagtacctggcccacgagaaggtgctgtccttctacaacgtgtcccagatgggcgccctgctggccggcgtgtccacccaggccttctgcagcatgaagaggaaggacatcagccaggtgctgcggtctgctgtgtcccagtatgtgtctgacctgagccctgcccagcagcagggcatcctgagcaagatggtgcaggccgaggacacagcccctggcatcgtggagatccagggcgccttcttcaaggaggtgtccctgtttgacctgcggcggcagcccggcttcaacagcacagtgctgaaggacaaggagctgggccgcagccaggccctcttcctgtatgagctgctgctgaagaccacccggcggcctgaggagctgctgtctgctggccagctggtgaagggcgtgacctgcagccacattgatgccatgagcacagacttcttcctggcccacttccaggacttccagaacaactttgccctgctgagcccctaccaggtgaactgcctggcctggaagtactgggaggtgtcccggctgtccatgccacccttcctgctggccgccctgcctgcccgctacctggcctctgtgcctgccagccagtgtgtgcccttcctgatcagcctgggcaagtcctggctggacagcctggtgctggacagccacaagaagacctctgtgctgaggaaggtgcagcagtgcctggatgacagcattgctgatgagtacacagtggacatcatgggcaacctgctgtgccacctgcctgctgccatcatcgaccggggcatcagcccccgggcctgggccacagccctgcacggcctgcgggactgcccagacctgaaccctgagcagaaggctgctgtgcggctgaagctgctgggccagtatggcctgccccagcactggacagctgagaccaccaaggacctgggccccttcctggtgctcttctctggagatgagctgagcagcatcgccaccaagtttcctgagatcctgctgcaggccgccagcaagatggcccggaccctgcccaccaaggagttcctgtgggccgtgttccagagcgtgaggaacagcagtgacaagatccccagctatgaccccatgcctggctgccacggcgtggtggcccccagcagtgatgacatcttcaagctggccgaggccaatgcctgctgggccctggaggacctgcgctgcatggaggaggacaccttcatcagaacagtggagctgctgggcgctgtgcagggcttcagccggccccagctgatgaccctgaaggagaaggccatccaggtgtgggacatgcccagctactggagggagcaccacatcgtgtccctgggccgcatcgccctggccctgaatgaaagtgagctggagcagctggacctgagcagcattgacacagtggccagcctgtcctggcagacagagtggaccccaggccaggccgagagcatcctgcagggctacctggatgattctggctacagcatccaggacctgaagagcttccacctggtgggcctgggcgccaccctgtgtgccatcaacatcacagagatccccctcatcaagatcagcgagttccgggtggtggtggccagaattggcaccctgctgtgcagcacccacgtgctggccgagttcaagaggaaggccgaggtggtgtttggagaccccacagagtggaccagctctgtgctgcaggagctgggcaccatcgctgctggcctgaccaaggccgagctgaggatgctggacaaggacctgatgccctacttccagcccagcgccatcaagtgcctgcctgatgagatcttcaaggagctgtctgctgagcagatcgccagcctgggcccagaaaatgctgctgctgtgacccacgcccagaggcggcggctgagccccctgcagctgcagagcctgcagcaggccctggatggagccaagacccacagctggcaggatgccccagccagcgctggccccaccaggaccagcagcagccgcagccctgctggggccctgcagagctggggcctgtggctgggctgccccctgctggtgctgatggccaagctgctgtggtag

SEQ ID NO: 247000 - DNA, 2448 bp, Artificial Sequence
  derived and/or modified sequence
atgttccggctgggcctgctggtgtgcttctacaacgacctggagctgctcgacgccaccgtggctcaagtgctgttgtatcagatgataaaatgttcccatctgcggggattccaggcaggcgtgcagaagcttaaagccgagctgctagatattgccatggagaaccagaccctcaacgagacactagggtctcttagcgacgctgtcgtgggtctcacctactcccagcttgaatctctttctccagaagctgtgcacggagcgatatctaccctcaaccaggtgtcggggtgggccaaatcacaagtgatcatcctgtctgccaagtacctggcacacgaaaaggtcctgtcattttacaatgtgtcccagatgggcgccctccttgctggagtgtcaacgcaggccttttgctcaatgaaacgcaaggatatcagtcaggttcttcggtccgccgtaagtcaatatgttagcgacctgtcaccagcgcaacaacaaggcattctgtccaagatggtacaggcggaggatacagcaccaggtatcgtggagattcagggtgctttctttaaagaagtgagcctgttcgatctgagacgccagcccggattcaactctaccgtactgaaggacaaggaactcggtcgctcgcaagccctcttcctgtatgagctcctcctgaaaacaactcgcagacccgaagagttgctttcagcaggccagttagtgaagggagtaacttgttcacacattgatgcgatgtccacggatttttttctggcccattttcaggatttccagaataacttcgctctgctgagcccttatcaggtcaattgcctcgcttggaaatactgggaagtgtctaggttatctatgcccccttttttgttggccgccctcccggctcgttacctggcttctgtgcccgcatcccaatgtgtgccatttttgataagcctcgggaaaagctggctcgactccctggtgctggactcccataaaaaaacctcagttctgcggaaggttcagcaatgcctggacgattctatcgccgatgagtacacagtagatatcatggggaatttgctctgccacctccccgccgctattattgaccgaggaataagccctagagcttgggccacagcgctccatggcctccgagattgtccagatttaaatccagagcaaaaggccgccgtgcgcctgaagctgctgggacagtatgggctgccccaacattggacagccgaaactacaaaagacttgggaccgtttcttgtcctgtttagcggggacgagctgtcgtctattgctactaaatttcctgagatcctgctgcaggctgcgagtaagatggcgagaacactgcccactaaagagtttctatgggccgtattccagagcgtcaggaacagtagcgataaaattccctcctacgatccaatgccaggttgtcatggagtggtggcccccagtagtgatgatatttttaaactggcagaagctaatgcatgttgggcactggaggatctgcgatgcatggaggaggatacatttattcgtacagtggaactcctcggagccgtgcaaggtttttcacgcccccaattgatgaccctgaaggaaaaagccattcaggtgtgggacatgccttcctactggagagagcaccacatcgtgtccctaggacggatagcactcgcacttaatgaaagtgagctggaacagctggatctttcttccattgatacagtcgcatccttgagctggcagacagagtggacaccggggcaggccgagtccatactccagggctacctggatgatagcgggtatagcattcaggacctgaagagttttcatctagtcggattgggcgcaacgctttgtgctattaatatcacagaaatacccttgattaagatttccgagtttagagtggttgtggccaggattggcacactcctgtgctccactcatgtgctcgccgagtttaaacggaaggccgaagtcgtgttcggagaccccactgagtggacctcttcggtgctacaggagttaggcaccattgccgccggccttaccaaagccgaactgcggatgctggacaaggacctcatgccctatttccagccctcagcgatcaagtgtctgcccgacgagatcttcaaggagctcagcgccgaacaaattgcctcgttagggcctgaaaatgcagccgcggtaacgcatgcccagcgtaggagactctcacccctgcaactacagtcactacagcaggccctggatggggccaagacacactcatggcaggatgcccctgcatctgccggacctacgaggacctcttcttcaagaagcccagcaggagctctgcagtcttgggggctgtggcttgggtgtccactgctggtgctcatggcaaaacttttatggtag

SEQ ID NO: 247001 - DNA, 2703 bp, Artificial Sequence
  derived and/or modified sequence
ccccattccttggtctcgtctgagcagttaggttccgcctgtggttgcacatttggttcatctgaggatgttcaggctggggctgctggtttgtttctacaatgacctggaattgctggatgccactgtggctcaagtcctgctttaccagatgatcaagtgcagccacctgaggggcttccaggctggcgtccagaagctcaaagcagaactcctggacattgccatggagaaccagaccctcaatgagaccctgggttctttgtcggatgcagttgtaggtttgacctacagccaactggaatccctctcccccgaggctgtgcacggagccatctccaccctcaaccaggtctcaggttgggccaagagccaggtcatcatcttgtctgccaaatacttggcccatgagaaggtgctgtctttctacaatgtcagccagatgggcgcactgctggctggggtcagcacccaggccttctgcagcatgaaacgcaaggacatctcgcaggtcctgagaagtgccgtctcccagtatgtatccgacttgtcacctgcccagcagcaaggtatcctcagcaagatggtccaagcggaagacactgccccaggcatcgtggagatacaaggggctttctttaaggaagtgtctctctttgatttaaggaggcaacctggattcaactctacagtcctgaaggataaggaacttggaaggagccaggctctgttcctgtatgagcttctgttaaagaccaccagaaggcctgaggagcttttgagtgctgggcagctggtcaaaggcgtgacctgctcacacattgatgccatgagcactgacttctttctggcccatttccaggattttcagaacaacttcgccctgctttcaccctatcaggttaattgtttggcgtggaaatactgggaagtttccagattgtctatgccacctttcctcttggctgcactcccggcccgctacctggcttctgtcccagcctcccagtgtgtgccctttctgatcagcctggggaagagctggttggactccttggttttagattcccacaaaaagacttcagtcctcaggaaagtgcagcagtgcctggacgactccattgctgatgagtacactgtggacatcatggggaacctgctgtgtcacttgccggcagccatcatcgacagggggatctcccccagggcttgggcgactgctctacacggcctcagagactgcccagacctcaaccctgagcaaaaggctgcagtgaggctcaagctcctgggacagtatggactccctcagcactggacagccgagaccacgaaggacttgggaccctttctagtacttttctcaggagatgaattaagctctatagccacaaagtttcctgagatccttctgcaagcagcttccaagatggccaggaccctgcccactaaagaattcctctgggctgtctttcagtctgttcggaacagcagtgataagatccccagctatgaccctatgcctggttgccatggagtcgtggccccctcttctgatgacatcttcaagttggccgaagccaacgcctgctgggccctggaggacctgcggtgcatggaggaagacacattcatcaggaccgtggaactgctgggagctgtccagggtttcagccggcctcagctgatgaccctgaaggagaaagcaatacaggtttgggacatgccatcttactggagagaacaccatatcgtctccctggggcgcattgctctggctcttaatgagagtgagctggagcagctggacctcagctccatagacactgtggcttccctaagctggcaaacagaatggaccccgggacaggctgaatccattttgcaagggtacctggatgattcaggatacagtatccaggacctgaagagctttcatttggtaggacttggtgcaaccctgtgtgctataaacatcactgaaatcccacttataaagatctcagaattcagggtggtagtggccagaattgggaccctgctctgcagcacacatgtcttagccgagtttaagaggaaggctgaagttgtgtttggggatcccactgagtggaccagttctgtcttgcaggagcttgggaccattgcagctggattaactaaggcagagctccggatgcttgacaaggatttgatgccatatttccagccatcagcaataaaatgccttcctgatgagatattcaaagagctgtccgcggagcagatcgcctccctgggtccggagaacgccgcggcggtgacccacgcccagcgccggcggctcagtccactgcagctgcagagcctccagcaggcgctagatggcgccaagactcactcctggcaggacgcgcccgctagcgccggtcccactagaacctcatcctcgcgttctcccgcaggagctctccagtcgtggggtctttggcttggttgtcccctgctggttctaatggccaagctcctgtggtgagtggcctgagcgcatcgtcctgtgttgccccaagcagctggccaacatgtgtagagacaggatgctccagatggtgggacacccttccctggatccagaccctcatctagggcagggaaaccctggggccttgatggtgaaaatgcaccccaaatgaaaaataattattaaaaatgatcttgcaaatt

SEQ ID NO: 247002 - DNA, 2448 bp, Artificial Sequence
  derived and/or modified sequence
atgttccgcctgggcctgttggtctgcttttataacgacctcgaactgcttgatgcaactgtcgcccaagtgcttctctatcagatgatcaagtgctcacaccttcgcggatttcaagcaggagtgcagaaactgaaggccgaactcctagacatagcaatggaaaaccagacccttaacgagaccttaggatctctgtctgatgcagtggtaggactcacctactcacaattggagagtctgtcccccgaggccgttcacggagcgatcagtacactgaatcaggtgtcagggtgggctaagagccaggtcatcattctcagtgcaaagtatctggcccatgaaaaagtactgtcattctataacgtttcccagatgggtgctctgttggccggagtctccacacaagctttttgctctatgaagcggaaggacatctcccaggttctcaggtccgccgtgtcgcagtacgttagtgacctaagtcctgcccagcaacaaggcatcctcagtaaaatggtccaggcggaggacaccgccccaggcattgtggaaattcagggcgctttctttaaggaagtctccttgtttgatcttcgccgtcaaccaggatttaattccacagtccttaaggacaaggagctgggccgatcacaggcgttatttctgtacgaactgctattgaaaacaaccaggagaccagaagaactgttaagtgcaggtcagttagttaagggcgttacctgttcccacatagacgctatgtcgacggatttctttctcgcccatttccaagatttccaaaataacttcgccctacttagcccttaccaggtgaattgcctggcttggaaatattgggaggtgtccaggctgagcatgcctcctttcctcctggccgcactgcccgcaagatatctggcttctgtacctgcttctcaatgtgtacccttcctaatttcactgggaaagagctggcttgattctctagtcctcgactcccacaaaaagacgtccgtgttaaggaaagtgcagcaatgtctagatgactccatagcggacgagtacacagtcgacatcatgggaaacctactttgtcatcttcccgcagctatcatcgacagaggtatctccccaagagcatgggccacagcattacacgggctacgggattgtcccgaccttaaccccgagcagaaggctgcagtgaggctgaagctgctcggccagtatggccttccacaacattggacagccgaaactaccaaggatctgggcccttttcttgtgctgttttcaggcgatgaactctcaagcatcgcgactaagtttccagaaattctcctccaggcggcatctaagatggcacgtacacttccaacaaaggaatttttatgggccgttttccagtctgttcgaaattcctctgataagattcctagttacgatcccatgccgggttgccacggtgtcgtggcaccaagctcagacgacatctttaagctggcagaggctaatgcttgttgggccttggaggatctgaggtgtatggaggaggacactttcatcaggactgtcgagctattaggcgctgtacaggggttttccagaccccagctgatgacgttgaaagagaaggcaatacaggtttgggacatgccatcctattggagggagcaccacatagtcagtctgggccgtattgctttggctctgaacgagtccgagctcgaacagttagacttgagctctatagacacagtggccagtctatcgtggcagacggaatggaccccaggacaggccgagtcgatcttacagggctacctggacgacagcggctacagcatccaagaccttaaatcattccatctggtggggctcggggctactctgtgcgccatcaatattactgagatccccctgataaaaattagcgagttccgagttgttgtggcacgtatcgggaccctcctgtgtagcacacacgtgctcgcagagtttaaaagaaaggcggaggttgtgttcggtgaccctaccgagtggactagctcagtcttgcaagaactcgggaccatcgctgcaggcctgaccaaagctgagctgcgtatgctcgacaaggatctgatgccttactttcagccttccgccattaagtgccttccagacgagatctttaaggagctttcagcagaacagattgcaagtttaggtccagagaatgcagcagctgtcacccacgcccagagacgtagactgagcccactccagctgcagtcacttcaacaagctctggacggcgcaaagacccactcttggcaagatgcgccagcttcagccggaccaacccggacatccagcagccgatccccggcaggcgctctacagtcatggggtctatggctagggtgccccttgctcgtactgatggccaaactgttgtggtag

SEQ ID NO: 247003 - DNA, 2448 bp, Artificial Sequence
  derived and/or modified sequence
atgttcagactgggcctgctggtgtgcttctacaacgacctggagctgctggacgccaccgtggcccaggtgctgctgtaccagatgatcaagtgcagccacctgagaggcttccaggccggcgtgcagaagctgaaggccgagctgctggacatcgccatggagaaccagaccctgaacgagaccctgggcagcctgagcgacgccgtggtgggcctgacctacagccagctggagagcctgagccccgaggccgtgcacggcgccatcagcaccctgaaccaggtgagcggctgggccaagagccaggtgatcatcctgagcgccaagtacctggcccacgagaaggtgctgagcttctacaacgtgagccagatgggcgccctgctggccggcgtgagcacccaggccttctgcagcatgaagagaaaggacatcagccaggtgctgagaagcgccgtgagccagtacgtgagcgacctgagccccgcccagcagcagggcatcctgagcaagatggtgcaggccgaggacaccgcccccggcatcgtggagatccagggcgccttcttcaaggaggtgagcctgttcgacctgagaagacagcccggcttcaacagcaccgtgctgaaggacaaggagctgggcagaagccaggccctgttcctgtacgagctgctgctgaagaccaccagaagacccgaggagctgctgagcgccggccagctggtgaagggcgtgacctgcagccacatcgacgccatgagcaccgacttcttcctggcccacttccaggacttccagaacaacttcgccctgctgagcccctaccaggtgaactgcctggcctggaagtactgggaggtgagcagactgagcatgccccccttcctgctggccgccctgcccgccagatacctggccagcgtgcccgccagccagtgcgtgcccttcctgatcagcctgggcaagagctggctggacagcctggtgctggacagccacaagaagaccagcgtgctgagaaaggtgcagcagtgcctggacgacagcatcgccgacgagtacaccgtggacatcatgggcaacctgctgtgccacctgcccgccgccatcatcgacagaggcatcagccccagagcctgggccaccgccctgcacggcctgagagactgccccgacctgaaccccgagcagaaggccgccgtgagactgaagctgctgggccagtacggcctgccccagcactggaccgccgagaccaccaaggacctgggccccttcctggtgctgttcagcggcgacgagctgagcagcatcgccaccaagttccccgagatcctgctgcaggccgccagcaagatggccagaaccctgcccaccaaggagttcctgtgggccgtgttccagagcgtgagaaacagcagcgacaagatccccagctacgaccccatgcccggctgccacggcgtggtggcccccagcagcgacgacatcttcaagctggccgaggccaacgcctgctgggccctggaggacctgagatgcatggaggaggacaccttcatcagaaccgtggagctgctgggcgccgtgcagggcttcagcagaccccagctgatgaccctgaaggagaaggccatccaggtgtgggacatgcccagctactggagagagcaccacatcgtgagcctgggcagaatcgccctggccctgaacgagagcgagctggagcagctggacctgagcagcatcgacaccgtggccagcctgagctggcagaccgagtggacccccggccaggccgagagcatcctgcagggctacctggacgacagcggctacagcatccaggacctgaagagcttccacctggtgggcctgggcgccaccctgtgcgccatcaacatcaccgagatccccctgatcaagatcagcgagttcagagtggtggtggccagaatcggcaccctgctgtgcagcacccacgtgctggccgagttcaagagaaaggccgaggtggtgttcggcgaccccaccgagtggaccagcagcgtgctgcaggagctgggcaccatcgccgccggcctgaccaaggccgagctgagaatgctggacaaggacctgatgccctacttccagcccagcgccatcaagtgcctgcccgacgagatcttcaaggagctgagcgccgagcagatcgccagcctgggccccgagaacgccgccgccgtgacccacgcccagagaagaagactgagccccctgcagctgcagagcctgcagcaggccctggacggcgccaagacccacagctggcaggacgcccccgccagcgccggccccaccagaaccagcagcagcagaagccccgccggcgccctgcagagctggggcctgtggctgggctgccccctgctggtgctgatggccaagctgctgtggtag

SEQ ID NO: 247004 - protein, 1015 aa, Artificial Sequence
  derived and/or modified sequence
MENAHTKTVEEVLGHFGVNESTGLSLEQVKKLKERWGSNELPAEEGKTLLELVIEQFEDLLVRILLLAACISFVLAWFEEGEETITAFVEPFVILLILVANAIVGVWQERNAENAIEALKEYEPEMGKVYRQDRKSVQRIKAKDIVPGDIVEIAGESVSVIKHTDPVPDPRAVNQDKKNMLFSGTNIAAGKAMGVVVATGVNTEIGKIRDEMVATEQERTPLQQKLDEFGEQLSKVISLICIAVWIINIGHFNDPVHGGSWIRGAIYYFKIAVALAVAAIPEGLPAVITTCLALGTRRMAKKNAIVRSLPSVETLGCTSVICSDKTGTLTTNQMSVCRMFILDRVEGDTCSLNEFTITGSTYAPIGEVHKDDKPVNCHQYDGLVELATICALCNDSALDYNEAKGVYEKVGEATETALTCLVEKMNVFDTELKGLSKIERANACNSVIKQLMKKEFTLEFSRDRKSMSVYCTPNKPSRTSMSKMFVKGAPEGVIDRCTHIRVGSTKVPMTSGVKQKIMSVIREWGSGSDTLRCLALATHDNPLRREEMHLEDSANFIKYETNLTFVGCVGMLDPPRIEVASSVKLCRQAGIRVIMITGDNKGTAVAICRRIGIFGQDEDVTSKAFTGREFDELNPSAQRDACLNARCFARVEPSHKSKIVEFLQSFDEITAMTGDGVNDAPALKKAEIGIAMGSGTAVAKTASEMVLADDNFSTIVAAVEEGRAIYNNMKQFIRYLISSNVGEVVCIFLTAALGFPEALIPVQLLWVNLVTDGLPATALGFNPPDLDIMNKPPRNPKEPLISGWLFFRYLAIGCYVGAATVGAAAWWFIAADGGPRVSFYQLSHFLQCKEDNPDFEGVDCAIFESPYPMTMALSVLVTIEMCNALNSLSENQSLLRMPPWENIWLVGSICLSMSLHFLILYVEPLPLIFQITPLNVTQWLMVLKISLPVILMDETLKFVARNYLEPGKECVQPATKSCSFSACTDGISWPFVLLIMPLVIWVYSTDTNFSDMFWS

SEQ ID NO: 247005 - protein, 1042 aa, Artificial Sequence
  derived and/or modified sequence
MENAHTKTVEEVLGHFGVNESTGLSLEQVKKLKERWGSNELPAEEGKTLLELVIEQFEDLLVRILLLAACISFVLAWFEEGEETITAFVEPFVILLILVANAIVGVWQERNAENAIEALKEYEPEMGKVYRQDRKSVQRIKAKDIVPGDIVEIAVGDKVPADIRLTSIKSTTLRVDQSILTGESVSVIKHTDPVPDPRAVNQDKKNMLFSGTNIAAGKAMGVVVATGVNTEIGKIRDEMVATEQERTPLQQKLDEFGEQLSKVISLICIAVWIINIGHFNDPVHGGSWIRGAIYYFKIAVALAVAAIPEGLPAVITTCLALGTRRMAKKNAIVRSLPSVETLGCTSVICSDKTGTLTTNQMSVCRMFILDRVEGDTCSLNEFTITGSTYAPIGEVHKDDKPVNCHQYDGLVELATICALCNDSALDYNEAKGVYEKVGEATETALTCLVEKMNVFDTELKGLSKIERANACNSVIKQLMKKEFTLEFSRDRKSMSVYCTPNKPSRTSMSKMFVKGAPEGVIDRCTHIRVGSTKVPMTSGVKQKIMSVIREWGSGSDTLRCLALATHDNPLRREEMHLEDSANFIKYETNLTFVGCVGMLDPPRIEVASSVKLCRQAGIRVIMITGDNKGTAVAICRRIGIFGQDEDVTSKAFTGREFDELNPSAQRDACLNARCFARVEPSHKSKIVEFLQSFDEITAMTGDGVNDAPALKKAEIGIAMGSGTAVAKTASEMVLADDNFSTIVAAVEEGRAIYNNMKQFIRYLISSNVGEVVCIFLTAALGFPEALIPVQLLWVNLVTDGLPATALGFNPPDLDIMNKPPRNPKEPLISGWLFFRYLAIGCYVGAATVGAAAWWFIAADGGPRVSFYQLSHFLQCKEDNPDFEGVDCAIFESPYPMTMALSVLVTIEMCNALNSLSENQSLLRMPPWENIWLVGSICLSMSLHFLILYVEPLPLIFQITPLNVTQWLMVLKISLPVILMDETLKFVARNYLEPGKECVQPATKSCSFSACTDGISWPFVLLIMPLVIWVYSTDTNFSDMFWS

SEQ ID NO: 247006 - protein, 933 aa, Artificial Sequence
  derived and/or modified sequence
  misc_feature (1)..(1): Xaa can be any naturally occurring amino acid
XTITAFVEPFVILLILVANAIVGVWQERNAENAIEALKEYEPEMGKVYRQDRKSVQRIKAKDIVPGDIVEIAGESVSVIKHTDPVPDPRAVNQDKKNMLFSGTNIAAGKAMGVVVATGVNTEIGKIRDEMVATEQERTPLQQKLDEFGEQLSKVISLICIAVWIINIGHFNDPVHGGSWIRGAIYYFKIAVALAVAAIPEGLPAVITTCLALGTRRMAKKNAIVRSLPSVETLGCTSVICSDKTGTLTTNQMSVCRMFILDRVEGDTCSLNEFTITGSTYAPIGEVHKDDKPVNCHQYDGLVELATICALCNDSALDYNEAKGVYEKVGEATETALTCLVEKMNVFDTELKGLSKIERANACNSVIKQLMKKEFTLEFSRDRKSMSVYCTPNKPSRTSMSKMFVKGAPEGVIDRCTHIRVGSTKVPMTSGVKQKIMSVIREWGSGSDTLRCLALATHDNPLRREEMHLEDSANFIKYETNLTFVGCVGMLDPPRIEVASSVKLCRQAGIRVIMITGDNKGTAVAICRRIGIFGQDEDVTSKAFTGREFDELNPSAQRDACLNARCFARVEPSHKSKIVEFLQSFDEITAMTGDGVNDAPALKKAEIGIAMGSGTAVAKTASEMVLADDNFSTIVAAVEEGRAIYNNMKQFIRYLISSNVGEVVCIFLTAALGFPEALIPVQLLWVNLVTDGLPATALGFNPPDLDIMNKPPRNPKEPLISGWLFFRYLAIGCYVGAATVGAAAWWFIAADGGPRVSFYQLSHFLQCKEDNPDFEGVDCAIFESPYPMTMALSVLVTIEMCNALNSLSENQSLLRMPPWENIWLVGSICLSMSLHFLILYVEPLPLIFQITPLNVTQWLMVLKISLPVILMDETLKFVARNYLEPGKECVQPATKSCSFSACTDGISWPFVLLIMPLVIWVYSTDTNFSDMFWS

SEQ ID NO: 247007 - DNA, 8329 bp, Artificial Sequence
  derived and/or modified sequence
ggcagcggccgataaatgctattagagcagccgccgcggagccgtccccgacgccacctccttttccttcgccgcagtttcctccgccgctgtcgggcgtgcggcgctgagggacccgggcgagcgcgccgcgcaccgccccgccggctcgcctccctcgccgcgttccgccctcagtggtctgccgggcgccccctcctccggcccgggcggggcctctgatcgcctcaagagagcggggagggggctcgggggccgcggcctgccctcccggcgggcggctgagggcgagggaggccctcccttctggcgaggggagggagggtgggtcaggagcccccaacccgccctgcggagctcggggccgcgcgaggggcggttgtctgggggagggggcgcggggtgattcagcgcccggcgaggcggaagcggccgcaagaggaggaggggagagcccgtccgcgcctgggctcccggggtggcacgagcccgcggccggagtgcgaggcggaggcgaggaggccgcggggacgggaggcgaggccggccgggcccccgaagccatggagaacgcgcacaccaagacggtggaggaggtgctgggccacttcggcgtcaacgagagtacggggctgagcctggaacaggtcaagaagcttaaggagagatggggctccaacgagttaccggctgaagaaggaaaaaccttgctggaacttgtgattgagcagtttgaagacttgctagttaggattttattactggcagcatgtatatcttttgttttggcttggtttgaagaaggtgaagaaacaattacagcctttgtagaaccttttgtaattttactcatattagtagccaatgcaattgtgggtgtatggcaggaaagaaatgctgaaaatgccatcgaagcccttaaggaatatgagcctgaaatgggcaaagtgtatcgacaggacagaaagagtgtgcagcggattaaagctaaagacatagttcctggtgatattgtagaaattgctgttggtgacaaagttcctgctgatataaggttaacttccatcaaatctaccacactaagagttgaccagtcaattctcacaggtgaatctgtctctgtcatcaagcacactgatcccgtccctgacccacgagctgtcaaccaagataaaaagaacatgctgttttctggtacaaacattgctgctgggaaagctatgggagtggtggtagcaactggagttaacaccgaaattggcaagatccgggatgaaatggtggcaacagaacaggagagaacaccccttcagcaaaaactagatgaatttggggaacagctttccaaagtcatctcccttatttgcattgcagtctggatcataaatattgggcacttcaatgacccggttcatggagggtcctggatcagaggtgctatttactactttaaaattgcagtggccctggctgtagcagccattcctgaaggtctgcctgcagtcatcaccacctgcctggctcttggaactcgcagaatggcaaagaaaaatgccattgttcgaagcctcccgtctgtggaaacccttggttgtacttctgttatctgctcagacaagactggtacacttacaacaaaccagatgtcagtctgcaggatgttcattctggacagagtggaaggtgatacttgttcccttaatgagtttaccataactggatcaacttatgcacctattggagaagtgcataaagatgataaaccagtgaattgtcaccagtatgatggtctggtagaattagcaacaatttgtgctctttgtaatgactctgctttggattacaatgaggcaaagggtgtgtatgaaaaagttggagaagctacagagactgctctcacttgcctagtagagaagatgaatgtatttgataccgaattgaagggtctttctaaaatagaacgtgcaaatgcctgcaactcagtcattaaacagctgatgaaaaaggaattcactctagagttttcacgtgacagaaagtcaatgtcggtttactgtacaccaaataaaccaagcaggacatcaatgagcaagatgtttgtgaagggtgctcctgaaggtgtcattgacaggtgcacccacattcgagttggaagtactaaggttcctatgacctctggagtcaaacagaagatcatgtctgtcattcgagagtggggtagtggcagcgacacactgcgatgcctggccctggccactcatgacaacccactgagaagagaagaaatgcaccttgaggactctgccaactttattaaatatgagaccaatctgaccttcgttggctgcgtgggcatgctggatcctccgagaatcgaggtggcctcctccgtgaagctgtgccggcaagcaggcatccgggtcatcatgatcactggggacaacaagggcactgctgtggccatctgtcgccgcatcggcatcttcgggcaggatgaggacgtgacgtcaaaagctttcacaggccgggagtttgatgaactcaacccctccgcccagcgagacgcctgcctgaacgcccgctgttttgctcgagttgaaccctcccacaagtctaaaatcgtagaatttcttcagtcttttgatgagattacagctatgactggcgatggcgtgaacgatgctcctgctctgaagaaagccgagattggcattgctatgggctctggcactgcggtggctaaaaccgcctctgagatggtcctggcggatgacaacttctccaccattgtggctgccgttgaggaggggcgggcaatctacaacaacatgaaacagttcatccgctacctcatctcgtccaacgtcggggaagttgtctgtattttcctgacagcagcccttggatttcccgaggctttgattcctgttcagctgctctgggtcaatctggtgacagatggcctgcctgccactgcactggggttcaaccctcctgatctggacatcatgaataaacctccccggaacccaaaggaaccattgatcagcgggtggctctttttccgttacttggctattggctgttacgtcggcgctgctaccgtgggtgctgctgcatggtggttcattgctgctgacggtggtccaagagtgtccttctaccagctgagtcatttcctacagtgtaaagaggacaacccggactttgaaggcgtggattgtgcaatctttgaatccccatacccgatgacaatggcgctctctgttctagtaactatagaaatgtgtaacgccctcaacagcttgtccgaaaaccagtccttgctgaggatgcccccctgggagaacatctggctcgtgggctccatctgcctgtccatgtcactccacttcctgatcctctatgtcgaacccttgccactcatcttccagatcacaccgctgaacgtgacccagtggctgatggtgctgaaaatctccttgcccgtgattctcatggatgagacgctcaagtttgtggcccgcaactacctggaacctggtaaagagtgtgtgcagcctgccaccaaatcctgctcgttctcggcatgcaccgatgggatttcctggccgtttgtgctgctcataatgcccctggtgatctgggtctatagcacagacactaactttagcgatatgttctggtcttgactgacagttttccataaagaagatgtttaacttaatcaattaatttttttattgtttaaagcaactgtctatttctgctgaattttcacatgaacatactggctggtgatggaggtttcatactctagattttgttttgctttttctgactccagtggggcaagattttccttttttatacacataattaaagtgtccattgacatgtacagagaactaacactattttatgcaaatatttttttgtagatgaaaaagcatgtacagtgttctgtttaatactcatccttgtataaaaaaaatagttgagccagcagacattgtcagcaaattaattggcagcagattttaggaaatgaatgtgtgtggttttttttctaaaactaaatagcatgtattgtgtcttttgcatgatgatccggatttaatttgatatcacagtctaatttttattcataagccaatttttctgcactgagcagagtcttgctacctcagtcagtattgttttggtttgctacttccctcacccactttggcctccgttcaccccaccccaccccacctctccccaccttacccccgccccgcttggcttcttctttaggattgtgatggttcgttctgtttacatcagttttaacgagaggtatgcctgtactcgcttgtgcagaaaacattgttccagattcaatcgactgggtttatgtcccttcacatagtttttaaggttatttatttaaatgtctaatgtattttattgtaacagacattgttttgccaacattgcctatttcagtggcacgtcatctagttttaaaaaaataaaacattttaaatggacagagaaaaataactgtcttgtctttaactcgtaagtggcttacctgggactaacagacatgtccaactttctctccagttcttagctcagaactttagttgtactctgcttgaggggaagaaggctcctgctctgctgtgtaggtagtcataggaattgtattcttaatgtacaggcactaattgtcatctgtgatgtacattttatgcaagtttctgctggcctggtatagagaacataagggcaagtgtgtatgtgtgtgtatgtgtgtgttttgtaaaatctgtaaatagcacatgaccaaatgaacatattgtatagaactatttttatttgaatgtggcactaaccaccaccaccgttactacgatcaatgtttgcgcatgttcgagatgagtctcaccaacagtgtgtaagtcattaacagtcctaactgtggtgttttcctccaatgccttccaacatccatcaactaacgtgagtattttcttcctgggatttggatgctttagcctaaaggtgactgccaccaagtgagataactgtatgtcactaacttataagccgcctccatggcagatgctgctgtgctccctgatgccctgtgagcaccggggttgcctgtggcgcctgccatgtgactcgggcgcagcatcagctggctggaggtgtggctttcatagacctccacaggctgcctaggacaagatgaccaggagggcccaagccagacaaaagccggagtggggagagaggcatttcagccagaccaacaggctgaaggagctgtgcagactattgctaaaatgagggttcgcagctgccaggagtcatcccagaacattgctacttatttattaaaaagctaaaaactagtgaaagcaagtaactgaaccagtgaactctgggtatcgataggttcgtcttaaataggccacttccccactcccccacccccccttgcttggtcttgtccttggtggctaagacttagctctgcaggggatgttaaagcacagttagtaggacgtggctctgcacagcccaaaaaccagcttactccttagccagggtgtgaggcctcgactatattcttcaaaatgtacttaggctctggttactgggatggccagtagatgtaatgcagatggttggagtttggggagggttaggaggcatcaagcaggacaaggtgctgctgagttcagagggcccacgttcaagggatggaggtggaacctggagaccgactcttaaaagcacagtccgtggttgggtgtggtggctcatgcctgtaagtaagtctcagccctttggaggccacagcagaaggattgcttgagcccaggtactcaaaccagcctgggcaacagagtgaggccctgtcaaaaaaaaatcagccttactgtgaagcctccaaggctgctcgcaggcagctgtggctctcgggaagggaggctgctttgcccagcagggaacatttggggcagggggtaaattttgccagtttgagcatcatgaggtgtaacaagaaatgggttgaatgggccaaatgcaaggagtgcatctctgggctgcaaactgacttgagtgctgcactattgctattccgtgcaaacaaaactcagcttttcctgactcagttccttgacttagtggcctttacaaaaaaagttgagtagtgtgtggcctgctgtcgcacagcccctagttagcttcatggtttctcagcttcagacccctccagcccacagaggagcccatggagggacccacttcccttggtccagacagctgggagtgggttaggcccactgctgttttgagcagggccacttgctccatttcactgaaggctttgctgggtgaaaacacttcagcatctcctcctcaggtcaacccataaagaccaggtccagcaccgtggtcttggcacatccctggcctcaggccctcacctaacagtgaggcagcagctgcccagccccgcaatgtgcctgctgtcaggcagctcttgcctgaaacttacttccacattctttcctgatgggcaggtggctgaaggcccagccatcagtgtcgcttgttgccaccccgtgcctcccttggcctctctgagctttgcccagaagaccaacaatcatacataccctaactgggacaccactctgcagaatgcagatgatccattctggaggaagctgtcccttgagctcagtgagctcccaggcaagcagggcatctggccgacttccctcacaacagctgctcccacatcccctcggactggagcttcagccctgactgaggtgggcagacctaagacctgagaccacaagattagctcagtgtctaccaagcatctagccactgtccagggccagagcataccacgtctgcagtgcctgtgagcagagccagcagttgccctgtgactgtaaccaccaaattgtccaaacacccgctgcagttagcaagaagggtaggcttcaccctcctttactgaggagaatgatgcggaggagtttcctctccagggctaggcaaggcaggcgagcagccagaagccgggtgcccacagggcagggacaggaaggctgtgctgctactggctgctcacttctccatcaacctcaccctctgcaccactaaccaagaccttgtcctcttgcctgtctcgctgctttcacagctgcaacgattgtgtctgcctcatggggttttcctccagagcctttattctgtagccagacgacacgaggagtctgtgtcactgagccagtgcttctagatgctaccctgtgtgggcggcacctcagggacagtaaatcagaaatgctggtcttgaaaccttgaaaagatcaagctgaatgttccttttcatctgtcgctgttgatcttcatctatttaaataggtattctaacgtttcctctctgtatttcatgaagctgatttcctctctctttccttttcagcaatactggagtaaccgcttcctaaaccattttgcagaaatgtaagggtgttcggttgcgtgcatgtgcgtttttagcaacacatctaccaaccctgtgcatgactgatgttggggaaaaagaaaagtaaaaaacttcccaactcactttgtgttatgtggaggaaatgtgtattaccaatggggttgttagcttttaaatcaaaatactgattacagatgtacaatttagcttaatcagaaagcctctccagagaagtttggtttctttgctgcaagaggaatgaggctctgtaaccttatctaagaacttggaagccgtcagccaagtcgccacatttctctgcaaaatgtcatagcttatataaatgtacagtattcaattgtaatgcatgccttcggttgtaagtagccagatccctctccagtgacattggaacatgctactttttaattggccctgtacagtttgcttatttataaattcattaaaaacactacaggtgttgaatggttaaaatgtaggcctccagttcattttcagttattttctgagtgtgcagacagctatttcgcactgtattaaatgtaacttatttaatgaaatcagaagcagtagacagatgttggtgcaatacaaatattgtgatgcatttatcttaataaaatgctaaatgtcaatttatcactgcgcatgtttgactttagactgtaaatagagatcagtttgtttctttctgtgctggtaacaatgagcgtcgcacagacatggtttcaggtaaataaatctattctatgataaaaaaaaaaaaaaaaa

SEQ ID NO: 247008 - DNA, 3048 bp, Artificial Sequence
  derived and/or modified sequence
atggagaatgcccacaccaagacagtagaagaggttctggggcacttcggtgtgaacgagtctactgggctctcactggaacaggtcaagaagctgaaagagcgttggggaagcaacgagctccccgccgaggaaggcaaaactctcttggagctggtgatcgagcagtttgaagacctcctggttcggatccttctccttgctgcctgtatctccttcgttctggcatggtttgaggagggcgaagaaacgataaccgccttcgttgagcctttcgtgatccttctgatactcgtagccaacgctatcgtgggagtgtggcaagaaaggaacgctgagaatgctatcgaagctctcaaggagtacgagcctgagatggggaaggtctaccgccaggacagaaagagcgtgcagaggatcaaggccaaggacatcgtcccgggtgatatcgttgaaatcgccggtgagtcggtgtccgtgataaaacatacagatcccgtacccgacccccgtgccgtcaatcaggacaagaagaacatgctgttctcaggtaccaatatcgccgccggcaaagccatgggggtcgtggttgctaccggcgtgaatacagagatcggaaagatccgggacgagatggtggccactgaacaggagagaaccccacttcagcaaaagctggacgagttcggtgaacagctgagcaaagtaatcagcctgatctgtattgccgtctggatcataaacatcggacacttcaacgaccctgttcatggaggcagctggatccgcggcgccatctactattttaagatcgcagttgcactggctgtagccgccatcccagagggtctgccagccgtgatcactacctgcctggccttgggcactagaagaatggccaaaaaaaatgccatcgtacgatctctaccatccgtggaaaccttagggtgcacatcagtgatctgttccgacaaaacaggcaccttgaccacaaaccagatgtccgtctgccgcatgtttatactggaccgggtagagggcgatacctgctccctgaatgagtttacaataactggttccacctacgcaccgatcggtgaagtccataaggatgacaagccagttaactgccaccagtacgatggcttggtagaactggccactatatgtgctctgtgtaacgactcggctctcgactacaacgaggcgaagggtgtctatgagaaagttggcgaagccacggagaccgccctcacatgtctagttgaaaagatgaatgtgtttgacaccgagttgaagggccttagtaagatagagcgggcaaacgcatgcaattctgtcataaagcagctcatgaaaaaagagttcacactcgaattctctagggatcgcaagagcatgtccgtgtactgcacgcctaacaagccctctcgtaccagcatgtcaaagatgttcgttaagggtgccccagaaggtgtcatcgataggtgcacccacatccgtgtgggatccaccaaagtccccatgacgtccggggtgaagcagaaaatcatgtccgtgatccgggaatggggatccggatccgatacacttaggtgtttagctctcgccacacacgataacccactccgtagggaggagatgcacctcgaagactccgccaattttatcaagtatgaaactaatctgacatttgtggggtgtgttgggatgttggaccccccacgcattgaagtggcctcatcagtgaaactctgtcgacaggcagggattagggtcattatgatcaccggggacaataagggaaccgctgtcgcaatttgtcgcaggattggcatttttggacaagatgaagatgtcacaagcaaggctttcactggccgagagtttgacgagttaaacccaagtgcacagcgagacgcatgcctgaacgcgagatgctttgctcgggtggaaccgtcccataagtccaaaatagtggaatttctccaatctttcgacgaaattactgctatgacaggggacggtgtcaatgatgcccctgccctcaaaaaagctgaaattggcatcgccatgggaagcggtactgcagttgcgaaaacagccagcgaaatggttcttgcagacgataatttttccacgatagtcgcagctgtcgaagaaggccgagccatctataataatatgaagcaattcatccggtacttgatcagtagcaacgtgggcgaggtcgtctgtatctttttgacagcagcactcggcttcccagaagccctgatccctgtccagctgctgtgggttaatttggtgacagatggcctccctgcgacagcactggggtttaaccctcccgacctagatattatgaacaaaccccctaggaatccaaaggagcctctgatctcgggatggctattttttagatacctggccattggctgctacgtgggcgcggcaaccgtgggcgcagcggcgtggtggttcatagccgccgatggggggccaagagtaagcttttatcaactctcacatttccttcagtgcaaagaggataaccccgatttcgaaggggttgattgtgctatctttgagagtccctacccaatgaccatggcactgagcgtcctggttacgatcgagatgtgcaacgcattgaacagtctgagtgagaaccaatccttattgagaatgcctccatgggagaatatctggttagtggggtcaatctgtttgagtatgtccctgcacttcctcatcctgtacgtcgagcctttgcccctcatattccaaattacgccgctgaatgtgacacagtggcttatggtgctgaaaataagtttgcccgtgatccttatggatgagaccttgaaattcgtagctcgcaactatctggaaccaggtaaggagtgtgtgcaacccgctaccaagtcctgcagttttagcgcctgtaccgatggtatttcctggcctttcgtcttgctgatcatgcccctggtcatctgggtgtactcgactgacacaaattttagcgacatgttttggtcttag

SEQ ID NO: 247009 - DNA, 3129 bp, Artificial Sequence
  derived and/or modified sequence
atggaaaacgcacatacaaaaacagtggaggaggttctcggtcacttcggagtcaatgaatctactggcctgagcctggaacaagtcaagaaattgaaggagaggtggggctctaacgagttaccagcggaagaagggaaaaccctactggagctcgttattgagcagttcgaggacctgcttgtgcggatcctgttactggccgcttgtatttcttttgtgcttgcatggttcgaggaaggcgaggaaaccatcacagccttcgtcgagccatttgtgattctgctgatcctcgtggccaacgccatcgtcggcgtatggcaagaaaggaatgctgagaacgccattgaagccctgaaggagtacgaacctgagatgggaaaggtataccgccaggatagaaagtccgtacaaagaatcaaggccaaggatatcgtaccgggcgatatagtcgagatcgccgtaggcgacaaggtgccagccgatatcagacttactagtataaaaagtactactctgcgcgtcgatcagtcgatcttgacaggcgaatcggtgagcgtcatcaaacatacggaccccgtccccgatcccagggccgtgaaccaagacaaaaaaaacatgctatttagcggtactaatatagctgctggcaaagcaatgggcgtcgttgtcgctacaggcgtgaacactgagatcggcaaaattagagatgagatggttgccaccgagcaggaacgaacaccgttgcaacagaaactggatgaatttggcgaacagctgtcaaaggtaatcagcctaatctgtattgccgtgtggataattaacataggtcacttcaacgaccccgttcatggaggcagctggatcaggggcgccatctattatttcaaaattgccgtcgccctggcagtagctgcaatcccagagggccttccagcggtcattacaacatgcctggctctgggcaccagaagaatggccaagaagaatgccatcgttcgctccttacctagcgtagagaccctgggctgcacctctgtgatctgcagcgacaagactggaactctgacgaccaatcaaatgtctgtttgtagaatgtttatattagatcgggtcgaaggcgatacttgctctctgaacgagtttaccattactggatccacttatgcccccatcggcgaggtgcataaggacgataaaccagtgaactgtcatcagtacgatggcctggtggaacttgccacaatctgcgccctttgcaacgacagcgccctcgattacaacgaagcgaagggcgtgtacgaaaaagtcggcgaggcaacagaaaccgccttaacttgtctggtggaaaagatgaacgtgttcgatactgaattgaagggactcagcaagatagagagggccaatgcatgcaacagcgtcattaaacagctgatgaagaaggaatttacactggaattctcacgggatagaaagtctatgagtgtgtactgcacacctaataaaccttcgcgtacttcaatgagtaagatgttcgtgaagggcgcgcctgagggtgtgatcgatcgctgtactcatatccgggttggatccacaaaggtgcctatgacttccggcgtcaagcaaaagattatgtctgttatccgggagtggggcagcgggtcggataccctcagatgtctagcattggccacacatgacaatccactccggcgggaggagatgcacctggaggatagcgcaaactttatcaagtacgaaactaacctgactttcgttggctgtgtgggaatgctggacccccctagaattgaggttgcttcgtctgtgaagctgtgtagacaggctggtattagagtcatcatgataacgggtgacaacaaagggactgctgttgctatctgcagacgtattgggatctttgggcaggacgaagatgtcacaagtaaggcctttaccggtcgggaatttgacgagctgaaccccagcgctcagagggatgcctgcctcaatgctcggtgctttgctagagtggaaccctctcacaagtctaagattgtcgagttcctccagagtttcgatgagattaccgccatgaccggggacggggtgaatgacgcgccagcgcttaaaaaggcagaaatcggaatcgctatgggttctgggaccgctgtggccaagaccgcatctgagatggttcttgccgatgacaacttttccacgatcgtagcggcagttgaggagggcagagcgatctacaataatatgaagcagttcatccgatatctgatctcttctaatgtgggggaggtagtgtgcatcttcctaactgctgcactcggcttccctgaggcactgatcccagttcaactcctgtgggtgaatctcgtcactgatggcctgcccgcaacagcattgggctttaatcccccggacctcgatataatgaataagcccccgcgtaatcccaaggaacctttaatcagtggatggctcttttttcgatacctcgccataggctgctacgtgggagcagcgaccgtgggtgcagctgcttggtggttcatagcggcggatggtgggcctcgggtttctttttatcagctgtcacacttccttcagtgtaaagaagataaccctgacttcgagggggtggattgcgctattttcgaaagcccgtaccctatgaccatggcactaagcgttctggtgactatcgagatgtgcaacgctcttaattccctgtctgaaaatcaatcgctcctcaggatgccaccatgggagaacatctggcttgttggatccatatgcctgtctatgagcctccatttccttatcctgtacgtggaacctttaccactcatattccaaattaccccacttaacgtgacacagtggctgatggtgctaaagattagcctccccgttattcttatggacgagactctgaagttcgtggctcgcaactacctagaaccaggaaaggaatgcgttcagcctgccaccaaatcctgcagttttagtgcctgtactgacggtatatcttggccctttgtcctgctgatcatgcctctggtaatttgggtgtattccactgacaccaattttagcgatatgttttggtcctag

SEQ ID NO: 247010 - DNA, 2802 bp, Artificial Sequence
  derived and/or modified sequence
tagacaatcactgcatttgtggaaccgtttgttatcttgctgatcttagttgcaaatgcaatagtgggtgtgtggcaggagcggaatgctgagaatgctattgaggcgttgaaggagtacgaacctgagatgggcaaagtgtacaggcaagatcgaaaatccgtccaacggatcaaggctaaggacattgtccccggcgacatcgtggagatcgccggtgagagtgtgtcagtgatcaaacacacagatcccgtccccgacccgcgcgccgtgaaccaggataagaaaaatatgctgtttagcgggacaaatattgccgctgggaaggccatgggcgttgtggtcgccaccggagtaaataccgaaatcggcaaaatcagagacgagatggtggctaccgagcaggagcgcacacctctccagcagaagctcgatgagttcggagaacagctttctaaggtgatctcactgatctgcatcgccgtctggataatcaatattggccatttcaatgatcccgtgcacggcggttcttggatcaggggtgctatctactacttcaaaatcgcggtggccctggccgtggccgcaattcccgagggactcccggctgtcattactacttgccttgccctgggcactcggagaatggccaagaagaatgccattgtacggtcactcccttctgtggaaaccctagggtgtacctctgtgatatgttctgacaaaaccgggaccctaacaactaatcagatgtcagtgtgtcggatgttcatcctggaccgagtggaaggagacacatgcagtctgaatgagttcaccattactgggagcacatacgcacccatcggcgaagtgcacaaggacgataaacctgtcaattgtcatcagtacgatgggctcgttgagctcgccacgatctgcgccctctgcaacgattccgctctggattacaatgaggcaaaaggcgtatacgagaaggtgggagaggccacagagaccgcactgacttgcctggtggagaaaatgaacgtgtttgacaccgagctgaagggcctgagtaaaattgaacgcgctaacgcatgcaacagtgtaatcaagcaactgatgaagaaagagttcactctggaatttagtagagatcgaaaatccatgtcggtttattgtactcccaacaaaccctctcgcacttccatgtccaaaatgttcgttaagggtgcccctgagggggttatcgatcggtgtactcatatccgcgtgggctcaaccaaagttcctatgacgtctggcgtcaagcagaaaattatgagtgtcatcagagaatgggggtctgggagtgacaccttaagatgcttggccctggcgacccatgacaaccccctgcggcgagaggaaatgcacctcgaggactctgctaacttcataaaatacgagactaacctcacttttgttggatgcgtgggcatgctcgaccccccacgaatcgaggttgcatcttccgtaaagttatgtaggcaagctggcatcagggttatcatgattactggagataacaagggaaccgccgttgccatctgtcgccgcatcggcatctttgggcaggacgaggacgtcaccagcaaggcttttacaggacgcgagttcgacgaactcaacccctctgcgcaaagagatgcatgtctgaacgcgcggtgcttcgctagggttgagccctcacataagagtaagatcgtcgaattccttcagagcttcgacgagatcacagcgatgacgggagatggcgtcaatgacgcccctgctttaaaaaaggctgagattgggatcgccatgggaagcggcaccgccgtggccaagactgcctctgagatggtgctcgccgacgataatttctccacaattgtcgcagcggtggaggaaggtagggctatttacaacaacatgaagcagtttatccgctatttaattagctccaacgtcggagaagtggtctgcatctttttgactgcagccctgggctttcctgaggctctcattcctgtccagctgctttgggtgaacttagtgactgacggattgccggcaactgctctcgggtttaatcctccagacctggacatcatgaataagccgccccgcaaccccaaagaacccttgatcagtggttggctcttcttcaggtacctggctatcggatgctatgtgggagccgctaccgtgggagcagcggcctggtggttcattgccgctgacggaggccctagagtatccttttaccaactttctcacttcttacagtgcaaagaggacaatcccgactttgaaggtgtagattgcgccattttcgagtcgccatacccaatgaccatggccctcagcgtgctggtaacaatagagatgtgtaatgcgctcaattctctttcagagaaccagtctctattacgaatgcctccctgggagaatatctggctggtggggagtatctgcctgtcgatgtccttgcattttttgatcttatatgttgaacccctccccctgatctttcaaataacacccctgaatgtcacacaatggctgatggtgcttaagattagtctacccgtcattctgatggatgaaacattgaaatttgttgcacggaactatttggaaccaggcaaggagtgtgtacagccagccacgaagagctgtagtttttcagcatgcactgatgggatctcttggccatttgttttacttatcatgcccttggtcatttgggtatactctaccgatacgaactttagtgatatgttctggtcctag

SEQ ID NO: 247011 - DNA, 3048 bp, Artificial Sequence
  derived and/or modified sequence
atggagaatgcccacaccaagacagtggaggaggtgctgggccactttggagtgaatgaaagcacaggcctgagcctggagcaggtgaagaagctgaaggagcgctggggcagcaatgagctgcctgctgaggagggcaagaccctgctggagctggtgattgagcagtttgaggacctgctggtgcgcatcctgctgctggccgcctgcatcagctttgtgctggcctggtttgaggagggggaggagaccatcacagcctttgtggagcccttcgtcatcctgctgatcctggtggccaatgccatcgtgggcgtgtggcaggagagaaatgcagaaaatgccatcgaggccctgaaggagtatgagcctgagatgggcaaggtgtaccggcaggacaggaagtctgtgcagaggatcaaggccaaggacatcgtgcctggggacatcgtggagattgctggggagagcgtgtctgtcatcaagcacacagatcctgtgcctgaccccagggctgtgaaccaggacaagaagaacatgctgttcagcggcaccaacattgctgctgggaaggccatgggcgtggtggtggccactggagtgaacacagaaattggcaagatcagagatgagatggtggccacagagcaggagaggacccccctgcagcagaagctggatgaatttggagagcagctgagcaaggtgatcagcctcatctgcatcgctgtgtggatcatcaacatcggccacttcaatgaccctgtgcatggaggctcctggatccggggggccatctactacttcaagattgctgtggccctggccgtggccgccatccctgagggcctgcctgctgtgatcaccacctgcctggccctgggcaccaggaggatggccaagaagaatgccatcgtgcgcagcctgcccagcgtggagaccctgggctgcaccagcgtcatctgcagcgacaagacaggcaccctgaccaccaaccagatgtctgtgtgcaggatgttcatcctggacagagtggagggggacacctgcagcctgaatgagttcaccatcaccggcagcacctacgcccccatcggggaggtgcacaaggatgacaagcctgtgaactgccaccagtatgatggcctggtggagctggccaccatctgtgccctgtgcaatgacagcgccctggactacaatgaggccaagggcgtgtatgagaaggtgggggaggccacagaaacagccctgacctgcctggtggagaagatgaatgtgtttgacacagagctgaagggcctgagcaagattgaaagagccaatgcctgcaacagcgtcatcaagcagctgatgaagaaggagttcaccctggagttcagccgggacaggaagtccatgtctgtgtactgcacccccaacaagcccagcaggacctccatgagcaagatgtttgtgaagggggcccctgagggcgtcatcgaccgctgcacccacatccgggtgggcagcaccaaggtgcccatgaccagcggcgtgaagcagaagatcatgtctgtcatccgggagtggggcagcggcagtgacaccctgcgctgcctggccctggccacccatgacaaccccctgcggcgggaggagatgcacctggaggacagcgccaacttcatcaagtatgagaccaacctgacctttgtgggctgtgtgggcatgctggaccccccaagaattgaggtggccagctctgtgaagctgtgccggcaggccggcatccgggtcatcatgatcactggagacaacaagggcacagctgtggccatctgcagaagaattggcatcttcggccaggatgaagatgtgaccagcaaggccttcaccggccgggagtttgatgagctgaaccccagcgcccagagagatgcctgcctgaatgcccgctgctttgcccgggtggagcccagccacaagagcaagatcgtggagttcctgcagagctttgatgagatcacagccatgactggagatggagtgaatgatgccccagccctgaagaaggccgagatcggcatcgccatgggcagcggcacagctgtggccaagacagccagcgagatggtgctggctgatgacaacttcagcaccatcgtggccgctgtggaggagggccgggccatctacaacaacatgaagcagttcatccgctacctgatcagcagcaatgtgggggaggtggtgtgcatcttcctgacagctgccctgggcttccctgaggccctgatccctgtgcagctgctgtgggtgaacctggtgacagatggcctgcctgccacagccctgggcttcaaccccccagacctggacatcatgaacaagccacccaggaaccccaaggagcccctcatcagcggctggctgttcttccgctacctggccatcggctgctacgtgggcgccgccaccgtgggcgccgccgcctggtggttcatcgctgctgatggcggcccccgggtgtccttctaccagctgagccacttcctgcagtgcaaggaggacaacccagactttgaaggagtggactgtgccatctttgagagcccctaccccatgaccatggccctgtctgtgctggtgaccatcgagatgtgcaatgccctgaacagcctgtctgagaaccagagcctgctgaggatgccaccctgggagaacatctggctggtgggcagcatctgcctgtccatgagcctgcacttcctgatcctgtatgtggagcccctgcccctcatcttccagatcacccccctgaatgtgacccagtggctgatggtgctgaagatcagcctgcccgtcatcctgatggatgagaccctgaagtttgtggccaggaactacctggagcccgggaaggaatgtgtgcagcctgccaccaagagctgcagcttcagcgcctgcacagatggcatctcctggccctttgtgctgctgatcatgcccctggtgatctgggtgtacagcacagacaccaacttcagtgacatgttctggagctag

SEQ ID NO: 247012 - DNA, 3129 bp, Artificial Sequence
  derived and/or modified sequence
atggagaatgcccacaccaagacagtggaggaggtgctgggccactttggagtgaatgaaagcacaggcctgagcctggagcaggtgaagaagctgaaggagcgctggggcagcaatgagctgcctgctgaggagggcaagaccctgctggagctggtgattgagcagtttgaggacctgctggtgcgcatcctgctgctggccgcctgcatcagctttgtgctggcctggtttgaggagggggaggagaccatcacagcctttgtggagcccttcgtcatcctgctgatcctggtggccaatgccatcgtgggcgtgtggcaggagagaaatgcagaaaatgccatcgaggccctgaaggagtatgagcctgagatgggcaaggtgtaccggcaggacaggaagtctgtgcagaggatcaaggccaaggacatcgtgcctggggacatcgtggagattgctgtgggggacaaggtgcctgctgacatccggctgaccagcatcaagagcaccaccctgcgggtggaccagagcatcctgactggagagagcgtgtctgtcatcaagcacacagatcctgtgcctgaccccagggctgtgaaccaggacaagaagaacatgctgttcagcggcaccaacattgctgctgggaaggccatgggcgtggtggtggccaccggggtgaacacagagatcggcaagatcagagatgagatggtggccacagagcaggagaggacccccctgcagcagaagctggatgaatttggagagcagctgagcaaggtgatcagcctcatctgcatcgctgtgtggatcatcaacatcggccacttcaatgaccctgtgcacggcggctcctggatccggggggccatctactacttcaagattgctgtggccctggccgtggccgccatccctgagggcctgcctgctgtgatcaccacctgcctggccctgggcaccaggaggatggccaagaagaatgccatcgtgcgcagcctgcccagcgtggagaccctgggctgcaccagcgtcatctgcagcgacaagacaggcaccctgaccaccaaccagatgtctgtgtgcaggatgttcatcctggacagagtggagggggacacctgcagcctgaatgagttcaccatcaccggcagcacctacgcccccatcggggaggtgcacaaggatgacaagcctgtgaactgccaccagtatgatggcctggtggagctggccaccatctgtgccctgtgcaatgattctgccctggactacaatgaggccaagggcgtgtatgagaaggtgggggaggccacagaaacagccctgacctgcctggtggagaagatgaatgtgtttgacacagagctgaagggcctgagcaagattgagcgggccaatgcctgcaacagcgtcatcaagcagctgatgaagaaggagttcaccctggagttcagccgggacaggaagtccatgtctgtgtactgcacccccaacaagcccagcaggacctccatgagcaagatgtttgtgaagggggcccctgagggcgtgattgaccgctgcacccacatccgggtgggcagcaccaaggtgcccatgaccagcggcgtgaagcagaagatcatgtctgtcatccgggagtggggcagcggcagtgacaccctgcgctgcctggccctggccacccatgacaaccccctgcggcgggaggagatgcacctggaggacagcgccaacttcatcaagtatgagaccaacctgacctttgtgggctgtgtgggcatgctggaccccccacgcatcgaggtggccagctctgtgaagctgtgccggcaggccggcatccgggtcatcatgatcaccggggacaacaagggcacagctgtggccatctgccgccgcatcggcatcttcggccaggatgaagatgtgaccagcaaggccttcaccggccgggagtttgatgagctgaaccccagcgcccagagagatgcctgcctgaatgcccgctgctttgcccgggtggagcccagccacaagagcaagatcgtggagttcctgcagagctttgatgagatcacagccatgactggagatggagtgaatgatgccccagccctgaagaaggccgagattggaattgccatgggcagcggcacagctgtggccaagacagccagcgagatggtgctggctgatgacaacttcagcaccatcgtggccgctgtggaggagggccgggccatctacaacaacatgaagcagttcatccgctacctgatcagcagcaatgtgggggaggtggtgtgcatcttcctgacagctgccctgggcttccctgaggccctgatccctgtgcagctgctgtgggtgaacctggtgacagatggcctgcctgccacagccctgggcttcaaccccccagacctggacatcatgaacaagcccccaagaaaccccaaggagcccctcatcagcggctggctgttcttccgctacctggccatcggctgctacgtgggcgccgccaccgtgggcgctgctgcctggtggttcatcgccgcagatggcggcccccgggtgtccttctaccagctgagccacttcctgcagtgcaaggaggacaacccagactttgagggcgtggactgtgccatctttgagagcccctaccccatgaccatggccctgtctgtgctggtgaccatcgagatgtgcaatgccctgaacagcctgtctgagaaccagagcctgctgaggatgccaccctgggagaacatctggctggtgggcagcatctgcctgtccatgagcctgcacttcctgatcctgtatgtggagcccctgcccctcatcttccagatcacccccctgaatgtgacccagtggctgatggtgctgaagatcagcctgcctgtgatcctgatggatgagaccctgaagtttgtggccaggaactacctggagcccgggaaggaatgtgtgcagcctgccaccaagagctgcagcttcagcgcctgcacagatggcatctcctggccctttgtgctgctgatcatgcccctggtgatctgggtgtacagcacagacaccaacttcagtgacatgttctggagctag

SEQ ID NO: 247013 - DNA, 2802 bp, Artificial Sequence
  derived and/or modified sequence
tgaaccatcacagcctttgtggagcccttcgtcatcctgctgatcctggtggccaatgccatcgtgggcgtgtggcaggagagaaatgcagaaaatgccatcgaggccctgaaggagtatgagcctgagatgggcaaggtgtaccggcaggacaggaagtctgtgcagaggatcaaggccaaggacatcgtgcctggggacatcgtggagattgctggggagagcgtgtctgtcatcaagcacacagatcctgtgcctgaccccagggctgtgaaccaggacaagaagaacatgctgttcagcggcaccaacattgctgctgggaaggccatgggcgtggtggtggccactggagtgaacacagaaattggcaagatcagagatgagatggtggccacagagcaggagaggacccccctgcagcagaagctggatgaatttggagagcagctgagcaaggtgatcagcctcatctgcatcgctgtgtggatcatcaacatcggccacttcaatgaccctgtgcatggaggctcctggatccggggggccatctactacttcaagattgctgtggccctggccgtggccgccatccctgagggcctgcctgctgtgatcaccacctgcctggccctgggcaccaggaggatggccaagaagaatgccatcgtgcgcagcctgcccagcgtggagaccctgggctgcaccagcgtcatctgcagcgacaagacaggcaccctgaccaccaaccagatgtctgtgtgcaggatgttcatcctggacagagtggagggggacacctgcagcctgaatgagttcaccatcaccggcagcacctacgcccccatcggggaggtgcacaaggatgacaagcctgtgaactgccaccagtatgatggcctggtggagctggccaccatctgtgccctgtgcaatgacagcgccctggactacaatgaggccaagggcgtgtatgagaaggtgggggaggccacagaaacagccctgacctgcctggtggagaagatgaatgtgtttgacacagagctgaagggcctgagcaagattgaaagagccaatgcctgcaacagcgtcatcaagcagctgatgaagaaggagttcaccctggagttcagccgggacaggaagtccatgtctgtgtactgcacccccaacaagcccagcaggacctccatgagcaagatgtttgtgaagggggcccctgagggcgtcatcgaccgctgcacccacatccgggtgggcagcaccaaggtgcccatgaccagcggcgtgaagcagaagatcatgtctgtcatccgggagtggggcagcggcagtgacaccctgcgctgcctggccctggccacccatgacaaccccctgcggcgggaggagatgcacctggaggacagcgccaacttcatcaagtatgagaccaacctgacctttgtgggctgtgtgggcatgctggaccccccaagaattgaggtggccagctctgtgaagctgtgccggcaggccggcatccgggtcatcatgatcactggagacaacaagggcacagctgtggccatctgcagaagaattggcatcttcggccaggatgaagatgtgaccagcaaggccttcaccggccgggagtttgatgagctgaaccccagcgcccagagagatgcctgcctgaatgcccgctgctttgcccgggtggagcccagccacaagagcaagatcgtggagttcctgcagagctttgatgagatcacagccatgactggagatggagtgaatgatgccccagccctgaagaaggccgagatcggcatcgccatgggcagcggcacagctgtggccaagacagccagcgagatggtgctggctgatgacaacttcagcaccatcgtggccgctgtggaggagggccgggccatctacaacaacatgaagcagttcatccgctacctgatcagcagcaatgtgggggaggtggtgtgcatcttcctgacagctgccctgggcttccctgaggccctgatccctgtgcagctgctgtgggtgaacctggtgacagatggcctgcctgccacagccctgggcttcaaccccccagacctggacatcatgaacaagccacccaggaaccccaaggagcccctcatcagcggctggctgttcttccgctacctggccatcggctgctacgtgggcgccgccaccgtgggcgccgccgcctggtggttcatcgctgctgatggcggcccccgggtgtccttctaccagctgagccacttcctgcagtgcaaggaggacaacccagactttgaaggagtggactgtgccatctttgagagcccctaccccatgaccatggccctgtctgtgctggtgaccatcgagatgtgcaatgccctgaacagcctgtctgagaaccagagcctgctgaggatgccaccctgggagaacatctggctggtgggcagcatctgcctgtccatgagcctgcacttcctgatcctgtatgtggagcccctgcccctcatcttccagatcacccccctgaatgtgacccagtggctgatggtgctgaagatcagcctgcccgtcatcctgatggatgagaccctgaagtttgtggccaggaactacctggagcccgggaaggaatgtgtgcagcctgccaccaagagctgcagcttcagcgcctgcacagatggcatctcctggccctttgtgctgctgatcatgcccctggtgatctgggtgtacagcacagacaccaacttcagtgacatgttctggagctag

SEQ ID NO: 247014 - DNA, 3048 bp, Artificial Sequence
  derived and/or modified sequence
atggagaacgcccacaccaagaccgtggaggaggtgctgggccactttggagtgaatgagtccacaggtttatcactggagcaagttaagaagttaaaggaaaggtggggcagtaatgaactcccggcagaggaggggaaaactttgctggagctggtgatcgagcaattcgaagatttgctagtgcgaatcctgctgctggcggcatgcatttctttcgtgctcgcatggtttgaagagggagaggagaccatcacggcatttgtggaaccgttcgtgattttgctcattctggtcgctaacgccatcgtcggcgtgtggcaggaacgcaatgcagagaatgcgatcgaggccctcaaagagtacgagcctgagatggggaaggtgtaccgccaggatcgcaaatctgtacagcgcataaaggccaaagatatcgtacctggggatatcgtggagattgccggtgagagcgtgtccgtaataaaacacaccgacccagtcccggaccctagagcggtaaaccaagataagaagaacatgctgttttcagggaccaatatcgctgccggtaaagcaatgggagttgtggttgccaccggtgtgaacacagagataggtaaaatcagggacgagatggttgcaacggagcaggagcgtaccccccttcagcagaagttagatgagtttggagaacaactgtcaaaggtcatctcattgatatgtattgcagtctggataatcaatattgggcactttaatgaccccgtgcatggcggatcatggatcagaggcgctatctactacttcaagatagctgtcgccctcgccgtcgctgccattccagagggactgcctgcagtcattactacgtgtttggcattaggaacgcggaggatggccaagaagaacgccatcgtcaggagcctgccatctgtggagacgctcggatgtacctctgtgatatgctctgataaaaccggcacccttacaactaatcagatgagcgtatgtcgcatgtttatattggatcgtgtcgagggagacacgtgcagcctgaacgaattcacaattaccggttcaacgtatgcacccattggcgaagttcacaaggatgacaagcctgtgaactgtcatcaatacgatggtctcgtcgaactagctacaatctgtgccctatgtaacgacagtgcgctggactacaatgaagccaagggggtgtacgagaaggtgggcgaggccacggagaccgctctcacttgcttggtcgaaaaaatgaacgtatttgatacagagctgaaaggcttgtccaagatagagcgggcaaatgcttgcaattctgtgatcaagcaactaatgaagaaggagtttactcttgagttttcccgcgacaggaagagcatgtccgtgtactgcactcccaacaagcccagccgaacgtctatgagcaagatgtttgttaaaggcgcgcccgagggtgtaatagaccggtgtactcatatcagggtgggatcaactaaggtgcccatgacatccggcgtgaagcagaagattatgtctgttatacgagaatggggctctggatctgacaccctgaggtgtttggctctggccacgcatgacaatcccctccgcagggaggagatgcatctggaagactcggccaacttcattaaatacgagaccaacttgaccttcgtgggttgtgtcggcatgctggaccctccacgcatagaagtggcgtcctccgtaaaactttgcaggcaggccggcatacgggtcataatgataacgggagataataagggtacagctgtggcgatctgtcgtagaattggcatttttggccaagatgaagacgttaccagcaaggccttcactgggagggaatttgacgagttgaatccgtcagcccagcgggacgcttgcctcaacgcacgatgttttgcacgcgtcgagccctcacacaaaagcaaaatagtagagttcctccaatctttcgatgagatcactgccatgactggcgacggcgtgaatgacgcccctgcattgaagaaggccgaaatcggcattgccatgggctccgggactgccgtggcaaagaccgcaagtgaaatggtgttagcagacgacaacttctcaacaatcgtggcggccgtggaggaggggagggcaatctacaataatatgaaacagtttattcgctatttgatttcatcgaacgtcggtgaggtcgtttgtatttttctaacagccgcccttggattccctgaagctctgatcccagtgcagcttctgtgggtgaacttggttaccgacgggctgcccgcgactgcactcgggtttaatccgcctgacttagatattatgaataaacctcccagaaaccctaaggagcccttaatatccggctggctgttttttaggtacttggctataggctgctatgtgggagctgctaccgtcggggcagccgcctggtggttcatcgccgcggatggtggtccaagagtgtctttttaccagctcagtcacttcctgcagtgcaaggaggataaccctgatttcgagggagttgattgcgctatattcgagtcgccctacccaatgacgatggcactttccgtgctggtgactatcgaaatgtgcaacgcactcaactcactatcggagaaccagtcattactgcgtatgccaccttgggagaacatatggctggttggctcgatttgcctgtccatgtcgctgcattttctgattttgtatgtagagcccctgccattgatcttccagattactcctttaaatgtcacccagtggctaatggtgttgaagataagccttcccgtcatcttaatggacgaaacgttgaagttcgtggccaggaattacttggaacctggaaaggaatgcgtgcagccggctacaaaatcttgctcattctcagcctgtaccgacggaatctcatggccattcgtgctgttgataatgcctctggttatctgggtgtacagcactgataccaatttctctgatatgttttggtcgtag

SEQ ID NO: 247015 - DNA, 3129 bp, Artificial Sequence
  derived and/or modified sequence
atggagaacgcccacaccaagaccgtggaggaggtgctgggccacttcggagtaaacgagtcaacaggactcagcctggagcaagttaagaaactgaaagagcgatggggcagcaatgaattgcctgctgaagagggtaaaactctgttggagctcgtgattgagcagtttgaagatctcctagtgcgaattctgcttctggcagcttgcatttcatttgtgctggcctggttcgaggaaggagaagaaactatcaccgcattcgtggagccgtttgtaatcctcttgatcctggtggctaacgcaatcgtcggggtgtggcaagaaagaaacgctgagaatgcgattgaagctctaaaagaatacgagccagagatgggcaaggtgtatagacaggaccgaaaaagtgtccaacgcattaaagcaaaggacattgtccctggcgacattgtcgagatcgccgtcggcgataaagtgcccgcagatattcggctcacgtctatcaagagcaccacactaagagtggatcaaagtatactcacaggagaaagtgtgtcagtcattaagcatacagatcctgtgcctgaccctagagctgtgaaccaggataagaagaatatgctgttttctgggacgaatattgcggcaggtaaggctatgggagttgtcgttgcaacgggggtgaatactgaaattgggaaaatcagagatgagatggtagccacagagcaagagaggacgcccctccagcagaagctagacgagttcggcgaacagctctccaaggtaatctctttaatctgcatcgcagtctggatcataaatataggccatttcaacgatccagtgcatggaggctcttggattcggggagcgatctattactttaagatcgctgtggccctcgctgtggctgcaattcccgaaggactcccagccgtaattaccacttgcctggctctgggcacgcggcgtatggcgaaaaagaacgcgatagttaggtcgctacctagtgtggaaacattaggctgtacctctgtcatatgcagcgacaaaacaggaactctgactactaatcaaatgtcagtatgccggatgtttatcctcgaccgggttgagggcgatacctgttccctgaatgagttcactatcactgggtcaacatacgcgccaatcggggaggtccataaagatgacaaaccagttaattgccaccagtatgacgggctcgtcgagcttgctacaatttgcgctctgtgtaacgactctgccctggactataacgaagccaaaggagtttatgaaaaagtgggcgaagcaacagagaccgccttgacctgtttggtggaaaagatgaatgtgtttgataccgaattaaaggggctgtcaaagatcgagagggctaatgcatgcaatagtgttatcaagcagctaatgaagaaagagtttactctggaatttagtagggaccgaaagtcgatgtcagtgtactgcacacctaacaaaccatctcggacctcaatgtctaaaatgtttgtaaaaggagctccagaaggcgtaatcgataggtgcacccacattagggtaggttccacaaaggtacccatgactagcggagtcaagcagaaaatcatgagcgtgataagagagtggggttccggaagtgatactctgcgctgtctggcccttgccacacacgataaccctttgagaagagaagaaatgcacctcgaggacagcgctaacttcatcaaatatgagaccaatctcacgttcgtcgggtgcgtaggaatgctagatccaccaaggattgaggtagcctcgagcgttaagctgtgccgccaggctggcatccgagttattatgatcaccggcgacaacaaagggaccgcagttgctatctgccgcaggatcggaatatttggccaggacgaggatgtcacaagcaaggcctttacggggagagagtttgacgagcttaatccctctgcacagcgggatgcatgccttaatgcccgctgttttgcccgcgttgagccttcccacaagagcaaaatcgttgagttccttcagtctttcgacgagattacagcaatgaccggggatggagtgaacgatgctccggctctgaagaaagcagaaatcggaattgccatgggctctgggacagccgtcgccaaaactgcctcggaaatggtcctcgccgatgacaacttcagcactatcgttgccgctgttgaggaagggcgggctatttataacaatatgaagcagtttatcagatatctaattagcagtaacgtgggcgaggttgtatgtatcttcctgacggcagcgcttggctttccggaggccttaataccggtacagctgttgtgggtgaaccttgtgacggatggattacccgccaccgctctgggctttaatcccccagacttggacataatgaataaacctccaaggaacccgaaagaacccctgatcagtggctggctgtttttccggtacctggccatcgggtgctacgtgggcgccgccaccgtcggtgcggcagcctggtggttcatcgccgccgatggcggccctcgtgtgtctttctaccagctttcccactttcttcagtgcaaagaggacaatccagactttgaaggggttgactgcgctatctttgaatccccatatcccatgaccatggcactttcagtcttggtgacaatcgagatgtgtaatgcccttaactctctctccgagaatcagtcacttctgcggatgcctccctgggagaacatttggttggtcggctccatctgcctgtctatgagcctgcatttcctgatcctgtatgtagagccattaccgctgatcttccaaataactcccctgaatgtgactcagtggttgatggttctgaagatctcgctcccagttatattgatggacgaaactttgaaatttgttgctcgaaattatcttgagcctggcaaagagtgtgttcaaccagcgaccaagtcctgcagcttttctgcatgcaccgatggaattagttggcctttcgtgttactgattatgccattggttatctgggtctactctacggatacaaacttctccgacatgttttggagctag

SEQ ID NO: 247016 - DNA, 2802 bp, Artificial Sequence
  derived and/or modified sequence
tgaaccatcaccgccttcgtggagcccttcgtgatcctgctgatcctggttgccaacgccatcgttggcgtctggcaggagcgaaatgccgagaacgcgattgaagccctgaaggagtatgagcccgagatgggcaaggtctatcgacaggaccgcaaaagtgttcaacgtatcaaggcaaaagatatcgtaccaggcgacatagtcgaaatcgcaggtgagtcggtctcggtgattaagcatacagacccagttcccgatccccgcgcagtgaaccaggacaagaagaacatgctcttttccggaacaaacatagccgccggaaaagcaatgggggtggtcgtcgctaccggggtgaacactgagattggcaaaattcgtgacgagatggttgccactgaacaggagagaacccccctgcagcagaagctggacgaatttggagagcagctgtctaaagttattagtctcatctgcattgcggtttggatcatcaatatcggccacttcaacgaccctgttcatggaggctcttggattcgcggcgccatctattacttcaagatcgccgttgcacttgctgtggctgcaatacccgaaggactccctgccgttattaccacctgcctggcattaggaactcgaagaatggctaaaaagaacgctatcgtgagatcacttccctctgtggaaacactgggctgcaccagcgttatctgctccgacaagacgggaacgttgacaactaaccagatgtcagtgtgcaggatgtttattctggatagagtggagggtgacacgtgttctctcaacgagtttaccattactgggtccacttatgcaccaatcggggaggtgcacaaagatgataaaccagtgaattgccaccaatacgatggcttagtggaattggccacaatatgcgccctctgtaatgacagcgccctggactacaatgaagcaaaaggtgtgtacgaaaaagtaggcgaggctacagagacagctctgacatgtcttgtcgagaaaatgaatgtgtttgataccgaactcaaaggcttgtcaaaaatcgagcgggccaatgcttgcaactccgttattaagcagctgatgaaaaaagagtttacactggagtttagtcgtgatagaaagtcaatgagcgtatactgtacccccaataaaccctccaggactagcatgtcaaagatgtttgtaaagggggcaccggaaggagtaattgaccgctgcacacacattcgcgtaggcagcacaaaagtccccatgactagcggcgtgaagcagaagatcatgtccgtgatccgcgagtggggcagtggctctgacactctccggtgcctggccctggctacacacgacaatcccctgaggcgcgaggaaatgcacctcgaagacagcgctaatttcatcaagtacgaaacaaacttaactttcgtgggctgtgtcggcatgctcgacccaccccgtattgaagtggcatctagtgtcaagctgtgtcggcaggcggggattcgcgtaattatgatcacaggcgacaataagggaactgcggttgcgatttgtcgaagaataggaatcttcggccaggatgaagacgtgacctcgaaagcatttacgggccgggagttcgacgaactcaatccctccgcccagagggacgcctgcttaaatgcgaggtgcttcgcgcgcgtagaaccatcccacaagtctaagattgtcgagtttctgcaatcattcgacgagattacggctatgaccggggacggcgtcaacgacgcgcctgctctgaagaaggcagagattggcatcgcgatgggctccggtactgcagtcgccaaaacagcgtccgaaatggtgttagcagacgacaatttttccactattgtggccgccgtggaggaaggtagagccatctataataatatgaagcaatttataagatacctgatttcctccaacgtcggcgaggtggtctgcatcttcctgaccgccgctctggggtttccagaagctctcattcccgtgcagctgctctgggtgaatcttgtcaccgacggtctgcctgccaccgcattgggtttcaatccacccgatctcgatataatgaacaaaccacccagaaatccaaaagaacctctgatcagtggatggctgttttttaggtacttggctattggatgttacgtcggcgctgctacagttggagccgccgcatggtggtttattgcagccgatggcggcccccgtgttagcttctaccagctctcccactttctccagtgtaaggaagataatccagactttgaaggcgtcgactgtgccatcttcgagtccccttatcccatgactatggcgcttagtgtcttggttactatcgagatgtgcaatgctctcaattctctcagcgaaaaccaaagcctgctcaggatgcccccatgggaaaatatctggctggtgggcagcatttgcctgagcatgtcattgcactttctgatcctctatgtggagcctctgcccttaattttccagattacccccctaaacgtcactcaatggcttatggtcctgaaaatttccttacctgttattctgatggacgagacgcttaagtttgttgcgaggaattacttggaaccagggaaggagtgcgttcagcccgctacaaagtcctgttctttctccgcgtgtaccgatggaatatcttggccattcgtactgctgataatgcctttggtcatatgggtgtactccactgacacaaatttttcagacatgttctggagctag

SEQ ID NO: 247017 - DNA, 3048 bp, Artificial Sequence
  derived and/or modified sequence
atggagaacgcccacacgaagactgtcgaggaagtgttgggacactttggggtcaacgaatccactggcctcagccttgagcaggtgaagaaactcaaggagaggtggggatcgaacgaacttcccgctgaggagggaaaaaccctgctcgagttggtgattgaacagttcgaggatcttctcgtacgcatccttctgctggcggcttgtatatcctttgtcctggcttggttcgaagagggcgaggaaacaatcactgccttcgtcgagcctttcgtgatcctcctcattttggttgccaacgcaatcgtgggggtgtggcaggaacggaatgctgaaaatgccattgaggccctgaaggaatacgagccagaaatggggaaggtgtaccggcaggatcggaaatcagttcagcggatcaaggccaaagacatcgttcccggtgatatagtcgaaattgctggagaatctgtgtcagtgattaagcacaccgacccagtaccggaccccagggcggtcaaccaggataagaagaacatgctcttttccggtaccaatatagccgcagggaaagcgatgggcgttgtggtggccaccggtgtcaacactgagatagggaaaattagagacgagatggtagccactgaacaggaacggacaccactgcagcagaagctggacgaatttggagaacagcttagcaaggtaatctccttaatctgcattgccgtctggatcatcaatattggacatttcaacgacccagtgcacgggggttcatggattaggggtgctatttactacttcaaaattgcagtggccctggcagtggccgcaattcccgagggtttgcccgctgttatcaccacatgtctcgccctgggcacccgtcggatggccaagaagaacgccattgtacgtagcctcccatccgtggagactcttggatgtaccagtgtgatttgctctgataagactggtaccctcacaaccaaccagatgagtgtatgtcgcatgttcatcctggaccgcgtggaaggggatacttgcagtctaaacgagttcaccataactggcagcacttatgcaccgattggggaggtccataaagacgacaaaccagttaactgccaccagtacgatgggctggtagaactggccaccatctgcgcgttatgtaatgattctgctctggactataacgaggcaaagggagtctatgaaaaagttggcgaggccaccgaaactgcactaacctgtctcgttgagaagatgaatgtcttcgacacagagttaaaaggattgtcaaagatcgagcgcgctaatgcctgtaattccgtgattaagcagctgatgaagaaggaattcacccttgagttctcacgtgacaggaaatcgatgagcgtgtactgcacacccaacaaaccctcgcgcacttccatgtctaagatgttcgttaaaggcgcacctgaaggcgtaatcgatagatgtacccacatccgcgtgggcagcacaaaagttccaatgaccagtggtgtgaaacagaagatcatgagtgtgattcgcgagtggggttcagggagcgataccctcaggtgtctagccttagccactcatgataatcctctgcgcagggaggagatgcatctcgaagattccgccaattttattaaatacgagacgaacttaacgttcgttggctgcgtaggcatgctggaccccccaaggattgaagtggcatcatctgtcaaattgtgtcgccaggcaggcatcagggtcataatgattactggtgacaataagggcaccgccgtcgcaatatgccgacgcatcggaatcttcggccaggacgaagacgtgaccagcaaggccttcaccggcagggagttcgatgagctcaatcctagtgctcagcgtgacgcttgcttgaatgcacgttgcttcgcccgagtggagcccagtcacaaatcaaaaatcgttgagtttctgcagagcttcgacgagatcaccgccatgacaggggacggtgtcaatgacgccccagcccttaaaaaggccgaaataggcatcgctatgggctctggcaccgccgttgcgaaaacagcgagtgaaatggtactcgcggatgataatttttctaccatagttgcagccgtggaggaaggtcgtgccatttataataatatgaagcagtttatccggtatcttatcagctcaaacgtcggcgaagtcgtgtgcatctttcttaccgccgctcttggctttcccgaagctctgatccctgtgcaattgctgtgggttaacctggtcactgacggactcccggctaccgcccttggattcaaccccccagacctggatataatgaacaagccccctaggaacccaaaagaacccctgatcagtggttggctgttcttcaggtatcttgccattgggtgttatgtgggagccgcaacagtcggggcagcggcttggtggtttattgcagccgatggaggtcctcgggtctctttctaccagctcagccacttcttacagtgtaaggaagacaatcccgacttcgagggtgtagattgcgcaatattcgagtccccatatcccatgaccatggcactcagcgttctcgtgaccattgaaatgtgcaacgccttgaacagcctgtccgagaaccagtcattgctgcggatgcccccatgggagaatatttggctggttggtagtatttgcctatcaatgtcccttcacttcctgatactctatgtggagccactgcctcttattttccagatcaccccactaaacgtgactcaatggctgatggtcttgaaaatttctttgccggttattctcatggacgaaactctgaaatttgttgcacggaattacctcgagccaggaaaggagtgcgtccagcctgcgacgaagagctgctccttcagcgcttgtactgacgggatttcttggccatttgtactcctgatcatgcccctggtgatttgggtgtactctactgacactaatttttccgatatgttctggagctag

SEQ ID NO: 247018 - DNA, 3129 bp, Artificial Sequence
  derived and/or modified sequence
atggagaatgcccacacaaagacagtggaagaagttctgggacacttcggcgtaaatgaaagcacaggtctctccctggaacaggtgaagaagcttaaggaacgctggggatccaacgaactgcccgctgaagagggtaagaccctcctcgagctcgtgattgagcagttcgaggatctgttggtccgcatcttgttgctggccgcttgcattagtttcgtcctggcatggttcgaggagggcgaggagacgatcactgcattcgtggagcccttcgtgattctcctcatcttggtggccaacgcgatcgtcggtgtgtggcaggaacgtaatgccgaaaatgccatcgaggccctgaaagaatatgagccagagatgggcaaggtctataggcaggaccggaagtccgttcagcgtattaaagccaaagacatagtgccaggcgacatcgtcgagatcgccgtgggcgacaaggtgcccgctgacattcgtctgacaagcatcaagtccacgacgctgagagttgaccagtcaatcctgaccggagaatcagtgtccgtgatcaaacacaccgatcccgttcccgatcctagggctgttaatcaggataagaagaacatgctgttctccggtacaaatattgcagccggaaaagctatgggcgtggtcgtggccaccggggtgaacaccgagatcggtaagatccgcgacgagatggttgctactgaacaggaaaggactcctctgcagcaaaagctggatgagtttggcgagcaactgtccaaggtgatctctcttatctgtattgcagtctggataatcaacatcggtcatttcaatgaccccgtacacgggggttcatggatcagaggagccatctattactttaagatcgccgtcgctctcgctgtcgcagccattcccgagggactccctgcagtcattaccacctgtctcgctttgggcacccgcagaatggctaaaaagaatgctatagtccgttctcttccgtctgtggagaccttagggtgtacctctgtaatctgtagtgacaaaaccggcactttgactactaatcaaatgtcggtatgtcgcatgtttattctggaccgtgtcgagggagacacatgcagtcttaacgagtttactataaccgggtctacttacgcacccatcggtgaggttcataaagacgataaacctgtcaactgtcaccagtatgacggcttggtcgagctggctaccatttgtgcattatgtaatgacagcgctctcgactataacgaggcaaagggggtgtacgagaaagtcggcgaagccaccgaaactgccttaacctgtctcgtcgaaaaaatgaatgtgtttgacaccgaactaaagggtctgtctaagatagagcgggctaacgcatgtaattctgtgattaaacagctgatgaagaaggagttcaccttggagttcagcagagaccgcaaaagcatgtcagtgtattgtacacctaataagccatcacggacctcgatgtcaaaaatgttcgtcaagggcgctcccgaaggtgtcatcgacaggtgcactcatatacgcgtcgggtcaacgaaagtcccgatgactagtggcgtcaaacagaagatcatgtcagtcataagagagtgggggagcggctccgatacgttacgctgcctggccctggctacgcacgataaccctcttaggagagaggagatgcacctggaagatagcgccaactttatcaaatacgaaactaacctcacttttgtgggctgtgttggtatgcttgaccctccacgcattgaagtagcttcatccgtaaaactgtgtaggcaggccggaatacgagtgatcatgatcaccggagataataagggaacagccgtggctatatgccggagaatcggcatcttcggtcaggatgaggatgtgacgagtaaagcctttaccggcagagaattcgacgaactcaatccgagtgctcagagggacgcatgccttaatgctagatgttttgcgcgtgtcgaaccaagccacaagtctaagattgtggaattcttgcagtccttcgatgagatcactgccatgactggcgacggcgtgaacgatgcacccgcactgaagaaagccgaaataggaattgccatggggtccggcaccgccgtggctaaaacagcgtccgagatggtattggcagacgacaacttctcaactatcgtcgccgctgtggaggagggtcgggctatctacaataacatgaaacaatttattaggtacctgatttccagcaacgttggagaagttgtgtgtatcttcctgactgccgcactgggatttcctgaagctctcattcctgtacaactgctctgggtaaacctggtgacagatgggctgcctgctaccgccctgggctttaaccccccagatctcgacatcatgaacaagcccccacgtaatccgaaagaacccctcatctcagggtggctcttctttcggtacctggccatcggatgctacgtgggagccgcaacagtgggtgcagccgcttggtggttcattgcagctgacggaggtccacgcgtttccttttaccaactttctcatttcctacagtgtaaggaggataacccggactttgaaggcgtggactgtgccatttttgagtcaccataccccatgacgatggctctgtccgtactcgtgactatcgagatgtgcaatgcactaaacagtctgtccgagaatcaaagcttactgaggatgcccccttgggagaacatttggctggtggggagtatatgcctgagtatgagcttgcactttctgatcctgtatgtggagccactcccgcttatttttcagattactcccctcaatgtaacacagtggcttatggtactaaagattagtctccccgtgattctcatggacgaaacattgaaattcgtggctcgtaactacctggagccagggaaagagtgtgtgcagccagctactaagagctgtagcttttctgcgtgcacggacggcatctcttggcccttcgtgctgcttattatgcctttagtcatctgggtctactccacagataccaatttctccgatatgttctggagctag

SEQ ID NO: 247019 - DNA, 2802 bp, Artificial Sequence
  derived and/or modified sequence
tagactatcactgctttcgttgagcccttcgtaatattgcttatacttgtggcaaatgcaatcgtcggggtgtggcaggagcggaatgccgagaatgccattgaggcgctgaaggagtacgaacccgaaatgggcaaggtttatcgccaggacaggaaatccgtgcagaggattaaggcaaaagatatagtccctggggacattgtcgagatagccggagaatccgtgtcagttataaagcacacagaccccgtaccggacccacgtgccgtgaaccaggacaaaaaaaacatgttgttttcagggacaaacatcgccgcaggtaaagccatgggggtcgtggtcgccacaggcgtgaatacagagatagggaagatccgggatgaaatggttgcgacggagcaggaaagaacgccactgcagcagaagctggacgaattcggcgagcagctcagcaaagtgatctccctcatttgtattgccgtatggatcataaacatcggccacttcaacgatcccgtgcatggcggttcctggatcagaggtgcgatttactactttaagatagccgtggccctagccgtagcggctattcccgaggggcttcctgcagtgataaccacatgcctcgcattaggaactagaaggatggcaaagaagaatgctattgtgaggtccctgcccagcgtggagacactaggctgcacgtccgtcatatgttctgataaaactgggacacttaccacaaaccagatgagcgtttgtaggatgttcattctggacagggtggaaggggacacctgttcattgaacgagttcacgatcaccggaagtacctatgcgccaatcggtgaggtacacaaagacgataagccagtcaactgccatcaatacgatggactggtggagctcgccacaatttgcgcactgtgtaatgactctgctctggattacaacgaggcaaaaggtgtatacgagaaagtgggtgaagccacagagacagctctcacatgcctggtagaaaagatgaatgtgttcgatacagagctgaaggggcttagtaagatcgaacgcgctaatgcttgtaatagtgtcatcaaacagcttatgaagaaggagtttacgctggagtttagccgcgaccgcaaatccatgtccgtgtattgtacacccaacaagccctcaaggacctctatgtccaaaatgttcgtgaaaggtgcaccagagggagtcattgatcgatgtacccatattcgtgttggctccactaaggtgcccatgactagtggcgtgaagcagaagattatgtcggtgattcgcgaatgggggtcgggttccgatacccttaggtgtctcgcgctggcaacccacgataaccctctaaggagggaggaaatgcacctggaggattcggctaatttcatcaagtatgagacaaatcttaccttcgtgggttgcgtgggcatgctcgacccgcctaggatcgaagtagcctcctcggtgaagctgtgtcgtcaggctgggatccgcgtcatcatgattacgggggataacaagggtaccgctgtggcaatttgccggcgaatcggtatcttcggacaggacgaagacgtgacatcaaaggcattcacagggcgagaatttgacgaattaaatcctagtgcacaacgggatgcctgtcttaacgctcgatgtttcgccagagtcgaaccttcacataaaagcaagatagtggagttcctccagagctttgatgaaatcactgcgatgacaggggacggagtgaacgatgcacctgctctcaagaaagcagagatcgggattgccatggggagtggtaccgccgtggccaaaaccgccagcgaaatggttctagccgatgataacttttctaccatcgtggcagcggtggaagaagggagggcaatatacaataatatgaagcaatttattagatacctgataagctccaacgtcggagaggtggtgtgtatctttctcacagccgcattggggtttcccgaggctctgattcctgtacagctcctctgggtgaatttggtgactgatggcctccccgctaccgccctcggcttcaatccaccagatctggacattatgaataagccaccgagaaatcctaaggaacctctaatttccgggtggctgttcttcagatatctggccattgggtgttatgtgggtgccgcaacagtgggcgcagctgcctggtggtttattgctgctgatggcggaccccgtgtctctttctaccagctgtcacacttcctgcagtgtaaggaggacaacccagatttcgaaggtgtcgactgtgccatcttcgagtcgccgtatccaatgactatggccctctctgtactcgttactattgaaatgtgcaacgcactcaacagcctttctgagaatcagagtctgctaagaatgccaccttgggagaacatctggctggtgggcagtatctgcctcagcatgtcattgcacttcctgatcctgtacgtggaacctctgcctcttatttttcagatcacccctctgaacgtcactcagtggttgatggtcctgaaaatttcactgcctgtcatcttaatggacgaaactcttaaatttgtcgcaagaaattacttggaacccggtaaggagtgtgtccagccagctacgaaatcatgctctttcagcgcatgtacagacggcataagctggcccttcgtactgttaatcatgcctctggtgatctgggtttacagcacagacaccaacttttccgacatgttctggtcttag

SEQ ID NO: 247020 - DNA, 8229 bp, Artificial Sequence
  derived and/or modified sequence
ggcagcggccgataaatgctattagagcagccgccgcggagccgtccccgacgccacctccttttccttcgccgcagtttcctccgccgctgtcgggcgtgcggcgctgagggacccgggcgagcgcgccgcgcaccgccccgccggctcgcctccctcgccgcgttccgccctcagtggtctgccgggcgccccctcctccggcccgggcggggcctctgatcgcctcaagagagcggggagggggctcgggggccgcggcctgccctcccggcgggcggctgagggcgagggaggccctcccttctggcgaggggagggagggtgggtcaggagcccccaacccgccctgcggagctcggggccgcgcgaggggcggttgtctgggggagggggcgcggggtgattcagcgcccggcgaggcggaagcggccgcaagaggaggaggggagagcccgtccgcgcctgggctcccggggtggcacgagcccgcggccggagtgcgaggcggaggcgaggaggccgcggggacgggaggcgaggccggccgggcccccgaagccatggagaacgcgcacaccaagacggtggaggaggtgctgggccacttcggcgtcaacgagagtacggggctgagcctggaacaggtcaagaagcttaaggagagatggggctccaacgagttaccggctgaagaaggaaaaaccttgctggaacttgtgattgagcagtttgaagacttgctagttaggattttattactggcagcatgtatatcttttgttttggcttggtttgaagaaggtgaagaaacaattacagcctttgtagaaccttttgtaattttactcatattagtagccaatgcaattgtgggtgtatggcaggaaagaaatgctgaaaatgccatcgaagcccttaaggaatatgagcctgaaatgggcaaagtgtatcgacaggacagaaagagtgtgcagcggattaaagctaaagacatagttcctggtgatattgtagaaattgctggtgaatctgtctctgtcatcaagcacactgatcccgtccctgacccacgagctgtcaaccaagataaaaagaacatgctgttttctggtacaaacattgctgctgggaaagctatgggagtggtggtagcaactggagttaacaccgaaattggcaagatccgggatgaaatggtggcaacagaacaggagagaacaccccttcagcaaaaactagatgaatttggggaacagctttccaaagtcatctcccttatttgcattgcagtctggatcataaatattgggcacttcaatgacccggttcatggagggtcctggatcagaggtgctatttactactttaaaattgcagtggccctggctgtagcagccattcctgaaggtctgcctgcagtcatcaccacctgcctggctcttggaactcgcagaatggcaaagaaaaatgccattgttcgaagcctcccgtctgtggaaacccttggttgtacttctgttatctgctcagacaagactggtacacttacaacaaaccagatgtcagtctgcaggatgttcattctggacagagtggaaggtgatacttgttcccttaatgagtttaccataactggatcaacttatgcacctattggagaagtgcataaagatgataaaccagtgaattgtcaccagtatgatggtctggtagaattagcaacaatttgtgctctttgtaatgactctgctttggattacaatgaggcaaagggtgtgtatgaaaaagttggagaagctacagagactgctctcacttgcctagtagagaagatgaatgtatttgataccgaattgaagggtctttctaaaatagaacgtgcaaatgcctgcaactcagtcattaaacagctgatgaaaaaggaattcactctagagttttcacgtgacagaaagtcaatgtcggtttactgtacaccaaataaaccaagcaggacatcaatgagcaagatgtttgtgaagggtgctcctgaaggtgtcattgacaggtgcacccacattcgagttggaagtactaaggttcctatgacctctggagtcaaacagaagatcatgtctgtcattcgagagtggggtagtggcagcgacacactgcgatgcctggccctggccactcatgacaacccactgagaagagaagaaatgcaccttgaggactctgccaactttattaaatatgagaccaatctgaccttcgttggctgcgtgggcatgctggatcctccgagaatcgaggtggcctcctccgtgaagctgtgccggcaagcaggcatccgggtcatcatgatcactggggacaacaagggcactgctgtggccatctgtcgccgcatcggcatcttcgggcaggatgaggacgtgacgtcaaaagctttcacaggccgggagtttgatgaactcaacccctccgcccagcgagacgcctgcctgaacgcccgctgttttgctcgagttgaaccctcccacaagtctaaaatcgtagaatttcttcagtcttttgatgagattacagctatgactggcgatggcgtgaacgatgctcctgctctgaagaaagccgagattggcattgctatgggctctggcactgcggtggctaaaaccgcctctgagatggtcctggcggatgacaacttctccaccattgtggctgccgttgaggaggggcgggcaatctacaacaacatgaaacagttcatccgctacctcatctcgtccaacgtcggggaagttgtctgtattttcctgacagcagcccttggatttcccgaggctttgattcctgttcagctgctctgggtcaatctggtgacagatggcctgcctgccactgcactggggttcaaccctcctgatctggacatcatgaataaacctccccggaacccaaaggaaccattgatcagcgggtggctctttttccgttacttggctattggctgttacgtcggcgctgctaccgtgggtgctgctgcatggtggttcattgctgctgacggtggtccaagagtgtccttctaccagctgagtcatttcctacagtgtaaagaggacaacccggactttgaaggcgtggattgtgcaatctttgaatccccatacccgatgacaatggcgctctctgttctagtaactatagaaatgtgtaacgccctcaacagcttgtccgaaaaccagtccttgctgaggatgcccccctgggagaacatctggctcgtgggctccatctgcctgtccatgtcactccacttcctgatcctctatgtcgaacccttgccactcatcttccagatcacaccgctgaacgtgacccagtggctgatggtgctgaaaatctccttgcccgtgattctcatggatgagacgctcaagtttgtggcccgcaactacctggaacctggtaaagagtgtgtgcagcctgccaccaaatcctgctcgttctcggcatgcaccgatgggatttcctggccgtttgtgctgctcataatgcccctggtgatctgggtctatagcacagacactaactttagcgatatgttctggtcttgactgacagttttccataaagaagatgtttaacttaatcaattaatttttttattgtttaaagcaactgtctatttctgctgaattttcacatgaacatactggctggtgatggaggtttcatactctagattttgttttgctttttctgactccagtggggcaagattttccttttttatacacataattaaagtgtccattgacatgtacagagaactaacactattttatgcaaatatttttttgtagatgaaaaagcatgtacagtgttctgtttaatactcatccttgtataaaaaaaatagttgagccagcagacattgtcagcaaattaattggcagcagattttaggaaatgaatgtgtgtggttttttttctaaaactaaatagcatgtattgtgtcttttgcatgatgatccggatttaatttgatatcacagtctaatttttattcataagccaatttttctgcactgagcagagtcttgctacctcagtcagtattgttttggtttgctacttccctcacccactttggcctccgttcaccccaccccaccccacctctccccaccttacccccgccccgcttggcttcttctttaggattgtgatggttcgttctgtttacatcagttttaacgagaggtatgcctgtactcgcttgtgcagaaaacattgttccagattcaatcgactgggtttatgtcccttcacatagtttttaaggttatttatttaaatgtctaatgtattttattgtaacagacattgttttgccaacattgcctatttcagtggcacgtcatctagttttaaaaaaataaaacattttaaatggacagagaaaaataactgtcttgtctttaactcgtaagtggcttacctgggactaacagacatgtccaactttctctccagttcttagctcagaactttagttgtactctgcttgaggggaagaaggctcctgctctgctgtgtaggtagtcataggaattgtattcttaatgtacaggcactaattgtcatctgtgatgtacattttatgcaagtttctgctggcctggtatagagaacataagggcaagtgtgtatgtgtgtgtatgtgtgtgttttgtaaaatctgtaaatagcacatgaccaaatgaacatattgtatagaactatttttatttgaatgtggcactaaccaccaccaccgttactacgatcaatgtttgcgcatgttcgagatgagtctcaccaacagtgtgtaagtcattaacagtcctaactgtggtgttttcctccaatgccttccaacatccatcaactaacgtgagtattttcttcctgggatttggatgctttagcctaaaggtgactgccaccaagtgagataactgtatgtcactaacttataagccgcctccatggcagatgctgctgtgctccctgatgccctgtgagcaccggggttgcctgtggcgcctgccatgtgactcgggcgcagcatcagctggctggaggtgtggctttcatagacctccacaggctgcctaggacaagatgaccaggagggcccaagccagacaaaagccggagtggggagagaggcatttcagccagaccaacaggctgaaggagctgtgcagactattgctaaaatgagggttcgcagctgccaggagtcatcccagaacattgctacttatttattaaaaagctaaaaactagtgaaagcaagtaactgaaccagtgaactctgggtatcgataggttcgtcttaaataggccacttccccactcccccacccccccttgcttggtcttgtccttggtggctaagacttagctctgcaggggatgttaaagcacagttagtaggacgtggctctgcacagcccaaaaaccagcttactccttagccagggtgtgaggcctcgactatattcttcaaaatgtacttaggctctggttactgggatggccagtagatgtaatgcagatggttggagtttggggagggttaggaggcatcaagcaggacaaggtgctgctgagttcagagggcccacgttcaagggatggaggtggaacctggagaccgactcttaaaagcacagtccgtggttgggtgtggtggctcatgcctgtaagtaagtctcagccctttggaggccacagcagaaggattgcttgagcccaggtactcaaaccagcctgggcaacagagtgaggccctgtcaaaaaaaaatcagccttactgtgaagcctccaaggctgctcgcaggcagctgtggctctcgggaagggaggctgctttgcccagcagggaacatttggggcagggggtaaattttgccagtttgagcatcatgaggtgtaacaagaaatgggttgaatgggccaaatgcaaggagtgcatctctgggctgcaaactgacttgagtgctgcactattgctattccgtgcaaacaaaactcagcttttcctgactcagttccttgacttagtggcctttacaaaaaaagttgagtagtgtgtggcctgctgtcgcacagcccctagttagcttcatggtttctcagcttcagacccctccagcccacagaggagcccatggagggacccacttcccttggtccagacagctgggagtgggttaggcccactgctgttttgagcagggccacttgctccatttcactgaaggctttgctgggtgaaaacacttcagcatctcctcctcaggtcaacccataaagaccaggtccagcaccgtggtcttggcacatccctggcctcaggccctcacctaacagtgaggcagcagctgcccagccccgcaatgtgcctgctgtcaggcagctcttgcctgaaacttacttccacattctttcctgatgggcaggtggctgaaggcccagccatcagtgtcgcttgttgccaccccgtgcctcccttggcctctctgagctttgcccagaagaccaacaatcatacataccctaactgggacaccactctgcagaatgcagatgatccattctggaggaagctgtcccttgagctcagtgagctcccaggcaagcagggcatctggccgacttccctcacaacagctgctcccacatcccctcggactggagcttcagccctgactgaggtgggcagacctaagacctgagaccacaagattagctcagtgtctaccaagcatctagccactgtccagggccagagcataccacgtctgcagtgcctgtgagcagagccagcagttgccctgtgactgtaaccaccaaattgtccaaacacccgctgcagttagcaagaagggtaggcttcaccctcctttactgaggagaatgatgcggaggagtttcctctccagggctaggcaaggcaggcgagcagccagaagccgggtgcccacagggcagggacaggaaggctgtgctgctactggctgctcacttctccatcaacctcaccctctgcaccactaaccaagaccttgtcctcttgcctgtctcgctgctttcacagctgcaacgattgtgtctgcctcatggggttttcctccagagcctttattctgtagccagacgacacgaggagtctgtgtcactgagccagtgcttctagatgctaccctgtgtgggcggcacctcagggacagtaaatcagaaatgctggtcttgaaaccttgaaaagatcaagctgaatgttccttttcatctgtcgctgttgatcttcatctatttaaataggtattctaacgtttcctctctgtatttcatgaagctgatttcctctctctttccttttcagcaatactggagtaaccgcttcctaaaccattttgcagaaatgtaagggtgttcggttgcgtgcatgtgcgtttttagcaacacatctaccaaccctgtgcatgactgatgttggggaaaaagaaaagtaaaaaacttcccaactcactttgtgttatgtggaggaaatgtgtattaccaatggggttgttagcttttaaatcaaaatactgattacagatgtacaatttagcttaatcagaaagcctctccagagaagtttggtttctttgctgcaagaggaatgaggctctgtaaccttatctaagaacttggaagccgtcagccaagtcgccacatttctctgcaaaatgtcatagcttatataaatgtacagtattcaattgtaatgcatgccttcggttgtaagtagccagatccctctccagtgacattggaacatgctactttttaattggccctgtacagtttgcttatttataaattcattaaaaacactacaggtgttgaatggttaaaatgtaggcctccagttcattttcagttattttctgagtgtgcagacagctatttcgcactgtattaaatgtaacttatttaatgaaatcagaagcagtagacagatgttggtgcaatacaaatattgtgatgcatttatcttaataaaatgctaaatgtcaatttatcactgcgcatgtttgactttagactgtaaatagagatcagtttgtttctttctgtgctggtaacaatgagcgtcgcacagacatggtttcaggtaaataaatctattctatg

SEQ ID NO: 247021 - DNA, 4094 bp, Artificial Sequence
  derived and/or modified sequence
cccgtccgcgcctgggctcccggggtggcacgagcccgcggccggagtgcgaggcggaggcgaggaggccgcggggacgggaggcgaggccggccgggcccccgaagccatggagaacgcgcacaccaagacggtggaggaggtgctgggccacttcggcgtcaacgagagtacggggctgagcctggaacaggtcaagaagcttaaggagagatggggctccaacgagttaccggctgaagaaggaaaaaccttgctggaacttgtgattgagcagtttgaagacttgctagttaggattttattactggcagcatgtatatcttttgttttggcttggtttgaagaaggtgaagaaacaattacagcctttgtagaaccttttgtaattttactcatattagtagccaatgcaattgtgggtgtatggcaggaaagaaatgctgaaaatgccatcgaagcccttaaggaatatgagcctgaaatgggcaaagtgtatcgacaggacagaaagagtgtgcagcggattaaagctaaagacatagttcctggtgatattgtagaaattgctgttggtgacaaagttcctgctgatataaggttaacttccatcaaatctaccacactaagagttgaccagtcaattctcacaggtgaatctgtctctgtcatcaagcacactgatcccgtccctgacccacgagctgtcaaccaagataaaaagaacatgctgttttctggtacaaacattgctgctgggaaagctatgggagtggtggtagcaactggagttaacaccgaaattggcaagatccgggatgaaatggtggcaacagaacaggagagaacaccccttcagcaaaaactagatgaatttggggaacagctttccaaagtcatctcccttatttgcattgcagtctggatcataaatattgggcacttcaatgacccggttcatggagggtcctggatcagaggtgctatttactactttaaaattgcagtggccctggctgtagcagccattcctgaaggtctgcctgcagtcatcaccacctgcctggctcttggaactcgcagaatggcaaagaaaaatgccattgttcgaagcctcccgtctgtggaaacccttggttgtacttctgttatctgctcagacaagactggtacacttacaacaaaccagatgtcagtctgcaggatgttcattctggacagagtggaaggtgatacttgttcccttaatgagtttaccataactggatcaacttatgcacctattggagaagtgcataaagatgataaaccagtgaattgtcaccagtatgatggtctggtagaattagcaacaatttgtgctctttgtaatgactctgctttggattacaatgaggcaaagggtgtgtatgaaaaagttggagaagctacagagactgctctcacttgcctagtagagaagatgaatgtatttgataccgaattgaagggtctttctaaaatagaacgtgcaaatgcctgcaactcagtcattaaacagctgatgaaaaaggaattcactctagagttttcacgtgacagaaagtcaatgtcggtttactgtacaccaaataaaccaagcaggacatcaatgagcaagatgtttgtgaagggtgctcctgaaggtgtcattgacaggtgcacccacattcgagttggaagtactaaggttcctatgacctctggagtcaaacagaagatcatgtctgtcattcgagagtggggtagtggcagcgacacactgcgatgcctggccctggccactcatgacaacccactgagaagagaagaaatgcaccttgaggactctgccaactttattaaatatgagaccaatctgaccttcgttggctgcgtgggcatgctggatcctccgagaatcgaggtggcctcctccgtgaagctgtgccggcaagcaggcatccgggtcatcatgatcactggggacaacaagggcactgctgtggccatctgtcgccgcatcggcatcttcgggcaggatgaggacgtgacgtcaaaagctttcacaggccgggagtttgatgaactcaacccctccgcccagcgagacgcctgcctgaacgcccgctgttttgctcgagttgaaccctcccacaagtctaaaatcgtagaatttcttcagtcttttgatgagattacagctatgactggcgatggcgtgaacgatgctcctgctctgaagaaagccgagattggcattgctatgggctctggcactgcggtggctaaaaccgcctctgagatggtcctggcggatgacaacttctccaccattgtggctgccgttgaggaggggcgggcaatctacaacaacatgaaacagttcatccgctacctcatctcgtccaacgtcggggaagttgtctgtattttcctgacagcagcccttggatttcccgaggctttgattcctgttcagctgctctgggtcaatctggtgacagatggcctgcctgccactgcactggggttcaaccctcctgatctggacatcatgaataaacctccccggaacccaaaggaaccattgatcagcgggtggctctttttccgttacttggctattggctgttacgtcggcgctgctaccgtgggtgctgctgcatggtggttcattgctgctgacggtggtccaagagtgtccttctaccagctgagtcatttcctacagtgtaaagaggacaacccggactttgaaggcgtggattgtgcaatctttgaatccccatacccgatgacaatggcgctctctgttctagtaactatagaaatgtgtaacgccctcaacagcttgtccgaaaaccagtccttgctgaggatgcccccctgggagaacatctggctcgtgggctccatctgcctgtccatgtcactccacttcctgatcctctatgtcgaacccttgccactcatcttccagatcacaccgctgaacgtgacccagtggctgatggtgctgaaaatctccttgcccgtgattctcatggatgagacgctcaagtttgtggcccgcaactacctggaacctggtaaagagtgtgtgcagcctgccaccaaatcctgctcgttctcggcatgcaccgatgggatttcctggccgtttgtgctgctcataatgcccctggtgatctgggtctatagcacagacactaactttagcgatatgttctggtcttgactgacagttttccataaagaagatgtttaacttaatcaattaatttttttattgtttaaagcaactgtctatttctgctgaattttcacatgaacatactggctggtgatggaggtttcatactctagattttgttttgctttttctgactccagtggggcaagattttccttttttatacacataattaaagtgtccattgacatgtacagagaactaacactattttatgcaaatatttttttgtagatgaaaaagcatgtacagtgttctgtttaatactcatccttgtataaaaaaaatagttgagccagcagacattgtcagcaaattaattggcagcagattttaggaaatgaatgtgtgtggttttttttctaaaactaaatagcatgtattgtgtcttttgcatgatgatccggatttaatttgatatcacagtctaatttttattcataagccaatttttctgcactgagcagagtcttgctacctcagtcagtattgttttggtttgctacttccctcacccactttggcctccgttcaccccaccccaccccacctctccccaccttacccccgccccgcttggcttcttctttaggattgtgatggttcgttctgtttacatcagttttaacgagaggtatgcctgtactcgcttgtgcagaaaacattgttccagattcaatcgactgggtttatgtcccttcacatagtttttaaggttatttatttaaatgtctaatgtattttattgtaacagacattgttttgccaacattgcctatttcagtggcacgtcatctagttttaaaaaaataaaacattttaaatggacagagaaaaataa

SEQ ID NO: 247022 - DNA, 2951 bp, Artificial Sequence
  derived and/or modified sequence
aacaattacagcctttgtagaaccttttgtaattttactcatattagtagccaatgcaattgtgggtgtatggcaggaaagaaatgctgaaaatgccatcgaagcccttaaggaatatgagcctgaaatgggcaaagtgtatcgacaggacagaaagagtgtgcagcggattaaagctaaagacatagttcctggtgatattgtagaaattgctggtgaatctgtctctgtcatcaagcacactgatcccgtccctgacccacgagctgtcaaccaagataaaaagaacatgctgttttctggtacaaacattgctgctgggaaagctatgggagtggtggtagcaactggagttaacaccgaaattggcaagatccgggatgaaatggtggcaacagaacaggagagaacaccccttcagcaaaaactagatgaatttggggaacagctttccaaagtcatctcccttatttgcattgcagtctggatcataaatattgggcacttcaatgacccggttcatggagggtcctggatcagaggtgctatttactactttaaaattgcagtggccctggctgtagcagccattcctgaaggtctgcctgcagtcatcaccacctgcctggctcttggaactcgcagaatggcaaagaaaaatgccattgttcgaagcctcccgtctgtggaaacccttggttgtacttctgttatctgctcagacaagactggtacacttacaacaaaccagatgtcagtctgcaggatgttcattctggacagagtggaaggtgatacttgttcccttaatgagtttaccataactggatcaacttatgcacctattggagaagtgcataaagatgataaaccagtgaattgtcaccagtatgatggtctggtagaattagcaacaatttgtgctctttgtaatgactctgctttggattacaatgaggcaaagggtgtgtatgaaaaagttggagaagctacagagactgctctcacttgcctagtagagaagatgaatgtatttgataccgaattgaagggtctttctaaaatagaacgtgcaaatgcctgcaactcagtcattaaacagctgatgaaaaaggaattcactctagagttttcacgtgacagaaagtcaatgtcggtttactgtacaccaaataaaccaagcaggacatcaatgagcaagatgtttgtgaagggtgctcctgaaggtgtcattgacaggtgcacccacattcgagttggaagtactaaggttcctatgacctctggagtcaaacagaagatcatgtctgtcattcgagagtggggtagtggcagcgacacactgcgatgcctggccctggccactcatgacaacccactgagaagagaagaaatgcaccttgaggactctgccaactttattaaatatgagaccaatctgaccttcgttggctgcgtgggcatgctggatcctccgagaatcgaggtggcctcctccgtgaagctgtgccggcaagcaggcatccgggtcatcatgatcactggggacaacaagggcactgctgtggccatctgtcgccgcatcggcatcttcgggcaggatgaggacgtgacgtcaaaagctttcacaggccgggagtttgatgaactcaacccctccgcccagcgagacgcctgcctgaacgcccgctgttttgctcgagttgaaccctcccacaagtctaaaatcgtagaatttcttcagtcttttgatgagattacagctatgactggcgatggcgtgaacgatgctcctgctctgaagaaagccgagattggcattgctatgggctctggcactgcggtggctaaaaccgcctctgagatggtcctggcggatgacaacttctccaccattgtggctgccgttgaggaggggcgggcaatctacaacaacatgaaacagttcatccgctacctcatctcgtccaacgtcggggaagttgtctgtattttcctgacagcagcccttggatttcccgaggctttgattcctgttcagctgctctgggtcaatctggtgacagatggcctgcctgccactgcactggggttcaaccctcctgatctggacatcatgaataaacctccccggaacccaaaggaaccattgatcagcgggtggctctttttccgttacttggctattggctgttacgtcggcgctgctaccgtgggtgctgctgcatggtggttcattgctgctgacggtggtccaagagtgtccttctaccagctgagtcatttcctacagtgtaaagaggacaacccggactttgaaggcgtggattgtgcaatctttgaatccccatacccgatgacaatggcgctctctgttctagtaactatagaaatgtgtaacgccctcaacagcttgtccgaaaaccagtccttgctgaggatgcccccctgggagaacatctggctcgtgggctccatctgcctgtccatgtcactccacttcctgatcctctatgtcgaacccttgccactcatcttccagatcacaccgctgaacgtgacccagtggctgatggtgctgaaaatctccttgcccgtgattctcatggatgagacgctcaagtttgtggcccgcaactacctggaacctggtaaagagtgtgtgcagcctgccaccaaatcctgctcgttctcggcatgcaccgatgggatttcctggccgtttgtgctgctcataatgcccctggtgatctgggtctatagcacagacactaactttagcgatatgttctggtcttgactgacagttttccataaagaagatgtttaacttaatcaattaatttttttattgtttaaagcaactgtctatttctgctgaattttcacatgaacatactggctggtgatggaggtttcatactctagattttgttttgctttttctgact

SEQ ID NO: 247023 - DNA, 3048 bp, Artificial Sequence
  derived and/or modified sequence
atggagaacgcccacaccaagaccgtggaggaggtgctgggccacttcggcgtgaacgagagcaccggcctgagcctggagcaggtgaagaagctgaaggagagatggggcagcaacgagctgcccgccgaggagggcaagaccctgctggagctggtgatcgagcagttcgaggacctgctggtgagaatcctgctgctggccgcctgcatcagcttcgtgctggcctggttcgaggagggcgaggagaccatcaccgccttcgtggagcccttcgtgatcctgctgatcctggtggccaacgccatcgtgggcgtgtggcaggagagaaacgccgagaacgccatcgaggccctgaaggagtacgagcccgagatgggcaaggtgtacagacaggacagaaagagcgtgcagagaatcaaggccaaggacatcgtgcccggcgacatcgtggagatcgccggcgagagcgtgagcgtgatcaagcacaccgaccccgtgcccgaccccagagccgtgaaccaggacaagaagaacatgctgttcagcggcaccaacatcgccgccggcaaggccatgggcgtggtggtggccaccggcgtgaacaccgagatcggcaagatcagagacgagatggtggccaccgagcaggagagaacccccctgcagcagaagctggacgagttcggcgagcagctgagcaaggtgatcagcctgatctgcatcgccgtgtggatcatcaacatcggccacttcaacgaccccgtgcacggcggcagctggatcagaggcgccatctactacttcaagatcgccgtggccctggccgtggccgccatccccgagggcctgcccgccgtgatcaccacctgcctggccctgggcaccagaagaatggccaagaagaacgccatcgtgagaagcctgcccagcgtggagaccctgggctgcaccagcgtgatctgcagcgacaagaccggcaccctgaccaccaaccagatgagcgtgtgcagaatgttcatcctggacagagtggagggcgacacctgcagcctgaacgagttcaccatcaccggcagcacctacgcccccatcggcgaggtgcacaaggacgacaagcccgtgaactgccaccagtacgacggcctggtggagctggccaccatctgcgccctgtgcaacgacagcgccctggactacaacgaggccaagggcgtgtacgagaaggtgggcgaggccaccgagaccgccctgacctgcctggtggagaagatgaacgtgttcgacaccgagctgaagggcctgagcaagatcgagagagccaacgcctgcaacagcgtgatcaagcagctgatgaagaaggagttcaccctggagttcagcagagacagaaagagcatgagcgtgtactgcacccccaacaagcccagcagaaccagcatgagcaagatgttcgtgaagggcgcccccgagggcgtgatcgacagatgcacccacatcagagtgggcagcaccaaggtgcccatgaccagcggcgtgaagcagaagatcatgagcgtgatcagagagtggggcagcggcagcgacaccctgagatgcctggccctggccacccacgacaaccccctgagaagagaggagatgcacctggaggacagcgccaacttcatcaagtacgagaccaacctgaccttcgtgggctgcgtgggcatgctggacccccccagaatcgaggtggccagcagcgtgaagctgtgcagacaggccggcatcagagtgatcatgatcaccggcgacaacaagggcaccgccgtggccatctgcagaagaatcggcatcttcggccaggacgaggacgtgaccagcaaggccttcaccggcagagagttcgacgagctgaaccccagcgcccagagagacgcctgcctgaacgccagatgcttcgccagagtggagcccagccacaagagcaagatcgtggagttcctgcagagcttcgacgagatcaccgccatgaccggcgacggcgtgaacgacgcccccgccctgaagaaggccgagatcggcatcgccatgggcagcggcaccgccgtggccaagaccgccagcgagatggtgctggccgacgacaacttcagcaccatcgtggccgccgtggaggagggcagagccatctacaacaacatgaagcagttcatcagatacctgatcagcagcaacgtgggcgaggtggtgtgcatcttcctgaccgccgccctgggcttccccgaggccctgatccccgtgcagctgctgtgggtgaacctggtgaccgacggcctgcccgccaccgccctgggcttcaacccccccgacctggacatcatgaacaagccccccagaaaccccaaggagcccctgatcagcggctggctgttcttcagatacctggccatcggctgctacgtgggcgccgccaccgtgggcgccgccgcctggtggttcatcgccgccgacggcggccccagagtgagcttctaccagctgagccacttcctgcagtgcaaggaggacaaccccgacttcgagggcgtggactgcgccatcttcgagagcccctaccccatgaccatggccctgagcgtgctggtgaccatcgagatgtgcaacgccctgaacagcctgagcgagaaccagagcctgctgagaatgcccccctgggagaacatctggctggtgggcagcatctgcctgagcatgagcctgcacttcctgatcctgtacgtggagcccctgcccctgatcttccagatcacccccctgaacgtgacccagtggctgatggtgctgaagatcagcctgcccgtgatcctgatggacgagaccctgaagttcgtggccagaaactacctggagcccggcaaggagtgcgtgcagcccgccaccaagagctgcagcttcagcgcctgcaccgacggcatcagctggcccttcgtgctgctgatcatgcccctggtgatctgggtgtacagcaccgacaccaacttcagcgacatgttctggagctag

SEQ ID NO: 247024 - DNA, 3129 bp, Artificial Sequence
  derived and/or modified sequence
atggagaacgcccacaccaagaccgtggaggaggtgctgggccacttcggcgtgaacgagagcaccggcctgagcctggagcaggtgaagaagctgaaggagagatggggcagcaacgagctgcccgccgaggagggcaagaccctgctggagctggtgatcgagcagttcgaggacctgctggtgagaatcctgctgctggccgcctgcatcagcttcgtgctggcctggttcgaggagggcgaggagaccatcaccgccttcgtggagcccttcgtgatcctgctgatcctggtggccaacgccatcgtgggcgtgtggcaggagagaaacgccgagaacgccatcgaggccctgaaggagtacgagcccgagatgggcaaggtgtacagacaggacagaaagagcgtgcagagaatcaaggccaaggacatcgtgcccggcgacatcgtggagatcgccgtgggcgacaaggtgcccgccgacatcagactgaccagcatcaagagcaccaccctgagagtggaccagagcatcctgaccggcgagagcgtgagcgtgatcaagcacaccgaccccgtgcccgaccccagagccgtgaaccaggacaagaagaacatgctgttcagcggcaccaacatcgccgccggcaaggccatgggcgtggtggtggccaccggcgtgaacaccgagatcggcaagatcagagacgagatggtggccaccgagcaggagagaacccccctgcagcagaagctggacgagttcggcgagcagctgagcaaggtgatcagcctgatctgcatcgccgtgtggatcatcaacatcggccacttcaacgaccccgtgcacggcggcagctggatcagaggcgccatctactacttcaagatcgccgtggccctggccgtggccgccatccccgagggcctgcccgccgtgatcaccacctgcctggccctgggcaccagaagaatggccaagaagaacgccatcgtgagaagcctgcccagcgtggagaccctgggctgcaccagcgtgatctgcagcgacaagaccggcaccctgaccaccaaccagatgagcgtgtgcagaatgttcatcctggacagagtggagggcgacacctgcagcctgaacgagttcaccatcaccggcagcacctacgcccccatcggcgaggtgcacaaggacgacaagcccgtgaactgccaccagtacgacggcctggtggagctggccaccatctgcgccctgtgcaacgacagcgccctggactacaacgaggccaagggcgtgtacgagaaggtgggcgaggccaccgagaccgccctgacctgcctggtggagaagatgaacgtgttcgacaccgagctgaagggcctgagcaagatcgagagagccaacgcctgcaacagcgtgatcaagcagctgatgaagaaggagttcaccctggagttcagcagagacagaaagagcatgagcgtgtactgcacccccaacaagcccagcagaaccagcatgagcaagatgttcgtgaagggcgcccccgagggcgtgatcgacagatgcacccacatcagagtgggcagcaccaaggtgcccatgaccagcggcgtgaagcagaagatcatgagcgtgatcagagagtggggcagcggcagcgacaccctgagatgcctggccctggccacccacgacaaccccctgagaagagaggagatgcacctggaggacagcgccaacttcatcaagtacgagaccaacctgaccttcgtgggctgcgtgggcatgctggacccccccagaatcgaggtggccagcagcgtgaagctgtgcagacaggccggcatcagagtgatcatgatcaccggcgacaacaagggcaccgccgtggccatctgcagaagaatcggcatcttcggccaggacgaggacgtgaccagcaaggccttcaccggcagagagttcgacgagctgaaccccagcgcccagagagacgcctgcctgaacgccagatgcttcgccagagtggagcccagccacaagagcaagatcgtggagttcctgcagagcttcgacgagatcaccgccatgaccggcgacggcgtgaacgacgcccccgccctgaagaaggccgagatcggcatcgccatgggcagcggcaccgccgtggccaagaccgccagcgagatggtgctggccgacgacaacttcagcaccatcgtggccgccgtggaggagggcagagccatctacaacaacatgaagcagttcatcagatacctgatcagcagcaacgtgggcgaggtggtgtgcatcttcctgaccgccgccctgggcttccccgaggccctgatccccgtgcagctgctgtgggtgaacctggtgaccgacggcctgcccgccaccgccctgggcttcaacccccccgacctggacatcatgaacaagccccccagaaaccccaaggagcccctgatcagcggctggctgttcttcagatacctggccatcggctgctacgtgggcgccgccaccgtgggcgccgccgcctggtggttcatcgccgccgacggcggccccagagtgagcttctaccagctgagccacttcctgcagtgcaaggaggacaaccccgacttcgagggcgtggactgcgccatcttcgagagcccctaccccatgaccatggccctgagcgtgctggtgaccatcgagatgtgcaacgccctgaacagcctgagcgagaaccagagcctgctgagaatgcccccctgggagaacatctggctggtgggcagcatctgcctgagcatgagcctgcacttcctgatcctgtacgtggagcccctgcccctgatcttccagatcacccccctgaacgtgacccagtggctgatggtgctgaagatcagcctgcccgtgatcctgatggacgagaccctgaagttcgtggccagaaactacctggagcccggcaaggagtgcgtgcagcccgccaccaagagctgcagcttcagcgcctgcaccgacggcatcagctggcccttcgtgctgctgatcatgcccctggtgatctgggtgtacagcaccgacaccaacttcagcgacatgttctggagctag

SEQ ID NO: 247025 - DNA, 2802 bp, Artificial Sequence
  derived and/or modified sequence
tgaaccatcaccgccttcgtggagcccttcgtgatcctgctgatcctggtggccaacgccatcgtgggcgtgtggcaggagagaaacgccgagaacgccatcgaggccctgaaggagtacgagcccgagatgggcaaggtgtacagacaggacagaaagagcgtgcagagaatcaaggccaaggacatcgtgcccggcgacatcgtggagatcgccggcgagagcgtgagcgtgatcaagcacaccgaccccgtgcccgaccccagagccgtgaaccaggacaagaagaacatgctgttcagcggcaccaacatcgccgccggcaaggccatgggcgtggtggtggccaccggcgtgaacaccgagatcggcaagatcagagacgagatggtggccaccgagcaggagagaacccccctgcagcagaagctggacgagttcggcgagcagctgagcaaggtgatcagcctgatctgcatcgccgtgtggatcatcaacatcggccacttcaacgaccccgtgcacggcggcagctggatcagaggcgccatctactacttcaagatcgccgtggccctggccgtggccgccatccccgagggcctgcccgccgtgatcaccacctgcctggccctgggcaccagaagaatggccaagaagaacgccatcgtgagaagcctgcccagcgtggagaccctgggctgcaccagcgtgatctgcagcgacaagaccggcaccctgaccaccaaccagatgagcgtgtgcagaatgttcatcctggacagagtggagggcgacacctgcagcctgaacgagttcaccatcaccggcagcacctacgcccccatcggcgaggtgcacaaggacgacaagcccgtgaactgccaccagtacgacggcctggtggagctggccaccatctgcgccctgtgcaacgacagcgccctggactacaacgaggccaagggcgtgtacgagaaggtgggcgaggccaccgagaccgccctgacctgcctggtggagaagatgaacgtgttcgacaccgagctgaagggcctgagcaagatcgagagagccaacgcctgcaacagcgtgatcaagcagctgatgaagaaggagttcaccctggagttcagcagagacagaaagagcatgagcgtgtactgcacccccaacaagcccagcagaaccagcatgagcaagatgttcgtgaagggcgcccccgagggcgtgatcgacagatgcacccacatcagagtgggcagcaccaaggtgcccatgaccagcggcgtgaagcagaagatcatgagcgtgatcagagagtggggcagcggcagcgacaccctgagatgcctggccctggccacccacgacaaccccctgagaagagaggagatgcacctggaggacagcgccaacttcatcaagtacgagaccaacctgaccttcgtgggctgcgtgggcatgctggacccccccagaatcgaggtggccagcagcgtgaagctgtgcagacaggccggcatcagagtgatcatgatcaccggcgacaacaagggcaccgccgtggccatctgcagaagaatcggcatcttcggccaggacgaggacgtgaccagcaaggccttcaccggcagagagttcgacgagctgaaccccagcgcccagagagacgcctgcctgaacgccagatgcttcgccagagtggagcccagccacaagagcaagatcgtggagttcctgcagagcttcgacgagatcaccgccatgaccggcgacggcgtgaacgacgcccccgccctgaagaaggccgagatcggcatcgccatgggcagcggcaccgccgtggccaagaccgccagcgagatggtgctggccgacgacaacttcagcaccatcgtggccgccgtggaggagggcagagccatctacaacaacatgaagcagttcatcagatacctgatcagcagcaacgtgggcgaggtggtgtgcatcttcctgaccgccgccctgggcttccccgaggccctgatccccgtgcagctgctgtgggtgaacctggtgaccgacggcctgcccgccaccgccctgggcttcaacccccccgacctggacatcatgaacaagccccccagaaaccccaaggagcccctgatcagcggctggctgttcttcagatacctggccatcggctgctacgtgggcgccgccaccgtgggcgccgccgcctggtggttcatcgccgccgacggcggccccagagtgagcttctaccagctgagccacttcctgcagtgcaaggaggacaaccccgacttcgagggcgtggactgcgccatcttcgagagcccctaccccatgaccatggccctgagcgtgctggtgaccatcgagatgtgcaacgccctgaacagcctgagcgagaaccagagcctgctgagaatgcccccctgggagaacatctggctggtgggcagcatctgcctgagcatgagcctgcacttcctgatcctgtacgtggagcccctgcccctgatcttccagatcacccccctgaacgtgacccagtggctgatggtgctgaagatcagcctgcccgtgatcctgatggacgagaccctgaagttcgtggccagaaactacctggagcccggcaaggagtgcgtgcagcccgccaccaagagctgcagcttcagcgcctgcaccgacggcatcagctggcccttcgtgctgctgatcatgcccctggtgatctgggtgtacagcaccgacaccaacttcagcgacatgttctggagctag

SEQ ID NO: 247026 - protein, 394 aa, Artificial Sequence
  derived and/or modified sequence
MAQRYDELPHYGGMDGVGVPASMYGDPHAPRPIPPVHHLNHGPPLHATQHYGAHAPHPNVMPASMGSAVNDALKRDKDAIYGHPLFPLLALVFEKCELATCTPREPGVAGGDVCSSDSFNEDIAVFAKQVRAEKPLFSSNPELDNLMIQAIQVLRFHLLELEKVHELCDNFCHRYISCLKGKMPIDLVIDERDGSSKSDHEELSGSSTNLADHNPSSWRDHDDATSTHSAGTPGPSSGGHASQSGDNSSEQGDGLDNSVASPGTGDDDDPDKDKKRQKKRGIFPKVATNIMRAWLFQHLTHPYPSEEQKKQLAQDTGLTILQVNNWFINARRRIVQPMIDQSNRAVSQGAAYSPEGQPMGSFVLDGQQHMGIRPAGPMSGMGMNMGMDGQWHYM

SEQ ID NO: 247027 - DNA, 1185 bp, Artificial Sequence
  derived and/or modified sequence
atggcccagcgatacgacgagctccctcactatggcgggatggatggagtgggcgttccagcctccatgtacggcgatccacacgcaccacggcccatccctcccgtccaccatcttaaccatggaccgcctctgcatgcaacacaacattacggggcccatgctccacatcctaatgtgatgcctgcctctatgggcagtgcggtcaacgatgccttaaagcgtgataaggatgctatttatgggcatcctctcttcccgctcctggcgcttgtgttcgagaagtgcgagttggccacctgcacacccagggaacccggggtggccgggggagatgtttgcagttccgacagctttaatgaggacatcgccgtgtttgccaagcaggtaagagccgagaaaccccttttcagttctaatcccgaactcgacaacctcatgattcaggcaattcaggtgctgaggtttcacctgttggagctcgagaaagtgcacgaactttgcgacaatttctgtcatagatatatttcctgtctcaaagggaagatgcctattgaccttgtcatcgacgagagagacggatcaagtaaatcagatcatgaggagctgagcgggtcttctacgaaccttgccgatcataacccaagttcctggagagaccatgatgacgcaacttcgacccacagcgctggaacccccggtcccagcagcggaggacacgcgagccagtccggcgacaattccagcgaacagggggatggactggacaactctgtggccagtcctgggactggtgatgacgacgatcctgacaaagataagaagagacagaaaaagcgcggcatctttcctaaggtggccacaaacatcatgcgtgcatggcttttccaacacctgactcacccctacccctcagaggaacaaaaaaagcagctcgctcaagatacagggctgaccatcctacaggtcaacaactggtttattaacgctagacgccggatagtacagccaatgatcgatcaatctaatagagcagtcagtcagggtgctgcatacagccctgaagggcagcccatggggtcttttgtgctcgatggacagcagcacatggggatacgcccagcgggccccatgtccgggatgggaatgaatatgggcatggacgggcagtggcactatatgtag

SEQ ID NO: 247028 - DNA, 1185 bp, Artificial Sequence
  derived and/or modified sequence
atggcccagaggtacgatgagctgcctcactatggaggcatggacggggtgggagtgcctgcatccatgtacggcgacccacatgctccacggcccatcccaccagtgcaccacctgaatcatggccctccgttacacgccacacagcactacggagctcacgcaccccatcctaacgtaatgccagcaagtatgggcagcgccgtcaacgatgccctcaagagggataaagatgctatttatggacaccctctgttccccctcctggccctggtcttcgaaaagtgtgagttggcaacatgtaccccccgagagcccggagtagccggcggagatgtctgctcatcagacagcttcaatgaggatattgccgttttcgcaaagcaggtgcgcgccgagaaacccctcttctcgtcgaatccagagctcgacaacctgatgatccaggcgattcaggttctccgattccatctcctggaactggaaaaagtacacgaactgtgcgataacttctgtcacaggtacattagctgcctgaaaggcaagatgcccattgacttggtaatagacgagagggacggtagcagcaagagcgatcacgaagagctgagtgggagctcaacaaatcttgcagaccacaacccgtcttcatggcgcgaccatgacgatgcaaccagcacgcactctgccggcacacctggtccctcctccggcgggcatgcctcacagtccggagacaactcatctgaacaaggcgacgggctggataattccgttgccagccctggaactggcgacgacgacgatccggacaaggataaaaaaagacagaaaaaacgtgggattttcccaaaagtcgcgaccaatatcatgagagcttggctctttcagcatctgacacacccttacccctcagaagaacagaaaaaacaactggcccaggacactgggctgacgattttgcaagtcaacaactggttcatcaacgccagaagaagaatcgtgcagcctatgattgaccaatcaaacagggcagttagccagggagccgcatacagtcctgaaggacagcctatgggatcgttcgtgctggacggccagcagcacatggggatccggccagccggtccaatgtccggtatggggatgaacatgggcatggatggccaatggcactatatgtag

SEQ ID NO: 247029 - DNA, 1185 bp, Artificial Sequence
  derived and/or modified sequence
atggcccagagatatgatgagctgccccactatggaggcatggatggagtgggcgtgcctgcctccatgtacggggacccccacgccccccggcccatcccccctgtgcaccacctgaaccacggcccccccctgcacgccacccagcactatggagcccacgccccccaccccaacgtgatgcctgcctccatgggcagcgctgtgaatgatgccctgaagagggacaaggatgccatctacggccaccccctcttccccctgctggccctggtgtttgagaagtgtgagctggccacctgcaccccccgggagcccggggtggccggaggagatgtgtgcagcagtgacagcttcaatgaagatattgctgtgtttgccaagcaggtgcgggcagagaagcccctcttcagcagcaaccctgagctggacaacctgatgatccaggccatccaggtgctgcgcttccacctgctggagctggagaaggtgcatgagctgtgtgacaacttctgccaccgctacatcagctgcctgaagggcaagatgcccatcgacctggtgattgatgaaagagatggcagcagcaagagtgaccacgaggagctgagcggcagcagcaccaacctggccgaccacaaccccagctcctggagggaccatgatgatgccaccagcacccacagcgctggcaccccaggccccagcagcggcggccacgccagccagagcggggacaacagcagcgagcagggagatggcctggacaacagcgtggccagccctggcactggagatgatgatgatcctgacaaggacaagaagaggcagaagaagaggggcatcttccccaaggtggccaccaacatcatgagggcctggctgttccagcacctgacccacccctaccccagcgaggagcagaagaagcagctggcccaggacaccggcctgaccatcctgcaggtgaacaactggttcatcaatgcccggcggcgcatcgtgcagcccatgattgaccagagcaacagagctgtgtcccagggcgccgcctacagccctgagggccagcccatgggcagctttgtgctggatggccagcagcacatgggcatccggcctgctggccccatgagcggcatgggcatgaacatgggcatggatggccagtggcactacatgtag

SEQ ID NO: 247030 - DNA, 1442 bp, Artificial Sequence
  derived and/or modified sequence
aggaggaggaggaagatcaggaggaggaggaagaagaggaaaaaagagaaaaagaagaaatatcacagaaaaaaaaattcttcgttgtctagactgggctttttttcccccctaaaaaatagcatattggagaattgggagaagtctctttggtttggaaaaaaaaaaaaggaatcttcagcctagatcactttcttatccggactgggatattaaatatacgacacatccaggagtttattggagcgcagactgatggcgcaaaggtacgatgagctgccccattacggcgggatggacggagtaggggttcccgcttccatgtacggagaccctcacgcgccgcggccgatccccccggttcaccacctgaaccacgggccgccgctccacgccacacagcactacggcgcgcacgccccgcaccccaatgtcatgccggccagtatgggatccgctgtcaacgacgccttgaagcgggacaaggacgcgatctatgggcacccgttgtttcctctgttagctctggtctttgagaagtgcgagctggcgacctgcactccccgggaacctggagtggctggcggagacgtctgctcctccgactccttcaacgaggacatcgcggtcttcgccaagcaggttcgcgccgaaaagccacttttttcctcaaatccagagctggacaatttgatgatacaagcaatacaagtactaaggtttcatcttttggagttagaaaaggtccacgaactgtgcgataacttctgccaccgatacattagctgtttgaaggggaaaatgcccatcgacctcgtcattgatgaaagagacggcagctccaagtcagatcatgaagaactttcaggctcctccacaaatctcgctgaccataacccttcttcttggcgagaccacgatgatgcaacctcaacccactcagcaggcaccccagggccctccagtgggggccatgcttcccagagcggagacaacagcagtgagcaaggggatggtttagacaacagtgtagcttcacctggtacaggtgacgatgatgatccggataaggacaaaaaacgccagaagaaaagaggcattttccccaaagtagcaacaaatatcatgagagcatggctcttccagcatctcacacatccgtacccttccgaagagcagaagaaacagttagcgcaagacacaggacttacaattctccaagtaaacaactggtttattaatgccagaagaagaatagtacagcccatgattgaccagtcaaatcgagcagtgagccaaggagcagcatatagtccagagggtcagcccatggggagctttgtgttggatggtcagcaacacatggggatccggcctgcaggacctatgagtggaatgggcatgaatatgggcatggatgggcaatggcactacatgtaacc

SEQ ID NO: 247031 - DNA, 1185 bp, Artificial Sequence
  derived and/or modified sequence
atggcccagcggtacgacgagctgccccactacggcggcatggacggagttggggtcccagctagtatgtatggcgatccgcacgcgcctagacctattccccccgtccatcaccttaaccacgggcctccactgcatgcgacccaacactatggcgcccacgccccccatccaaatgtgatgccagctagtatgggaagcgccgtgaacgacgcccttaaaagggacaaagacgcaatctatggccaccccctgtttccgctactggcgctagtgtttgagaaatgtgaattagccacctgtactcccagagagcctggtgtggccggaggcgacgtgtgttccagcgattcctttaacgaggacatcgcagttttcgccaaacaggtgcgagccgagaagccccttttcagttccaaccccgagttagataatctcatgatacaggcaatccaggtactccgttttcacctcctggagttggaaaaggtgcacgaactttgtgacaatttctgtcacaggtacatatcctgtctgaagggtaaaatgcccatagatctggttattgatgagcgtgacggctcatccaaaagtgatcatgaggagctgagtggctcgtccactaacttggctgatcacaatccaagctcttggcgagatcatgacgacgctacatcaacccattctgccggcaccccgggcccgtcaagtggaggccacgcttcccagtctggcgacaattcctcagaacagggtgatggcctagacaatagcgtcgctagtcccgggaccggcgacgacgatgatccggacaaggataagaagagacagaaaaaaagagggattttccccaaagtggcaactaatatcatgcgggcctggctgtttcagcacttgacccatccttacccctcggaggaacaaaaaaagcagctggcccaagacaccgggctcactatactgcaagttaataattggttcatcaatgcacgacgccgcattgtgcagccaatgatcgaccagagcaatcgtgccgtgtcacagggcgctgcctatagccctgaggggcagccaatggggtcattcgttttggatggacagcaacacatggggataaggcctgcaggtcctatgagcggtatgggaatgaatatgggaatggacggccagtggcattacatgtag

SEQ ID NO: 247032 - DNA, 1185 bp, Artificial Sequence
  derived and/or modified sequence
atggcccagcggtacgacgagctgccccactacggcggcatggacggggtgggcgtacctgcatccatgtatggggacccacacgcaccgcgtccgattcctccagtgcaccatctaaaccacggacccccattgcacgcaacacagcactacggcgcccacgcaccacaccccaacgtcatgcccgcctctatgggatcagcagtaaacgatgctctcaaaagagacaaggacgcaatttatggccatcctctgttcccccttctcgctctggtgttcgagaaatgcgaactggctacatgcacgccgcgtgaaccaggagtcgcaggcggtgacgtgtgcagttcagactccttcaacgaggacatcgcagtgttcgctaaacaggtgcgggccgagaaacccctcttcagcagtaatccagagctggacaatttaatgattcaggcgatccaggtcctccggttccacctgttagagctggaaaaagtgcacgagctttgtgacaacttctgccatcggtacatctcttgtctgaaaggaaagatgccaatagatctggtcattgacgaacgcgacggatcatctaagagcgatcacgaagagttgagcggatcctcaactaacttggctgaccataaccctagctcctggcgggaccatgatgacgcaacctcaacacatagtgctggcactccagggccttctagtgggggacacgcttctcagtcgggagacaattctagcgaacagggagatggtctggacaactcagtcgcctcacctgggaccggagacgatgatgacccagacaaggataagaaaaggcagaagaaacgggggatattccccaaagtcgctactaacataatgcgagcctggctgttccaacacctgacacacccatacccttctgaagagcagaaaaagcagctggctcaggatacagggctgactatattgcaggtgaataactggttcattaatgcgagaagaaggatcgttcaaccaatgatcgatcagtccaaccgagctgttagccagggagctgcttatagtcccgaagggcagcctatggggagctttgtcttggatggtcagcagcatatgggaatccgccccgctggcccaatgagcggtatgggcatgaacatggggatggatggtcagtggcattacatgtag

SEQ ID NO: 247033 - DNA, 1185 bp, Artificial Sequence
  derived and/or modified sequence
atggcgcagagatacgacgaacttcctcattatggagggatggacggcgttggggtacccgcttccatgtatggggatccccacgctccccgacccatcccccctgttcaccaccttaatcatgggcctccccttcacgcaacgcagcattacggcgcacacgcaccccaccccaacgtgatgccagccagcatgggatccgccgtaaacgacgctctgaaacgtgacaaggatgccatttacgggcaccctctgtttcccctgctggcactcgttttcgaaaagtgtgaactcgccacgtgcacaccaagggagcccggagtggcgggaggagacgtttgctctagcgactccttcaacgaagatatcgcagtctttgccaagcaggtccgtgccgaaaaacccctgttttcctcaaacccggaactggataatctaatgatccaggctatccaggtcctacgtttccatttactggagttggagaaggtacacgagttgtgtgacaacttttgtcatcgttatatctcatgcctgaagggaaagatgcccattgatctcgtgatcgatgaacgcgacgggtctagtaagagtgaccacgaagagctgtccgggtcttccacaaatctggccgaccataatccatcttcctggagagatcatgatgacgccacctccacccatagcgcaggcacacccggaccatcgagtggcggtcacgcatctcagtcaggcgacaactcttctgaacagggcgacggccttgacaatagcgttgcttctcccggaaccggtgacgacgatgaccccgacaaagacaaaaaacgccaaaagaagagaggcatttttcccaaggttgccactaatataatgagagcctggctgtttcagcaccttacccacccctacccctctgaggagcaaaaaaagcaactagcccaagatactggtttgacaattctgcaagttaacaattggtttattaatgcacggagacgtatcgttcagcccatgattgaccagtctaaccgcgcagtctcacaaggcgcagcctattcacctgagggacagccaatgggttcattcgtcctggacggacagcagcacatgggaattcgccctgctgggcctatgtccggcatggggatgaatatggggatggatgggcaatggcattacatgtag

SEQ ID NO: 247034 - DNA, 1185 bp, Artificial Sequence
  derived and/or modified sequence
atggcccagaggtacgacgaacttcctcactacggaggcatggacggtgtgggggtccctgcatctatgtacggtgacccccacgctcctaggcctatcccccctgtccaccacctcaatcatggtcccccacttcacgccactcagcattacggtgctcacgccccacaccctaacgtgatgcccgcatcaatgggaagcgccgtgaatgacgctttgaagagagacaaagatgcaatttacggccaccccctgtttcccctattggctctagtgtttgaaaagtgcgagcttgcaacctgtactcctagggaacccggtgtggctggtggtgacgtgtgttcttccgactcattcaacgaggatatcgcggtttttgccaagcaggtgagggccgaaaagcccctattttcttccaaccccgagttggacaacctcatgattcaagccatccaggtgcttcgcttccatctgctcgagttagagaaagtgcacgagctgtgtgacaacttctgccataggtatatatcctgcctgaagggcaagatgccaattgacctcgtgatcgacgagcgggacgggagcagcaagagcgatcatgaagagctgtctggatctagcacaaatctggctgaccataatcctagcagctggagagatcatgacgacgcgaccagtacacacagtgccggtaccccagggccaagttctggtgggcatgcctctcagtccggcgacaattcctctgagcagggggacggtctggataattctgtggccagtccaggcacaggagacgatgatgatccagataaagacaaaaagaggcagaagaagcgcggtatattcccaaaagtagccaccaacatcatgagggcctggctgttccagcacctgacgcacccctaccccagtgaggagcagaagaaacaattagcgcaggacacggggctgacaatcctgcaggtcaataattggttcatcaacgctcgcaggcgcatcgtgcaaccaatgatagaccagagcaatcgcgcagtctctcagggggctgcctactcacctgaggggcaacctatgggtagctttgtccttgatggtcagcaacacatgggaatcaggccagcaggcccaatgtctggtatgggcatgaacatgggcatggacgggcagtggcactacatgtag

SEQ ID NO: 247035 - DNA, 1185 bp, Artificial Sequence
  derived and/or modified sequence
atggcccagagatacgacgagctgccccactacggcggcatggacggcgtgggcgtgcccgccagcatgtacggcgacccccacgcccccagacccatcccccccgtgcaccacctgaaccacggcccccccctgcacgccacccagcactacggcgcccacgccccccaccccaacgtgatgcccgccagcatgggcagcgccgtgaacgacgccctgaagagagacaaggacgccatctacggccaccccctgttccccctgctggccctggtgttcgagaagtgcgagctggccacctgcacccccagagagcccggcgtggccggcggcgacgtgtgcagcagcgacagcttcaacgaggacatcgccgtgttcgccaagcaggtgagagccgagaagcccctgttcagcagcaaccccgagctggacaacctgatgatccaggccatccaggtgctgagattccacctgctggagctggagaaggtgcacgagctgtgcgacaacttctgccacagatacatcagctgcctgaagggcaagatgcccatcgacctggtgatcgacgagagagacggcagcagcaagagcgaccacgaggagctgagcggcagcagcaccaacctggccgaccacaaccccagcagctggagagaccacgacgacgccaccagcacccacagcgccggcacccccggccccagcagcggcggccacgccagccagagcggcgacaacagcagcgagcagggcgacggcctggacaacagcgtggccagccccggcaccggcgacgacgacgaccccgacaaggacaagaagagacagaagaagagaggcatcttccccaaggtggccaccaacatcatgagagcctggctgttccagcacctgacccacccctaccccagcgaggagcagaagaagcagctggcccaggacaccggcctgaccatcctgcaggtgaacaactggttcatcaacgccagaagaagaatcgtgcagcccatgatcgaccagagcaacagagccgtgagccagggcgccgcctacagccccgagggccagcccatgggcagcttcgtgctggacggccagcagcacatgggcatcagacccgccggccccatgagcggcatgggcatgaacatgggcatggacggccagtggcactacatgtag

SEQ ID NO: 247036 - protein, 470 aa, Artificial Sequence
  derived and/or modified sequence
MAQRYDELPHYGGMDGVGVPASMYGDPHAPRPIPPVHHLNHGPPLHATQHYGAHAPHPNVMPASMGSAVNDALKRDKDAIYGHPLFPLLALVFEKCELATCTPREPGVAGGDVCSSDSFNEDIAVFAKQVRAEKPLFSSNPELDNLMIQAIQVLRFHLLELEKVHELCDNFCHRYISCLKGKMPIDLVIDERDGSSKSDHEELSGSSTNLADHNPSSWRDHDDATSTHSAGTPGPSSGGHASQSGDNSSEQGDGLDNSVASPGTGDDDDPDKDKKRQKKRGIFPKVATNIMRAWLFQHLTHPYPSEEQKKQLAQDTGLTILQVNNWFINARRRIVQPMIDQSNRAVSQGAAYSPEGQPMGSFVLDGQQHMGIRPAGLQSMPGDYVSQGGPMGMSMAQPSYTPPQMTPHPTQLRHGPPMHSYLPSHPHHPAMMMHGGPPTHPGMTMSAQSPTMLNSVDPNVGGQVMDIHAQ

SEQ ID NO: 247037 - DNA, 3623 bp, Artificial Sequence
  derived and/or modified sequence
tcccgctccccactcccgggatgtgtctccgccgtacgacgggctatggccaccacgacttccgggttccgtcatttcgttctcccgccgccgacccgcgccgccaaactgaggctcttcaataagccaggcagcagccaacctgccaacacctactgacactcactcatctcccagagagagaaagagagcgagagagagcgagcgcgagagagcgagcgcgagtgagagcgagcgagcgagcgagaaagagagagagggagagacaaaatacctaccaggaaagggggggaggaagtccaatttttgcaaactattcatttttttttcttgatttttctcactgctttctttgaacaatactttaaagagagaggatcgtattatagataccgcgggggcaaagctaaaaaaggggggaggggggaggaaaaaattcaagaagcagaaacccctcgcggagttttactggaagaaaaaaacgggtctgaaagattcctcctcttcatcatcatcaaccatcattcattcactaccttgacattccgggctttgattgacagctggagtggcaaaaagccatgaaacacgacagttcggttacatgtgggctgctgacgggccgctcgtaaccttcagttcgggggcttgacaatttttttcttctttttcttctttttcttttctttctttttttttccaactgaggggaagagaagagaaagagggggaaaggaggaccgaagaggaggaggaggggaggggggaggaggaggaggtggaggaggaggaggaagatcaggaggaggaggaagaagaggaaaaaagagaaaaagaagaaatatcacagaaaaaaaaattcttcgttgtctagactgggctttttttcccccctaaaaaatagcatattggagaattgggagaagtctctttggtttggaaaaaaaaaaaaggaatcttcagcctagatcactttcttatccggactgggatattaaatatacgacacatccaggagtttattggagcgcagactgatggcgcaaaggtacgatgagctgccccattacggcgggatggacggagtaggggttcccgcttccatgtacggagaccctcacgcgccgcggccgatccccccggttcaccacctgaaccacgggccgccgctccacgccacacagcactacggcgcgcacgccccgcaccccaatgtcatgccggccagtatgggatccgctgtcaacgacgccttgaagcgggacaaggacgcgatctatgggcacccgttgtttcctctgttagctctggtctttgagaagtgcgagctggcgacctgcactccccgggaacctggagtggctggcggagacgtctgctcctccgactccttcaacgaggacatcgcggtcttcgccaagcaggttcgcgccgaaaagccacttttttcctcaaatccagagctggacaatttgatgatacaagcaatacaagtactaaggtttcatcttttggagttagaaaaggtccacgaactgtgcgataacttctgccaccgatacattagctgtttgaaggggaaaatgcccatcgacctcgtcattgatgaaagagacggcagctccaagtcagatcatgaagaactttcaggctcctccacaaatctcgctgaccataacccttcttcttggcgagaccacgatgatgcaacctcaacccactcagcaggcaccccagggccctccagtgggggccatgcttcccagagcggagacaacagcagtgagcaaggggatggtttagacaacagtgtagcttcacctggtacaggtgacgatgatgatccggataaggacaaaaaacgccagaagaaaagaggcattttccccaaagtagcaacaaatatcatgagagcatggctcttccagcatctcacagtttattaatgccagaagaagaatagtacagcccatgattgaccagtcaaatcgagcagtgagccaaggagcagcatatagtccagagggtcagcccatggggagctttgtgttggatggtcagcaacacatggggatccggcctgcaggacctatgagtggaatgggcatgaatatgggcatggatgggcaatggcactacatgtaaccttcatcatgtaaagcaatcgcaaagcaagggggaagtttgcagagcatgccaggggactacgtttctcagggtggtcctatgggaatgagtatggcacagccaagttacactcctccccagatgaccccacaccctactcaattaagacatggacccccaatgcattcatatttgccaagccatccccaccacccagccatgatgatgcacggaggaccccctacccaccctggaatgactatgtcagcacagagccccacaatgttaaattctgtagatcccaatgttggcggacaggttatggacattcatgcccaatagtataagggaactcaagggaaaaggaaacacacgcaaaaactattttaagactttctgaactttgaccagatgttgacacttaatatgaaattccagacagctgtgattattttttacttttgtcatttttcatcaagcaacagaggaccaatgcaacaagaacacaaatgtgaaatcatgggctgactgagacaattctgtccatgtaaagatcctctggaaaaagactccgagagttataactactgtagtataaatataggaactaagttaaacttgtacatttctgttgatcacgccgttatgttgcctcaaatagttttagaagagaaaaaaaaatatatccttgttttccacactatgtgtgttgttcccaaaagaatgactgttttggttcatcagtgaattcaccatccaggagagactgtggtatatattttaaacctgttgggccaatgagaaaagaaccacactggagatcatgatgaacttttggctgaacctcatcactcgaactccagcttcaagaatgtgttttcatgcccggcctttgttcctccataaatgtgtcctttagtttcaaacagatctttatagttcgtgcttcataagccaattcttattattatttttgggggactcttcttcaaagagcttgccaatgaagatttaaagacagagcaggagcttcttccaggagttctgagccttggttgtggacaaaacaatcttaagttgggcagctttcctcaacacaaaaaaaagttattaatggtcattgaaccataactaggactttatcagaaactcaaagcttgggggataaaaaggagcaagagaatactgtaacaaacttcgtacagagttcggtctattaattgtttcatgttagatattctatgtgtttacctcaattgaaaaaaaaaagaatgtttttgctagtatcagatctgctgtggaattggtattgtatgtccatgaattcttcttttctcagcacgtgttcctcactagaagaaaatgctgttacctttaagctttgtcaaatttacattaaaatacttgtatgaggactgtgacgttatgttaaaaaaaaaaaggtgttaagtcacaaaaagcggtaataaatatttcatttttgaaaaaaaaaaaaa

SEQ ID NO: 247038 - DNA, 1413 bp, Artificial Sequence
  derived and/or modified sequence
atggcacagaggtacgacgagttgcctcactacgggggcatggatggtgtcggtgttccggcatcaatgtacggggaccctcacgctcctcggcccattccaccagtgcaccacctaaatcacggccccccgctgcacgccacacaacattatggtgcccatgctccacacccaaatgtgatgcctgcctcaatgggatcagctgttaatgatgccctcaagcgcgacaaggacgctatctatggccacccgctgttccctctgctggcacttgtgttcgaaaagtgtgagttagcaacatgcaccccaagggaacctggtgtggcaggtggcgacgtgtgctcgtccgactcctttaatgaggatatagcagtgttcgcgaaacaagtgagagccgaaaagcccctgtttagttccaaccctgagctcgataaccttatgattcaggccatccaggtgctgcggttccacttgcttgagctggagaaggtgcacgagctctgcgacaatttttgccatagatatatcagttgcctgaaaggcaagatgccgattgatctggtgatcgacgaacgcgacggcagttctaagagcgaccatgaggagctcagcgggagcagtactaatttagccgatcacaacccatcttcgtggcgcgaccatgatgacgccacgagtacacacagtgccggcacgccaggcccctccagtggggggcatgcttctcagtccggcgataattcctctgagcagggcgatggccttgataacagtgtggcctctccgggaacaggcgacgacgatgacccggacaaagacaaaaagcgccagaaaaagaggggcatattcccaaaggtcgccaccaacattatgcgggcctggctgtttcagcatctcacacacccttacccaagcgaggagcagaagaagcaactagctcaagacaccggcttgacgatcctccaggtcaataactggtttatcaacgcccgcaggagaattgtccagcctatgattgaccagagtaatcgtgccgtgtctcagggcgccgcttacagtccagaaggtcagccaatgggttcgttcgttctggatggtcagcagcatatgggtattagaccggcaggcctacagagtatgccaggagattatgtgtcacagggcggtcccatgggtatgagtatggctcagcctagttatactccaccgcagatgactccccaccccacccagctccgccacggccctccaatgcacagttatcttcctagtcatccccaccaccccgccatgatgatgcacgggggccctccaactcaccccggcatgaccatgtcagcacagagtccaactatgctgaacagcgttgatccgaatgttgggggacaggtgatggacatccatgcccaatag

SEQ ID NO: 247039 - DNA, 1413 bp, Artificial Sequence
  derived and/or modified sequence
atggctcaaaggtacgacgaactaccccactatggaggaatggatggggtcggtgtgcccgcgtccatgtacggtgatccgcatgccccccgcccaattcctccagtccatcacttgaatcacggccctccactccacgcaacacaacactacggcgctcatgctccgcaccctaacgtgatgccagcctccatggggtctgctgtcaacgatgcattaaagcgggacaaagacgccatctatgggcaccctctgtttcccctcctggctctggtattcgagaaatgcgaattggctacctgcacaccacgcgagccaggagtcgctgggggggacgtgtgcagtagtgactccttcaatgaggatatcgcagtctttgccaaacaggtgcgtgctgaaaagcctttgtttagtagtaaccccgagctggataatctgatgatacaggccattcaggtactgcgctttcacttgcttgagctggaaaaggtccatgaactatgtgacaacttttgccaccgatacatctcctgcttaaaaggaaaaatgcctattgacctagtaatagacgagagagatggaagctcaaaatccgaccatgaggagctgagcgggagcagtaccaacctggccgaccataacccttcatcctggcgagatcatgacgacgcgacttctactcactccgctggcactcccggaccatccagtggtggacatgcatcacagtctggggataacagtagcgagcaaggcgacggtctggacaatagtgtggcttcgcctggcacaggcgacgacgatgacccagataaggataaaaaaagacaaaagaagaggggtatctttcccaaggtcgccacaaatatcatgcgcgcatggctgttccagcaccttacccacccttacccttcagaagaacaaaagaaacagctggcccaggacaccggcttgaccatcttgcaggtcaataactggtttataaatgcccgcaggcgcatagtgcagcccatgatcgaccagagtaatagagcagtgtctcagggcgccgcatattcaccagagggccagcccatgggctcctttgttctcgacggacagcagcacatgggcatcaggccggccggcttgcagtcaatgcccggagattatgtgagccagggaggaccaatgggcatgtcaatggcccagccctcttacactccgccacaaatgaccccccatccaacacagctgagacatggaccaccaatgcattcttacctcccttctcatcctcatcatcccgccatgatgatgcacggagggcctcctacacaccctggaatgactatgtccgcacaaagcccaactatgttgaactccgtggacccaaacgtcgggggccaagtgatggacattcatgcgcagtag

SEQ ID NO: 247040 - DNA, 1413 bp, Artificial Sequence
  derived and/or modified sequence
atggcccagagatatgatgagctgccccactatggaggcatggatggagtgggcgtgcctgcctccatgtacggggacccccacgccccccggcccatcccccctgtgcaccacctgaaccacggcccccccctgcacgccacccagcactatggagcccacgccccccaccccaacgtgatgcctgcctccatgggcagcgctgtgaatgatgccctgaagagggacaaggatgccatctacggccaccccctcttccccctgctggccctggtgtttgagaagtgtgagctggccacctgcaccccccgggagcccggggtggccggaggagatgtgtgcagcagtgacagcttcaatgaagatattgctgtgtttgccaagcaggtgcgggcagagaagcccctcttcagcagcaaccctgagctggacaacctgatgatccaggccatccaggtgctgcgcttccacctgctggagctggagaaggtgcatgagctgtgtgacaacttctgccaccgctacatcagctgcctgaagggcaagatgcccatcgacctggtgattgatgaaagagatggcagcagcaagagtgaccacgaggagctgagcggcagcagcaccaacctggccgaccacaaccccagctcctggagggaccatgatgatgccaccagcacccacagcgctggcaccccaggccccagcagcggcggccacgccagccagagcggggacaacagcagcgagcagggagatggcctggacaacagcgtggccagccctggcactggagatgatgatgatcctgacaaggacaagaagaggcagaagaagaggggcatcttccccaaggtggccaccaacatcatgagggcctggctgttccagcacctgacccacccctaccccagcgaggagcagaagaagcagctggcccaggacaccggcctgaccatcctgcaggtgaacaactggttcatcaatgcccggcggcgcatcgtgcagcccatgattgaccagagcaacagagctgtgtcccagggcgccgcctacagccctgagggccagcccatgggcagctttgtgctggatggccagcagcacatgggcatccggcctgctggcctgcagagcatgcctggggactatgtgtcccagggcggccccatgggcatgtccatggcccagcccagctacaccccaccccagatgaccccccaccccacccagctgcggcacggcccccccatgcacagctacctgcccagccacccccaccacccagccatgatgatgcacggcggcccccccacccaccctggcatgaccatgtctgcccagagccccaccatgctgaacagcgtggaccccaacgtgggcggccaggtgatggacatccacgcccagtag

SEQ ID NO: 247041 - DNA, 3007 bp, Artificial Sequence
  derived and/or modified sequence
accgcttggagggagtgtgctctgagttaagctggtctcttctggtcctggaaaaaaatgagtattgacaaggttgctggatctgcgcagaaaagaaagtgccacttaataaaaaatttagcccggcagtggtaccgtctgcagagcttgctgcccttggacgttagcaggaagccttcggggtgctgtaatcggcgggcagaggagagggaggccgcggaattaaaaggaacaaaagctagagcgccatgccaaacgtccccggcaagacccagttaggcaggagccgggagtgatgggaaaatgaactagaacatattggagaattgggagaagtctctttggtttggaaaaaaaaaaaaggaatcttcagcctagatcactttcttatccggactgggatattaaatatacgacacatccaggagtttattggagcgcagactgatggcgcaaaggtacgatgagctgccccattacggcgggatggacggagtaggggttcccgcttccatgtacggagaccctcacgcgccgcggccgatccccccggttcaccacctgaaccacgggccgccgctccacgccacacagcactacggcgcgcacgccccgcaccccaatgtcatgccggccagtatgggatccgctgtcaacgacgccttgaagcgggacaaggacgcgatctatgggcacccgttgtttcctctgttagctctggtctttgagaagtgcgagctggcgacctgcactccccgggaacctggagtggctggcggagacgtctgctcctccgactccttcaacgaggacatcgcggtcttcgccaagcaggttcgcgccgaaaagccacttttttcctcaaatccagagctggacaatttgatgatacaagcaatacaagtactaaggtttcatcttttggagttagaaaaggtccacgaactgtgcgataacttctgccaccgatacattagctgtttgaaggggaaaatgcccatcgacctcgtcattgatgaaagagacggcagctccaagtcagatcatgaagaactttcaggctcctccacaaatctcgctgaccataacccttcttcttggcgagaccacgatgatgcaacctcaacccactcagcaggcaccccagggccctccagtgggggccatgcttcccagagcggagacaacagcagtgagcaaggggatggtttagacaacagtgtagcttcacctggtacaggtgacgatgatgatccggataaggacaaaaaacgccagaagaaaagaggcattttccccaaagtagcaacaaatatcatgagagcatggctcttccagcatctcacacatccgtacccttccgaagagcagaagaaacagttagcgcaagacacaggacttacaattctccaagtaaacaactggtttattaatgccagaagaagaatagtacagcccatgattgaccagtcaaatcgagcagtgagccaaggagcagcatatagtccagagggtcagcccatggggagctttgtgttggatggtcagcaacacatggggatccggcctgcaggtttgcagagcatgccaggggactacgtttctcagggtggtcctatgggaatgagtatggcacagccaagttacactcctccccagatgaccccacaccctactcaattaagacatggacccccaatgcattcatatttgccaagccatccccaccacccagccatgatgatgcacggaggaccccctacccaccctggaatgactatgtcagcacagagccccacaatgttaaattctgtagatcccaatgttggcggacaggttatggacattcatgcccaatagtataagggaactcaagggaaaaggaaacacacgcaaaaactattttaagactttctgaactttgaccagatgttgacacttaatatgaaattccagacagctgtgattattttttacttttgtcatttttcatcaagcaacagaggaccaatgcaacaagaacacaaatgtgaaatcatgggctgactgagacaattctgtccatgtaaagatcctctggaaaaagactccgagagttataactactgtagtataaatataggaactaagttaaacttgtacatttctgttgatcacgccgttatgttgcctcaaatagttttagaagagaaaaaaaaatatatccttgttttccacactatgtgtgttgttcccaaaagaatgactgttttggttcatcagtgaattcaccatccaggagagactgtggtatatattttaaacctgttgggccaatgagaaaagaaccacactggagatcatgatgaacttttggctgaacctcatcactcgaactccagcttcaagaatgtgttttcatgcccggcctttgttcctccataaatgtgtcctttagtttcaaacagatctttatagttcgtgcttcataagccaattcttattattatttttgggggactcttcttcaaagagcttgccaatgaagatttaaagacagagcaggagcttcttccaggagttctgagccttggttgtggacaaaacaatcttaagttgggcagctttcctcaacacaaaaaaaagttattaatggtcattgaaccataactaggactttatcagaaactcaaagcttgggggataaaaaggagcaagagaatactgtaacaaacttcgtacagagttcggtctattaattgtttcatgttagatattctatgtgtttacctcaattgaaaaaaaaaagaatgtttttgctagtatcagatctgctgtggaattggtattgtatgtccatgaattcttcttttctcagcacgtgttcctcactagaagaaaatgctgttacctttaagctttgtcaaatttacattaaaatacttgtatgaggactgtgacgttatgttaaaaaaaaaaaggtgttaagtcacaaaaagcggtaataaatatttcatttttgattttt

SEQ ID NO: 247042 - DNA, 3050 bp, Artificial Sequence
  derived and/or modified sequence
gcctttggctacatcggacccagatgactgcctcctcacttcctccctcccgattccgccgcggcccccaaagactctcggggtggccccttgtccgcaccgcttggagggagtgtgctctgagttaagctggtctcttctggtcctggaaaaaaatgagtattgacaaggttgctggatctgcgcagaaaagaaagtgccacttaataaaaaatttagcccggcagtggtaccgtctgcagagcttgctgcccttggacgttagcaggaagccttcggggtgctgtaatcggcgggcagaggagagggaggccgcggaattaaaaggaacaaaagctagagcgccatgccaaacgtccccggcaagacccagttaggcaggagccgggagtgatgggaaaatgaactagaatacgatgagctgccccattacggcgggatggacggagtaggggttcccgcttccatgtacggagaccctcacgcgccgcggccgatccccccggttcaccacctgaaccacgggccgccgctccacgccacacagcactacggcgcgcacgccccgcaccccaatgtcatgccggccagtatgggatccgctgtcaacgacgccttgaagcgggacaaggacgcgatctatgggcacccgttgtttcctctgttagctctggtctttgagaagtgcgagctggcgacctgcactccccgggaacctggagtggctggcggagacgtctgctcctccgactccttcaacgaggacatcgcggtcttcgccaagcaggttcgcgccgaaaagccacttttttcctcaaatccagagctggacaatttgatgatacaagcaatacaagtactaaggtttcatcttttggagttagaaaaggtccacgaactgtgcgataacttctgccaccgatacattagctgtttgaaggggaaaatgcccatcgacctcgtcattgatgaaagagacggcagctccaagtcagatcatgaagaactttcaggctcctccacaaatctcgctgaccataacccttcttcttggcgagaccacgatgatgcaacctcaacccactcagcaggcaccccagggccctccagtgggggccatgcttcccagagcggagacaacagcagtgagcaaggggatggtttagacaacagtgtagcttcacctggtacaggtgacgatgatgatccggataaggacaaaaaacgccagaagaaaagaggcattttccccaaagtagcaacaaatatcatgagagcatggctcttccagcatctcacacatccgtacccttccgaagagcagaagaaacagttagcgcaagacacaggacttacaattctccaagtaaacaactggtttattaatgccagaagaagaatagtacagcccatgattgaccagtcaaatcgagcagtgagccaaggagcagcatatagtccagagggtcagcccatggggagctttgtgttggatggtcagcaacacatggggatccggcctgcaggacctatgagtggaatgggcatgaatatgggcatggatgggcaatggcactacatgtaaccttcatcatgtaaagcaatcgcaaagcaagggggaagtttgcagagcatgccaggggactacgtttctcagggtggtcctatgggaatgagtatggcacagccaagttacactcctccccagatgaccccacaccctactcaattaagacatggacccccaatgcattcatatttgccaagccatccccaccacccagccatgatgatgcacggaggaccccctacccaccctggaatgactatgtcagcacagagccccacaatgttaaattctgtagatcccaatgttggcggacaggttatggacattcatgcccaatagtataagggaactcaagggaaaaggaaacacacgcaaaaactattttaagactttctgaactttgaccagatgttgacacttaatatgaaattccagacagctgtgattattttttacttttgtcatttttcatcaagcaacagaggaccaatgcaacaagaacacaaatgtgaaatcatgggctgactgagacaattctgtccatgtaaagatcctctggaaaaagactccgagagttataactactgtagtataaatataggaactaagttaaacttgtacatttctgttgatcacgccgttatgttgcctcaaatagttttagaagagaaaaaaaaatatatccttgttttccacactatgtgtgttgttcccaaaagaatgactgttttggttcatcagtgaattcaccatccaggagagactgtggtatatattttaaacctgttgggccaatgagaaaagaaccacactggagatcatgatgaacttttggctgaacctcatcactcgaactccagcttcaagaatgtgttttcatgcccggcctttgttcctccataaatgtgtcctttagtttcaaacagatctttatagttcgtgcttcataagccaattcttattattatttttgggggactcttcttcaaagagcttgccaatgaagatttaaagacagagcaggagcttcttccaggagttctgagccttggttgtggacaaaacaatcttaagttgggcagctttcctcaacacaaaaaaaagttattaatggtcattgaaccataactaggactttatcagaaactcaaagcttgggggataaaaaggagcaagagaatactgtaacaaacttcgtacagagttcggtctattaattgtttcatgttagatattctatgtgtttacctcaattgaaaaaaaaaagaatgtttttgctagtatcagatctgctgtggaattggtattgtatgtccatgaattcttcttttctcagcacgtgttcctcactagaagaaaatgctgttacctttaagctttgtcaaatttacattaaaatacttgtatgaggactgtgacgttatgttaaaaaaaaaaaggtgttaagtcacaaaaagcggtaataaatatttcatttttg

SEQ ID NO: 247043 - DNA, 3591 bp, Artificial Sequence
  derived and/or modified sequence
tcccgctccccactcccgggatgtgtctccgccgtacgacgggctatggccaccacgacttccgggttccgtcatttcgttctcccgccgccgacccgcgccgccaaactgaggctcttcaataagccaggcagcagccaacctgccaacacctactgacactcactcatctcccagagagagaaagagagcgagagagagcgagcgcgagagagcgagcgcgagtgagagcgagcgagcgagcgagaaagagagagagggagagacaaaatacctaccaggaaagggggggaggaagtccaatttttgcaaactattcatttttttttcttgatttttctcactgctttctttgaacaatactttaaagagagaggatcgtattatagataccgcgggggcaaagctaaaaaaggggggaggggggaggaaaaaattcaagaagcagaaacccctcgcggagttttactggaagaaaaaaacgggtctgaaagattcctcctcttcatcatcatcaaccatcattcattcactaccttgacattccgggctttgattgacagctggagtggcaaaaagccatgaaacacgacagttcggttacatgtgggctgctgacgggccgctcgtaaccttcagttcgggggcttgacaatttttttcttctttttcttctttttcttttctttctttttttttccaactgaggggaagagaagagaaagagggggaaaggaggaccgaagaggaggaggaggggaggggggaggaggaggaggtggaggaggaggaggaagatcaggaggaggaggaagaagaggaaaaaagagaaaaagaagaaatatcacagaaaaaaaaattcttcgttgtctagactgggctttttttcccccctaaaaaatagcatattggagaattgggagaagtctctttggtttggaaaaaaaaaaaaggaatcttcagcctagatcactttcttatccggactgggatattaaatatacgacacatccaggagtttattggagcgcagactgatggcgcaaaggtacgatgagctgccccattacggcgggatggacggagtaggggttcccgcttccatgtacggagaccctcacgcgccgcggccgatccccccggttcaccacctgaaccacgggccgccgctccacgccacacagcactacggcgcgcacgccccgcaccccaatgtcatgccggccagtatgggatccgctgtcaacgacgccttgaagcgggacaaggacgcgatctatgggcacccgttgtttcctctgttagctctggtctttgagaagtgcgagctggcgacctgcactccccgggaacctggagtggctggcggagacgtctgctcctccgactccttcaacgaggacatcgcggtcttcgccaagcaggttcgcgccgaaaagccacttttttcctcaaatccagagctggacaatttgatgatacaagcaatacaagtactaaggtttcatcttttggagttagaaaaggtccacgaactgtgcgataacttctgccaccgatacattagctgtttgaaggggaaaatgcccatcgacctcgtcattgatgaaagagacggcagctccaagtcagatcatgaagaactttcaggctcctccacaaatctcgctgaccataacccttcttcttggcgagaccacgatgatgcaacctcaacccactcagcaggcaccccagggccctccagtgggggccatgcttcccagagcggagacaacagcagtgagcaaggggatggtttagacaacagtgtagcttcacctggtacaggtgacgatgatgatccggataaggacaaaaaacgccagaagaaaagaggcattttccccaaagtagcaacaaatatcatgagagcatggctcttccagcatctcacacatccgtacccttccgaagagcagaagaaacagttagcgcaagacacaggacttacaattctccaagtaaacaactggtttattaatgccagaagaagaatagtacagcccatgattgaccagtcaaatcgagcagtgagccaaggagcagcatatagtccagagggtcagcccatggggagctttgtgttggatggtcagcaacacatggggatccggcctgcaggtttgcagagcatgccaggggactacgtttctcagggtggtcctatgggaatgagtatggcacagccaagttacactcctccccagatgaccccacaccctactcaattaagacatggacccccaatgcattcatatttgccaagccatccccaccacccagccatgatgatgcacggaggaccccctacccaccctggaatgactatgtcagcacagagccccacaatgttaaattctgtagatcccaatgttggcggacaggttatggacattcatgcccaatagtataagggaactcaagggaaaaggaaacacacgcaaaaactattttaagactttctgaactttgaccagatgttgacacttaatatgaaattccagacagctgtgattattttttacttttgtcatttttcatcaagcaacagaggaccaatgcaacaagaacacaaatgtgaaatcatgggctgactgagacaattctgtccatgtaaagatcctctggaaaaagactccgagagttataactactgtagtataaatataggaactaagttaaacttgtacatttctgttgatcacgccgttatgttgcctcaaatagttttagaagagaaaaaaaaatatatccttgttttccacactatgtgtgttgttcccaaaagaatgactgttttggttcatcagtgaattcaccatccaggagagactgtggtatatattttaaacctgttgggccaatgagaaaagaaccacactggagatcatgatgaacttttggctgaacctcatcactcgaactccagcttcaagaatgtgttttcatgcccggcctttgttcctccataaatgtgtcctttagtttcaaacagatctttatagttcgtgcttcataagccaattcttattattatttttgggggactcttcttcaaagagcttgccaatgaagatttaaagacagagcaggagcttcttccaggagttctgagccttggttgtggacaaaacaatcttaagttgggcagctttcctcaacacaaaaaaaagttattaatggtcattgaaccataactaggactttatcagaaactcaaagcttgggggataaaaaggagcaagagaatactgtaacaaacttcgtacagagttcggtctattaattgtttcatgttagatattctatgtgtttacctcaattgaaaaaaaaaagaatgtttttgctagtatcagatctgctgtggaattggtattgtatgtccatgaattcttcttttctcagcacgtgttcctcactagaagaaaatgctgttacctttaagctttgtcaaatttacattaaaatacttgtatgaggactgtgacgttatgttaaaaaaaaaaaggtgttaagtcacaaaaagcggtaataaatatttcatttttg

SEQ ID NO: 247044 - DNA, 2295 bp, Artificial Sequence
  derived and/or modified sequence
cccgatgcctcctctcccttcaacgcttctgctgctgctcgctgcttgatgatggcggccagtattttaaaaaatagcaaaattattcatcggcttctttccctcccgtgcctctgcgtgtgtgcgagtgtgtgtgcgtgcgtgtgtgcgtgtctgggcgcgcgtgttccagcgctgtgcgagcgggcgggcggcgagtgcgtgtgagtggtgtgtgtgtgtgcgtgtgcaatcgttacacgctttcgcctcgctccagcttttaccccagcagcgcgattcccccggttctcctgctgccgctgctgcgccgctgccgccgtggctcgcgcggctcggggcgggcacgggctgcgtaggagccgccgccggggccgccgctggggccgcgctgccgcagccgctgcgccgccgcctagactactagcctgggctgcttgttttgtctctgaaattgacaaggacgcagggaatccgctgctaaataatgtttctgtacgatgagctgccccattacggcgggatggacggagtaggggttcccgcttccatgtacggagaccctcacgcgccgcggccgatccccccggttcaccacctgaaccacgggccgccgctccacgccacacagcactacggcgcgcacgccccgcaccccaatgtcatgccggccagtatgggatccgctgtcaacgacgccttgaagcgggacaaggacgcgatctatggctctggtctttgagaagtgcgagctggcgacctgcactccccgggaacctggagtggctggcggagacgtctgctcctccgactccttcaacgaggacatcgcggtcttcgccaagcaggttcgcgccgaaaagccacttttttcctcaaatccagagctggacaatttgatgatacaagcaatacaagtactaaggtttcatcttttggagttagaaaaggtccacgaactgtgcgataacttctgccaccgatacattagctgtttgaaggggaaaatgcccatcgacctcgtcattgatgaaagagacggcagctccaagtcagatcatgaagaactttcaggctcctccacaaatctcgctgaccataacccttcttcttggcgagaccacgatgatgcaacctcaacccactcagcaggcaccccagggccctccagtgggggccatgcttcccagagcggagacaacagcagtgagcaaggggatggtttagacaacagtgtagcttcacctggtacaggtgacgatgatgatccggataaggacaaaaaacgccagaagaaaagaggcattttccccaaagtagcaacaaatatcatgagagcatggctcttccagcatctcacacatccgtacccttccgaagagcagaagaaacagttagcgcaagacacaggacttacaattctccaagtaaacaactggtttattaatgccagaagaagaatagtacagcccatgattgaccagtcaaatcgagcagtgagccaaggagcagcatatagtccagagggtcagcccatggggagctttgtgttggatggtcagcaacacatggggatccggcctgcaggacctatgagtggaatgggcatgaatatgggcatggatgggcaatggcactacatgtaaccttcatcatgtaaagcaatcgcaaagcaagggggaagtttgcagagcatgccaggggactacgtttctcagggtggtcctatgggaatgagtatggcacagccaagttacactcctccccagatgaccccacaccctactcaattaagacatggacccccaatgcattcatatttgccaagccatccccaccacccagccatgatgatgcacggaggaccccctacccaccctggaatgactatgtcagcacagagccccacaatgttaaattctgtagatcccaatgttggcggacaggttatggacattcatgcccaatagtataagggaactcaagggaaaaggaaacacacgcaaaaactattttaagactttctgaactttgaccagatgttgacacttaatatgaaattccagacagctgtgattattttttacttttgtcatttttcatcaagcaacagaggaccaatgcaacaagaacacaaatgtgaaatcatgggctgactgagacaattctgtccatgtaaagatcctctggaaaaagactccgagagttataactactgtagtataaatataggaactaagttaaacttgtacatttctgttgatcacgccgttatgttgcctcaaatagttttag

SEQ ID NO: 247045 - DNA, 2738 bp, Artificial Sequence
  derived and/or modified sequence
catctttatcccttcctctcttttctgttcgccctcttctccctgctctttttccctttccacccccctcctctgttctccctcacctcctgcgccccctcccccttcccgggttctgacagtacgatgagctgccccattacggcgggatggacggagtaggggttcccgcttccatgtacggagaccctcacgcgccgcggccgatccccccggttcaccacctgaaccacgggccgccgctccacgccacacagcactacggcgcgcacgccccgcaccccaatgtcatgccggccagtatgggatccgctgtcaacgacgccttgaagcgggacaaggacgcgatctatggctctggtctttgagaagtgcgagctggcgacctgcactccccgggaacctggagtggctggcggagacgtctgctcctccgactccttcaacgaggacatcgcggtcttcgccaagcaggttcgcgccgaaaagccacttttttcctcaaatccagagctggacaatttgatgatacaagcaatacaagtactaaggtttcatcttttggagttagaaaaggtccacgaactgtgcgataacttctgccaccgatacattagctgtttgaaggggaaaatgcccatcgacctcgtcattgatgaaagagacggcagctccaagtcagatcatgaagaactttcaggctcctccacaaatctcgctgaccataacccttcttcttggcgagaccacgatgatgcaacctcaacccactcagcaggcaccccagggccctccagtgggggccatgcttcccagagcggagacaacagcagtgagcaaggggatggtttagacaacagtgtagcttcacctggtacaggtgacgatgatgatccggataaggacaaaaaacgccagaagaaaagaggcattttccccaaagtagcaacaaatatcatgagagcatggctcttccagcatctcacacatccgtacccttccgaagagcagaagaaacagttagcgcaagacacaggacttacaattctccaagtaaacaactggtttattaatgccagaagaagaatagtacagcccatgattgaccagtcaaatcgagcagtgagccaaggagcagcatatagtccagagggtcagcccatggggagctttgtgttggatggtcagcaacacatggggatccggcctgcaggacctatgagtggaatgggcatgaatatgggcatggatgggcaatggcactacatgtaaccttcatcatgtaaagcaatcgcaaagcaagggggaagtttgcagagcatgccaggggactacgtttctcagggtggtcctatgggaatgagtatggcacagccaagttacactcctccccagatgaccccacaccctactcaattaagacatggacccccaatgcattcatatttgccaagccatccccaccacccagccatgatgatgcacggaggaccccctacccaccctggaatgactatgtcagcacagagccccacaatgttaaattctgtagatcccaatgttggcggacaggttatggacattcatgcccaatagtataagggaactcaagggaaaaggaaacacacgcaaaaactattttaagactttctgaactttgaccagatgttgacacttaatatgaaattccagacagctgtgattattttttacttttgtcatttttcatcaagcaacagaggaccaatgcaacaagaacacaaatgtgaaatcatgggctgactgagacaattctgtccatgtaaagatcctctggaaaaagactccgagagttataactactgtagtataaatataggaactaagttaaacttgtacatttctgttgatcacgccgttatgttgcctcaaatagttttagaagagaaaaaaaaatatatccttgttttccacactatgtgtgttgttcccaaaagaatgactgttttggttcatcagtgaattcaccatccaggagagactgtggtatatattttaaacctgttgggccaatgagaaaagaaccacactggagatcatgatgaacttttggctgaacctcatcactcgaactccagcttcaagaatgtgttttcatgcccggcctttgttcctccataaatgtgtcctttagtttcaaacagatctttatagttcgtgcttcataagccaattcttattattatttttgggggactcttcttcaaagagcttgccaatgaagatttaaagacagagcaggagcttcttccaggagttctgagccttggttgtggacaaaacaatcttaagttgggcagctttcctcaacacaaaaaaaagttattaatggtcattgaaccataactaggactttatcagaaactcaaagcttgggggataaaaaggagcaagagaatactgtaacaaacttcgtacagagttcggtctattaattgtttcatgttagatattctatgtgtttacctcaattgaaaaaaaaaagaatgtttttgctagtatcagatctgctgtggaattggtattgtatgtccatgaattcttcttttctcagcacgtgttcctcactagaagaaaatgctgttacctttaagctttgtcaaatttacattaaaatacttgtatgaggactgtgacgttatgttaaaaaaaaaaaggtgttaagtcacaaaaagcggtaataaatatttcatttttga

SEQ ID NO: 247046 - DNA, 3687 bp, Artificial Sequence
  derived and/or modified sequence
tcccgctccccactcccgggatgtgtctccgccgtacgacgggctatggccaccacgacttccgggttccgtcatttcgttctcccgccgccgacccgcgccgccaaactgaggctcttcaataagccaggcagcagccaacctgccaacacctactgacactcactcatctcccagagagagaaagagagcgagagagagcgagcgcgagagagcgagcgcgagtgagagcgagcgagcgagcgagaaagagagagagggagagacaaaatacctaccaggaaagggggggaggaagtccaatttttgcaaactattcatttttttttcttgatttttctcactgctttctttgaacaatactttaaagagagaggatcgtattatagataccgcgggggcaaagctaaaaaaggggggaggggggaggaaaaaattcaagaagcagaaacccctcgcggagttttactggaagaaaaaaacgggtctgaaagattcctcctcttcatcatcatcaaccatcattcattcactaccttgacattccgggctttgattgacagctggagtggcaaaaagccatgaaacacgacagttcggttacatgtgggctgctgacgggccgctcgtaaccttcagttcgggggcttgacaatttttttcttctttttcttctttttcttttctttctttttttttccaactgaggggaagagaagagaaagagggggaaaggaggaccgaagaggaggaggaggggaggggggaggaggaggaggtggaggaggaggaggaagatcaggaggaggaggaagaagaggaaaaaagagaaaaagaagaaatatcacagaaaaaaaaattcttcgttgtctagactgggctttttttcccccctaaaaaatagcatattggagaattgggagaagtctctttggtttggaaaaaaaaaaaaggaatcttcagcctagatcactttcttatccggactgggatattaaatatacgacacatccaggagtttattggagcgcagactgatggcgcaaaggtacgatgagctgccccattacggcgggatggacggagtaggggttcccgcttccatgtacggagaccctcacgcgccgcggccgatccccccggttcaccacctgaaccacgggccgccgctccacgccacacagcactacggcgcgcacgccccgcaccccaatgtcatgccggccagtatgggatccgctgtcaacgacgccttgaagcgggacaaggacgcgatctatgggcacccgttgtttcctctgttagctctggtctttgagaagtgcgagctggcgacctgcactccccgggaacctggagtggctggcggagacgtctgctcctccgactccttcaacgaggacatcgcggtcttcgccaagcaggttcgcgccgaaaagccacttttttcctcaaatccagagctggacaatttgatgatacaagcaatacaagtactaaggtttcatcttttggagttagaaaaggtccacgaactgtgcgataacttctgccaccgatacattagctgtttgaaggggaaaatgcccatcgacctcgtcattgatgaaagagacggcagctccaagtcagatcatgaagaactttcaggctcctccacaaatctcgctgaccataacccttcttcttggcgagaccacgatgatgcaacctcaacccactcagcaggcaccccagggccctccagtgggggccatgcttcccagagcggagacaacagcagtgagcaaggggatggtttagacaacagtgtagcttcacctggtacaggtgacgatgatgatccggataaggacaaaaaacgccagaagaaaagaggcattttccccaaagtagcaacaaatatcatgagagcatggctcttccagcatctcacacatccgtacccttccgaagagcagaagaaacagttagcgcaagacacaggacttacaattctccaagtaaacaactggtttattaatgccagaagaagaatagtacagcccatgattgaccagtcaaatcgagcagtgagccaaggagcagcatatagtccagagggtcagcccatggggagctttgtgttggatggtcagcaacacatggggatccggcctgcaggacctatgagtggaatgggcatgaatatgggcatggatgggcaatggcactacatgtaaccttcatcatgtaaagcaatcgcaaagcaagggggaagtttgcagagcatgccaggggactacgtttctcagggtggtcctatgggaatgagtatggcacagccaagttacactcctccccagatgaccccacaccctactcaattaagacatggacccccaatgcattcatatttgccaagccatccccaccacccagccatgatgatgcacggaggaccccctacccaccctggaatgactatgtcagcacagagccccacaatgttaaattctgtagatcccaatgttggcggacaggttatggacattcatgcccaatagtataagggaactcaagggaaaaggaaacacacgcaaaaactattttaagactttctgaactttgaccagatgttgacacttaatatgaaattccagacagctgtgattattttttacttttgtcatttttcatcaagcaacagaggaccaatgcaacaagaacacaaatgtgaaatcatgggctgactgagacaattctgtccatgtaaagatcctctggaaaaagactccgagagttataactactgtagtataaatataggaactaagttaaacttgtacatttctgttgatcacgccgttatgttgcctcaaatagttttagaagagaaaaaaaaatatatccttgttttccacactatgtgtgttgttcccaaaagaatgactgttttggttcatcagtgaattcaccatccaggagagactgtggtatatattttaaacctgttgggccaatgagaaaagaaccacactggagatcatgatgaacttttggctgaacctcatcactcgaactccagcttcaagaatgtgttttcatgcccggcctttgttcctccataaatgtgtcctttagtttcaaacagatctttatagttcgtgcttcataagccaattcttattattatttttgggggactcttcttcaaagagcttgccaatgaagatttaaagacagagcaggagcttcttccaggagttctgagccttggttgtggacaaaacaatcttaagttgggcagctttcctcaacacaaaaaaaagttattaatggtcattgaaccataactaggactttatcagaaactcaaagcttgggggataaaaaggagcaagagaatactgtaacaaacttcgtacagagttcggtctattaattgtttcatgttagatattctatgtgtttacctcaattgaaaaaaaaaagaatgtttttgctagtatcagatctgctgtggaattggtattgtatgtccatgaattcttcttttctcagcacgtgttcctcactagaagaaaatgctgttacctttaagctttgtcaaatttacattaaaatacttgtatgaggactgtgacgttatgttaaaaaaaaaaaggtgttaagtcacaaaaagcggtaataaatatttcatttttg

SEQ ID NO: 247047 - DNA, 1413 bp, Artificial Sequence
  derived and/or modified sequence
atggcccagcggtacgacgagctgccccactacggcggcatggacggcgtcggcgtgccagcgagcatgtatggggacccccacgccccccgcccgattccgcctgtccatcatctgaaccacggtcccccacttcacgccactcagcactacggcgcccacgcccctcatcctaatgtgatgcccgcctccatgggctcagcagttaatgatgcccttaagagggacaaggatgccatttatggccacccattgttccctctcctggccctggtttttgaaaagtgcgaacttgctacgtgtaccccaagggagccaggggtcgccggcggcgacgtgtgcagcagtgacagttttaacgaagacatcgccgtgtttgcaaaacaggtaagggctgagaagccactcttctcttccaaccccgaacttgacaatctcatgattcaagccatccaagtactcagattccatttactggaactcgaaaaggtccacgaactgtgcgacaatttctgccatagatatataagctgtctcaaaggtaagatgccgattgacctggtgattgatgaacgcgatgggtcttcaaagagtgatcacgaagagctgagtgggtcaagcacgaacctcgccgaccacaatccttcaagctggcgtgaccacgatgacgctacctccacccactcagcgggtaccccgggtccatcctctggaggccatgccagccagagtggggataattcctccgaacagggtgatggcctggataactcagtcgcatcaccggggacaggcgacgacgacgaccccgataaggacaagaagaggcaaaagaaacgggggatctttcctaaagtcgccactaatattatgcgcgcatggctctttcagcatctgacccacccttacccgtcagaggagcagaaaaagcagctggcccaagacaccggtctgaccattctgcaggtaaataattggttcatcaatgcccggaggcggatcgtgcagcctatgatcgatcaatccaaccgagccgtgtcacagggggccgcatattcccccgaggggcagcctatgggctcattcgtgctcgatgggcaacagcatatgggtatacggccagctggccttcaatctatgcctggggactatgtgtcacagggcggtcctatgggtatgtccatggcccagcctagctacaccccacctcaaatgaccccgcatccaacccagctgaggcacggccctcctatgcattcctacctgccttcacacccacaccatccggccatgatgatgcatggcggaccacccactcatcccggcatgacaatgagcgcccagtccccaactatgctgaactcggtcgacccgaacgtgggaggccaggtgatggacatccatgctcagtag

SEQ ID NO: 247048 - DNA, 1413 bp, Artificial Sequence
  derived and/or modified sequence
atggcccagcggtacgacgagctgccccactacggcggcatggacggcgtaggagtccctgccagcatgtacggagatccacatgcccccaggcccatccctcccgtccaccatttaaaccatgggcctccgctccacgcgacacagcattacggcgcccacgctccccatcctaacgtgatgcctgcatcgatgggcagcgctgttaatgatgcacttaaacgggacaaagacgctatctatggtcaccccctctttccattactggccctcgtgttcgagaaatgtgagcttgccacatgcacccctcgtgaaccgggcgtcgccggaggcgacgtctgctcctccgacagcttcaatgaggatatcgctgtgtttgctaagcaggtccgcgccgaaaagccactgttctcctcaaatccggaacttgacaacttgatgatacaggctattcaggtgctccggtttcatctacttgaattggaaaaagttcatgagttgtgtgacaatttctgccatagatatatttcgtgtttaaaaggtaaaatgcccatagacttggttatcgacgagcgcgatggatccagtaagagcgatcacgaggagctgagcggatcttcaaccaatctggccgatcacaatcctagtagttggagggaccacgatgacgctactagcacacactcagctggaactccgggtccatcctcaggaggtcatgcgtcacaatccggagataatagttccgaacaaggagatgggctggataactctgtggccagccccgggactggcgacgatgacgatccagataaagataagaagcgtcagaaaaagcggggcatcttccccaaagtggctaccaacatcatgcgcgcctggctgttccagcacttaactcatccctaccccagcgaagagcagaagaagcagctggctcaggacaccggtctcactatcctccaggttaataattggtttattaacgcacgccgccgtatcgtacagccgatgatcgatcagtcaaatagagcagtgagccagggagcagcttactccccagagggtcaacccatgggttcattcgtcctcgatggacagcaacatatgggaatcagaccagccggactgcagagcatgcctggggattatgtaagccagggcggacccatgggcatgagcatggcccagccatcatacacgcccccccagatgacaccccatccaacccagctaaggcacggtccccctatgcactcatatttacctagtcacccgcatcatcctgccatgatgatgcacggcgggccccctactcatcctgggatgaccatgtcagcacagtcgccaaccatgctgaatagcgtcgatcccaatgtcggcggccaagtcatggatatccacgctcagtag

SEQ ID NO: 247049 - DNA, 1413 bp, Artificial Sequence
  derived and/or modified sequence
atggctcagcggtacgacgagctgcctcattatgggggtatggatggtgttggtgtccccgcatctatgtatggagacccccatgcaccacgcccaattcccccagtgcaccacctaaaccatggaccccctctccatgcaacccagcactacggcgctcatgccccacaccccaatgttatgccagcttccatgggatctgcagtaaatgatgcattaaaaagggacaaagatgccatctatgggcatcctctgtttcccctcctcgcacttgttttcgagaagtgcgaattggctacctgcaccccccgagaacctggcgtcgccggtggcgacgtgtgcagcagcgattccttcaacgaggacatcgccgtgtttgctaagcaagtgcgagccgagaaaccacttttctccagcaatcctgagcttgacaacctaatgattcaggcgattcaagtcctccgctttcacctattggaactcgagaaggtgcacgagctgtgtgataacttctgtcaccgatatataagctgtttgaagggaaaaatgccaatcgatctggtaatagacgaaagggatgggagtagcaagagcgatcatgaggagctcagcggcagttccacgaaccttgctgatcacaatccgtctagttggcgtgaccacgatgatgcgacatccactcactcggccggtacccctggaccttcttcggggggtcacgcaagccagagtggcgataattcttccgagcagggcgacgggctggacaatagcgtggcctccccgggaaccggggatgatgacgaccctgataaggataaaaagcggcagaagaagcgtggcattttcccaaaggtggcaactaatattatgagggcgtggctgtttcaacatcttactcatccatatccatcggaagaacagaagaaacagctcgcccaagatacagggctgaccatactccaggtgaacaactggttcatcaatgccaggcggcgaatcgtgcagcctatgattgaccagagtaaccgcgcagtgagtcagggcgcagcgtattctcccgagggacagcccatggggtcctttgtgctcgacggtcagcagcatatgggtattaggcctgccggactgcagtcaatgcccggtgactacgtgtcccaaggtggcccaatggggatgtctatggctcagcccagctataccccgccacagatgacgcctcaccctacccagctgcgtcacgggccaccaatgcactcgtatctgcctagtcaccctcaccacccagcaatgatgatgcacgggggaccaccgacacatcccggaatgacgatgtcagctcagagccccaccatgttgaactccgtggaccccaatgtgggcggacaagtgatggatatccacgcccagtag

SEQ ID NO: 247050 - DNA, 1413 bp, Artificial Sequence
  derived and/or modified sequence
atggcccagcgctatgatgagctgccgcattatggtggtatggacggagtgggcgtgcccgcatctatgtacggcgatccacatgctccacgccctattccccctgtccatcacctcaatcatggtcctccactacacgcaacacagcattatggcgcacacgccccacatcccaacgttatgcctgctagtatggggtcagcagtcaatgacgcactgaaaagagacaaagacgctatctatggccaccctctcttccctctgctagccttggtgttcgaaaagtgcgagttagccacctgtactcctagggaacccggtgttgctggcggagatgtgtgctcaagtgactctttcaacgaggacatagccgtctttgcgaagcaggttagagccgaaaagcctctgttctcaagtaatccggagttggataacctgatgattcaggctatccaggttttaagattccatctcttagagctggaaaaggtgcacgaactgtgcgacaacttctgtcaccgctacatcagttgtttgaagggtaaaatgcccattgatttagtaattgatgagcgcgatgggtcgtccaagtctgaccatgaagagctatccggttcttctacaaacttggccgatcacaatccctcttcatggcgggaccatgacgatgccacatccacgcacagcgctggcacacccggtccaagcagcggcggacacgcttcccagagcggtgacaacagttccgaacaaggcgacggcttggataacagtgtggctagcccaggcaccggcgatgatgacgatccagataaagacaaaaagagacaaaagaagcggggtatcttcccaaaggtcgcgaccaacataatgcgagcttggctttttcaacacttgacccatccatacccttccgaagagcagaagaaacaactggcacaggacaccggcctgacgatattgcaggtaaataattggtttatcaatgcccgacgtcggatcgtacaaccaatgatcgatcagagcaaccgagccgtgtcccagggcgctgcttattcacccgagggtcaaccaatggggtccttcgtgctggacggacagcagcatatggggatacggcctgcgggtctgcagtccatgccaggcgactacgttagccagggaggccctatgggcatgagtatggcacagccatcttatacccctcctcagatgacacctcaccctacccagttaaggcacggaccacctatgcattcctacctcccatcccacccacaccaccccgcaatgatgatgcatgggggacctcccactcatccagggatgaccatgagcgcgcagagcccaaccatgttaaacagtgtggatcctaatgtcggtggacaggtgatggatattcacgcccagtag

SEQ ID NO: 247051 - DNA, 1413 bp, Artificial Sequence
  derived and/or modified sequence
atggcccagagatacgacgagctgccccactacggcggcatggacggcgtgggcgtgcccgccagcatgtacggcgacccccacgcccccagacccatcccccccgtgcaccacctgaaccacggcccccccctgcacgccacccagcactacggcgcccacgccccccaccccaacgtgatgcccgccagcatgggcagcgccgtgaacgacgccctgaagagagacaaggacgccatctacggccaccccctgttccccctgctggccctggtgttcgagaagtgcgagctggccacctgcacccccagagagcccggcgtggccggcggcgacgtgtgcagcagcgacagcttcaacgaggacatcgccgtgttcgccaagcaggtgagagccgagaagcccctgttcagcagcaaccccgagctggacaacctgatgatccaggccatccaggtgctgagattccacctgctggagctggagaaggtgcacgagctgtgcgacaacttctgccacagatacatcagctgcctgaagggcaagatgcccatcgacctggtgatcgacgagagagacggcagcagcaagagcgaccacgaggagctgagcggcagcagcaccaacctggccgaccacaaccccagcagctggagagaccacgacgacgccaccagcacccacagcgccggcacccccggccccagcagcggcggccacgccagccagagcggcgacaacagcagcgagcagggcgacggcctggacaacagcgtggccagccccggcaccggcgacgacgacgaccccgacaaggacaagaagagacagaagaagagaggcatcttccccaaggtggccaccaacatcatgagagcctggctgttccagcacctgacccacccctaccccagcgaggagcagaagaagcagctggcccaggacaccggcctgaccatcctgcaggtgaacaactggttcatcaacgccagaagaagaatcgtgcagcccatgatcgaccagagcaacagagccgtgagccagggcgccgcctacagccccgagggccagcccatgggcagcttcgtgctggacggccagcagcacatgggcatcagacccgccggcctgcagagcatgcccggcgactacgtgagccagggcggccccatgggcatgagcatggcccagcccagctacacccccccccagatgaccccccaccccacccagctgagacacggcccccccatgcacagctacctgcccagccacccccaccaccccgccatgatgatgcacggcggcccccccacccaccccggcatgaccatgagcgcccagagccccaccatgctgaacagcgtggaccccaacgtgggcggccaggtgatggacatccacgcccagtag

SEQ ID NO: 247052 - protein, 401 aa, Artificial Sequence
  derived and/or modified sequence
MAQRYDELPHYGGMDGVGVPASMYGDPHAPRPIPPVHHLNHGPPLHATQHYGAHAPHPNVMPASMGSAVNDALKRDKDAIYGHPLFPLLALVFEKCELATCTPREPGVAGGDVCSSDSFNEDIAVFAKQVRAEKPLFSSNPELDNLMIQAIQVLRFHLLELEKVHELCDNFCHRYISCLKGKMPIDLVIDERDGSSKSDHEELSGSSTNLADHNPSSWRDHDDATSTHSAGTPGPSSGGHASQSGDNSSEQGDGLDNSVASPGTGDDDDPDKDKKRQKKRGIFPKVATNIMRAWLFQHLTHPYPSEEQKKQLAQDTGLTILQVNNWFINARRRIVQPMIDQSNRAGFLLDPSVSQGAAYSPEGQPMGSFVLDGQQHMGIRPAGPMSGMGMNMGMDGQWHYM

SEQ ID NO: 247053 - protein, 388 aa, Artificial Sequence
  derived and/or modified sequence
MDGVGVPASMYGDPHAPRPIPPVHHLNHGPPLHATQHYGAHAPHPNVMPASMGSAVNDALKRDKDAIYGHPLFPLLALVFEKCELATCTPREPGVAGGDVCSSDSFNEDIAVFAKQVRAEKPLFSSNPELDNLMIQAIQVLRFHLLELEKVHELCDNFCHRYISCLKGKMPIDLVIDERDGSSKSDHEELSGSSTNLADHNPSSWRDHDDATSTHSAGTPGPSSGGHASQSGDNSSEQGDGLDNSVASPGTGDDDDPDKDKKRQKKRGIFPKVATNIMRAWLFQHLTHPYPSEEQKKQLAQDTGLTILQVNNWFINARRRIVQPMIDQSNRAGFLLDPSVSQGAAYSPEGQPMGSFVLDGQQHMGIRPAGPMSGMGMNMGMDGQWHYM

SEQ ID NO: 247054 - DNA, 1206 bp, Artificial Sequence
  derived and/or modified sequence
atggctcagaggtatgatgagctgccacactacggaggaatggacggggtgggcgtcccagcttccatgtatggggatccgcacgcgcccagacctatacctccagtgcatcacttaaatcacggcccccctttgcacgcaactcagcactacggagcccatgctccacaccctaatgtgatgccagcttcaatgggtagcgctgttaatgacgcgttaaaacgggacaaggacgctatctatggccatccactgtttcccctcctcgccctagtcttcgagaaatgcgagctcgccacttgcacccctcgcgaaccaggcgtggccggaggggatgtgtgctcatctgattcttttaatgaggatattgccgtgtttgcaaagcaagtgcgggcagaaaagccgcttttctcctcaaaccccgaactggataacctgatgattcaggccatccaagtcctccgttttcatcttctggagctggaaaaggtccacgaactttgtgacaacttttgccataggtacatttcttgcctcaaaggaaagatgccaatcgacctggtgatcgatgaacgtgatggctccagcaaaagcgatcacgaagaactttccggcagttcaacaaacctggcagaccataatcctagctcttggcgggatcatgacgacgccacttccacacacagcgcaggcacacctgggccatcaagcggaggccatgctagccaaagcggagacaacagttctgagcaaggcgatggcctggataacagtgtggccagcccaggcaccggcgacgatgacgatcccgacaaggacaaaaaaaggcagaaaaagcgggggatatttcctaaagtcgctaccaatataatgagggcctggctctttcaacatctcacccacccatatcctagtgaagaacagaagaagcagctggcacaggatactgggctgaccatcctgcaagtgaataactggttcattaacgctcggcgccggatcgtgcagcccatgatcgaccagtccaaccgcgccggcttcttgctcgatccttcagtcagtcagggcgcagcctactcgccggaaggacagcctatgggatctttcgtgctggatggccagcagcacatgggcattaggcccgctggacccatgtcaggtatgggcatgaacatgggaatggacgggcaatggcactacatgtag

SEQ ID NO: 247055 - DNA, 1206 bp, Artificial Sequence
  derived and/or modified sequence
atggcccagagatatgatgagctgccccactatggaggcatggatggagtgggcgtgcctgcctccatgtacggggacccccacgccccccggcccatcccccctgtgcaccacctgaaccacggcccccccctgcacgccacccagcactatggagcccacgccccccaccccaacgtgatgcctgcctccatgggcagcgctgtgaatgatgccctgaagagggacaaggatgccatctacggccaccccctcttccccctgctggccctggtgtttgagaagtgtgagctggccacctgcaccccccgggagcccggggtggccggaggagatgtgtgcagcagtgacagcttcaatgaagatattgctgtgtttgccaagcaggtgcgggcagagaagcccctcttcagcagcaaccctgagctggacaacctgatgatccaggccatccaggtgctgcgcttccacctgctggagctggagaaggtgcatgagctgtgtgacaacttctgccaccgctacatcagctgcctgaagggcaagatgcccatcgacctggtgattgatgaaagagatggcagcagcaagagtgaccacgaggagctgagcggcagcagcaccaacctggccgaccacaaccccagctcctggagggaccatgatgatgccaccagcacccacagcgctggcaccccaggccccagcagcggcggccacgccagccagagcggggacaacagcagcgagcagggagatggcctggacaacagcgtggccagccctggcactggagatgatgatgatcctgacaaggacaagaagaggcagaagaagaggggcatcttccccaaggtggccaccaacatcatgagggcctggctgttccagcacctgacccacccctaccccagcgaggagcagaagaagcagctggcccaggacaccggcctgaccatcctgcaggtgaacaactggttcatcaatgcccggcggcgcatcgtgcagcccatgattgaccagagcaacagagctggcttcctgctggaccccagcgtgtcccagggcgccgcctacagccctgagggccagcccatgggcagctttgtgctggatggccagcagcacatgggcatccggcctgctggccccatgagcggcatgggcatgaacatgggcatggatggccagtggcactacatgtag

SEQ ID NO: 247056 - DNA, 1206 bp, Artificial Sequence
  derived and/or modified sequence
atggcccagcggtacgacgagctgccccactacggcggcatggacggagttggcgtacctgcctcaatgtatggcgatccccatgcaccccggccaattcctcctgtacaccacctgaatcatggccccccactccatgcgactcagcactatggtgctcacgcaccacatcccaacgttatgccagcctctatgggatcagctgtgaacgacgcccttaaaagagataaggatgctatctatggccaccctctcttcccactgctggctctcgtgttcgagaagtgtgaattggctacatgcaccccccgagaacctggagtagcaggaggagatgtctgctcttctgactcatttaatgaagacatcgcggtattcgctaaacaagttcgggcagagaagccattgttctcttcaaaccccgagcttgacaatctgatgatacaggccatccaggtgctgagatttcatctgctggaattagaaaaagtgcatgagctttgcgacaatttctgtcaccgctacatatcatgtctgaagggcaagatgccaattgatctcgtcatcgacgagcgggatggcagttccaaatctgaccacgaggagctctctggctcgtcgacaaatctggccgatcataatccctcttcatggagagatcacgacgatgccacatcaacccactccgctggtactcctgggccttctagcggcgggcacgcttcgcagtccggtgataactcatctgaacagggtgacggtttagacaattcggtggcgagccctggtacaggtgatgatgatgatcccgacaaggacaagaagcggcagaaaaaacgaggcatttttcccaaggtcgcaacaaacatcatgcgggcctggctgtttcaacacttgacgcatccttaccccagtgaggagcagaagaaacagctggcccaggacactgggctgactatactgcaagtgaacaactggtttatcaatgcaagacgtcgtatcgttcagcccatgattgaccagtctaatagggccgggtttttgctggacccaagcgtgtcccagggcgctgcttatagcccagaaggccagccaatgggaagcttcgtgctggatggacagcagcacatggggatccgacccgcagggccgatgtccggtatgggtatgaacatgggaatggacggacagtggcactacatgtag

SEQ ID NO: 247057 - DNA, 1206 bp, Artificial Sequence
  derived and/or modified sequence
atggcacagcggtacgacgaactaccccattatgggggaatggatggcgtgggggttcctgccagcatgtatggcgacccgcatgcgccacgccctatcccccctgtgcaccatttaaaccacggcccacccctacatgcaacccagcattatggtgctcacgccccacaccctaacgtcatgccggcttccatgggaagtgcggttaatgacgccctgaaaagagataaggacgccatttacggacaccctttgtttcctctgctcgctctggtttttgagaagtgtgaactcgccacttgcaccccaagagaaccgggagttgcaggtggcgacgtttgctccagtgattcgttcaatgaagacattgccgtcttcgctaagcaggtgcgcgcagaaaaacctcttttctcctctaaccctgagttagataacctgatgatccaggctattcaagtgcttcgcttccatctgttggagctggagaaggtgcatgaactgtgtgacaatttctgccaccgatatatttcctgcctgaaaggcaagatgcctatcgatttagttatcgacgagagggacggaagtagtaagagtgatcatgaggaactttctggttcatccactaatttggcagatcataatccctcctcttggagagatcatgatgatgccacctcaactcattccgctgggacacccggtccatcaagtgggggacacgctagtcagtctggggacaattcttcggagcagggcgatgggttggacaatagcgtggcatctcctggcactggagacgatgacgaccccgacaaagacaagaaacgacaaaagaaaaggggaattttccccaaagtggctactaacattatgcgggcttggctctttcagcacctgacgcacccttatccgagtgaagaacaaaagaaacagctggctcaagataccggactcaccatcctgcaagttaacaactggttcatcaatgctcgaagacgcatagtacaacctatgatcgatcagtctaaccgtgccggtttcctgctggacccatcagtgtcgcagggcgctgcctactctcctgaggggcaacccatgggctcctttgtgctggacgggcagcagcacatggggattcgcccagcaggtcctatgagcgggatgggtatgaacatgggaatggacggccaatggcactacatgtag

SEQ ID NO: 247058 - DNA, 1206 bp, Artificial Sequence
  derived and/or modified sequence
atggcccagagatacgacgagctgccccactacggcggcatggacggcgtgggcgtgcccgccagcatgtacggcgacccccacgcccccagacccatcccccccgtgcaccacctgaaccacggcccccccctgcacgccacccagcactacggcgcccacgccccccaccccaacgtgatgcccgccagcatgggcagcgccgtgaacgacgccctgaagagagacaaggacgccatctacggccaccccctgttccccctgctggccctggtgttcgagaagtgcgagctggccacctgcacccccagagagcccggcgtggccggcggcgacgtgtgcagcagcgacagcttcaacgaggacatcgccgtgttcgccaagcaggtgagagccgagaagcccctgttcagcagcaaccccgagctggacaacctgatgatccaggccatccaggtgctgagattccacctgctggagctggagaaggtgcacgagctgtgcgacaacttctgccacagatacatcagctgcctgaagggcaagatgcccatcgacctggtgatcgacgagagagacggcagcagcaagagcgaccacgaggagctgagcggcagcagcaccaacctggccgaccacaaccccagcagctggagagaccacgacgacgccaccagcacccacagcgccggcacccccggccccagcagcggcggccacgccagccagagcggcgacaacagcagcgagcagggcgacggcctggacaacagcgtggccagccccggcaccggcgacgacgacgaccccgacaaggacaagaagagacagaagaagagaggcatcttccccaaggtggccaccaacatcatgagagcctggctgttccagcacctgacccacccctaccccagcgaggagcagaagaagcagctggcccaggacaccggcctgaccatcctgcaggtgaacaactggttcatcaacgccagaagaagaatcgtgcagcccatgatcgaccagagcaacagagccggcttcctgctggaccccagcgtgagccagggcgccgcctacagccccgagggccagcccatgggcagcttcgtgctggacggccagcagcacatgggcatcagacccgccggccccatgagcggcatgggcatgaacatgggcatggacggccagtggcactacatgtag

SEQ ID NO: 247059 - protein, 163 aa, Artificial Sequence
  derived and/or modified sequence
MPSIKLQSSDGEIFEVDVEIAKQSVTIKTMLEDLGMDDEGDDDPVPLPNVNAAILKKVIQWCTHHKDDPPPPEDDENKEKRTDDIPVWDQEFLKVDQGTLFELILAANYLDIKGLLDVTCKTVANMIKGKTPEEIRKTFNIKNDFTEEEEAQVRKENQWCEEK

SEQ ID NO: 247060 - protein, 18 aa, Artificial Sequence
  derived and/or modified sequence
MPSIKLQSSDGEIFEVDV

SEQ ID NO: 247061 - DNA, 492 bp, Artificial Sequence
  derived and/or modified sequence
atgcccagcatcaagctgcagagcagcgacggcgagatcttcgaggtggacgtggagatcgccaagcagagcgtgaccatcaagaccatgctggaggacctgggcatggacgacgagggcgacgacgaccccgtgcccctgcccaacgtgaacgccgccatcctgaagaaggtgatccagtggtgcacccaccacaaggacgacccccccccccccgaggacgacgagaacaaggagaagagaaccgacgacatccccgtgtgggaccaggagttcctgaaggtggaccagggcaccctgttcgagctgatcctggccgccaactacctggacatcaagggcctgctggacgtgacctgcaagaccgtggccaacatgatcaagggcaagacccccgaggagatcagaaagaccttcaacatcaagaacgacttcaccgaggaggaggaggcccaggtgagaaaggagaaccagtggtgcgaggagaagtag

SEQ ID NO: 247062 - DNA, 2018 bp, Artificial Sequence
  derived and/or modified sequence
agcccagccgcgatgtgacgccgcgcgccccggggtcctcggcgcctgcgccctctcctataaagcagacgccgcgccgcgctgcgacgctgtagtggcttcgtcttcggtttttctcttccttcgctaacgcctcccggctctcgtcagcctcccgccggccgtctccttaacaccgaacaccatgccttcaattaagttgcagagttctgatggagagatatttgaagttgatgtggaaattgccaaacaatctgtgactattaagaccatgttggaagatttgggaatggatgatgaaggagatgatgacccagttcctctaccaaatgtgaatgcagcaatattaaaaaaggtcattcagtggtgcacccaccacaaggatgaccctcctcctcctgaagatgatgagaacaaagaaaagcgaacagatgatatccctgtttgggaccaagaattcctgaaagttgaccaaggaacactttttgaactcattctggctgcaaactacttagacatcaaaggtttgcttgatgttacatgcaagactgttgccaatatgatcaaggggaaaactcctgaggagattcgcaagaccttcaatatcaaaaatgactttactgaagaggaggaagcccaggtacgcaaagagaaccagtggtgtgaagagaagtgaaatgttgtgcctgacactgtaacactgtaaggattgttccaaatactagttgcactgctctgtttataattgttaatattagacaaacagtagacaaatgcagcagcaagtcaattgtattagcagaatattgtcctcattgcatgtgtagtttgagcacagatcccaaaccttacggccaagtttcttctagtatgatggaaagtttcttttttctttgctctgaataaaactgaactgtgggttctctataagtggcattttgggctttccctcttttttgtaaagcaatgtctgcctagtttattgtccagttaactttagtgaccttttaaaagttggcattgtaaataaaacaacttgcaaaaaagttttctggaatagaattaacaaaatattatctttattcatgagttggaaactggaaaaaggcttcttgaagtaaatgttctgagtggagctactaggatgtcttccagcctcctgcagtcaaggagtaccactgtattgattagcctgtatgtagcagggctcccttcattgcatctgaggacttgttttctttttctttatttttaatcctcttagttttaaatatattgcctagagactcagttactacccagtttgtggttttttgggagaaatgtaactggacagttagcttttcaattaaaaagacacttaacccatgtgggatgtcatctttttataattagtgttcccatgtggagaaaattattcacactacttgcatgtaaagaataatttaacttttaacattaaaatatgtggtaaaacccagaaagcatccatcatgaatgcaagatactttcaataaaaagtaagttatatagtaggtagttaagtttgcttttgtggacttaaatgtgtctcttcacttaaatgggttgaatgtgtatatatttgttcagcttgaaaagacttagtttatatcctagctcactggaggctgctgacataaccataacttctgtcccttctaattgtcatttatatgcctaactggagctagtactttaattcttaacacaaaattactctgccattgtttccagcttccctcctacaatagaatgaagtttttttgatggcttgagatggctcacaaattttgatttttttttcttccttgtgctccctttttttctccttgcttttccagttaacatctatattcacatgtaatcttgttttctcttcacattcactgagttgttcaggctcagatcatcccttgacagtagtttgccttcatctcacctttcatttgtcccaaattcaccttatttaataaagtcccatatgttgtctcacttaa

SEQ ID NO: 247063 - DNA, 492 bp, Artificial Sequence
  derived and/or modified sequence
atgccgtcaatcaagctccagagttccgacggcgagatattcgaagtggatgtggagatcgccaagcagtcagtcaccattaagactatgttggaggacctgggcatggatgatgagggagatgacgatcccgtgcctttgcctaacgtgaatgctgccattctgaagaaggtgatccagtggtgtacccatcataaagacgaccctccacctcccgaggatgatgagaataaagagaagagaacggatgatatacccgtgtgggaccaggagtttctgaaagtggaccagggaacattattcgagctgatcctggccgctaactacctggacattaaggggctgcttgacgtcacctgcaaaactgttgccaatatgatcaagggtaaaactccggaagagatccgcaaaaccttcaacattaagaatgacttcaccgaggaggaggaggcccaggtccggaaagagaatcaatggtgtgaagagaagtag

SEQ ID NO: 247064 - DNA, 492 bp, Artificial Sequence
  derived and/or modified sequence
atgcccagtatcaagctccagagctcagatggcgaaatctttgaagttgacgttgagatcgctaaacagtcagtgactattaaaacaatgctggaggacctcggcatggacgacgaaggcgacgatgatccggtccccctgcctaatgtcaatgcagcaatcctgaagaaagtgatacagtggtgtactcatcataaggatgacccgcctccccctgaggatgatgaaaacaaagaaaaacggacagacgacattccagtctgggaccaggagttcctgaaggtagaccagggcacgcttttcgaactcatcctcgctgccaattatcttgatatcaagggtctgctggacgtgacatgtaagacagtcgccaatatgattaaaggtaagacgcctgaagagataagaaagacctttaatatcaaaaacgattttaccgaagaagaggaagcccaagtaagaaaggaaaaccaatggtgcgaagaaaaatag

SEQ ID NO: 247065 - DNA, 492 bp, Artificial Sequence
  derived and/or modified sequence
atgccttctattaagctgcaaagttccgacggcgagatatttgaagtggacgtcgagattgccaaacagtcggtgaccataaaaactatgctggaggacctcgggatggatgatgagggcgacgacgaccctgttccactcccaaatgttaacgccgccatcctaaagaaggtaatacagtggtgtactcatcacaaagatgatcctcctccccctgaagacgacgaaaataaggagaagaggaccgacgatatacccgtctgggatcaggagtttctcaaggtggatcaagggacattgttcgagctgattttggccgcaaactatctcgacattaaggggctactggatgttacctgcaagacagtggcgaacatgatcaagggcaagacccctgaggaaatccggaagacatttaacatcaaaaatgatttcacagaggaagaggaggcccaggtcagaaaggagaatcagtggtgcgaggagaaatag

SEQ ID NO: 247066 - DNA, 492 bp, Artificial Sequence
  derived and/or modified sequence
atgcccagcatcaagctgcagagcagtgatggagagatctttgaggtggatgtggagatcgccaagcagagcgtgaccatcaagaccatgctggaggacctgggcatggatgatgaaggagatgatgatcctgtgcccctgcccaacgtgaatgctgccatcctgaagaaggtgatccagtggtgcacccaccacaaggatgatcctcctcctccagaagatgatgagaacaaggagaagaggacagatgacatccctgtgtgggaccaggagttcctgaaggtggaccagggcaccctgtttgagctgatcctggccgccaactacctggacatcaagggcctgctggatgtgacctgcaagacagtggccaacatgatcaagggcaagaccccagaggagatcaggaagaccttcaacatcaagaatgacttcacagaggaggaggaggcccaggtgaggaaggagaaccagtggtgtgaggagaagtag

SEQ ID NO: 247067 - DNA, 492 bp, Artificial Sequence
  derived and/or modified sequence
atgcccagcatcaagctgcagagcagcgacggcgagatcttcgaggttgatgtagagattgccaaacaatctgtgacaatcaaaaccatgttagaggacctgggaatggacgacgagggcgatgatgatccggtgccattacccaacgtcaacgccgcaatcctcaagaaggtcattcaatggtgtactcaccacaaggatgatccgcccccacctgaggatgacgaaaacaaggagaagcgtactgatgatattcctgtctgggatcaagagttcctgaaggttgatcagggcacgttgttcgagctgattctggcggcaaattatttggatatcaagggcctgcttgacgtgacatgcaaaacagtagcgaatatgataaaagggaaaacccccgaagaaatacgaaagacatttaacatcaaaaacgactttacggaagaggaggaggctcaagtgagaaaagaaaaccagtggtgcgaggaaaaatag

SEQ ID NO: 247068 - DNA, 492 bp, Artificial Sequence
  derived and/or modified sequence
atgcccagcatcaagctgcagagcagcgacggcgagatcttcgaggttgatgtggaaattgctaaacaaagtgttacaatcaagaccatgctcgaggatcttggcatggatgacgaaggggacgacgacccagtccccttgcccaatgtgaatgccgctattttgaagaaggtgatccagtggtgcacacaccacaaggatgacccacctccacccgaggacgatgaaaataaggagaagcggactgacgacatcccagtgtgggaccaagaatttctaaaagtggatcaggggacactctttgaactgattctggcagcgaattacctggatataaagggcctcctcgacgtgacatgcaagactgttgcaaatatgatcaagggaaagacccccgaggaaatacgaaagacttttaatattaaaaacgacttcacagaagaagaagaggcacaggtcaggaaggaaaaccagtggtgcgaggaaaagtag

SEQ ID NO: 247069 - DNA, 492 bp, Artificial Sequence
  derived and/or modified sequence
atgcccagcatcaagctgcagagcagcgacggcgagatcttcgaggtggacgttgaaattgccaaacagagcgtgaccattaaaacaatgctggaggacctggggatggacgatgaaggcgacgacgaccctgtcccactgcctaacgttaatgcagccattctgaaaaaggtaatccagtggtgtacacaccataaagatgatcctccccccccagaggatgacgagaataaggaaaaaaggacagatgatattccagtgtgggatcaggaattcctgaaggtggaccagggcacactgttcgagctgatactggcagccaattatttggacattaagggcttgttggacgttacttgcaagaccgtcgctaatatgatcaagggaaagactcctgaagaaattcgcaaaacattcaacatcaagaatgacttcacagaggaagaggaggctcaggtgcgtaaagaaaaccaatggtgtgaggagaagtag

SEQ ID NO: 247070 - DNA, 492 bp, Artificial Sequence
  derived and/or modified sequence
atgccatctattaagctgcagtcttctgatggcgaaatatttgaggtggatgttgagatcgccaaacagtctgtaacaataaaaactatgctggaggaccttggaatggacgacgagggcgacgatgaccccgtccccctaccgaatgtaaacgccgctattctgaaaaaggtgatccaatggtgtacgcatcataaggatgacccccctcctccagaagacgatgagaataaggagaagcgcacagacgacatccccgtctgggatcaagagtttctcaaggtggatcagggcactcttttcgagcttattttagccgctaactacctcgacattaagggactgctggatgtgacatgtaaaactgtcgctaacatgatcaagggcaaaactcctgaagagatccgcaaaacctttaacatcaagaatgatttcactgaggaggaagaggcccaggtgaggaaggagaaccagtggtgcgaagagaagtag

SEQ ID NO: 247071 - DNA, 492 bp, Artificial Sequence
  derived and/or modified sequence
atgccatctatcaagctgcagtctagtgatggcgaaatcttcgaggtggacgtggaaatcgctaagcagtctgtcacaatcaagacaatgttggaggatttgggcatggacgatgaaggcgacgacgaccccgtgcctctaccaaatgttaatgccgctattcttaagaaggtaattcaatggtgtacacatcataaagatgaccctcccccacccgaggacgacgagaacaaggaaaagagaacggatgatatacccgtttgggaccaggaatttctcaaagttgaccagggtaccctgttcgagcttattcttgccgcaaactatctggacattaaaggcctcctggacgtgacgtgtaagacagtggccaacatgattaaaggtaagacgccggaagaaatacgcaaaaccttcaatattaaaaacgacttcaccgaggaggaggaggctcaggtgcgcaaagaaaaccaatggtgcgaggaaaagtag

SEQ ID NO: 247072 - DNA, 492 bp, Artificial Sequence
  derived and/or modified sequence
atgccatccattaagctccagtcttccgacggggagattttcgaggtggacgtggagattgccaaacagtcagtgaccatcaagaccatgctggaggacctagggatggatgatgagggcgacgatgatcctgtgcccctgcccaatgtgaacgcagcgatccttaagaaggtgattcagtggtgcacacaccataaggatgaccctccaccaccggaggacgacgaaaacaaggaaaagcggactgatgacattccagtctgggaccaggaattccttaaagtggaccagggcacgctttttgaactcatcctcgcggcaaactacctggatatcaaaggcttattagacgtgacctgtaagaccgtggctaatatgatcaaaggcaagacccccgaagagatccggaagacatttaatatcaagaatgacttcaccgaggaggaggaagcccaagtgcgcaaggaaaatcaatggtgcgaagagaagtag

SEQ ID NO: 247073 - DNA, 876 bp, Artificial Sequence
  derived and/or modified sequence
gttgtcgaccctgttcttcgggagaccctaccaggttccgttcacctgccccgcccccgactcagcgaggcctcctctggccgggcgtcctcacggcgctccataaacataaatgagcatattctgatgtactctttggatctgaactcatcttcacagatgccttcaattaagttgcagagttctgatggagagatatttgaagttgatgtggaaattgccaaacaatctgtgactattaagaccatgttggaagatttgggaatggatgatgaaggagatgatgacccagttcctctaccaaatgtgaatgcagcaatattaaaaaaggtcattcagtggtgcacccaccacaaggatgaccctcctcctcctgaagatgatgagaacaaagaaaagcgaacagatgatatccctgtttgggaccaagaattcctgaaagttgaccaaggaacactttttgaactcattctggctgcaaactacttagacatcaaaggtttgcttgatgttacatgcaagactgttgccaatatgatcaaggggaaaactcctgaggagattcgcaagaccttcaatatcaaaaatgactttactgaagaggaggaagcccaggtacgcaaagagaaccagtggtgtgaagagaagtgaaatgttgtgcctgacactgtaacactgtaaggattgttccaaatactagttgcactgctctgtttataattgttaatattagacaaacagtagacaaatgcagcagcaagtcaattgtattagcagaatattgtcctcattgcatgtgtagtttgagcacagatcccaaaccttacggccaagtttcttctagtatgatggaaagtttcttttttctttgctctg

SEQ ID NO: 247074 - DNA, 802 bp, Artificial Sequence
  derived and/or modified sequence
gctgtagtggcttcgtcttcggtttttctcttccttcgctaacgcctcccggctctcgtcagcctcccgccggccgtctccttaacaccgaacaccacataaatgagcatattctgatgtactctttggatctgaactcatcttcacagatgccttcaattaagttgcagagttctgatggagagatatttgaagttgatgtggaaattgccaaacaatctgtgactattaagaccatgttggaagatttgggaatggatgatgaaggagatgatgacccagttcctctaccaaatgtgaatgcagcaatattaaaaaaggtcattcagtggtgcacccaccacaaggatgaccctcctcctcctgaagatgatgagaacaaagaaaagcgaacagatgatatccctgtttgggaccaagaattcctgaaagttgaccaaggaacactttttgaactcattctggctgcaaactacttagacatcaaaggtttgcttgatgttacatgcaagactgttgccaatatgatcaaggggaaaactcctgaggagattcgcaagaccttcaatatcaaaaatgactttactgaagaggaggaagcccaggtacgcaaagagaaccagtggtgtgaagagaagtgaaatgttgtgcctgacactgtaacactgtaaggattgttccaaatactagttgcactgctctgtttataattgttaatattagacaaacagtagacaaatgcagcagcaagtcaattgtattagcagaatattgtcctcattgcatgtgtagtttgagcaca

SEQ ID NO: 247075 - protein, 471 aa, Artificial Sequence
  derived and/or modified sequence
MAAAQPKYPAGATARRLARGCWSALWDYETPKVIVVRNRRLGVLYRAVQLLILLYFVWYVFIVQKSYQESETGPESSIITKVKGITTSEHKVWDVEEYVKPPEGGSVFSIITRVEATHSQTQGTCPESIRVHNATCLSDADCVAGELDMLGNGLRTGRCVPYYQGPSKTCEVFGWCPVEDGASVSQFLGTMAPNFTILIKNSIHYPKFHFSKGNIADRTDGYLKRCTFHEASDLYCPIFKLGFIVEKAGESFTELAHKGGVIGVIINWDCDLDLPASECNPKYSFRRLDPKHVPASSGYNFRFAKYYKINGTTTRTLIKAYGIRIDVIVHGQAGKFSLIPTIINLATALTSVGVGSFLCDWILLTFMNKNKVYSHKKFDKVCTPSHPSGSWPVTLARVLGQAPPEPGHRSEDQHPSPPSGQEGQQGAECGPAFPPLRPCPISAPSEQMVDTPASEPAQASTPTDPKGLAQL

SEQ ID NO: 247076 - DNA, 1416 bp, Artificial Sequence
  derived and/or modified sequence
atggccgccgcccagcccaagtaccccgccggcgccaccgccagaagactggccagaggctgctggagcgccctgtgggactacgagacccccaaggtgatcgtggtgagaaacagaagactgggcgtgctgtacagagccgtgcagctgctgatcctgctgtacttcgtgtggtacgtgttcatcgtgcagaagagctaccaggagagcgagaccggccccgagagcagcatcatcaccaaggtgaagggcatcaccaccagcgagcacaaggtgtgggacgtggaggagtacgtgaagccccccgagggcggcagcgtgttcagcatcatcaccagagtggaggccacccacagccagacccagggcacctgccccgagagcatcagagtgcacaacgccacctgcctgagcgacgccgactgcgtggccggcgagctggacatgctgggcaacggcctgagaaccggcagatgcgtgccctactaccagggccccagcaagacctgcgaggtgttcggctggtgccccgtggaggacggcgccagcgtgagccagttcctgggcaccatggcccccaacttcaccatcctgatcaagaacagcatccactaccccaagttccacttcagcaagggcaacatcgccgacagaaccgacggctacctgaagagatgcaccttccacgaggccagcgacctgtactgccccatcttcaagctgggcttcatcgtggagaaggccggcgagagcttcaccgagctggcccacaagggcggcgtgatcggcgtgatcatcaactgggactgcgacctggacctgcccgccagcgagtgcaaccccaagtacagcttcagaagactggaccccaagcacgtgcccgccagcagcggctacaacttcagattcgccaagtactacaagatcaacggcaccaccaccagaaccctgatcaaggcctacggcatcagaatcgacgtgatcgtgcacggccaggccggcaagttcagcctgatccccaccatcatcaacctggccaccgccctgaccagcgtgggcgtgggcagcttcctgtgcgactggatcctgctgaccttcatgaacaagaacaaggtgtacagccacaagaagttcgacaaggtgtgcacccccagccaccccagcggcagctggcccgtgaccctggccagagtgctgggccaggccccccccgagcccggccacagaagcgaggaccagcaccccagcccccccagcggccaggagggccagcagggcgccgagtgcggccccgccttcccccccctgagaccctgccccatcagcgcccccagcgagcagatggtggacacccccgccagcgagcccgcccaggccagcacccccaccgaccccaagggcctggcccagctgtag

SEQ ID NO: 247077 - DNA, 1416 bp, Artificial Sequence
  derived and/or modified sequence
atggccgctgcccaacctaagtacccagctggggctacggcccggcgtctagcgcgtggctgttggagcgctttgtgggattacgaaacacccaaggtaatcgtggtgcgcaaccgccggctgggggtcttatatcgcgctgtgcagctgctgatcttactttatttcgtgtggtacgtgtttatagtacaaaaaagctaccaggagagcgagaccggcccagaaagttcaataattacaaaggtaaaagggatcaccacctcagagcataaggtttgggatgtcgaagagtatgtgaagccacccgaaggaggctcagtctttagcatcattacccgggtcgaggccacacacagccagacccaggggacctgtcctgagagtatcagagtccataacgctacctgtctgtctgatgctgattgcgtcgcaggtgagctcgatatgcttggaaatggattgaggacagggcgttgcgtgccctactatcagggaccctccaaaacctgtgaagtcttcggttggtgcccagtggaggatggggcatcagtgagccagttcctgggcaccatggcacccaattttactatcctaataaaaaacagcatccactatccaaagtttcacttcagcaaaggcaacatcgcagatcgaacagatgggtatctcaagcgttgtacatttcatgaggcttctgatttgtattgccccatcttcaagttaggctttatcgtcgagaaagcaggcgaatcatttacagagttagctcataagggtggcgtaatcggcgtgattataaattgggactgtgatttggatctccctgccagtgagtgcaatccgaagtacagtttccggcgcttggaccccaagcacgtgcctgctagcagcgggtacaactttcggttcgcgaaatactacaagataaacgggaccaccactcgaaccctgatcaaagcgtatgggattagaattgatgtgatagtacatggccaggccggcaagttttcactaattcctaccattatcaacctggcaacagccctgacctccgtgggtgtgggaagctttctttgtgactggattctcctcacctttatgaataaaaacaaggtttactcccataagaagtttgacaaggtctgcacaccctctcatccgagtggatcttggccagtgacactggcgcgagtgctgggtcaggcaccccctgagcctggacacaggagcgaggatcagcacccctctcccccctccggtcaggaagggcagcaaggcgcagagtgtgggcctgcatttcctcccttacggccttgtccaattagtgctccgagtgaacagatggtcgatacccccgcctccgagccagctcaggcaagtacccccaccgaccctaagggactggcccaactgtag

SEQ ID NO: 247078 - DNA, 1416 bp, Artificial Sequence
  derived and/or modified sequence
atggctgctgcccagcccaagtacccagctggggccacagcccggcggctggcccggggctgctggagcgccctgtgggactatgagacccccaaggtgattgtggtgaggaacagaaggctgggcgtgctgtacagagctgtgcagctgctgatcctgctgtactttgtgtggtacgtgttcatcgtgcagaagagctaccaggagagcgagaccggccctgagagcagcatcatcaccaaggtgaagggcatcaccaccagcgagcacaaggtgtgggatgtggaggagtatgtgaagcccccagagggcggcagcgtcttcagcatcatcaccagggtggaggccacccacagccagacccagggcacctgcccagagagcatccgggtgcacaatgccacctgcctgagtgatgctgactgtgtggccggggagctggacatgctgggcaatggcctgaggacaggccgctgtgtgccctactaccagggccccagcaagacctgtgaggtgtttggctggtgccctgtggaggatggagcctctgtgtcccagttcctgggcaccatggcccccaacttcaccatcctgatcaagaacagcatccactaccccaagttccacttcagcaagggcaacattgctgacagaacagatggctacctgaagcgctgcaccttccacgaggccagtgacctgtactgccccatcttcaagctgggcttcatcgtggagaaggccggggagagcttcacagagctggcccacaagggcggcgtcatcggggtcatcatcaactgggactgtgacctggacctgcctgccagcgagtgcaaccccaagtacagcttccggcggctggaccccaagcacgtgcctgccagcagcggctacaacttccgctttgccaagtactacaagatcaatggcaccaccaccaggaccctcatcaaggcctacggcatcagaattgatgtgattgtgcacggccaggccggcaagttcagcctcatccccaccatcatcaacctggccacagccctgacctctgtgggcgtgggcagcttcctgtgtgactggatcctgctgaccttcatgaacaagaacaaggtgtacagccacaagaagtttgacaaggtgtgcacccccagccaccccagcggctcctggcctgtgaccctggcccgggtgctgggccaggcccctcctgagcccggccacagaagtgaggaccagcaccccagccccccatctggccaggagggccagcagggcgcagaatgtggccctgccttcccccccctgcggccctgccccatcagcgcccccagcgagcagatggtggacaccccagccagcgagcccgcccaggccagcacccccacagaccccaagggcctggcccagctgtag

SEQ ID NO: 247079 - DNA, 1416 bp, Artificial Sequence
  derived and/or modified sequence
atggccgccgcccagcccaagtaccccgccggcgccaccgcccggcgcttagcaagagggtgctggtctgctctgtgggactacgagactccaaaagttattgtggtacggaaccgaaggctgggggtcctgtacagggccgtccagcttcttattctcctatatttcgtgtggtacgtgttcatagtgcaaaagagctaccaggaaagtgagacaggtcccgagtcatctattattaccaaagttaagggtatcaccaccagtgagcacaaggtgtgggacgtggaagaatacgtaaaacctcctgaaggcggatccgtattttcaattatcactcgcgtagaagccactcactcacaaacacagggcacatgtcctgaatcaatacgtgtccacaacgcgacatgcctgagcgacgccgactgtgtggcaggggagctggatatgctggggaatggattgagaaccgggcgttgcgttccctattatcagggaccatccaagacatgcgaggtctttggctggtgcccagtggaggatggagcatctgtttcccagttcctgggcacaatggcccctaacttcacaattctgatcaagaactctattcattacccgaaattccatttttcaaaggggaacatagccgataggaccgatggctacctaaagaggtgcactttccacgaagcctccgacctgtattgtcctatcttcaagcttggattcattgttgagaaagcaggagagtccttcactgagctcgctcataaagggggcgtgatcggcgtgatcataaactgggattgtgacttagatttgccggcctccgagtgcaatccaaaatatagtttccggcggttagatccaaaacatgtaccagccagttcagggtataatttcagatttgctaaatactataagatcaacgggactaccacacgcaccctaatcaaagcatacgggatcagaatcgacgtgattgtacacggccaggctggcaaattctctctgataccgactatcattaacctggccaccgctctaactagcgtgggggtgggctccttcctttgtgactggatcttactcactttcatgaacaagaacaaagtgtatagccacaagaagttcgacaaagtttgcactccctcacatccatcaggttcttggcccgttacgctcgcaagggtgctggggcaggcccccccagagcccgggcataggtcggaggaccaacatccaagccctccgagtggccaagagggtcaacagggtgcggagtgtggtccggcgttccccccacttagaccctgtccgatttctgcaccctcagagcagatggttgacactccggcatcagaacccgcccaagcttccacacccactgaccccaagggcctggcccaattatag

SEQ ID NO: 247080 - DNA, 1867 bp, Artificial Sequence
  derived and/or modified sequence
ctgcagcgccttcctggaggtgggggccgcccgcgccatggccgccgcccagcccaagtaccccgccggggcgaccgcccggcgcctggcccggggctgctggtccgccctctgggactacgagacgcccaaggtgatcgtggtgaggaaccggcgcctgggggtcctgtaccgcgccgtgcagctgctcatcctgctctacttcgtgtggtacgtattcatcgtgcagaaaagctaccaggagagcgagacgggccccgagagctccatcatcaccaaggtcaaggggatcaccacgtccgagcacaaagtgtgggacgtggaggagtacgtgaagccccccgaggggggcagcgtgttcagcatcatcaccagggtcgaggccacccactcccagacccagggaacctgccccgagagcataagggtccacaacgccacctgcctctccgacgccgactgcgtggctggggagctggacatgctgggaaacggcctgaggactgggcgctgtgtgccctattaccaggggccctccaagacctgcgaggtgttcggctggtgcccggtggaagatggggcctctgtcagccaatttctgggtacgatggccccaaatttcaccatcctcatcaagaacagcatccactaccccaaattccacttctccaagggcaacatcgccgaccgcacagacgggtacctgaagcgctgcacgttccacgaggcctccgacctctactgccccatcttcaagctgggctttatcgtggagaaggctggggagagcttcacagagctcgcacacaagggtggtgtcatcggggtcattatcaactgggactgtgacctggacctgcctgcatcggagtgcaaccccaagtactccttccggaggcttgaccccaagcacgtgcctgcctcgtcaggctacaacttcaggtttgccaaatactacaagatcaatggcaccaccacccgcacgctcatcaaggcctacgggatccgcattgacgtcattgtgcatggacaggccgggaagttcagcctgattcccaccattattaatctggccacagctctgacttccgtcggggtgggctccttcctgtgcgactggatcttgctaacattcatgaacaaaaacaaggtctacagccataagaaatttgacaaggtgtgtacgccgagccacccctcaggtagctggcctgtgacccttgcccgtgtattgggccaggcccctcccgaacccggccaccgctccgaggaccagcaccccagccctccatcaggccaggagggccaacaaggggcagagtgtggcccagccttcccgcccctgcggccttgccccatctctgccccttctgagcagatggtggacactcctgcctccgagcctgcccaagcctccacacccacagaccccaaaggtttggctcaactctgagctcctttccatctcactggactgcagacccggcctggtggggccagagagtccccagctagggacctgcacgtggacgtgggcacctcagtagcggagcatctccacgaaacggggcaccacaggatccctgtgcaagggctgggggcacgctctggccccaggcttgtgccccaccctggcatacagcccctgacacctcctccccagctggtccctacagggctgctcacttcccatcacctctcacagccacctggaacccaagccagctgagctctgaggggctctgctcccggtcttgggccctgggaaccccaccccaccccaccccacaggcgttgtaaccttgaatctgcccagactcttcccttagaagtcacaacatactcagtccaataaacctgtgagcag

SEQ ID NO: 247081 - DNA, 1416 bp, Artificial Sequence
  derived and/or modified sequence
atggccgcagctcagccaaagtacccagctggagctacagccaggcggctagctcgtggatgttggagcgccctgtgggactacgaaacacccaaggtgattgtggttcgcaaccggaggctgggcgttctgtatagagcagtacaactgcttatcttactgtatttcgtgtggtatgtgtttatagtgcagaagagttaccaggagtccgaaaccggtcccgaaagtagcattattacaaaagtgaaaggaatcactacgagcgaacacaaggtgtgggatgtcgaagagtatgtcaaacccccagagggaggatctgtgttttctattattactcgggtcgaagctacccacagccagacccaggggacctgtcctgaatcaattcgggtgcataatgcgacctgcctgagcgacgccgactgcgttgcaggagagttagacatgttaggaaacgggttaaggacagggaggtgtgttccctattaccagggaccttcaaagacgtgtgaggttttcgggtggtgtcccgtagaggatggtgcaagcgtcagccagtttttgggaacaatggcacctaactttacaatactgatcaagaattccattcactaccctaaattccatttctccaaaggcaacattgcggaccggaccgacggatatctcaaacgttgcacattccatgaagccagcgacttgtactgccccattttcaaattgggcttcatcgtggaaaaggccggagagtcattcaccgagctcgcccacaaggggggagtcattggcgtcataattaactgggattgtgacctggacttgcccgcttctgagtgtaaccctaagtattccttcaggcgcctggaccctaaacacgtgcccgcttcgtccggatacaacttccgtttcgccaaatactacaaaatcaatggcaccacaacacgcaccctaattaaggcttacggtatcaggatcgatgtgatagtgcatggccaggccggaaaattcagcctcatccccacgatcataaatctggcgacggccctgacctctgtgggggtgggttccttcctgtgcgactggatcctcctgacattcatgaacaaaaacaaggtttatagccacaaaaagttcgataaggtgtgtacccctagtcatccatctgggtcatggcccgtgaccctggcgcgagtcctgggtcaggcacctcctgagcctggccatcgtagcgaggaccagcatccttccccgccaagtggacaggagggccaacaaggtgcagaatgcggacccgcattccctcccttgcggccttgccccatctctgccccatctgagcaaatggtggatacgccggcatctgaaccggcacaggctagcactccaacagatccgaaaggactggcacagctgtag

SEQ ID NO: 247082 - protein, 497 aa, Artificial Sequence
  derived and/or modified sequence
MAAAQPKYPAGATARRLARGCWSALWDYETPKVIVVRNRRLGVLYRAVQLLILLYFVWYVFIVQKSYQESETGPESSIITKVKGITTSEHKVWDVEEYVKPPEGGSVFSIITRVEATHSQTQGTCPESIRVHNATCLSDADCVAGELDMLGNGLRTGRCVPYYQGPSKTCEVFGWCPVEDGASVSQFLGTMAPNFTILIKNSIHYPKFHFSKGNIADRTDGYLKRCTFHEASDLYCPIFKLGFIVEKAGESFTELAHKGGVIGVIINWDCDLDLPASECNPKYSFRRLDPKHVPASSGYNFRFAKYYKINGTTTRTLIKAYGIRIDVIVHGQAGKFSLIPTIINLATALTSVGVVRNPLWGPSGCGGSTRPLHTGLCWPQGSFLCDWILLTFMNKNKVYSHKKFDKVCTPSHPSGSWPVTLARVLGQAPPEPGHRSEDQHPSPPSGQEGQQGAECGPAFPPLRPCPISAPSEQMVDTPASEPAQASTPTDPKGLAQL

SEQ ID NO: 247083 - DNA, 1494 bp, Artificial Sequence
  derived and/or modified sequence
atggccgccgcccagcccaagtaccccgccggcgccaccgccagaagactggccagaggctgctggagcgccctgtgggactacgagacccccaaggtgatcgtggtgagaaacagaagactgggcgtgctgtacagagccgtgcagctgctgatcctgctgtacttcgtgtggtacgtgttcatcgtgcagaagagctaccaggagagcgagaccggccccgagagcagcatcatcaccaaggtgaagggcatcaccaccagcgagcacaaggtgtgggacgtggaggagtacgtgaagccccccgagggcggcagcgtgttcagcatcatcaccagagtggaggccacccacagccagacccagggcacctgccccgagagcatcagagtgcacaacgccacctgcctgagcgacgccgactgcgtggccggcgagctggacatgctgggcaacggcctgagaaccggcagatgcgtgccctactaccagggccccagcaagacctgcgaggtgttcggctggtgccccgtggaggacggcgccagcgtgagccagttcctgggcaccatggcccccaacttcaccatcctgatcaagaacagcatccactaccccaagttccacttcagcaagggcaacatcgccgacagaaccgacggctacctgaagagatgcaccttccacgaggccagcgacctgtactgccccatcttcaagctgggcttcatcgtggagaaggccggcgagagcttcaccgagctggcccacaagggcggcgtgatcggcgtgatcatcaactgggactgcgacctggacctgcccgccagcgagtgcaaccccaagtacagcttcagaagactggaccccaagcacgtgcccgccagcagcggctacaacttcagattcgccaagtactacaagatcaacggcaccaccaccagaaccctgatcaaggcctacggcatcagaatcgacgtgatcgtgcacggccaggccggcaagttcagcctgatccccaccatcatcaacctggccaccgccctgaccagcgtgggcgtggtgagaaaccccctgtggggccccagcggctgcggcggcagcaccagacccctgcacaccggcctgtgctggccccagggcagcttcctgtgcgactggatcctgctgaccttcatgaacaagaacaaggtgtacagccacaagaagttcgacaaggtgtgcacccccagccaccccagcggcagctggcccgtgaccctggccagagtgctgggccaggccccccccgagcccggccacagaagcgaggaccagcaccccagcccccccagcggccaggagggccagcagggcgccgagtgcggccccgccttcccccccctgagaccctgccccatcagcgcccccagcgagcagatggtggacacccccgccagcgagcccgcccaggccagcacccccaccgaccccaagggcctggcccagctgtag

SEQ ID NO: 247084 - DNA, 1494 bp, Artificial Sequence
  derived and/or modified sequence
atggccgcagcccagcctaagtaccctgccggggccaccgccagacggttggcccgcggatgctggagtgcattatgggattatgagacccccaaagtaatcgttgtacgcaaccgccgtctgggagtgttgtaccgtgcagttcaactactcatcctgctgtacttcgtttggtatgtgttcattgtgcaaaaatcatatcaggagtctgagaccgggccagagtctagcataattaccaaagtgaaggggattaccacgtctgaacacaaggtttgggacgtcgaagagtacgtcaagccaccagaggggggaagtgtcttcagcatcatcacaagggtggaggccactcactcccagacgcagggtacctgtccagaatcaattcgggtgcacaacgcaacgtgcctgtcagacgcagattgcgtggccggcgaattagacatgctcggcaacggccttcgaaccggtcggtgcgtgccctactaccaagggccctctaagacgtgcgaagtcttcggctggtgtcctgtagaagatggggcatccgtctcgcagtttttgggaactatggcgcccaatttcaccatccttatcaagaactctattcattaccccaagttccacttctcaaagggcaatattgccgaccgcacggacggttacctgaaacggtgcacattccacgaggccagtgatctgtattgccccattttcaaactcggctttatcgtagaaaaggccggggaatcctttactgagttagcccacaaagggggcgttattggagtcatcattaattgggactgtgatcttgatctgccagcatcggaatgcaaccctaaatactctttccggcgcctggaccccaaacacgtacccgcctcttcgggatacaattttaggttcgctaaatactacaaaattaatggcacaacaacccgaacgctgatcaaggcttacggcattagaatagacgtaatcgtgcatggccaggcgggaaaattcagcttgattcctaccatcatcaaccttgccacagccctaacctcagtgggagtagtccgaaacccattgtggggaccctctgggtgtggtggcagtacccgcccactgcacaccggattatgctggccgcagggcagttttctgtgcgactggattctgctgacttttatgaacaagaataaggtgtattctcataaaaaatttgacaaagtctgcactcctagtcacccctccgggagttggcctgtgacacttgctcgggtgttaggacaggccccgccggagccaggccatagatctgaggatcaacacccaagcccaccatcaggacaggagggacaacaaggcgctgagtgcggcccagcttttccacctctccgcccatgcccaatctcagctccaagcgagcagatggtggacacgcctgcttccgaaccggcacaggcttcaacaccaaccgatcccaagggactcgcccagctctag

SEQ ID NO: 247085 - DNA, 1494 bp, Artificial Sequence
  derived and/or modified sequence
atggctgctgcccagcccaagtacccagctggggccacagcccggcggctggcccggggctgctggagcgccctgtgggactatgagacccccaaggtgattgtggtgaggaacagaaggctgggcgtgctgtacagagctgtgcagctgctgatcctgctgtactttgtgtggtacgtgttcatcgtgcagaagagctaccaggagagcgagaccggccctgagagcagcatcatcaccaaggtgaagggcatcaccaccagcgagcacaaggtgtgggatgtggaggagtatgtgaagcccccagagggcggcagcgtcttcagcatcatcaccagggtggaggccacccacagccagacccagggcacctgcccagagagcatccgggtgcacaatgccacctgcctgagtgatgctgactgtgtggccggggagctggacatgctgggcaatggcctgaggacaggccgctgtgtgccctactaccagggccccagcaagacctgtgaggtgtttggctggtgccctgtggaggatggagcctctgtgtcccagttcctgggcaccatggcccccaacttcaccatcctgatcaagaacagcatccactaccccaagttccacttcagcaagggcaacattgctgacagaacagatggctacctgaagcgctgcaccttccacgaggccagtgacctgtactgccccatcttcaagctgggcttcatcgtggagaaggccggggagagcttcacagagctggcccacaagggcggcgtcatcggggtcatcatcaactgggactgtgacctggacctgcctgccagcgagtgcaaccccaagtacagcttccggcggctggaccccaagcacgtgcctgccagcagcggctacaacttccgctttgccaagtactacaagatcaatggcaccaccaccaggaccctcatcaaggcctacggcatcagaattgatgtgattgtgcacggccaggccggcaagttcagcctcatccccaccatcatcaacctggccacagccctgacctctgtgggcgtggtgaggaaccccctgtggggccccagcggctgcggcggcagcacccggcccctgcacacaggcctgtgctggccccagggcagcttcctgtgtgactggatcctgctgaccttcatgaacaagaacaaggtgtacagccacaagaagtttgacaaggtgtgcacccccagccaccccagcggctcctggcctgtgaccctggcccgggtgctgggccaggcccctcctgagcccggccacagaagtgaggaccagcaccccagccccccatctggccaggagggccagcagggcgcagaatgtggccctgccttcccccccctgcggccctgccccatcagcgcccccagcgagcagatggtggacaccccagccagcgagcccgcccaggccagcacccccacagaccccaagggcctggcccagctgtag

SEQ ID NO: 247086 - DNA, 1494 bp, Artificial Sequence
  derived and/or modified sequence
atggccgccgcccagcccaagtaccccgccggcgccaccgcccggagactggcaagaggatgctggtctgctctgtgggattacgaaacaccaaaagtcattgtcgtgaggaatcgcaggttgggcgtgctgtatcgggctgttcaacttctgatattactctatttcgtatggtacgtgttcattgtgcaaaaaagctaccaagaaagtgagacagggcccgagtcctctattattactaaagtgaaaggtatcaccactagtgaacataaagtctgggacgtggaagagtatgtcaaaccccccgaaggaggcagtgtgtttagcatcatcactcgggtggaagctacacattcacagacccagggcacctgtcccgagagtatacgcgtgcacaacgccacctgcctctccgacgcagactgcgttgctggggaactggatatgttaggaaacggcctcaggacaggcagatgcgtgccatactaccagggaccatccaaaacctgcgaggtttttggatggtgtcctgtggaagacggcgcctctgtgtctcagtttctggggacgatggcaccaaatttcaccattcttataaagaattccatccactatcccaagttccatttttcgaaggggaacattgccgatcgcaccgatggatacctcaagcgttgcactttccatgaggccagtgacttatactgccctatctttaaactgggcttcatcgtggagaaggccggagaaagttttacggagttggcccacaaaggcggcgtgataggcgtcatcatcaattgggactgtgatctggacctacctgcatccgaatgtaaccctaagtacagtttccgacgactagacccaaagcatgttccagcatcctccggatacaactttcggtttgcaaaatattataaaataaacggtacaactacacgtactctcatcaaggcctacggcattcggatcgacgtcattgtgcatgggcaggcaggcaagtttagcctgatacctactatcatcaaccttgcgacagctctgacatcagttggcgttgtgcggaatccactgtggggaccatccggctgcggcggctccacaagacccttgcatacaggtctgtgttggcctcaggggtcttttctttgcgactggattctgctgacatttatgaacaagaacaaagtgtattctcataagaagttcgataaggtgtgcacccccagccatccctctggcagctggcctgtgacactcgctcgggttctgggtcaggctccccctgagccaggacataggagcgaagatcagcatccatcacctccctcaggtcaagagggacagcaaggtgcggaatgcggacctgcctttccaccattgcgcccctgccccatcagtgctccttccgagcagatggtagatactcctgcgagcgaacccgcacaggctagcacccccactgatcccaaaggactggcccagttgtag

SEQ ID NO: 247087 - DNA, 1494 bp, Artificial Sequence
  derived and/or modified sequence
atggccgccgcccagcccaagtaccccgccggggcgaccgcccggcgcctggcccggggctgctggtccgccctctgggactacgagacgcccaaggtgatcgtggtgaggaaccggcgcctgggggtcctgtaccgcgccgtgcagctgctcatcctgctctacttcgtgtggtacgtattcatcgtgcagaaaagctaccaggagagcgagacgggccccgagagctccatcatcaccaaggtcaaggggatcaccacgtccgagcacaaagtgtgggacgtggaggagtacgtgaagccccccgaggggggcagcgtgttcagcatcatcaccagggtcgaggccacccactcccagacccagggaacctgccccgagagcataagggtccacaacgccacctgcctctccgacgccgactgcgtggctggggagctggacatgctgggaaacggcctgaggactgggcgctgtgtgccctattaccaggggccctccaagacctgcgaggtgttcggctggtgcccggtggaagatggggcctctgtcagccaatttctgggtacgatggccccaaatttcaccatcctcatcaagaacagcatccactaccccaaattccacttctccaagggcaacatcgccgaccgcacagacgggtacctgaagcgctgcacgttccacgaggcctccgacctctactgccccatcttcaagctgggctttatcgtggagaaggctggggagagcttcacagagctcgcacacaagggtggtgtcatcggggtcattatcaactgggactgtgacctggacctgcctgcatcggagtgcaaccccaagtactccttccggaggcttgaccccaagcacgtgcctgcctcgtcaggctacaacttcaggtttgccaaatactacaagatcaatggcaccaccacccgcacgctcatcaaggcctacgggatccgcattgacgtcattgtgcatggacaggccgggaagttcagcctgattcccaccattattaatctggccacagctctgacttccgtcggggtggtaaggaaccctctctggggtcccagcgggtgcggggggtccaccaggcccttacacaccggtctctgctggccccagggctccttcctgtgcgactggatcttgctaacattcatgaacaaaaacaaggtctacagccataagaaatttgacaaggtgtgtacgccgagccacccctcaggtagctggcctgtgacccttgcccgtgtattgggccaggcccctcccgaacccggccaccgctccgaggaccagcaccccagccctccatcaggccaggagggccaacaaggggcagagtgtggcccagccttcccgcccctgcggccttgccccatctctgccccttctgagcagatggtggacactcctgcctccgagcctgcccaagcctccacacccacagaccccaaaggtttggctcaactctga

SEQ ID NO: 247088 - DNA, 1494 bp, Artificial Sequence
  derived and/or modified sequence
atggccgctgcccaacctaaatatcccgcaggcgcaacagcacgacggcttgccagggggtgttggtccgccctctgggactacgagacccccaaagttatcgtggtgcgcaaccggagattaggagtcctgtatcgggctgtacagctgctaatcctgttgtattttgtgtggtacgtgttcattgttcagaagtcttaccaggagtcagagactgggcctgaaagttccatcatcacaaaagttaaaggaataacaaccagcgaacacaaggtctgggatgtcgaagaatatgtgaaaccccctgaaggagggtcagtgttttccattataacaagagtcgaggctacacatagccagactcaagggacatgtcccgagtctataagggttcataatgcaacatgcctctccgacgccgactgcgttgctggggagttggacatgctgggcaatggtctgcgtacaggacggtgcgtcccgtactaccaagggccttctaagacttgcgaggtgtttggctggtgccccgtcgaggacggtgcatcagtgtctcagttcttgggaaccatggcaccgaattttaccattctcataaaaaattccatccactatccaaaatttcactttagcaagggcaacatcgccgaccgcaccgatggatatttgaagagatgtacctttcatgaggcctcagacctttactgtcccatctttaagttagggtttatagttgagaaggcaggagagagcttcacggagcttgcgcacaaaggtggagtcatcggggtaattatcaattgggattgtgatctggatctgccagcctccgagtgcaacccgaaatattcatttcgcagactagaccccaagcacgtccccgcatcatctggatataatttcaggttcgctaagtattacaagattaacggtactactacccggacactgattaaggcttacggaatccggatagacgttatcgtccacggccaggccggaaagttttcactcattccaacaatcattaatcttgcaactgcactgaccagcgtcggcgttgtgcggaacccactgtggggaccttccggatgcggaggtagcactaggcctcttcacactggattatgctggccgcagggctctttcctgtgtgattggatcctcctgacttttatgaataaaaacaaagtgtattctcacaagaaattcgacaaggtgtgtacaccgagccaccccagcggcagttggcctgtgaccctggctagggtcctgggccaggcgccaccggaacctggtcatagaagcgaagatcagcacccatccccaccaagcgggcaggagggacagcaaggggctgagtgtggtcctgctttcccccctctgcgaccctgtccaatcagcgcccctagtgagcagatggtggatacacctgcatcagaaccagcacaggcatctacgcccactgacccaaagggcctggcccagttgtag

SEQ ID NO: 247089 - protein, 113 aa, Artificial Sequence
  derived and/or modified sequence
MLPCLALLLLMELSVCTVAGDGGEEQTLSTEAETWVIVALEEGAGPSIQLQLQEVKTGKASQFFGLMGKRVGGRPLIQPRRKKAYQLEHTFQGLLGKRSLFTEGREDEAQGSE

SEQ ID NO: 247090 - protein, 53 aa, Artificial Sequence
  derived and/or modified sequence
MLPCLALLLLMELSVCTVAGDGGEEQTLSTEAETWVIVALEVLLGRGSDEGRG

SEQ ID NO: 247091 - DNA, 342 bp, Artificial Sequence
  derived and/or modified sequence
atgctgccctgcttggccttgttactactgatggagctctccgtctgtacagtggctggcgacgggggagaggagcagacgctgtctaccgaggccgaaacttgggtgatcgtagctctggaggagggcgcaggccctagcatccaacttcaattgcaggaggtgaagacgggcaaggcatcgcagttcttcggactcatgggtaaacgtgtgggcggaagacctttgatacagcccaggcgcaaaaaggcctatcaactggagcacacatttcagggattgctcggcaagcgctccctctttacagagggtcgagaggacgaggcccaggggtcagagtag

SEQ ID NO: 247092 - DNA, 162 bp, Artificial Sequence
  derived and/or modified sequence
atgcttccttgcctagcgctactgctgttgatggaactgtcagtgtgcacagtagcgggtgacggtggggaagagcagacactgtctactgaagcagagacctgggttatcgtcgctctggaggtactgcttggcagaggatcagacgaaggtcgaggctag

SEQ ID NO: 247093 - DNA, 342 bp, Artificial Sequence
  derived and/or modified sequence
atgctgccctgcttagctctactgctgctgatggaactgtctgtgtgcacagtggccggtgatgggggcgaagaacagactctgagcactgaggcagagacgtgggtgattgtggccctagaagaaggagcaggaccttcaattcagctccagctccaggaagtcaagacaggaaaagcatctcagttttttggactcatgggcaagagagtgggggggaggccactaattcagcctaggcgcaaaaaggcatatcagcttgaacatacttttcagggattgctgggcaaaagatccctgtttacggaagggagagaggatgaagcacagggatccgaatag

SEQ ID NO: 247094 - DNA, 162 bp, Artificial Sequence
  derived and/or modified sequence
atgttgccgtgccttgctttactcctccttatggaactgagcgtatgcacagtcgcgggcgatggaggagaagagcaaacattgtctaccgaagcggagacatgggtcattgtcgccttggaggtgctgcttgggaggggttctgatgagggaagaggatag

SEQ ID NO: 247095 - DNA, 342 bp, Artificial Sequence
  derived and/or modified sequence
atgctgccctgcttagctctactgctgctgatggaactgtctgtgtgcacagtggccggtgatgggggcgaagaacagactctgagcactgaggcagagacgtgggtgattgtggccctagaagaaggagcaggaccttcaattcagctccagctccaggaagtcaagacaggaaaagcatctcagttttttggactcatgggcaagagagtgggggggaggccactaattcagcctaggcgcaaaaaggcatatcagcttgaacatacttttcagggattgctgggcaaaagatccctgtttacagaagggcgggaagatgaggcacagggaagcgagtag

SEQ ID NO: 247096 - DNA, 455 bp, Artificial Sequence
  derived and/or modified sequence
atgctgccttgcctcgccctgcttctcctgatggagctgtccgtgtgcactgtggcaggtgatggtggagaggaacagacactcagcactgaagcagagacctgggtaattgtggccttggaggtacttttggggagaggctctgacgagggcaggggataatcggcagtgcagaggcagaagatcccctgcatggctgctgggagagcaggcagtctgcaaggcaagttgtctgactctctaccatgggtagattcaaggctatgagccctggcctggcagacctccgaagtgtgtgtgtgtgtgtgtgtgtgtgtgtgtgtgtctgtgtgtgtgtgtgtgtgtgtaagaaatacttatttaacacacggtatatctctggcactgtctgaaatgctttataaatattaactcaatcctcccatcaacctcatggggaagcgagtgggaggtga

SEQ ID NO: 247097 - DNA, 342 bp, Artificial Sequence
  derived and/or modified sequence
atgctgccctgcctggccctgctgctgctgatggagctgagcgtgtgcaccgtggccggcgacggcggcgaggagcagaccctgagcaccgaggccgagacctgggtgatcgtggccctggaggagggcgccggccccagcatccagctgcagctgcaggaggtgaagaccggcaaggccagccagttcttcggcctgatgggcaagagagtgggcggcagacccctgatccagcccagaagaaagaaggcctaccagctggagcacaccttccagggcctgctgggcaagagaagcctgttcaccgagggcagagaggacgaggcccagggcagcgagtag

SEQ ID NO: 247098 - DNA, 162 bp, Artificial Sequence
  derived and/or modified sequence
atgctgccctgcctggccctgctgctgctgatggagctgagcgtgtgcaccgtggccggcgacggcggcgaggagcagaccctgagcaccgaggccgagacctgggtgatcgtggccctggaggtgctgctgggcagaggcagcgacgagggcagaggctag

SEQ ID NO: 247099 - DNA, 675 bp, Artificial Sequence
  derived and/or modified sequence
atgctgccttgcctcgccctgcttctcctgatggagctgtccgtgtgcactgtggcaggtgatggtggagaggaacagacactcagcactgaagcagagacctgggtaattgtggccttggaggaaggcgctggccccagcattcagctccagctgcaggaggtgaagacgggcaaggcaagccagttctttgggctgatggggaagcgagtgggaggaagacctctgatccagccaaggagaaaaaaagcatatcagctggaacacacgttccagggcctcctgggcaagagaagcctgttcacagaaggcagagaggatgaggcccaaggttcagagtaaaagcccccaccacagacttcccagaggacacggtgccgcttcttcctacctggatgtcacagctgacaagccggcaggccaactctcttctctgtgtctcctgtcctcatcgctggcacttcacacaaggcccacactgaacccactgggcttcttcctggactctcagtgtcaagcagcagtcctgcataaatgcacagcttcgccgtagcaagctgcactgactctgccctccctcacactcagagttggcatctcactgcacagcagtgaggagactcgcacactctgtatcctgtgcctagcacacagtaggcactcaataaatgagtg

SEQ ID NO: 247100 - DNA, 342 bp, Artificial Sequence
  derived and/or modified sequence
atgttgccatgtttggcactattactgctgatggagctatcagtgtgcactgtggccggggatgggggggaagagcagacactgagcaccgaagccgagacctgggtaatcgtagccctggaggagggggccggcccatctattcagttgcagctgcaggaggttaagactgggaaagcatctcaatttttcggactgatgggtaaaagagtcggcggccggcccctgattcagccccgacgaaaaaaagcatatcagctcgagcacacttttcaagggctgctcgggaaacggagtcttttcaccgaaggcagggaggatgaggcccaagggagtgagtag

SEQ ID NO: 247101 - DNA, 162 bp, Artificial Sequence
  derived and/or modified sequence
atgctcccttgtctggcactgctgctcctgatggaattgtccgtctgcacagtggcgggagatgggggggaggaacagacactgtctactgaggccgagacatgggttatcgtggctctcgaagtgctcctgggaagggggtcagacgaggggagaggttag

SEQ ID NO: 247102 - DNA, 342 bp, Artificial Sequence
  derived and/or modified sequence
atgctgccctgcctggccctgctgctgctgatggagctgtctgtgtgcaccgtggccggagatggaggagaggagcagaccctgagcacagaggccgagacctgggtgattgtggccctggaggagggcgccggccccagcatccagctgcagctgcaggaggtgaagacaggcaaggccagccagttcttcggcctgatgggcaagagggtgggcggccggcccctcatccagcccaggaggaagaaggcctaccagctggagcacaccttccagggcctgctgggcaagaggagcctcttcacagagggccgggaggatgaggcccagggcagcgagtag

SEQ ID NO: 247103 - DNA, 162 bp, Artificial Sequence
  derived and/or modified sequence
atgctgccctgcctggccctgctgctgctgatggagctgtctgtgtgcaccgtggccggagatggaggagaggagcagaccctgagcacagaggccgagacctgggtgattgtggccctggaggtgctgctgggccggggcagtgatgagggccggggctag

SEQ ID NO: 247104 - DNA, 342 bp, Artificial Sequence
  derived and/or modified sequence
atgctgccctgcctggccctgctgctgctgatggagctgagcgtgtgtacagttgctggtgacggcggagaggaacagaccctaagtacagaggccgaaacgtgggtcatcgtagctctcgaggagggcgcagggccttctattcagttacaactccaggaagtcaagactggcaaggccagccaattctttggactgatgggaaaaagggtgggcggccgcccacttatccaacctaggcgaaagaaagcctatcaacttgagcacaccttccagggcctgctaggaaaacgaagcctctttaccgaggggcgcgaggacgaggcacagggttctgagtag

SEQ ID NO: 247105 - DNA, 162 bp, Artificial Sequence
  derived and/or modified sequence
atgctgccctgcctggccctgctgctgctgatggagctgagcgtgtgcaccgtggccggtgacggcggagaagaacagaccctcagcacagaagctgagacgtgggtcatagtagccctggaagtcctacttggcagagggagtgacgaagggagggggtag

SEQ ID NO: 247106 - RNA, 342 nt, Artificial Sequence
  derived and/or modified sequence
augcugcccugcuuagcucuacugcugcugauggaacugucugugugcacaguggccggugaugggggcgaagaacagacucugagcacugaggcagagacgugggugauuguggcccuagaagaaggagcaggaccuucaauucagcuccagcuccaggaagucaagacaggaaaagcaucucaguuuuuuggacucaugggcaagagagugggggggaggccacuaauucagccuaggcgcaaaaaggcauaucagcuugaacauacuuuucagggauugcugggcaaaagaucccuguuuacggaagggagagaggaugaagcacagggauccgaauag

SEQ ID NO: 247107 - RNA, 162 nt, Artificial Sequence
  derived and/or modified sequence
auguugccgugccuugcuuuacuccuccuuauggaacugagcguaugcacagucgcgggcgauggaggagaagagcaaacauugucuaccgaagcggagacaugggucauugucgccuuggaggugcugcuugggagggguucugaugagggaagaggauag

SEQ ID NO: 247108 - RNA, 342 nt, Artificial Sequence
  derived and/or modified sequence
augcugcccugcuuagcucuacugcugcugauggaacugucugugugcacaguggccggugaugggggcgaagaacagacucugagcacugaggcagagacgugggugauuguggcccuagaagaaggagcaggaccuucaauucagcuccagcuccaggaagucaagacaggaaaagcaucucaguuuuuuggacucaugggcaagagagugggggggaggccacuaauucagccuaggcgcaaaaaggcauaucagcuugaacauacuuuucagggauugcugggcaaaagaucccuguuuacagaagggcgggaagaugaggcacagggaagcgaguag

SEQ ID NO: 247109 - protein, 642 aa, Artificial Sequence
  derived and/or modified sequence
MAEAAPAPTSEWDSECLTSLQPLPLPTPPAANEAHLQTAAISLWTVVAAVQAIERKVEIHSRRLLHLEGRTGTAEKKLASCEKTVTELGNQLEGKWAVLGTLLQEYGLLQRRLENLENLLRNRNFWILRLPPGIKGDIPKVPVAFDDVSIYFSTPEWEKLEEWQKELYKNIMKGNYESLISMDYAINQPDVLSQIQPEGEHNTEDQAGPEESEIPTDPSEEPGISTSDILSWIKQEEEPQVGAPPESKESDVYKSTYADEELVIKAEGLARSSLCPEVPVPFSSPPAAAKDAFSDVAFKSQQSTSMTPFGRPATDLPEASEGQVTFTQLGSYPLPPPVGEQVFSCHHCGKNLSQDMLLTHQCSHATEHPLPCAQCPKHFTPQADLSSTSQDHASETPPTCPHCARTFTHPSRLTYHLRVHNSTERPFPCPDCPKRFADQARLTSHRRAHASERPFRCAQCGRSFSLKISLLLHQRGHAQERPFSCPQCGIDFNGHSALIRHQMIHTGERPYPCTDCSKSFMRKEHLLNHRRLHTGERPFSCPHCGKSFIRKHHLMKHQRIHTGERPYPCSYCGRSFRYKQTLKDHLRSGHNGGCGGDSDPSGQPPNPPGPLITGLETSGLGVNTEGLETNQWYGEGSGGGVL

SEQ ID NO: 247110 - DNA, 5508 bp, Artificial Sequence
  derived and/or modified sequence
tcggtcctcagaggaggggcccgggcaccctccgtgcgggccgcagcacgccggtctttgagggacccttggactcccggatctgcatgcgagggatgcggtcgaagacgagatgagggagctgacgggaggggaaacggaggggcaggtgaacatggagagagcaggaacagggagagagtagggacagcgactgggagacgcgctccacagaaacccggactgagaggcagcgagaggacgtagtcttgctctgttgcctaggctggagtagagtggtgtgatcttggctcactgcaacctccgcctcccaggttcaagcgattctcctgcctcagcctcccaagtagttgggattacagacatctgaatgggactccgagtgccttacatccctgcagccccttcctcttcctacacccccagcagcaaatgaggcacacctgcagacagcagctatctctctgtggacagtggtggccgccgtgcaggctatagagaggaaggtggagatccacagccggcgactcctacacctggaaggtcggacagggacagcagagaagaaactagccagctgtgaaaagacagttaccgagcttgggaaccagctggagggcaagtgggccgtgctgggaaccctgctgcaggagtacgggctgctgcagaggcggctggagaacttggagaacctgctgcgcaacaggaacttctggatcctgcggctccctccaggtattaagggagatatcccaaaggtgcctgtggcatttgatgatgtctccatctacttttccactccagagtgggaaaaattagaagaatggcaaaaggaactttacaagaatatcatgaagggcaactacgagtctctcatctccatggattatgctataaatcaacctgatgtcttatctcagattcaaccagaaggggaacataatacagaggaccaggcagggccagaggaaagtgagattcccacagaccccagtgaagagcctggtatttcaacatcagatattctgtcttggattaaacaagaagaagagcctcaggttggggccccaccggagtccaaggagagtgacgtgtacaaaagcacttatgctgatgaagagcttgtcatcaaagctgaaggccttgctagatcctcgttgtgccctgaggttccagtccctttctcttctccaccagcagcagcaaaggatgctttttcagatgtggctttcaaaagccagcagtctacatccatgacaccttttggacgtccagccactgacctgcctgaagcctctgagggacaagtgacttttactcagttgggtagctatcccctcccacctccagttggcgagcaggtgttctcatgccaccactgtggcaagaatctcagccaagacatgttgctgacccaccaatgtagccatgctactgagcaccccttaccctgtgcccagtgccctaagcactttactccacaggcggacctcagcagcacctcccaggaccatgccagcgagacaccccccacctgcccacactgtgccaggacttttactcacccatcaagacttacctaccatcttcgggtccataacagcactgagcgtcctttcccctgtcctgattgccccaagcgctttgctgaccaggctcgactcaccagccaccggagagctcatgcaagcgaaaggcccttccgctgtgcccagtgcggcaggagcttcagcttgaaaatcagcctcctgctccaccagcggggtcatgcacaagagcgccctttctcctgccctcagtgtggcattgacttcaacggccactcggccctgatccgccaccagatgatccacacaggcgagcgtccttacccctgcactgactgcagtaagagcttcatgcgcaaggagcacctgctgaaccaccggcggctgcacacaggcgagcggcccttcagttgtcctcactgtggcaagagcttcatccgcaagcaccacctaatgaaacaccagcgcatccacaccggggagcggccctacccctgctcctactgtggcaggagcttccgctacaaacagacactcaaggaccacctccgttcaggccacaatggaggctgtgggggtgatagtgacccatcaggtcagccacccaacccaccaggtcccctcataactgggcttgaaacttctggcctgggtgtcaacactgaaggtctagagaccaaccagtggtatggggaagggagtggagggggagttttgtaaatccaaatctctgtggcttcatgcttgtatatgctcacagcagggcacaaaatccaagagaaggtctgtgagccccatccaacacccacagtaattattatctggcacatcaatgaatttggggtcctatacacttgactagagacatgcttgtgttttggaatttcacacccttacaagaataccacattttgaaacccagaaagacctggaaaggagcccagcatgtccatcttttcaaagatacaacaaaagcagaagttacaagaatattgcggagaggttggaaagcaggatttaacctctagttctcttgttctcagagaacagcaggttgatagtagattatgtctctaggtagagacagatacatgagaagagcctccaaaactggaagcccatcataaggcatgagaatgtttaactataaagccttttattagttctttgatagctaagatggttgttggagaaagtgcttaagccactgtttatgttgctgcctcctctctcaaaaccagccaagatctgttcacacacctctgtggctgtctttccctgaaacatggtaactcaagactgcctgcctaggtttcttagattaattattcacataaattttgtttaatattggttgaacaagaaatctgactttaaaagattattaaggagaatattccttaactatactggcttgatttgaaacaggctcttattgccatttaaactgccagaaatctttgccaaggtcctggttaaaaaaattggaaacggttttcttagccccagctttaaaagctagagatctcagagaaatagctggcttaacaatgacagaacagcttaaaatttgtgcctacaccatgttctgagagtcgttcacatcaaattcttatcttttccaagccagtaagttggcttctccattcctggtgtctgatattcttgacaatcatcagcaacaaagatcacagcactttccagaagcatggagcttcagaaagtgccagtgaactcttggtcctcagtagtgagatgataacagtgttataatgcagcttccttgagccatcagagagagtgtatgttcaccctatctggctgtatcccattggcagtggacagattgaggaaattcctagatcactgagagctaagcaccatgcatagacaacagtttgttcttgcctgtgttgcttttagggactttgactaccacatgttcttttcttggggtgatttaatcacctgggagcatctgagtctgctcctaagtggctttgcaactgggcctaagttctgtttcctttatggatctcaaattttcatctgcacaatgaggctgttgaaaggaaaaaaagtgagcctctaggaattattcaaaaaaagtctgtgatacattccttttcctgccaaagttctgtctctgtctttggcttctgtccaggcaaagctaaataagacagcaaagtcaaagcagataaattcttgttgaaacttgactaaaatttatttgatttgttgttttactcccacttggaatcctgaggtagaagacagaatgcagaagtcttacatcttgggcaggaaactggtttattcctatactcttgtttcctctgcttcttcctgaggtctagaacaaggtctggaaatgtttagacaggatattttcttgatgaagtgataaggaaaggacccatttttttgctcatcacctagcccatccttcactctctctagttatgcataacaacactagaagaaggtgttagcccagctaactttgcttctgggaaggctatgtctgaacatgttgctctgtaggataatcacacttagaaaacatctgctccatgacattcacaataccagggaccatgggagacacaagaaatgtgtgtctgctgtcataacttacagtgaaaaagcccaataatacagaacaagacatgatgggcaataccctagcatattgggattaagagctttctagccagaatctggacctataccatgggaaaatttaggggtgctgggaatcccaaagccaaggttctggcttcattggcaacccactaggaacttgaatgtgagattcagctctagtttgcaccttgatttccccagtgaaaagggagaagagccaaagtattgtctaggtgctgagttcccttttctgagtggatttcaagcatttgccagggtatgctggaggagggactcctaaagtaggtgagatgtgggactaggtaacactttaaatacttttttactcaaagatttgccaagaacacagcttattagtgaaagagacctgtggattgaaatggctgcagatagatcccgcagtcccttctgaaaggaactgtgtagccagcagggacctaaactttggcaaaaagtgaacacaattcaaatacgaatgaaggaagagccctcagatggaacgaaaggcgatgtgcaaggccatcccagagagacggaagcaggtgcgatactaagcctcagcccaagaataaaagagagttcaactgttactcttttctttcatcaatcccctatcagttagaactgcaggccagttccaaagagtgtttgcttaagattcaaaagtgggtaagtaaaatggatcagtgggaaggataaggtgtccaacagaaagtgtggaggagaaactcttggcctatcaagtgctcctgagagaaaccatgcaatttaacacttcagttaaagaaatacatgagaactgcttgtcatgaccagacaagataggaaaggggaaaccccagaaacgtgctcttcatctgtcagccttttggaccaagaagctgtcactatcacacataagcaccattcccttagagtggatccaggtgttgactataaccagatttactctttgcttactaggttttccattgtcaccattggatgaacctctggtttagccacagttgtgaaaataaatggaagttggttgattgtctagaaagtgcaagaagatggccctgctccttttctgctgaacatttagtattggaaactcctacttcccttttcattaataatgtgtgcaagtttcctattagcggggaaggtgtggggctctgctgggcttctcttgagcatatctgagaagtgatgttcatgtctatctcaaccaggaccagaccctgtgacttactcggtaataacagtccacacaagcctcgttgatattaaaaaaaaaaaaaaaaaa

SEQ ID NO: 247111 - DNA, 1929 bp, Artificial Sequence
  derived and/or modified sequence
atggccgaggccgcccccgcccccaccagcgagtgggacagcgagtgcctgaccagcctgcagcccctgcccctgcccaccccccccgccgccaacgaggcccacctgcagaccgccgccatcagcctgtggaccgtggtggccgccgtgcaggccatcgagagaaaggtggagatccacagcagaagactgctgcacctggagggcagaaccggcaccgccgagaagaagctggccagctgcgagaagaccgtgaccgagctgggcaaccagctggagggcaagtgggccgtgctgggcaccctgctgcaggagtacggcctgctgcagagaagactggagaacctggagaacctgctgagaaacagaaacttctggatcctgagactgccccccggcatcaagggcgacatccccaaggtgcccgtggccttcgacgacgtgagcatctacttcagcacccccgagtgggagaagctggaggagtggcagaaggagctgtacaagaacatcatgaagggcaactacgagagcctgatcagcatggactacgccatcaaccagcccgacgtgctgagccagatccagcccgagggcgagcacaacaccgaggaccaggccggccccgaggagagcgagatccccaccgaccccagcgaggagcccggcatcagcaccagcgacatcctgagctggatcaagcaggaggaggagccccaggtgggcgccccccccgagagcaaggagagcgacgtgtacaagagcacctacgccgacgaggagctggtgatcaaggccgagggcctggccagaagcagcctgtgccccgaggtgcccgtgcccttcagcagcccccccgccgccgccaaggacgccttcagcgacgtggccttcaagagccagcagagcaccagcatgacccccttcggcagacccgccaccgacctgcccgaggccagcgagggccaggtgaccttcacccagctgggcagctaccccctgcccccccccgtgggcgagcaggtgttcagctgccaccactgcggcaagaacctgagccaggacatgctgctgacccaccagtgcagccacgccaccgagcaccccctgccctgcgcccagtgccccaagcacttcaccccccaggccgacctgagcagcaccagccaggaccacgccagcgagaccccccccacctgcccccactgcgccagaaccttcacccaccccagcagactgacctaccacctgagagtgcacaacagcaccgagagacccttcccctgccccgactgccccaagagattcgccgaccaggccagactgaccagccacagaagagcccacgccagcgagagacccttcagatgcgcccagtgcggcagaagcttcagcctgaagatcagcctgctgctgcaccagagaggccacgcccaggagagacccttcagctgcccccagtgcggcatcgacttcaacggccacagcgccctgatcagacaccagatgatccacaccggcgagagaccctacccctgcaccgactgcagcaagagcttcatgagaaaggagcacctgctgaaccacagaagactgcacaccggcgagagacccttcagctgcccccactgcggcaagagcttcatcagaaagcaccacctgatgaagcaccagagaatccacaccggcgagagaccctacccctgcagctactgcggcagaagcttcagatacaagcagaccctgaaggaccacctgagaagcggccacaacggcggctgcggcggcgacagcgaccccagcggccagccccccaacccccccggccccctgatcaccggcctggagaccagcggcctgggcgtgaacaccgagggcctggagaccaaccagtggtacggcgagggcagcggcggcggcgtgctgtag

SEQ ID NO: 247112 - DNA, 1929 bp, Artificial Sequence
  derived and/or modified sequence
atggcagaagcagctccggcccctacatccgagtgggatagcgaatgtctgacgtcactacagccactgcctctgccgacaccacccgctgccaacgaggctcacctccagacggccgcgattagcttgtggaccgtggtcgccgcggtccaagcgattgagaggaaggttgaaatccattctaggagactccttcacctggaggggcgcacaggaaccgctgagaagaaactggctagttgtgagaaaacggttactgagctcggcaaccagctagaaggaaagtgggcagttctcgggacattactgcaggagtacgggctgttacagcgaagattagaaaatctggagaatctcctgcggaatagaaatttctggatcctgcgcctgcctccaggaattaaaggtgatatccctaaggtgccagtggcctttgatgatgtgagcatttacttttctaccccagaatgggagaagcttgaggagtggcagaaggagctctataaaaacattatgaagggaaactacgagagcttaattagcatggattacgccatcaatcagccagacgtgctcagccaaattcagcctgagggcgagcacaatactgaggaccaggcaggccccgaagaatcagaaatcccaaccgacccgtccgaggagcctggaatatcaactagtgacatattgagttggatcaagcaggaggaggaaccacaggtaggggcccctcctgagagtaaagagagtgacgtctataagtcaacatatgcagatgaagagctcgtcataaaagccgaaggcctcgctcgcagctcactgtgccctgaggtaccagtgccctttagttcaccaccagccgcagcaaaagacgcttttagcgatgtcgcatttaaaagtcagcagagcacatccatgaccccattcggacgtcccgctacggacctgccagaggcgagcgagggacaggtcaccttcacccagttaggctcttacccactgcctcctccagtcggggagcaagtttttagctgccaccattgtggtaagaacctgtcacaggacatgctcctgacgcatcagtgctcccacgccaccgaacatccgttaccatgtgctcaatgtccaaagcactttaccccccaagccgatttgtcatcaacatcccaggatcacgcctcagagactccacctacgtgcccacactgtgcgaggacgttcacccacccatcaagacttacatatcacttacgggttcacaactccaccgagcgaccgttcccctgtcccgattgtcccaaacgcttcgcagaccaagcccgcctgacatcccaccggcgggctcatgcgtccgagcgaccctttagatgcgcccagtgcggccgatcttttagtttgaagatcagtttgcttctccatcagcgcgggcacgcacaggagcgcccatttagctgcccccagtgcggtatagactttaatggacacagcgccctcattcggcaccagatgattcatacaggagaaagaccttatccttgcacggattgtagcaaaagctttatgcgtaaggagcatctgttgaatcatcggcgcctgcacaccggggaaaggcccttctcctgtccacactgcggaaaatcattcattagaaaacatcatctgatgaaacatcagcgcattcacaccggcgagaggccatatccatgttcttactgcggccggtcatttcgctataagcagactttaaaagaccacctgaggagcgggcataacgggggatgtgggggagattcggacccatccgggcagccacctaacccacctggccccctgatcacgggactcgagacctctggccttggcgtcaacactgaagggctggagactaaccagtggtatggcgaggggtccggcggcggtgtgctgtag

SEQ ID NO: 247113 - DNA, 1929 bp, Artificial Sequence
  derived and/or modified sequence
atggccgaggccgccccagcccccaccagcgagtgggacagtgaatgtctgaccagcctgcagcccctgcccctgcccaccccacctgctgccaatgaggcccacctgcagacagctgccatcagcctgtggacagtggtggccgctgtgcaggccattgaaaggaaggtggagatccacagccggcggctgctgcacctggagggccgcactggaacagctgagaagaagctggccagctgtgagaagacagtgacagagctgggcaaccagctggagggcaagtgggccgtgctgggcaccctgctgcaggagtatggcctgctgcagaggcggctggagaacctggagaacctgctgaggaacagaaacttctggatcctgcggctgcccccaggcatcaagggggacatccccaaggtgcctgtggcctttgatgatgtgtccatctacttcagcaccccagagtgggagaagctggaggagtggcagaaggagctgtacaagaacatcatgaagggcaactatgagagcctcatctccatggactatgccatcaaccagccagatgtgctgagccagatccagcctgagggggagcacaacacagaggaccaggccggccctgaggagagcgagatccccacagaccccagcgaggagcccggcatcagcaccagtgacatcctgtcctggatcaagcaggaggaggagccccaggtgggcgcccctcctgagagcaaggagagtgatgtgtacaagagcacctatgcagatgaggagctggtgatcaaggccgagggcctggcccggagcagcctgtgcccagaggtgcctgtgcccttcagcagccccccagctgctgccaaggatgccttcagtgatgtggccttcaagagccagcagagcacctccatgaccccatttggccggcctgccacagacctgcctgaggccagcgagggccaggtgaccttcacccagctgggcagctaccccctgcccccacctgtgggggagcaggtgttcagctgccaccactgtgggaagaacctgagccaggacatgctgctgacccaccagtgcagccacgccacagagcaccccctgccctgtgcccagtgccccaagcacttcaccccccaggccgacctgagcagcaccagccaggaccacgccagcgagaccccacccacctgcccccactgtgcccggaccttcacccaccccagccggctgacctaccacctgcgggtgcacaacagcacagagcggcccttcccctgcccagactgccccaagagatttgctgaccaggcccggctgaccagccaccggcgggcccacgccagcgagcggcccttccgctgtgcccagtgtggccgctccttcagcctgaagatcagcctgctgctgcaccagaggggccacgcccaggagcggcccttcagctgcccccagtgtggcatcgacttcaacggccacagcgccctgatccgccaccagatgatccacactggagagcggccctacccctgcacagactgcagcaagagcttcatgaggaaggagcacctgctgaaccaccggcggctgcacactggagagcggcccttcagctgcccccactgtgggaagagcttcatcaggaagcaccacctgatgaagcaccagaggatccacactggagagcggccctacccctgcagctactgcggccgctccttccgctacaagcagaccctgaaggaccacctgcggagcggccacaatggaggctgcggcggggacagcgaccccagcggccagccccccaaccccccaggccccctcatcaccggcctggagaccagcggcctgggcgtgaacacagagggcctggagaccaaccagtggtatggagagggcagcggcggcggcgtgctgtag

SEQ ID NO: 247114 - DNA, 1929 bp, Artificial Sequence
  derived and/or modified sequence
atggccgaggccgcccccgcccccaccagcgagtgggacagcgagtgcttgacttcgcttcagcccctacccttaccaacgccaccagccgcaaacgaggcccacctgcagacagccgcgatatcattatggaccgtagtggcggcagtccaagccatcgagagaaaagtggagatccactcgagaagactgctgcatcttgagggaaggaccgggacagccgagaaaaaactagcctcttgtgaaaagactgtgacggaactgggaaaccagttagaaggtaagtgggcggtgctgggcaccctcctccaagaatacggtcttctccagcggcgtctggaaaacctcgagaacctgctaaggaaccgtaacttttggatcttgcgtcttccccctgggatcaagggcgacatacccaaggtcccggtcgcctttgacgatgtttccatttactttagtacacctgagtgggaaaagcttgaggaatggcagaaagagctgtataagaacattatgaagggcaattatgaatccttgatttcgatggactacgcaatcaatcagcccgatgtcttgtcccagatccagcccgagggcgagcataacaccgaagaccaggcaggccccgaggaatccgagattccaaccgatcctagcgaagagcccggaatcagcacttcggacatactgtcctggatcaagcaggaagaagagcctcaagttggcgccccaccagagtctaaggaatcagatgtgtacaaatccacctatgctgatgaggaactagtgataaaagctgagggactcgccagatcaagtctgtgcccagaggtgccggtaccattctcatccccaccagcagctgctaaagacgctttctcagacgttgcattcaagtcccagcaaagcacgtccatgactcctttcggacgcccagcaacagacctccccgaagcctccgaggggcaggtgacatttactcagctcggctcttaccccctgcccccaccagttggtgaacaggttttctcatgccatcattgcgggaaaaatctgagccaggacatgctcctcacccatcaatgttctcatgccactgagcacccactgccttgtgctcagtgccctaagcacttcacaccccaggccgacctgtcttctactagccaagatcatgcttccgaaacccctcccacctgtccacactgcgcccgtaccttcacacacccatctaggctgacttatcatctgagggtgcacaactctaccgaacgacctttcccctgcccggactgtcctaagcgctttgctgaccaggcaagactgacttcccaccgccgcgcacatgcgagtgaacggccctttcgttgcgcccagtgcggtagatccttttctttaaagatctctttgcttctgcaccagcgtgggcatgctcaggagcgtccatttagctgtccccagtgtggaatcgatttcaacgggcatagcgcgctgattaggcaccagatgatccacacaggggagaggccctacccctgtacagattgctccaaatctttcatgagaaaggagcatcttctgaaccataggagactgcacactggtgaacggccattcagctgccctcactgtggtaagtcattcattaggaagcatcacctgatgaaacaccaaagaatacatacaggcgaaagaccttatccgtgcagttattgtggccggtcatttcggtacaagcagaccctgaaggaccatctgcgctccgggcacaatggaggatgcgggggcgattccgatcccagcggccagccgcccaacccccctggacctctgattacaggtctggaaacttcagggctgggggtcaacacagaggggctggaaaccaaccagtggtatggcgagggcagcggaggtggtgtgctgtag

SEQ ID NO: 247115 - DNA, 1929 bp, Artificial Sequence
  derived and/or modified sequence
atggccgaagccgctccagctccaaccagcgagtgggattctgagtgcctgacctcactacagccactgcccctgccaacaccgcctgcagcgaatgaagctcacctccaaactgcagccatttccctttggactgtggtggccgctgtccaggctatcgagcgcaaggttgagattcatagtcgcaggctgctgcacttggaagggaggacaggtaccgccgaaaagaaactggcctcatgtgagaaaacagtgaccgaactgggaaaccaactggaaggaaagtgggcagtgttgggcactttgctgcaagagtacggattactgcagcgccgtctcgaaaatcttgaaaaccttctcaggaatcggaacttttggatcctccgcctccctcccggtataaaaggagacataccgaaagtaccagttgcctttgacgacgttagcatctatttttcgacgcccgagtgggagaagctcgaggagtggcaaaaggagctttataagaacattatgaaaggcaattatgagtctttgatcagcatggactacgcaatcaaccagcctgatgtgctcagccaaatccaaccggagggggagcataacaccgaggaccaggccggtccggaggagtcagaaatccccactgacccctcagaagagccaggcatctcaacgtccgatatattgagttggatcaagcaggaggaggagcctcaggttggagcccctccagagagtaaggaatccgatgtatacaagtctacatacgccgacgaagagctggtaattaaggcagaaggccttgcacggtcgtccctctgtcccgaagtgccagtcccgttcagctcaccccctgcagccgcaaaggatgcatttagcgacgtggctttcaagtcccagcagtccacctctatgactcccttcggcaggccagccacagatctccctgaagcatctgaaggccaagtcacgtttacccagttaggcagctatcccctgcctccgccagttggtgagcaggtatttagctgtcaccattgcggtaagaacctcagccaagatatgcttctcactcaccagtgcagtcatgccacagagcacccactgccatgtgcacaatgtccgaagcattttacaccccaagcggacttaagttccactagtcaggaccacgcatcagagaccccccctacctgccctcactgcgcacggaccttcactcacccctcccgcttaacttaccacctcagggtccataattccactgaaagaccatttccctgtccagattgtcccaagcgcttcgctgatcaggctaggctgacctcacaccggagggcacatgcgagcgagcggccattcagatgcgcccaatgcggtaggagcttttctctgaaaattagtttgttgctccaccagagaggccacgcacaggagcgtccgtttagttgtccccagtgtggcatcgacttcaatggacacagtgcgctcatccggcaccagatgatccacactggcgaacgcccttacccatgcaccgactgctcaaagtcctttatgaggaaggagcatcttctaaaccacaggaggctgcacacgggagagagacccttttcgtgccctcactgtggcaagtccttcatccggaagcatcacctgatgaagcaccagcgcattcacacaggtgaaagaccttatccatgttcctattgcggccgatcctttcgttataaacagactctgaaagatcatctccggagcggacacaatggaggttgtggcggtgactctgatccaagcggacagcccccaaatccccctgggcctctgataacagggttggagactagcggactaggtgtaaatacggaaggacttgagactaatcaatggtacggggaaggttccggaggcggagtgctgtag

SEQ ID NO: 247116 - DNA, 5427 bp, Artificial Sequence
  derived and/or modified sequence
aaagcgccagctgaggggccgctgcgggtggagtgcggcggagtcggcctcgcgaccccagcttgatccgccgcctgctgcaccgcgcctccgccgcgttcctgcgcgtcccgagccccgacggccgcgtgagtcccgtccgtgcggggaaggcagggccgggtcggcgccgcctgtggagaggacccggcggccgggcctgcttggagccgggcgcggtggcagcggcggcagcggcggcgacttccgaggcccgggctagacagcgcagggccatggctgaggcggccccggccccgacatctgaatgggactccgagtgccttacatccctgcagccccttcctcttcctacacccccagcagcaaatgaggcacacctgcagacagcagctatctctctgtggacagtggtggccgccgtgcaggctatagagaggaaggtggagatccacagccggcgactcctacacctggaaggtcggacagggacagcagagaagaaactagccagctgtgaaaagacagttaccgagcttgggaaccagctggagggcaagtgggccgtgctgggaaccctgctgcaggagtacgggctgctgcagaggcggctggagaacttggagaacctgctgcgcaacaggaacttctggatcctgcggctccctccaggtattaagggagatatcccaaaggtgcctgtggcatttgatgatgtctccatctacttttccactccagagtgggaaaaattagaagaatggcaaaaggaactttacaagaatatcatgaagggcaactacgagtctctcatctccatggattatgctataaatcaacctgatgtcttatctcagattcaaccagaaggggaacataatacagaggaccaggcagggccagaggaaagtgagattcccacagaccccagtgaagagcctggtatttcaacatcagatattctgtcttggattaaacaagaagaagagcctcaggttggggccccaccggagtccaaggagagtgacgtgtacaaaagcacttatgctgatgaagagcttgtcatcaaagctgaaggccttgctagatcctcgttgtgccctgaggttccagtccctttctcttctccaccagcagcagcaaaggatgctttttcagatgtggctttcaaaagccagcagtctacatccatgacaccttttggacgtccagccactgacctgcctgaagcctctgagggacaagtgacttttactcagttgggtagctatcccctcccacctccagttggcgagcaggtgttctcatgccaccactgtggcaagaatctcagccaagacatgttgctgacccaccaatgtagccatgctactgagcaccccttaccctgtgcccagtgccctaagcactttactccacaggcggacctcagcagcacctcccaggaccatgccagcgagacaccccccacctgcccacactgtgccaggacttttactcacccatcaagacttacctaccatcttcgggtccataacagcactgagcgtcctttcccctgtcctgattgccccaagcgctttgctgaccaggctcgactcaccagccaccggagagctcatgcaagcgaaaggcccttccgctgtgcccagtgcggcaggagcttcagcttgaaaatcagcctcctgctccaccagcggggtcatgcacaagagcgccctttctcctgccctcagtgtggcattgacttcaacggccactcggccctgatccgccaccagatgatccacacaggcgagcgtccttacccctgcactgactgcagtaagagcttcatgcgcaaggagcacctgctgaaccaccggcggctgcacacaggcgagcggcccttcagttgtcctcactgtggcaagagcttcatccgcaagcaccacctaatgaaacaccagcgcatccacaccggggagcggccctacccctgctcctactgtggcaggagcttccgctacaaacagacactcaaggaccacctccgttcaggccacaatggaggctgtgggggtgatagtgacccatcaggtcagccacccaacccaccaggtcccctcataactgggcttgaaacttctggcctgggtgtcaacactgaaggtctagagaccaaccagtggtatggggaagggagtggagggggagttttgtaaatccaaatctctgtggcttcatgcttgtatatgctcacagcagggcacaaaatccaagagaaggtctgtgagccccatccaacacccacagtaattattatctggcacatcaatgaatttggggtcctatacacttgactagagacatgcttgtgttttggaatttcacacccttacaagaataccacattttgaaacccagaaagacctggaaaggagcccagcatgtccatcttttcaaagatacaacaaaagcagaagttacaagaatattgcggagaggttggaaagcaggatttaacctctagttctcttgttctcagagaacagcaggttgatagtagattatgtctctaggtagagacagatacatgagaagagcctccaaaactggaagcccatcataaggcatgagaatgtttaactataaagccttttattagttctttgatagctaagatggttgttggagaaagtgcttaagccactgtttatgttgctgcctcctctctcaaaaccagccaagatctgttcacacacctctgtggctgtctttccctgaaacatggtaactcaagactgcctgcctaggtttcttagattaattattcacataaattttgtttaatattggttgaacaagaaatctgactttaaaagattattaaggagaatattccttaactatactggcttgatttgaaacaggctcttattgccatttaaactgccagaaatctttgccaaggtcctggttaaaaaaattggaaacggttttcttagccccagctttaaaagctagagatctcagagaaatagctggcttaacaatgacagaacagcttaaaatttgtgcctacaccatgttctgagagtcgttcacatcaaattcttatcttttccaagccagtaagttggcttctccattcctggtgtctgatattcttgacaatcatcagcaacaaagatcacagcactttccagaagcatggagcttcagaaagtgccagtgaactcttggtcctcagtagtgagatgataacagtgttataatgcagcttccttgagccatcagagagagtgtatgttcaccctatctggctgtatcccattggcagtggacagattgaggaaattcctagatcactgagagctaagcaccatgcatagacaacagtttgttcttgcctgtgttgcttttagggactttgactaccacatgttcttttcttggggtgatttaatcacctgggagcatctgagtctgctcctaagtggctttgcaactgggcctaagttctgtttcctttatggatctcaaattttcatctgcacaatgaggctgttgaaaggaaaaaaagtgagcctctaggaattattcaaaaaaagtctgtgatacattccttttcctgccaaagttctgtctctgtctttggcttctgtccaggcaaagctaaataagacagcaaagtcaaagcagataaattcttgttgaaacttgactaaaatttatttgatttgttgttttactcccacttggaatcctgaggtagaagacagaatgcagaagtcttacatcttgggcaggaaactggtttattcctatactcttgtttcctctgcttcttcctgaggtctagaacaaggtctggaaatgtttagacaggatattttcttgatgaagtgataaggaaaggacccatttttttgctcatcacctagcccatccttcactctctctagttatgcataacaacactagaagaaggtgttagcccagctaactttgcttctgggaaggctatgtctgaacatgttgctctgtaggataatcacacttagaaaacatctgctccatgacattcacaataccagggaccatgggagacacaagaaatgtgtgtctgctgtcataacttacagtgaaaaagcccaataatacagaacaagacatgatgggcaataccctagcatattgggattaagagctttctagccagaatctggacctataccatgggaaaatttaggggtgctgggaatcccaaagccaaggttctggcttcattggcaacccactaggaacttgaatgtgagattcagctctagtttgcaccttgatttccccagtgaaaagggagaagagccaaagtattgtctaggtgctgagttcccttttctgagtggatttcaagcatttgccagggtatgctggaggagggactcctaaagtaggtgagatgtgggactaggtaacactttaaatacttttttactcaaagatttgccaagaacacagcttattagtgaaagagacctgtggattgaaatggctgcagatagatcccgcagtcccttctgaaaggaactgtgtagccagcagggacctaaactttggcaaaaagtgaacacaattcaaatacgaatgaaggaagagccctcagatggaacgaaaggcgatgtgcaaggccatcccagagagacggaagcaggtgcgatactaagcctcagcccaagaataaaagagagttcaactgttactcttttctttcatcaatcccctatcagttagaactgcaggccagttccaaagagtgtttgcttaagattcaaaagtgggtaagtaaaatggatcagtgggaaggataaggtgtccaacagaaagtgtggaggagaaactcttggcctatcaagtgctcctgagagaaaccatgcaatttaacacttcagttaaagaaatacatgagaactgcttgtcatgaccagacaagataggaaaggggaaaccccagaaacgtgctcttcatctgtcagccttttggaccaagaagctgtcactatcacacataagcaccattcccttagagtggatccaggtgttgactataaccagatttactctttgcttactaggttttccattgtcaccattggatgaacctctggtttagccacagttgtgaaaataaatggaagttggttgattgtctagaaagtgcaagaagatggccctgctccttttctgctgaacatttagtattggaaactcctacttcccttttcattaataatgtgtgcaagtttcctattagcggggaaggtgtggggctctgctgggcttctcttgagcatatctgagaagtgatgttcatgtctatctcaaccaggaccagaccctgtgacttactcggtaataacagtccacacaagcctcgttgatatt

SEQ ID NO: 247117 - DNA, 5268 bp, Artificial Sequence
  derived and/or modified sequence
tcggtcctcagaggaggggcccgggcaccctccgtgcgggccgcagcacgccggtctttgagggacccttggactcccggatctgcatgcgagggatgcggtcgaagacgagatgagggagctgacgggaggggaaacggaggggcaggtgaacatggagagagcaggaacagggagagagtagggacagcgactgggagacgcgctccacagaaacccggactgagaggcagcgagaggacgtagtcttgctctgttgcctaggctggagtagagtggtgtgatcttggctcactgcaacctccgcctcccaggttcaagcgattctcctgcctcagcctcccaagtagttgggattacagacatctgaatgggactccgagtgccttacatccctgcagccccttcctcttcctacacccccagcagcaaatgaggcacacctgcagacagcagctatctctctgtggacagtggtggccgccgtgcaggctatagagaggaaggtggagatccacagccggcgactcctacacctggaaggtcggacagggacagcagagaagaaactagccagctgtgaaaagacagttaccgagcttgggaaccagctggagggcaagtgggccgtgctgggaaccctgctgcaggagtacgggctgctgcagaggcggctggagaacttggagaacctgctgcgcaacaggaacttctggatcctgcggctccctccaggtattaagggagatatcccaaaggtgcctgtggcatttgatgatgtctccatctacttttccactccagagtgggaaaaattagaagaatggcaaaaggaactttacaagaatatcatgaagggcaactacgagtctctcatctccatggattatgctataaatcaacctgatgtcttatctcagattcaaccagaaggggaacataatacagaggaccaggcagggccagaggaaagtgagattcccacagaccccagtgaagagcctggtatttcaacatcagatattctgtcttggattaaacaagaagaagagcctcaggttggggccccaccggagtccaaggagagtgacgtgtacaaaagcacttatgctgatgaagagcttgtcatcaaagctgaaggccttgctagatcctcgttgtgccctgaggttccagtccctttctcttctccaccagcagcagcaaaggatgctttttcagatgtggctttcaaaagccagcagtctacatccatgacaccttttggacgtccagccactgacctgcctgaagcctctgagggacaagtgacttttactcagttgggtagctatcccctcccacctccagttggcgagcaggtgttctcatgccaccactgtggcaagaatctcagccaagacatgttgctgacccaccaatgtagccatgctactgagcaccccttaccctgtgcccagtgccctaagcactttactccacaggcggacctcagcagcacctcccaggaccatgccagcgagacaccccccacctgcccacactgtgccaggacttttactcacccatcaagacttacctaccatcttcgggtccataacagcactgagcgtcctttcccctgtcctgattgccccaagcgctttgctgaccaggctcgactcaccagccaccggagagctcatgcaagcgaaaggcccttccgctgtgcccagtgcggcaggagcttcagcttgaaaatcagcctcctgctccaccagcggggtcatgcacaagagcgccctttctcctgccctcagtgtggcattgacttcaacggccactcggccctgatccgccaccagatgatccacacaggcgagcgtccttacccctgcactgactgcagtaagagcttcatgcgcaaggagcacctgctgaaccaccggcggctgcacacaggcgagcggcccttcagttgtcctcactgtggcaagagcttcatccgcaagcaccacctaatgaaacaccagcgcatccacaccggggagcggccctacccctgctcctactgtggcaggagcttccgctacaaacagacactcaaggaccacctccgttcaggccacaatggaggctgtgggggtgatagtgacccatcaggtcagccacccaacccaccaggtcccctcataactgggcttgaaacttctggcctgggtgtcaacactgaaggtctagagaccaaccagtggtatggggaagggagtggagggggagttttgtaaatccaaatctctgtggcttcatgcttgtatatgctcacagcagggcacaaaatccaagagaaggtctgtgagccccatccaacacccacagtaattattatctggcacatcaatgaatttggggtcctatacacttgactagagacatgcttgtgttttggaatttcacacccttacaagaataccacattttgaaacccagaaagacctggaaaggagcccagcatgtccatcttttcaaagatacaacaaaagcagaagttacaagaatattgcggagaggttggaaagcaggatttaacctctagttctcttgttctcagagaacagcaggttgatagtagattatgtctctaggtagagacagatacatgagaagagcctccaaaactggaagcccatcataaggcatgagaatgtttaactataaagccttttattagttctttgatagctaagatggttgttggagaaagtgcttaagccactgtttatgttgctgcctcctctctcaaaaccagccaagatctgttcacacacctctgtggctgtctttccctgaaacatggtaactcaagactgcctgcctaggtttcttagattaattattcacataaattttgtttaatattggttgaacaagaaatctgactttaaaagattattaaggagaatattccttaactatactggcttgatttgaaacaggctcttattgccatttaaactgccagaaatctttgccaaggtcctggttaaaaaaattggaaacggttttcttagccccagctttaaaagctagagatctcagagaaatagctggcttaacaatgacagaacagcttaaaatttgtgcctacaccatgttctgagagtcgttcacatcaaattcttatcttttccaagccagtaagttggcttctccattcctggtgtctgatattcttgacaatcatcagcaacaaagatcacagcactttccagaagcatggagcttcagaaagtgccagtgaactcttggtcctcagtagtgagatgataacagtgttataatgcagcttccttgagccatcagagagagtgtatgttcaccctatctggctgtatcccattggcagtggacagattgaggaaattcctagatcactgagagctaagcaccatgcatagacaacagtttgttcttgcctgtgttgcttttagggactttgactaccacatgttcttttcttggggtgatttaatcacctgggagcatctgagtctgctcctaagtggctttgcaactgggcctaagttctgtttcctttatggatctcaaattttcatctgcacaatgaggctgttgaaaggaaaaaaagtgagcctctaggaattattcaaaaaaagtctgtgatacattccttttcctgccaaagttctgtctctgtctttggcttctgtccaggcaaagctaaataagacagcaaagtcaaagcagataaattcttgttgaaacttgactaaaatttatttgatttgttgttttactcccacttggaatcctgaggtagaagacagaatgcagaagtcttacatcttgggcaggaaactggtttattcctatactcttgtttcctctgcttcttcctgaggtctagaacaaggtctggaaatgtttagacaggatattttcttgatgaagtgataaggaaaggacccatttttttgctcatcacctagcccatccttcactctctctagttatgcataacaacactagaagaaggtgttagcccagctaactttgcttctgggaaggctatgtctgaacatgttgctctgtaggataatcacacttagaaaacatctgctccatgacattcacaataccagggaccatgggagacacaagaaatgtgtgtctgctgtcataacttacagtgaaaaagcccaataatacagaacaagacatgatgggcaataccctagcatattgggattaagagctttctagccagaatctggacctataccatgggaaaatttaggggtgctgggaatcccaaagccaaggttctggcttcattggcaacccactaggaacttgaatgtgagattcagctctagtttgcaccttgatttccccagtgaaaagggagaagagccaaagtattgtctaggtgctgagttcccttttctgagtggatttcaagcatttgccagggtatgctggaggagggactcctaaagtaggtgagatgtgggactaggtaacactttaaatacttttttactcaaagatttgccaagaacacagcttattagtgaaagagacctgtggattgaaatggctgcagatagatcccgcagtcccttctgaaaggaactgtgtagccagcagggacctaaactttggcaaaaagtgaacacaattcaaatacgaatgaaggaagagccctcagatggaacgaaaggcgatgtgcaaggccatcccagagagacggaagcaggtgcgatactaagcctcagcccaagaataaaagagagttcaactgttactcttttctttcatcaatcccctatcagttagaactgcaggccagttccaaagagtgtttgcttaagattcaaaagtgggtaagtaaaatggatcagtgggaaggataaggtgtccaacagaaagtgtggaggagaaactcttggcctatcaagtgctcctgagagaaaccatgcaatttaacacttcagttaaagaaatacatgagaactgcttgtcatgaccagacaagataggaaaggggaaaccccagaaacgtgctcttcatctgtcagccttttggaccaagaagctgtcactatcacacataagcaccattcccttagagtggatccaggtgttgactataaccagatttactctttgcttactaggttttccattgtcaccattggatgaacctctggtttagccacagttgtgaaaataaatggaagttggttgattgtctagaaagtgcaa

SEQ ID NO: 247118 - DNA, 2860 bp, Artificial Sequence
  derived and/or modified sequence
agctgaggggccgctgcgggtggagtgcggcggagtcggcctcgcgaccccagcttgatccgccgcctgctgcaccgcgcctccgccgcgttcctgcgcgtcccgagccccgacggccgcgtgagtcccgtccgtgcggggaaggcagggccgggtcggcgccgcctgtggagaggacccggcggccgggcctgcttggagccgggcgcggtggcagcggcggcagcggcggcgacttccgaggcccgggctagacagcgcagggccatggctgaggcggccccggccccgacatctgaatgggactccgagtgccttacatccctgcagccccttcctcttcctacacccccagcagcaaatgaggcacacctgcagacagcagctatctctctgtggacagtggtggccgccgtgcaggctatagagaggaaggtggagatccacagccggcgactcctacacctggaaggtcggacagggacagcagagaagaaactagccagctgtgaaaagacagttaccgagcttgggaaccagctggagggcaagtgggccgtgctgggaaccctgctgcaggagtacgggctgctgcagaggcggctggagaacttggagaacctgctgcgcaacaggaacttctggatcctgcggctccctccaggtattaagggagatatcccaaaggtgcctgtggcatttgatgatgtctccatctacttttccactccagagtgggaaaaattagaagaatggcaaaaggaactttacaagaatatcatgaagggcaactacgagtctctcatctccatggattatgctataaatcaacctgatgtcttatctcagattcaaccagaaggggaacataatacagaggaccaggcagggccagaggaaagtgagattcccacagaccccagtgaagagcctggtatttcaacatcagatattctgtcttggattaaacaagaagaagagcctcaggttggggccccaccggagtccaaggagagtgacgtgtacaaaagcacttatgctgatgaagagcttgtcatcaaagctgaaggccttgctagatcctcgttgtgccctgaggttccagtccctttctcttctccaccagcagcagcaaaggatgctttttcagatgtggctttcaaaagccagcagtctacatccatgacaccttttggacgtccagccactgacctgcctgaagcctctgagggacaagtgacttttactcagttgggtagctatcccctcccacctccagttggcgagcaggtgttctcatgccaccactgtggcaagaatctcagccaagacatgttgctgacccaccaatgtagccatgctactgagcaccccttaccctgtgcccagtgccctaagcactttactccacaggcggacctcagcagcacctcccaggaccatgccagcgagacaccccccacctgcccacactgtgccaggacttttactcacccatcaagacttacctaccatcttcgggtccataacagcactgagcgtcctttcccctgtcctgattgccccaagcgctttgctgaccaggctcgactcaccagccaccggagagctcatgcaagcgaaaggcccttccgctgtgcccagtgcggcaggagcttcagcttgaaaatcagcctcctgctccaccagcggggtcatgcacaagagcgccctttctcctgccctcagtgtggcattgacttcaacggccactcggccctgatccgccaccagatgatccacacaggcgagcgtccttacccctgcactgactgcagtaagagcttcatgcgcaaggagcacctgctgaaccaccggcggctgcacacaggcgagcggcccttcagttgtcctcactgtggcaagagcttcatccgcaagcaccacctaatgaaacaccagcgcatccacaccggggagcggccctacccctgctcctactgtggcaggagcttccgctacaaacagacactcaaggaccacctccgttcaggccacaatggaggctgtgggggtgatagtgacccatcaggtcagccacccaacccaccaggtcccctcataactgggcttgaaacttctggcctgggtgtcaacactgaaggtctagagaccaaccagtggtatggggaagggagtggagggggagttttgtaaatccaaatctctgtggcttcatgcttgtatatgctcacagcagggcacaaaatccaagagaaggtctgtgagccccatccaacacccacagtaattattatctggcacatcaatgaatttggggtcctatacacttgactagagacatgcttgtgttttggaatttcacacccttacaagaataccacattttgaaacccagaaagacctggaaaggagcccagcatgtccatcttttcaaagatacaacaaaagcagaagttacaagaatattgcggagaggttggaaagcaggatttaacctctagttctcttgttctcagagaacagcaggttgatagtagattatgtctctaggtagagacagatacatgagaagagcctccaaaactggaagcccatcataaggcatgagaatgtttaactataaagccttttattagttctttgatagctaagatggttgttggagaaagtgcttaagccactgtttatgttgctgcctcctctctcaaaaccagccaagatctgttcacacacctctgtggctgtctttccctgaaacatggtaactcaagactgcctgcctaggtttcttagattaattattcacataaattttgtttaatattggttgaacaagaaatctgactttaaaagatta

SEQ ID NO: 247119 - DNA, 2121 bp, Artificial Sequence
  derived and/or modified sequence
ggccgcgggagcgttcgtcaccagcaatctgagcggtggcgcgggcggcatttaagtgtgcggaggcgcattcccgccgcgctgcgtgacgcctgggctcccggcaccggactcgggacacgcgggaggccctcccgaaatagctgccgaatgaatgacatctgaatgggactccgagtgccttacatccctgcagccccttcctcttcctacacccccagcagcaaatgaggcacacctgcagacagcagctatctctctgtggacagtggtggccgccgtgcaggctatagagaggaaggtggagatccacagccggcgactcctacacctggaaggtcggacagggacagcagagaagaaactagccagctgtgaaaagacagttaccgagcttgggaaccagctggagggcaagtgggccgtgctgggaaccctgctgcaggagtacgggctgctgcagaggcggctggagaacttggagaacctgctgcgcaacaggaacttctggatcctgcggctccctccaggtgcctgtggcatttgatgatgtctccatctacttttccactccagagtgggaaaaattagaagaatggcaaaaggaactttacaagaatatcatgaagggcaactacgagtctctcatctccatggattatgctataaatcaacctgatgtcttatctcagattcaaccagaaggggaacataatacagaggaccaggcagggccagaggaaagtgagattcccacagaccccagtgaagagcctggtatttcaacatcagatattctgtcttggattaaacaagaagaagagcctcaggttggggccccaccggagtccaaggagagtgacgtgtacaaaagcacttatgctgatgaagagcttgtcatcaaagctgaaggccttgctagatcctcgttgtgccctgaggttccagtccctttctcttctccaccagcagcagcaaaggatgctttttcagatgtggctttcaaaagccagcagtctacatccatgacaccttttggacgtccagccactgacctgcctgaagcctctgagggacaagtgacttttactcagttgggtagctatcccctcccacctccagttggcgagcaggtgttctcatgccaccactgtggcaagaatctcagccaagacatgttgctgacccaccaatgtagccatgctactgagcaccccttaccctgtgcccagtgccctaagcactttactccacaggcggacctcagcagcacctcccaggaccatgccagcgagacaccccccacctgcccacactgtgccaggacttttactcacccatcaagacttacctaccatcttcgggtccataacagcactgagcgtcctttcccctgtcctgattgccccaagcgctttgctgaccaggctcgactcaccagccaccggagagctcatgcaagcgaaaggcccttccgctgtgcccagtgcggcaggagcttcagcttgaaaatcagcctcctgctccaccagcggggtcatgcacaagagcgccctttctcctgccctcagtgtggcattgacttcaacggccactcggccctgatccgccaccagatgatccacacaggcgagcgtccttacccctgcactgactgcagtaagagcttcatgcgcaaggagcacctgctgaaccaccggcggctgcacacaggcgagcggcccttcagttgtcctcactgtggcaagagcttcatccgcaagcaccacctaatgaaacaccagcgcatccacaccggggagcggccctacccctgctcctactgtggcaggagcttccgctacaaacagacactcaaggaccacctccgttcaggccacaatggaggctgtgggggtgatagtgacccatcaggtcagccacccaacccaccaggtcccctcataactgggcttgaaacttctggcctgggtgtcaacactgaaggtctagagaccaaccagtggtatggggaagggagtggagggggagttttgtaaatccaaatctctgtggcttcatgcttgtatatgctcacagcagggcacaaaatccaagagaaggtctgtgagccccatccaa

SEQ ID NO: 247120 - protein, 1280 aa, Artificial Sequence
  derived and/or modified sequence
MELSPSSGGAAEALSWPEMFPALESDSPLPPEDLDAVVPVSGAVAGGMLDRILLESVCQQQSWVRVYDVKGPPTHRLSCGQSPYTETTTWERKYCILTDSQLVLLNKEKEIPVEGGQEQQTDSTKGRCLRRTVSVPSEGQFPEYPPEGATKLEVPAERSPRRRSISGTSTSEKPNSMDTANTSPFKVPGFFSKRLKGSIKRTKSQSKLDRNTSFRLPSLRSTDDRSRGLPKLKESRSHESLLSPCSTVECLDLGRGEPVSVKPLHSSILGQDFCFEVTYLSGSKCFSCNSASERDKWMENLRRTVQPNKDNCRRAENVLRLWIIEAKDLAPKKKYFCELCLDDTLFARTTSKTKADNIFWGEHFEFFSLPPLHSITVHIYKDVEKKKKKDKNNYVGLVNIPTASVTGRQFVEKWYPVSTPTPNKGKTGGPSIRIKSRFQTITILPMEQYKEFAEFVTSNYTMLCSVLEPVISVRNKEELACALVHILQSTGRAKDFLTDLVMSEVDRCGEHDVLIFRENTIATKSIEEYLKLVGQQYLHDALGEFIKALYESDENCEVDPSKCSSSELIDHQSNLKMCCELAFCKIINSYCVFPRELKEVFASWKQQCLNRGKQDISERLISASLFLRFLCPAIMSPSLFNLMQEYPDDRTSRTLTLIAKVIQNLANFAKFGNKEEYMAFMNDFLEHEWGGMKRFLLEISNPDTISNTPGFDGYIDLGRELSVLHSLLWEVVSQLDKATVAKLGPLPRVLADITKSLTNPTPIQQQLRRFTEHNSSPNVSGSLSSGLQKIFEDPTDSDLHKLKSPSQDNTDSYFRGKTLLLVQQASSQSMTYSEKDERESSLPNGRSVSLMDLQDTHAAQVEHASVMLDVPIRLTGSQLSITQVASIKQLRETQSTPQSAPQVRRPLHPALNQPGGLQPLSFQNPVYHLNNPIPAMPKASIDSSLENLSTASSRSQSNSEDFKLSGPSNSSMEDFTKRSTQSEDFSRRHTVPDRHIPLALPRQNSTGQAQIRKVDQGGLGARAKAPPSLPHSASLRSTGSMSVVSAALVAEPVQNGSRSRQQSSSSRESPVPKVRAIQRQQTQQVQSPVDSATMSPVERTAAWVLNNGQYEEDVEETEQNLDEAKHAEKYEQEITKLKERLRVSSRRLEEYERRLLVQEQQMQKLLLEYKARLEDSEERLRRQQEEKDSQMKSIISRLMAVEEELKKDHAEMQAVIDAKQKIIDAQEKRIVSLDSANTRLMSALTQVKERYSMQVRNGISPTNPTKLSITENGEFKNSSC

SEQ ID NO: 247121 - DNA, 3843 bp, Artificial Sequence
  derived and/or modified sequence
atggagctgagccccagcagcggcggcgccgccgaggccctgagctggcccgagatgttccccgccctggagagcgacagccccctgccccccgaggacctggacgccgtggtgcccgtgagcggcgccgtggccggcggcatgctggacagaatcctgctggagagcgtgtgccagcagcagagctgggtgagagtgtacgacgtgaagggcccccccacccacagactgagctgcggccagagcccctacaccgagaccaccacctgggagagaaagtactgcatcctgaccgacagccagctggtgctgctgaacaaggagaaggagatccccgtggagggcggccaggagcagcagaccgacagcaccaagggcagatgcctgagaagaaccgtgagcgtgcccagcgagggccagttccccgagtacccccccgagggcgccaccaagctggaggtgcccgccgagagaagccccagaagaagaagcatcagcggcaccagcaccagcgagaagcccaacagcatggacaccgccaacaccagccccttcaaggtgcccggcttcttcagcaagagactgaagggcagcatcaagagaaccaagagccagagcaagctggacagaaacaccagcttcagactgcccagcctgagaagcaccgacgacagaagcagaggcctgcccaagctgaaggagagcagaagccacgagagcctgctgagcccctgcagcaccgtggagtgcctggacctgggcagaggcgagcccgtgagcgtgaagcccctgcacagcagcatcctgggccaggacttctgcttcgaggtgacctacctgagcggcagcaagtgcttcagctgcaacagcgccagcgagagagacaagtggatggagaacctgagaagaaccgtgcagcccaacaaggacaactgcagaagagccgagaacgtgctgagactgtggatcatcgaggccaaggacctggcccccaagaagaagtacttctgcgagctgtgcctggacgacaccctgttcgccagaaccaccagcaagaccaaggccgacaacatcttctggggcgagcacttcgagttcttcagcctgccccccctgcacagcatcaccgtgcacatctacaaggacgtggagaagaagaagaagaaggacaagaacaactacgtgggcctggtgaacatccccaccgccagcgtgaccggcagacagttcgtggagaagtggtaccccgtgagcacccccacccccaacaagggcaagaccggcggccccagcatcagaatcaagagcagattccagaccatcaccatcctgcccatggagcagtacaaggagttcgccgagttcgtgaccagcaactacaccatgctgtgcagcgtgctggagcccgtgatcagcgtgagaaacaaggaggagctggcctgcgccctggtgcacatcctgcagagcaccggcagagccaaggacttcctgaccgacctggtgatgagcgaggtggacagatgcggcgagcacgacgtgctgatcttcagagagaacaccatcgccaccaagagcatcgaggagtacctgaagctggtgggccagcagtacctgcacgacgccctgggcgagttcatcaaggccctgtacgagagcgacgagaactgcgaggtggaccccagcaagtgcagcagcagcgagctgatcgaccaccagagcaacctgaagatgtgctgcgagctggccttctgcaagatcatcaacagctactgcgtgttccccagagagctgaaggaggtgttcgccagctggaagcagcagtgcctgaacagaggcaagcaggacatcagcgagagactgatcagcgccagcctgttcctgagattcctgtgccccgccatcatgagccccagcctgttcaacctgatgcaggagtaccccgacgacagaaccagcagaaccctgaccctgatcgccaaggtgatccagaacctggccaacttcgccaagttcggcaacaaggaggagtacatggccttcatgaacgacttcctggagcacgagtggggcggcatgaagagattcctgctggagatcagcaaccccgacaccatcagcaacacccccggcttcgacggctacatcgacctgggcagagagctgagcgtgctgcacagcctgctgtgggaggtggtgagccagctggacaaggccaccgtggccaagctgggccccctgcccagagtgctggccgacatcaccaagagcctgaccaaccccacccccatccagcagcagctgagaagattcaccgagcacaacagcagccccaacgtgagcggcagcctgagcagcggcctgcagaagatcttcgaggaccccaccgacagcgacctgcacaagctgaagagccccagccaggacaacaccgacagctacttcagaggcaagaccctgctgctggtgcagcaggccagcagccagagcatgacctacagcgagaaggacgagagagagagcagcctgcccaacggcagaagcgtgagcctgatggacctgcaggacacccacgccgcccaggtggagcacgccagcgtgatgctggacgtgcccatcagactgaccggcagccagctgagcatcacccaggtggccagcatcaagcagctgagagagacccagagcaccccccagagcgccccccaggtgagaagacccctgcaccccgccctgaaccagcccggcggcctgcagcccctgagcttccagaaccccgtgtaccacctgaacaaccccatccccgccatgcccaaggccagcatcgacagcagcctggagaacctgagcaccgccagcagcagaagccagagcaacagcgaggacttcaagctgagcggccccagcaacagcagcatggaggacttcaccaagagaagcacccagagcgaggacttcagcagaagacacaccgtgcccgacagacacatccccctggccctgcccagacagaacagcaccggccaggcccagatcagaaaggtggaccagggcggcctgggcgccagagccaaggccccccccagcctgccccacagcgccagcctgagaagcaccggcagcatgagcgtggtgagcgccgccctggtggccgagcccgtgcagaacggcagcagaagcagacagcagagcagcagcagcagagagagccccgtgcccaaggtgagagccatccagagacagcagacccagcaggtgcagagccccgtggacagcgccaccatgagccccgtggagagaaccgccgcctgggtgctgaacaacggccagtacgaggaggacgtggaggagaccgagcagaacctggacgaggccaagcacgccgagaagtacgagcaggagatcaccaagctgaaggagagactgagagtgagcagcagaagactggaggagtacgagagaagactgctggtgcaggagcagcagatgcagaagctgctgctggagtacaaggccagactggaggacagcgaggagagactgagaagacagcaggaggagaaggacagccagatgaagagcatcatcagcagactgatggccgtggaggaggagctgaagaaggaccacgccgagatgcaggccgtgatcgacgccaagcagaagatcatcgacgcccaggagaagagaatcgtgagcctggacagcgccaacaccagactgatgagcgccctgacccaggtgaaggagagatacagcatgcaggtgagaaacggcatcagccccaccaaccccaccaagctgagcatcaccgagaacggcgagttcaagaacagcagctgctag

SEQ ID NO: 247122 - DNA, 3843 bp, Artificial Sequence
  derived and/or modified sequence
atggaactgtctcccagctctggaggcgcagcagaggccttatcttggcccgagatgtttccagcccttgaaagcgattctccactgccaccagaggacctggatgcagtggtacctgtgagtggggccgtagccggcgggatgctcgacaggatccttttagagtccgtctgtcagcagcaatcatgggttcgagtgtacgatgtgaaggggcccccaacccacagactgagttgtgggcaatcaccgtacacagaaactacaacgtgggagcgcaaatactgcatcctgaccgacagccagctggtgctgctaaataaagagaaggagattccagtggaagggggacaggaacagcagaccgatagtaccaaggggagatgtctccgccgcacggtctctgtcccctccgagggccagttccccgagtacccgcccgaaggggccacaaaattggaggttcccgcggagagatcccctaggaggcggtcaataagtggcaccagtaccagcgaaaagccgaatagcatggataccgccaatacatccccttttaaggtaccgggcttctttagtaagagactgaaaggatctattaaacgtaccaagtctcagtctaagctcgataggaacacctcctttaggttaccttcactgcgcagcaccgatgacagatcccggggtctgcccaagttgaaggagagcagatctcatgagtccctcctttctccttgttccacggttgagtgtctggacttgggaagaggggagccggtgtcagtaaagcccctgcactctagcatattagggcaagatttctgtttcgaagtcacatatctgtccggatccaagtgtttctcctgcaatagcgcctcagaacgagataagtggatggaaaaccttcgacgcaccgtgcagcccaataaagataactgccgaagagccgaaaatgtcctgaggctctggataatcgaagccaaggatttagcacctaagaagaagtacttttgtgaactgtgtctggacgatacgctatttgctagaacaacctccaagaccaaggctgataacatattttggggagagcactttgagttcttttcccttccaccgttgcatagtatcaccgtccacatctataaggacgtggagaaaaaaaagaaaaaggataaaaataattacgtggggctagtgaatattcctacagcctccgttacaggccggcagttcgtggagaagtggtatcccgtctctacccccacaccaaataaaggtaagactggaggaccatccattaggattaaaagtcggtttcagactattacaatattgcccatggagcagtacaaagaatttgcagagttcgtcacttcaaattacacaatgttgtgcagtgtgttagaaccagtcataagtgttcgcaacaaggaagagctggcgtgtgctctggtgcacattctccaaagtaccgggcgggcaaaggactttctgacagacctcgtgatgagtgaggtggatagatgtggagagcatgatgtgttgatctttcgcgagaatactattgctaccaaatctatcgaggaatacctgaagctggtgggccagcagtatctccacgacgcgctcggtgagtttataaaggcactgtatgagagcgatgagaactgcgaagtggatccgtcaaaatgcagctcatcagaactgatcgatcatcagtccaatctgaaaatgtgctgcgagctcgctttctgcaaaattatcaactcctattgtgtatttccaagggagttgaaagaggttttcgcaagttggaagcagcagtgcctaaaccggggaaagcaagatatctctgagagactaatatccgccagcctattcctgcgctttctatgccccgccataatgtccccatccctattcaatctgatgcaggagtatcccgatgataggacttctcggaccctgacacttattgccaaagtgattcaaaatctcgccaatttcgccaaattcggcaacaaggaggaatatatggcgttcatgaacgacttcctggagcacgaatggggaggaatgaagaggtttctgttggaaattagcaatcccgacacaatctcaaacacccctgggtttgacggttatatcgatctcggacgtgaattgtcagtcctgcacagcctactgtgggaagtggtcagccaattggataaggccaccgtcgccaaactcggaccgctaccgagagtcctggccgacatcacaaaatcgctcactaacccaacgcccattcagcaacagttgcgtcgattcactgagcacaattcctcgccaaacgtgtccgggagtctgtcatccggattgcagaagatatttgaggatcctacagactctgacctgcacaagctgaaaagtccctcccaggacaacacagacagctatttccgcggtaagaccttgctgttagtgcagcaggcctcctcacagtctatgacatacagcgagaaggatgagagagaaagtagcctgcccaatgggaggagcgtatctctgatggacctccaggacacccatgcagctcaggtggagcacgccagtgtgatgttagatgtccctataagactgactggctctcaactgtctatcacccaggtggccagtataaaacagctccgggagacacaatcaaccccccaaagcgcaccccaggtgagaagaccattgcaccctgccctcaaccaacctggtggacttcagcccctaagttttcaaaatcccgtgtatcatctgaataacccaattcccgcaatgccgaaagccagcatagactctagcctcgagaatctctccaccgcttccagtcgctcccagtccaatagcgaagattttaaactgtctggcccttccaacagcagcatggaggatttcactaaacggtcgacacaaagtgaagatttttctcgccgccacaccgtgccagaccgacacatcccactcgccctgcccaggcaaaattcaaccgggcaagcccagatcagaaaggtagatcagggaggactcggggcccgcgccaaggcgcctccaagtctcccccactccgctagcctccgcagcacaggcagtatgagtgttgtgtcagcagctctggtggccgagccagtgcaaaatggcagcaggtcgagacaacaaagctcctcctcacgtgaaagccccgtacctaaggtaagagcaatccaacgccagcaaacccaacaggtgcagagccccgtcgactccgcgaccatgagtccggtcgagagaactgcagcctgggtgctgaacaacggtcagtacgaggaggacgtcgaagaaacagaacagaatctcgatgaggctaaacacgctgaaaaatacgagcaggagatcacgaagttaaaagagagacttcgcgtctcctcacggcgtctggaggaatatgagcgcaggcttcttgtgcaagagcagcagatgcagaaactgcttctggagtacaaggcccgcttagaagactccgaggaaaggttgagaagacagcaagaagagaaggactcgcaaatgaaatctatcattagccgacttatggcagtggaggaagagctgaaaaaggaccatgccgagatgcaagccgtgatcgacgccaaacaaaaaataattgacgcgcaagagaagcggattgtaagcctagattccgccaacacccgcctgatgtccgctctaactcaggtaaaagagcgctattccatgcaggtccggaatggaattagccctaccaatcccaccaaactgtccattaccgagaacggcgagtttaaaaacagtagctgttag

SEQ ID NO: 247123 - DNA, 3843 bp, Artificial Sequence
  derived and/or modified sequence
atggagctgagccccagcagtggaggagctgctgaggccctgtcctggccagagatgtttcctgccctggagagtgacagccccctgcccccagaggacctggatgctgtggtgcctgtgtctggagctgtggccggcggcatgctggaccgcatcctgctggagagcgtgtgccagcagcagagctgggtgcgggtgtatgatgtgaagggcccccccacccaccggctgagctgtggccagagcccctacacagagaccaccacctgggagaggaagtactgcatcctgacagacagccagctggtgctgctgaacaaggagaaggagatccctgtggagggcggccaggagcagcagacagacagcaccaagggccgctgcctgcggaggacagtgtctgtgcccagcgagggccagtttcctgagtacccacctgagggcgccaccaagctggaggtgcctgctgagaggagcccccggcggcgcagcatcagcggcaccagcaccagcgagaagcccaacagcatggacacagccaacaccagccccttcaaggtgcccggcttcttcagcaagaggctgaagggcagcatcaagaggaccaagagccagagcaagctggacaggaacaccagcttccggctgcccagcctgcggagcacagatgacaggagccggggcctgcccaagctgaaggagagccgcagccatgagagcctgctgagcccctgcagcacagtggagtgcctggacctgggccgcggggagcctgtgtctgtgaagcccctgcacagcagcatcctgggccaggacttctgctttgaggtgacctacctgagcggcagcaagtgcttcagctgcaacagcgccagcgagcgggacaagtggatggagaacctgcggaggacagtgcagcccaacaaggacaactgcagaagagcagaaaatgtgctgcggctgtggatcatcgaggccaaggacctggcccccaagaagaagtacttctgtgagctgtgcctggatgacaccctgtttgcccggaccaccagcaagaccaaggctgacaacatcttctggggcgagcactttgagttcttcagcctgccccccctgcacagcatcaccgtgcacatctacaaggatgtggagaagaagaagaagaaggacaagaacaactacgtgggcctggtgaacatccccacagcctctgtgacaggccggcagtttgtggagaagtggtaccctgtgtccacccccacccccaacaagggcaagacaggaggccccagcatccgcatcaagagccgcttccagaccatcaccatcctgcccatggagcagtacaaggagtttgctgagtttgtgaccagcaactacaccatgctgtgcagcgtgctggagcctgtgatctctgtgaggaacaaggaggagctggcctgtgccctggtgcacatcctgcagagcacaggccgggccaaggacttcctgacagacctggtgatgtctgaggtggacagatgtggggagcatgatgtgctgatcttccgggagaacaccatcgccaccaagagcattgaggagtacctgaagctggtgggccagcagtacctgcatgatgccctgggggagttcatcaaggccctgtatgaaagtgatgagaactgtgaggtggaccccagcaagtgcagcagcagcgagctgattgaccaccagagcaacctgaagatgtgctgtgagctggccttctgcaagatcatcaacagctactgtgtgttcccccgggagctgaaggaggtgtttgcctcctggaagcagcagtgcctgaacagaggcaagcaggacatcagcgagcggctcatcagcgccagcctcttcctgcgcttcctgtgcccagccatcatgagccccagcctcttcaacctgatgcaggagtacccagatgacaggaccagcaggaccctgaccctcatcgccaaggtgatccagaacctggccaactttgccaagtttggaaacaaggaggagtacatggccttcatgaatgacttcctggagcacgagtggggcggcatgaagcgcttcctgctggagatcagcaacccagacaccatcagcaacaccccaggctttgatggctacatcgacctgggccgggagctgtctgtgctgcacagcctgctgtgggaggtggtgtcccagctggacaaggccaccgtggccaagctgggccccctgccccgggtgctggccgacatcaccaagagcctgaccaaccccacccccatccagcagcagctgcggcgcttcacagagcacaacagcagccccaacgtgtctggcagcctgagcagcggcctgcagaagatctttgaggaccccacagacagcgacctgcacaagctgaagagccccagccaggacaacacagacagctacttccggggcaagaccctgctgctggtgcagcaggccagcagccagagcatgacctacagcgagaaggatgagcgggagagcagcctgcccaacggccgctctgtgtccctgatggacctgcaggacacccacgccgcccaggtggagcacgcctctgtgatgctggatgtgcccatccggctgaccggcagccagctgagcatcacccaggtggccagcatcaagcagctgcgggagacccagagcaccccccagagcgccccccaggtgcggcggcccctgcacccagccctgaaccagcccggcggcctgcagcccctgtccttccagaaccctgtgtaccacctgaacaaccccatcccagccatgcccaaggccagcattgacagcagcctggagaacctgagcacagccagcagccgcagccagagcaacagcgaggacttcaagctgagcggccccagcaacagctccatggaggacttcaccaagaggagcacccagagcgaggacttcagcagaagacacacagtgcctgacagacacatccccctggccctgccccggcagaacagcacaggccaggcccagatcaggaaggtggaccagggcggcctgggcgcccgggccaaggccccacccagcctgccccacagcgccagcctgcggagcacaggctccatgtctgtggtgtctgctgccctggtggccgagcctgtgcagaatggcagccgcagccggcagcagagcagcagcagccgggagagccctgtgcccaaggtgcgggccatccagaggcagcagacccagcaggtgcagagccctgtggacagcgccaccatgagccctgtggagaggacagctgcctgggtgctgaacaacggccagtatgaggaggatgtggaggagacagagcagaacctggatgaggccaagcatgctgagaagtatgagcaggagatcaccaagctgaaggagcggctgcgggtgagcagccggcggctggaggagtatgaaagaaggctgctggtgcaggagcagcagatgcagaagctgctgctggagtacaaggcccggctggaggacagcgaggagcggctgcggcggcagcaggaggagaaggacagccagatgaagagcatcatcagccggctgatggctgtggaggaggagctgaagaaggaccacgccgagatgcaggccgtgattgatgccaagcagaagatcattgatgcccaggagaagagaattgtgtccctggacagcgccaacacccggctgatgtctgccctgacccaggtgaaggagcgctacagcatgcaggtgagaaatggcatcagccccaccaaccccaccaagctgagcatcacagaaaatggagagttcaagaacagcagctgctag

SEQ ID NO: 247124 - DNA, 3843 bp, Artificial Sequence
  derived and/or modified sequence
atggagctgagccccagcagcggcggcgccgccgaggccctgagctggcccgaaatgtttccggccctcgagtctgatagccctctgcctcctgaagatctcgacgcagttgtccctgtttctggcgcagttgccggaggaatgctcgacagaatcctgttggaaagcgtctgccaacagcagtcctgggttcgtgtgtatgatgtcaaagggcctcccactcaccggctgagttgcggccagtccccatatactgaaacaaccacgtgggaacggaagtactgtatcctaactgactctcagctcgtgttactaaataaggagaaggagatccccgttgagggcggacaagagcagcagaccgactctaccaagggcagatgtctccgtcgcacagttagcgtcccctccgagggacagtttcccgagtacccgccggaaggtgcaacgaagctggaggtgcctgccgaacgatcccctagaagaaggtccatcagtgggacttccactagcgagaaacccaattctatggacacagcaaacaccagccccttcaaggtgcctggctttttctcaaaacgactcaaaggcagcattaagcgcacgaagagccagagcaaactggatcgaaatacatcttttagactgcctagcctcaggtccactgatgataggagtagagggctgcccaaactgaaggaaagccggtcgcatgaaagtcttctctcaccttgcagtactgtggagtgtctggatctgggcaggggcgagcccgtctcagttaaacctctacactcatccattctcggccaagacttttgcttcgaggttacatatcttagcggatcaaagtgcttctcctgtaacagcgctagcgaacgggacaagtggatggaaaatctgcgtcggacggtacagcccaacaaagacaactgtaggagagctgagaacgttctgaggctgtggatcatagaggctaaggatctcgcccctaaaaagaaatacttctgtgagctttgcctcgacgacacactcttcgcacgaacgacctctaagacaaaggccgacaatattttctggggcgaacacttcgagttcttttcacttcccccgcttcatagtattacagtccatatctacaaagatgtggagaaaaagaagaaaaaagataaaaacaactatgtaggactcgtaaacatccccacagcttctgtgacagggcgccagttcgtggaaaagtggtatcctgtttccacccctacccctaataaggggaagacggggggaccatccattcgtatcaagtccagattccagactatcactatccttccaatggagcagtacaaagagtttgcggagttcgtgacgtctaactacacgatgctgtgctcggtcttagagcccgttattagcgtgcggaataaggaggaactagcttgtgccctcgtgcatattctgcagtcaactggtcgggcaaaggacttcctgactgaccttgtgatgagtgaggttgatagatgtggcgaacatgatgttcttatattccgggagaacacaattgctaccaagtccattgaagagtacttgaaacttgttggccaacagtatctccacgacgccctgggagagtttattaaggccctttacgagtcagacgaaaattgcgaagtggacccctcgaaatgctcgagctccgagctcattgaccaccagagtaatctgaagatgtgctgtgagctcgcgttttgcaaaatcattaactcctattgtgttttccctagagagctgaaggaagtgtttgcttcctggaaacagcaatgtttgaacaggggcaagcaggatataagtgagcgcctgatcagtgcatccctctttctgagattcctctgcccagccattatgtcacccagcctctttaatctaatgcaggaatatccagacgaccggacttctcgcactcttacgctgattgccaaagtgatacagaatctagcgaacttcgccaagttcggaaataaagaagaatacatggcattcatgaacgactttctggaacacgaatggggtgggatgaaaagatttcttctggagatctctaaccctgataccatttccaacacccctggcttcgacgggtatatcgacttggggcgcgagctcagcgtgctgcatagcctgctttgggaagttgtctcacagctggacaaggctactgtggctaaactcggccccctacctcgcgtgttggccgacattaccaaaagccttacaaacccaaccccaattcagcagcagctcaggcgttttaccgaacataattcgtcccctaacgtctccggttccctgagcagcggtctgcagaagatctttgaggaccccactgacagcgatctgcataagttgaagtcgccgagccaagacaatactgattcctactttagggggaaaactctgttgctggtacagcaggcatccagccaaagtatgacctacagcgagaaggatgaacgcgaaagttcgttacctaacgggcggagcgtgtctttgatggacctgcaggacactcatgccgcacaagtggaacacgcatcagttatgctcgatgtgccgatacgacttaccgggtctcagctttcaatcactcaggttgcaagtattaagcagttgcgcgaaacccagagcactccacagtccgctccacaagtgcgacggcccctgcatccggcgttaaatcagcccggtggtttgcaacccctctccttccagaaccccgtctatcacttgaacaatcctatcccagcgatgcccaaggcctcgattgatagctcactggagaacctatccacagctagcagccgtagccagagcaatagtgaagatttcaaattgtcagggcccagcaatagctccatggaggacttcaccaagcggtctactcagtcagaagacttcagcaggcgtcatacagtgccagatcggcacatccccctggccctgcctcgccaaaatagtactggtcaagctcagatcaggaaagtggaccagggtggtctgggagctagggccaaggccccgccctcactgccacactccgcgtctttaagatccactggctctatgtcagtggtatccgcagctttagttgccgagcccgtacagaatggttcacgttcaagacaacagtccagctcctctcgtgagtcacccgtgcccaaagtgcgcgcaattcagagacagcagactcagcaggtacagagccctgtggattccgctacaatgtcacccgtggagaggactgccgcttgggttcttaacaacggacagtatgaagaggacgttgaagaaacagaacagaatctcgacgaagctaagcacgcggagaagtacgaacaggagattaccaagttgaaggaacggctgcgggtcagctcccgaagactcgaggaatatgaacgtcgactccttgtccaggaacagcagatgcagaagctgctactggagtataaagcccgacttgaggactctgaagagcgcctgcggagacaacaagaagaaaaggattctcagatgaaaagcattatatcccgcttgatggctgtcgaggaagaacttaagaaagatcatgcagagatgcaggccgtgattgacgccaaacagaaaattattgacgctcaggaaaaaagaatagtctctctagattccgcaaacacccgcctgatgtccgcattaacccaggtgaaggaacgctactcgatgcaggtgcgtaatggaatttctccaacaaatccgacaaaactgagtattacagagaacggagaatttaaaaatagctcttgttag

SEQ ID NO: 247125 - DNA, 3843 bp, Artificial Sequence
  derived and/or modified sequence
atggagctgtcccccagctctggtggggctgccgaagccctgtcctggcctgagatgtttcctgccttggagtctgattcaccactgccaccagaggatctggatgcggtcgtcccagtaagcggggcagtggccggtggtatgctggataggattttactggagtctgtttgtcagcagcagagttgggtgcgtgtttacgacgtcaaagggccacctacacacagattatcctgtggtcagtctccgtacactgaaactactacatgggaaaggaagtactgtatccttacagactcacagctggtcctactcaacaaagagaaagagatccctgtggagggtggtcaggagcagcagaccgactcaactaaggggagatgcttgaggcggacagtgtctgtgccttccgagggccagtttcctgagtatcccccagagggagcgaccaaactcgaggtgccggctgagagatccccaaggcggaggagcatttccggaacgagcacgtccgaaaaaccgaactctatggacactgccaatacttcccccttcaaggtccctggcttcttttctaaaagactgaagggcagcatcaagaggactaagtctcagagcaagttggatcgtaatacaagttttagattgcccagcctgcgaagcactgatgacaggtccagaggtttacctaaactgaaagagtccaggtctcatgagagccttctgtcgccctgcagcacagtcgagtgcctggatttgggcaggggtgagcccgtgtctgttaagcctttgcattcctctatcctcggacaggacttttgttttgaggttacctacctctctgggagcaaatgctttagctgcaacagcgcatccgaaagagataaatggatggaaaacctcagacgtacggtacagcccaataaggacaactgtcgacgagcagagaacgtgctgcggctttggatcatcgaggctaaggacctggcccctaaaaagaagtatttttgcgaactctgtttagatgatactctgtttgccagaacaacgagtaagactaaggctgacaatatattctggggagagcacttcgaattcttttctcttcctccgttgcacagcataaccgtccatatttacaaggacgtagagaaaaagaagaaaaaggataaaaacaactacgttggcctagtcaacatccctaccgcctctgtgaccggtcgccagttcgtcgagaagtggtatcctgttagtacaccaacccccaacaaagggaagacaggagggccatccattaggatcaaatcacgattccagaccataacaattctgccaatggagcagtataaggagttcgccgaatttgttacctccaattacactatgctctgttccgtcctcgagccagtaatcagcgtgcgtaataaggaggaactcgcttgcgcactcgtccacatcctacagagcaccgggagggctaaggattttctgacagatctggtcatgtcagaggtagacaggtgtggagagcatgacgtactcattttccgtgagaatactattgctacgaagagcatagaggagtacttgaagctcgtgggacagcagtatttacatgatgcattaggagagtttatcaaggcactgtacgagagcgacgagaactgtgaagtcgacccctctaaatgttcctcaagcgagttgattgatcaccagagcaacctgaaaatgtgctgcgagctggctttttgcaaaattatcaatagctactgcgtcttccctagagagcttaaagaagtgttcgcctcctggaagcagcaatgcctgaatcggggaaagcaggatatcagtgaaaggttaatctccgcctccctgttcctccgctttctctgccctgccattatgtctccctcactgttcaacctgatgcaagagtaccccgatgatcgaacatcaaggaccctgacgcttattgcaaaggtaatccaaaatctcgcaaattttgcaaagttcgggaataaggaggaatacatggccttcatgaacgacttcctggaacacgaatgggggggaatgaaacgctttttactagaaatttcaaatcccgacacgatcagtaatactccaggatttgacgggtacattgacctcgggagagagttatccgttttgcacagtcttctgtgggaagttgtctcacagttagataaagcgaccgtggcaaaactggggcctttgcctagggtactggccgatatcacaaagtcccttaccaaccctaccccgattcagcagcagttgcggaggtttaccgagcataatagttcccccaatgtgtccggttccctgtcatccgggcttcagaaaatctttgaagaccccacagactcagacctgcacaaactgaagtctccatcccaagataatacggactcctacttccggggtaagacactgcttttggtgcagcaagcgtcatcccagagcatgacttactccgagaaggatgaacgagaaagctcattgcccaacggacgcagcgtatcattaatggatctgcaggacacgcatgcagcccaagtggagcatgcttccgtgatgctcgatgtgcctattagactgaccggttctcagctgagtatcactcaggtcgcaagcatcaagcaactgagagaaacacagagtactccacagtctgcaccacaggtgaggcgccctttgcatcctgccttgaaccagccaggagggctgcagcccttgagttttcaaaaccctgtctaccatctgaataacccaatccctgcaatgcccaaggctagcattgattcttctcttgaaaacttgagcacagcttctagtcggagccagtccaacagcgaggattttaagttgtcaggcccatcaaattcttcaatggaggattttactaaaaggtcaacccagagtgaggacttttcacgcaggcataccgtgcccgatagacatatcccacttgctctcccacggcagaattccacaggtcaggcgcaaatccggaaggtggatcagggagggctgggtgccagggccaaggcacctcccagcttaccccactcagcttccctccggtccactgggtctatgagcgtcgtctccgcagcgctcgtcgccgaacccgtccagaatggatctcgatcacggcagcaaagctcttcaagtcgggagagcccagtccctaaggtgagggccattcagcgtcaacagacccagcaggttcaaagccctgtggactccgccactatgagccccgttgaaaggactgctgcatgggttctgaacaatgggcagtatgaagaggatgtggaagaaacggagcaaaatctcgatgaagcgaaacacgccgagaaatacgaacaggaaatcactaagctgaaggaacgcttgcgcgtttcatctcgtcggttggaagaatacgagagacgccttctggtgcaggagcagcagatgcagaagctcctgctggagtacaaggctaggctggaagacagtgaagaaagacttcgcagacagcaagaagagaaggacagccagatgaagtcaataatctctaggcttatggccgtggaagaagagcttaaaaaggatcacgcagaaatgcaggctgtaatcgatgccaagcagaagataatcgacgcccaggagaagagaattgtgtcacttgatagcgctaataccagattaatgtcagctctaactcaggtaaaagagcggtacagcatgcaggtgcggaatggcatttctcccacaaaccctaccaaacttagtattactgagaacggcgagttcaaaaactctagctgttag

SEQ ID NO: 247126 - DNA, 4378 bp, Artificial Sequence
  derived and/or modified sequence
gaagaaggcggctccgaggaggtgggagggcgagcctcccctcccgggttcttctgcgtcctctcccgggagggacccacacacacctgagcccggacccacccttggtcggggccacgctggatcctcctcccggcctgggtcccgcccgccgactgcaggtgggctgcatcgcccgagcctcgggcagtgggcgacggggaaggaggtgagaggtgtccgcgccggctgccgctcgggtccctgccctcgctgcgcgctctcctcctccccttaccgcaggcagggcgcggagccgcgcgccagcccgccccgaagccgccgcctcgtccccctcccgcctcggggcaccatggagctctctccgtcgtccggaggagccgcggaggcgctgtcctggccggagatgttcccggcgctggagtccgactcgccgctgcccccggaggacctggacgcggttgtcccagtcagtggagccgtcgccggtggcatgttggatcggatccttctggagtccgtgtgccagcaacagagctgggtccgggtgtacgatgtgaaaggaccacccacccaccgtctgtcttgtggtcagtcaccctacaccgagacaacaacgtgggagcggaagtattgcatcctcacagacagccagttggtattgctcaacaaggagaaggagatacctgtggaagggggacaggagcagcagacagattccaccaaagggcgatgcctgaggagaactgtcagtgtcccttccgagggtcagtttcccgagtacccaccagagggcgccactaaactggaggtaccagcagaaaggtcccctcgtagacggagtatctcagggaccagtacatcagagaaacccaactccatggacactgcaaatacctcacccttcaaagtaccaggattcttcagcaagcgcctgaaaggctccatcaagaggaccaaaagccagtcaaagcttgacagaaacacgagctttcggcttccatcccttcgcagtacagatgacaggtctcgtgggctgcctaaactaaaagagtcacgttcccatgaatccttgctgagcccatgcagcacagtggaatgtctggatcttggtagaggggaacctgtatcagtgaaaccacttcatagtagcatccttggacaagacttctgctttgaggttacctacttaagtggaagtaaatgcttcagctgtaattctgcttctgagagagacaagtggatggaaaaccttcgcaggacagttcaacctaataaggacaattgcaggcgagctgaaaatgttcttcgtttatggatcattgaagccaaggaccttgcccctaaaaagaaatatttctgcgaactgtgccttgatgataccctctttgctcgtacaaccagcaagaccaaagcagacaatattttctggggcgaacattttgaattcttcagccttccacctcttcatagtatcacagttcacatttacaaggatgtggaaaaaaagaaaaaaaaggacaagaataattatgtagggctagtcaacatccccactgccagtgtgactggtcgccaatttgtagaaaagtggtatccagtgagtacacctacacccaacaaaggaaagacaggaggaccttctattcggattaaatcacgtttccaaactatcaccattctgcctatggagcaatacaaagaatttgcagaatttgtcaccagcaactacaccatgctgtgttctgtccttgagccagtaattagtgtgagaaataaagaggagttggcttgtgccttagtgcacattcttcaaagtactggcagagccaaggattttctgactgacttggtgatgtctgaggtggatcgttgtggagagcatgatgtcttgatcttcagagagaacactattgccaccaaatccattgaggaatacctcaagttggtgggacaacagtatcttcatgacgcactgggggagtttatcaaagctttgtatgagtccgatgagaactgtgaagtggatcccagcaaatgttcatctagtgaactgatagaccatcagagcaacctgaaaatgtgctgtgagctggctttctgcaagatcatcaactcttactgtgttttccctcgtgagttgaaagaagtgtttgcatcatggaagcagcagtgcctgaaccgtggcaagcaagacatcagcgagaggctcatcagtgcctcattatttctccgttttctgtgtccagccattatgtctcccagtcttttcaaccttatgcaggagtatcctgatgaccgcacatctcggactctaactcttattgccaaggtcattcagaacctggccaactttgccaagtttggtaacaaagaggaatacatggcattcatgaatgattttttagaacatgaatggggtggaatgaagcgctttcttttggagatctctaatccagacaccatctcaaacaccccaggctttgatggttacattgatctgggccgagagctttcagttttgcattccttactgtgggaagtagtttcccaacttgataaggcgaccgtggcaaaattggggcctctccctcgtgttcttgctgatattaccaagtcattgactaatcctacgccaatacaacagcaactgagacgcttcactgaacataactccagtccaaatgtcagtggaagcctctcctctgggctgcagaaaatatttgaagaccccactgacagtgatttgcataaactaaaatctccaagccaggacaacacagacagctacttcagagggaaaacattattgctggttcagcaagcctcctctcagagcatgacttattctgaaaaggatgaaagggaaagtagccttcctaatggtcggagcgtctccctcatggacctccaggacactcatgctgctcaagtggagcatgcatctgtcatgcttgatgtgcctatacgcttgaccggaagccagctttccataacccaggtggccagcatcaaacagctgcgggaaacccagagcactccccaaagtgcaccccaagtgagaaggcccctgcacccagccttgaaccagccaggtggccttcagcccttgtcgttccagaaccctgtctatcacctcaataacccaattccagcaatgccaaaggcctctatagattccagtttggagaacctaagcactgccagttccagaagccaaagtaacagtgaagacttcaagctcagtggacccagcaatagcagcatggaagatttcactaaacgtagcactcagagtgaggacttctccaggcggcacacggtgccagatagacacatacctcttgctttgccacgacaaaatagtactgggcaggcccagatccgaaaagtggaccagggtgggttaggtgcccgagccaaagccccaccatccctgccacacagtgcttctttacgtagcaccgggagcatgtcagtggtgtccgcagccctggtggccgaacctgtgcagaatgggagccggtcccggcagcagtcctcttcctccagagagagccctgttcccaaagttagagcaatccagagacaacagacacagcaggttcagtcacctgtggactctgccacaatgtccccagtagagaggacagcagcctgggttctgaacaatgggcagtatgaagaggatgtggaagaaactgagcaaaatctagatgaagccaagcatgctgagaagtatgaacaagaaattactaaactgaaggagcgcctgagagtttccagccggcgactggaggaatatgaacgccgcttgctggtgcaggagcagcagatgcagaagctgctgctggaatacaaggcccgactggaggacagcgaggagcggctccgaagacagcaggaagaaaaagatagccagatgaaaagcatcatcagcaggctaatggctgtggaagaggaactgaagaaggatcatgctgagatgcaagcagttattgatgcaaagcagaaaataattgatgcacaggaaaaacggatcgtgtccctggattcagccaacaccagactgatgagcgcgctgacccaagtgaaggagcggtacagcatgcaggtccgcaatggcatctcccccaccaaccccaccaagctttccatcacggagaatggtgaattcaaaaacagcagctgctgacgggctttgtctgtggaaggagacagaaggaaattgacccactctcctatctccagacctttacctagcccctccaggtttacagaatgttgctacttcacaatggcgatgtggtgagaaactcctgaatgaagaaaggaaccttgtctttcagggcataaggcggcgacttccaaggtcaat

SEQ ID NO: 247127 - protein, 401 aa, Artificial Sequence
  derived and/or modified sequence
MVLAQSRVSAGVGSPHCSGSGGGGSDSFPWPASHPGNPQCSFSTAFLASPRLSRGTLAYLPPAPWSSLATPSALLGSSCAPPPPPARCPQPRALSPELGTKAGPRRPHRWELPRSPSQGAQGPAPRRRLLETMKGIVAASGSETEDEDSMDIPLDLSSSAGSGKRRRRGNLPKESVQILRDWLYEHRYNAYPSEQEKALLSQQTHLSTLQVCNWFINARRRLLPDMLRKDGKDPNQFTISRRGAKISETSSVESVMGIKNFMPALEETPFHSCTAGPNPTLGRPLSPKPSSPGSVLARPSVICHTTVTALKDVPFSLCQSVGVGQNTDIQQIAAKNFTDTSLMYPEDTCKSGPSTNTQSGLFNTPPPTPPDLNQDFSGFQLLVDVALKRAAEMELQAKLTA

SEQ ID NO: 247128 - DNA, 1206 bp, Artificial Sequence
  derived and/or modified sequence
atggtattagcacaaagcagggtgagcgccggcgtcggctccccacactgttcaggcagcggggggggcggttctgatagtttcccctggcctgcaagtcaccccggaaatcctcagtgttcattctccaccgctttcttagcctccccgaggttatccaggggcaccctcgcttaccttccacctgccccatggtcctcactggctacccccagtgccctcttgggaagctcttgtgccccgcctcctcccccagctaggtgcccccaaccccgggccttgagcccggaactgggtaccaaagctggacctcggagaccacatcgatgggaactgcctcgcagcccgtctcaaggcgctcagggaccggcacctagacgaagattactggaaaccatgaagggtatcgtcgcagcctcgggctctgagacggaggacgaggatagcatggatattcccttggatctgagctccagtgcaggcagtggcaaacgcagaaggcgcggcaacttacccaaggaaagcgtgcagatcctgcgggactggctgtacgagcacaggtataacgcttatccgtctgaacaggagaaagctctcctgagtcagcaaacccatctgtcaacccttcaggtgtgtaattggttcatcaatgccaggagaagactgcttccagacatgctgaggaaggacgggaaggatcctaatcagtttaccatttcaagacggggagctaaaattagcgagaccagttcggtcgagtctgtaatgggcataaaaaacttcatgcccgcccttgaggagactcctttccactcttgcacggctggccccaacccgacgctgggcaggcccctatctccaaagccaagctcccctgggtcagtgctggcaaggcctagcgtaatatgtcacaccaccgtgacagctctgaaggacgtgccctttagcctttgccaaagtgtgggtgtggggcagaacaccgacatccaacaaatagccgcaaagaattttaccgatacatcattgatgtacccagaagatacatgtaaatccggtccctcaaccaacacacaatcaggcctgttcaacacgcctccacccacaccgccagatctgaatcaggattttagcggtttccagttattagtggacgtagcactcaagagggctgctgagatggagctgcaggctaagctcactgcatag

SEQ ID NO: 247129 - DNA, 1206 bp, Artificial Sequence
  derived and/or modified sequence
atggtgctggcccagagccgggtgtctgctggggtgggcagcccccactgcagcggcagcggcggcggcggcagtgacagcttcccctggccagccagccaccctggcaacccccagtgcagcttcagcacagccttcctggccagcccccggctgagccggggcaccctggcctacctgcccccagccccctggagcagcctggccacccccagcgccctgctgggcagcagctgtgcccctcctcctcctccagcccgctgcccccagccccgggccctgagccctgagctgggcaccaaggccggcccccggcggccccaccgctgggagctgcccaggagccccagccagggcgcccagggccctgccccccggcggcggctgctggagaccatgaagggcatcgtggccgccagcggcagcgagacagaagatgaagattccatggacatccccctggacctgagcagcagcgctggcagcggcaagagaagaagaagaggcaacctgcccaaggagagcgtgcagatcctgcgggactggctgtatgagcaccgctacaatgcctaccccagcgagcaggagaaggccctgctgagccagcagacccacctgagcaccctgcaggtgtgcaactggttcatcaatgcccggcggcggctgctgcctgacatgctgaggaaggatggcaaggaccccaaccagttcaccatcagcagaagaggagccaagatcagcgagaccagctctgtggagagcgtgatgggcatcaagaacttcatgcctgccctggaggagacccccttccacagctgcacagctggccccaaccccaccctgggccggcccctgagccccaagcccagcagccctggctctgtgctggcccggcccagcgtcatctgccacaccaccgtgacagccctgaaggatgtgcccttcagcctgtgccagagcgtgggcgtgggccagaacacagacatccagcagattgctgccaagaacttcacagacaccagcctgatgtacccagaggacacctgcaagagcggccccagcaccaacacccagagcggcctcttcaacaccccaccacccaccccaccagacctgaaccaggacttcagcggcttccagctgctggtggatgtggccctgaagagagctgctgagatggagctgcaggccaagctgacagcctag

SEQ ID NO: 247130 - DNA, 1206 bp, Artificial Sequence
  derived and/or modified sequence
atggtgctggcccagagccgggtgagcgccggcgtgggcagcccccactgcagcggaagcggaggaggcggctcagacagtttcccatggccagccagccaccccggtaatccccaatgcagtttcagcacagcattcctggctagccccagactctccaggggtacacttgcctatctgcctcctgcaccttggtccagcctcgcaaccccaagcgccttactcggttctagttgtgcccctccgccccctcccgcgcggtgtccacagccaagagcactctcacctgagctcggcaccaaggcgggcccacgtcgcccgcaccggtgggagctgccgcgctccccatcccagggagcccaaggccccgcacctaggaggcgtctcttagagactatgaaagggattgtcgccgcgagtgggagcgaaacagaggacgaagatagcatggacatcccactggatttgagctcttcggccggaagtgggaagcggcggcggcggggaaacctgcccaaagaatctgtccagattctaagggactggctgtatgagcatcgttataatgcatatccctcggagcaggagaaggccttgctgtctcagcagacccacctgtcaacgctccaagtgtgtaattggttcatcaatgcaaggcgtagattgctacctgatatgttaaggaaagatggaaaggacccgaatcagttcaccataagccgcaggggggcaaaaatttccgaaacaagctccgtagagtcagtgatggggataaagaacttcatgcccgcgctagaagagacaccattccattcttgcaccgccggtccgaatcccacacttgggagaccactcagccccaagccttctagccctggatccgtactagcccgaccatctgtcatctgtcataccaccgtgacagccctgaaagatgtcccattctccctgtgtcagtctgtcggtgtgggccaaaataccgacatccagcagatagcagctaaaaactttaccgatacaagcctgatgtaccctgaggacacttgcaaatcaggcccttccaccaatactcagtctggtctctttaacacaccaccccctactccaccagacttgaatcaggacttttcgggttttcagctgctggtggacgtcgctttgaagcgggccgccgagatggagttgcaggccaagctgacagcctag

SEQ ID NO: 247131 - DNA, 1980 bp, Artificial Sequence
  derived and/or modified sequence
gggaggccctgaaacgcgcggagcttccctctgcctccaggctttcccagcgagagtgaaattaaacttgaaactcggatcaactggcagtcgttgttggtagaacgccctaaggacccctccccgcgggacggagggaggactcgggacagggaattggccctgggagaaaacgcgcggggggcgtccgagacgccccgtgaaagccgtgccgacccttgggaggactgacaggtctagagacacgcgctgtctgttgtggtgggcctcccgggaataagtgaggggctctgtgtttcgaggatggttctagcgcagagccgggtgtctgccggggtgggctccccgcattgttcgggctccggcgggggcggctctgattcctttccatggcccgcctcccaccccgggaatccccagtgctccttttccacggcttttctggcgtccccccgactctcccgcggcactttggcctaccttcccccagcgccgtggtcctccctggcgaccccctctgcgctcctggggtcctcctgcgccccccctcctccaccggcgcgctgcccacagccgcgtgccctctccccggagctggggaccaaggctgggccccgccggccgcatcggtgggaacttccgcggtccccatcccagggcgcacagggtccagctcctcggcgccgactcctggaaacaatgaaaggtattgttgcagcatctggcagtgagactgaggatgaggacagcatggacattcccttggacctttcttcatccgctggctcaggcaagagaaggagaaggggcaacctacccaaggagtctgtgcagattcttcgggattggctgtatgagcaccgttacaatgcctatccttcagagcaagaaaaagcgttgctgtcccagcaaacacacctgtctacgctacaggtctgtaactggttcatcaacgcccgccgcaggctcctccctgacatgctgagaaaggatggcaaagatccaaatcagttcacaatttcccgccgtggggccaagatttctgaaacgagctctgtggagtccgtgatgggcatcaaaaacttcatgccagctctagaggagaccccatttcattcctgtacagctgggccaaacccaaccctagggaggccactgtctcctaagccgtcatccccgggatcagttttggctcgtccatcagtgatctgccataccactgtgactgcattgaaagatgtccctttctctctctgccagtcggtcggtgtgggacaaaacacagatatacagcagatagcggccaaaaacttcacagacacctctctcatgtacccagaggacacttgtaaatctggaccaagtacgaatacacagagtggtcttttcaacactcctccccctactccaccggacctcaaccaggacttcagtggatttcagcttctagtggatgttgcactcaaacgggctgcagagatggagcttcaggcaaaacttacagcttaacccattttcaagcaaaacagttctcagaaatgtcatgattgccggggtgaaggcaagagatgaattgcattattttatatattttttattaatatttgcacatgggattgctaaaacagcttcctgttactgagatgtcttcaatggaatacagtcattccaagaactataaacttaaagctactgtagaaacaaagggttttcttttttaaatgtttcttggtagattattcataatgtgagatggttcccaatatcatgtgattttttttttcctccccttccctttttttgttattttttcagactgtgcaatacttagagaacctatagcatcttctcattcccatgtggaacaggatgcccacatactgtctaattaataaattttccattttttttcaaacaagtatgaatctagttggttgatgccttttttttcatgacataataaagtattttctttaaaaa

SEQ ID NO: 247132 - DNA, 1206 bp, Artificial Sequence
  derived and/or modified sequence
atggtgctggctcagtctcgcgtgtccgccggagtcggaagtccacactgttctgggtcgggcggaggtggttcggattcattcccatggccagctagccaccctggcaacccccagtgctcattcagtacggcattcctggctagcccaaggctcagcaggggtaccttggcgtacctgcctcctgccccttggagcagcttagcaacacccagcgctcttctaggttcttcttgtgcgccacctcccccacctgcacgttgtccacagccgagggccctgagccccgagctcggaaccaaagcgggtccacgacgtccgcacagatgggagctcccgaggtccccttcacagggagcacagggaccggcaccgagacgtcgccttcttgagacgatgaagggcatcgtggcagcaagtgggtcagagacggaagatgaggattctatggatattcctctggacttaagctcaagcgccggatcgggtaaacgacggagaagaggaaatctacctaaagagtcagttcaaatcctccgtgactggctgtacgaacataggtacaatgcgtaccctagcgagcaggaaaaggcccttctatctcaacagacacatctgagtaccttacaagtttgcaactggttcatcaatgcacgcaggcggctgctgcctgatatgttaagaaaggatggaaaggaccctaatcagttcactatctcacggagaggcgcaaaaattagcgaaacttcctctgtggaatctgttatgggcataaagaattttatgcctgctctggaagaaactcctttccatagctgtaccgcgggacctaatcctacactcggtcgcccactgtcccccaaaccctcaagtcccggatccgtccttgcccgaccgtccgtgatctgccacacaaccgtgactgccctgaaggacgtcccattttccctgtgtcagagcgtgggggtgggtcagaatacagacatccagcagattgctgccaagaactttacagataccagcttgatgtatccagaggacacctgcaaaagcgggccatccacaaatacccagtcggggttatttaatactccaccacctacaccccctgacctgaaccaggacttcagcggctttcaactacttgtcgatgtggctctgaagagggcagctgagatggaactccaagctaaactgacagcgtag

SEQ ID NO: 247133 - DNA, 1206 bp, Artificial Sequence
  derived and/or modified sequence
atggtgctggcccagagcagagtgagcgccggcgtgggcagcccccactgcagcggcagcggcggcggcggcagcgacagcttcccctggcccgccagccaccccggcaacccccagtgcagcttcagcaccgccttcctggccagccccagactgagcagaggcaccctggcctacctgccccccgccccctggagcagcctggccacccccagcgccctgctgggcagcagctgcgcccccccccccccccccgccagatgcccccagcccagagccctgagccccgagctgggcaccaaggccggccccagaagaccccacagatgggagctgcccagaagccccagccagggcgcccagggccccgcccccagaagaagactgctggagaccatgaagggcatcgtggccgccagcggcagcgagaccgaggacgaggacagcatggacatccccctggacctgagcagcagcgccggcagcggcaagagaagaagaagaggcaacctgcccaaggagagcgtgcagatcctgagagactggctgtacgagcacagatacaacgcctaccccagcgagcaggagaaggccctgctgagccagcagacccacctgagcaccctgcaggtgtgcaactggttcatcaacgccagaagaagactgctgcccgacatgctgagaaaggacggcaaggaccccaaccagttcaccatcagcagaagaggcgccaagatcagcgagaccagcagcgtggagagcgtgatgggcatcaagaacttcatgcccgccctggaggagacccccttccacagctgcaccgccggccccaaccccaccctgggcagacccctgagccccaagcccagcagccccggcagcgtgctggccagacccagcgtgatctgccacaccaccgtgaccgccctgaaggacgtgcccttcagcctgtgccagagcgtgggcgtgggccagaacaccgacatccagcagatcgccgccaagaacttcaccgacaccagcctgatgtaccccgaggacacctgcaagagcggccccagcaccaacacccagagcggcctgttcaacacccccccccccaccccccccgacctgaaccaggacttcagcggcttccagctgctggtggacgtggccctgaagagagccgccgagatggagctgcaggccaagctgaccgcctag

SEQ ID NO: 247134 - DNA, 324 bp, Artificial Sequence
  derived and/or modified sequence
atgaggccaaagaccctgaggaattccgccgcgagaagccgcaaagaacccggcttcctgaatcaccatatggagggatcttgcctgcagctcggggagcttagtagtgtcggatattggtggccctttggccaccctggtcccgctcagggccaccttcccgtggctgtatgggcctcctgggtggtggctggcataagcatcgctctgtatttacccccacacccagaggggcgctatgagggaccctttaaaaggcataccaagaccttccgcagcgcacagtgcgcagactgtctcgtgcaatgcccagcttcgccttag

SEQ ID NO: 247135 - DNA, 321 bp, Artificial Sequence
  derived and/or modified sequence
atgaggcccaagaccctgagaaattctgctgcccggagcaggaaggagcccggcttcctgaaccaccacatggagggcagctgcctgcagctgggggagctgagctctgtgggctactggtggcccttcggccaccctggccctgcccagggccacctgcctgtggccgtgtgggcctcctgggtggtggccggcatcagcatcgccctgtacctgcccccccaccctgagggccgctatgagggccccttcaagaggcacaccaagaccttccgcagcgcccagtgtgccgactgcctgacctgtgccctggagccctag

SEQ ID NO: 247136 - DNA, 321 bp, Artificial Sequence
  derived and/or modified sequence
atgcggcccaagaccctgcggaacagcgccgcccggagccggaaggaacctggcttccttaaccaccacatggaagggagctgcttgcaactgggggaattaagcagtgtgggctattggtggccattcgggcaccccggacctgcacaaggccacttgccggtagccgtatgggctagctgggtggtggcggggatttcgatcgcgctctatttgcctcctcaccccgaaggtcgttatgaaggaccgttcaagagacatacaaagacattccgatccgcgcaatgcgcggattgcctgacttgcgctttggaaccatag

SEQ ID NO: 247137 - DNA, 324 bp, Artificial Sequence
  derived and/or modified sequence
atgcggcccaagaccctgcggaacagcgccgcccggagccggaaggagcctggttttctgaaccatcatatggaggggagttgccttcagctcggggaactgtcatcagtgggctactggtggccattcggacatcccgggcccgcccagggtcatctgcccgtcgcggtgtgggcctcatgggtggtggccggcattagcatagccctttaccttccgccccatcccgaaggcaggtatgagggaccattcaagaggcatacaaaaacgttcaggtcagctcaatgtgccgactgcctcgtccaatgtccagcttcaccctag

SEQ ID NO: 247138 - DNA, 321 bp, Artificial Sequence
  derived and/or modified sequence
atgaggcccaagacactgcgcaatagcgcagctcgaagtaggaaggaaccagggttcttgaaccaccatatggaaggaagctgcctgcagctcggggaactgtcctcggttggttactggtggccctttgggcaccccggacccgctcaggggcatctgcctgtcgctgtttgggcttcttgggtggtcgcgggaatcagcatagcactctatctgccacctcatccggagggacgctacgagggacccttcaaacgccacaccaagaccttcagatcagcgcagtgtgccgactgcttgacttgtgctctggagccatag

SEQ ID NO: 247139 - protein, 480 aa, Artificial Sequence
  derived and/or modified sequence
MTSSKIEMPGEVKADPAALMASLHLLPSPTPNLEIKYTKIFINNEWQNSESGRVFPVYNPATGEQVCEVQEADKADIDKAVQAARLAFSLGSVWRRMDASERGRLLDKLADLVERDRAVLATMESLNGGKPFLQAFYVDLQGVIKTFRYYAGWADKIHGMTIPVDGDYFTFTRHEPIGVCGQIIPWNFPLLMFAWKIAPALCCGNTVVIKPAEQTPLSALYMGALIKEVGKLIQEAAGRSNLKRVTLELGGKSPNIIFADADLDYAVEQAHQGVFFNQGQCCTAGSRIFVEESIYEEFVRRSVERAKRRVVGSPFDPTTEQGPQIDKKQYNKILELIQSGVAEGAKLECGGKGLGRKGFFIEPTVFSNVTDDMRIAKEEIFGPVQEILRFKTMDEVIERANNSDFGLVAAVFTNDINKALTVSSAMQAGTVWINCYNALNAQSPFGGFKMSGNGREMGEFGLREYSEVKTVTVKIPQKNS

SEQ ID NO: 247140 - protein, 85 aa, Artificial Sequence
  derived and/or modified sequence
MDASERGRLLDKLADLVERDRAVLATMESLNGGKPFLQAFYVDLQGVIKTFRYYAGWADKIHGMTIPVDGDYFTFTRHEPIGVCG

SEQ ID NO: 247141 - DNA, 1443 bp, Artificial Sequence
  derived and/or modified sequence
atgacctctagtaagatcgagatgcccggcgaggtgaaagctgatcctgctgcattgatggcctccctgcacctcttgcctagtccgacccccaacctggaaataaagtataccaagatcttcatcaacaatgaatggcaaaattctgagtccggtagagtgttccctgtctacaatccagccacaggagagcaagtttgtgaagtccaagaggccgataaagcagacattgataaggctgtgcaggccgccagactggccttttctctgggttccgtgtggcgccggatggacgctagcgaacggggacgtctactcgacaaattagctgatcttgtggagcgggatagggccgtgctggcaaccatggagtccctgaatggtgggaagccattcttgcaggcgttctacgtcgacctccagggcgtgatcaagacattccgatactatgccggatgggccgataaaatccacggcatgacaattccggtggatggtgactatttcacatttactcgtcatgaacctatcggcgtgtgcggtcagatcattccgtggaattttcctttgctgatgtttgcttggaaaatcgcaccagcactgtgttgcggaaatactgtggtgataaaaccggccgaacagacccctctctcggccctgtatatgggcgccctgattaaagaagtgggcaaactaatccaggaagccgccgggcgatctaatctgaagcgcgtgacactggaactcggaggaaagagtccaaatattatatttgctgatgctgacctagattatgcagtggagcaggcccaccaaggggtcttcttcaaccagggtcagtgttgcacggccggcagccgcatcttcgtcgaggagtcaatctatgaagaatttgtcagacggtcagtcgagagagcaaagaggcgtgtggtcgggtctcccttcgatccgacgaccgaacagggcccccagattgacaaaaagcagtataacaagattctcgagctgatccaaagcggcgtcgcagaaggtgccaaactggaatgcgggggcaaggggctggggcgcaaaggcttctttatcgaacccacggtgtttagcaacgttaccgatgacatgagaatcgcaaaagaagagatattcggccctgtgcaggaaatacttaggttcaagacgatggacgaagtgatcgagcgggccaataacagcgattttggactggtggccgccgtgtttactaacgacatcaacaaggccctcactgtatcatccgcaatgcaagcgggcacggtatggattaattgctacaatgctttgaacgctcagtccccgttcggcggctttaaaatgtccggaaacggccgggaaatgggcgagttcgggctacgcgaatactccgaggtgaagacagtgacagtcaagatcccccagaagaactcttag

SEQ ID NO: 247142 - DNA, 1443 bp, Artificial Sequence
  derived and/or modified sequence
atgaccagcagcaagattgagatgcctggagaggtgaaggctgaccctgctgccctgatggccagcctgcacctgctgcccagccccacccccaacctggagatcaagtacaccaagatcttcatcaacaatgagtggcagaacagcgagagcggccgggtcttccctgtgtacaacccagccaccggggagcaggtgtgtgaggtgcaggaggccgacaaggctgacatcgacaaggctgtgcaggccgcccggctggccttcagcctgggctctgtgtggaggaggatggatgccagcgagcggggccgcctgctggacaagctggccgacctggtggagcgggacagagctgtgctggccaccatggagagcctgaatggaggcaagcccttcctgcaggccttctacgtggacctgcagggcgtcatcaagaccttccgctactatgccggctgggccgacaagatccacggcatgaccatccctgtggatggagactacttcaccttcaccaggcatgagcccatcggcgtgtgtggccagatcatcccctggaacttccccctgctgatgtttgcctggaagatcgccccagccctgtgctgcggcaacacagtggtgatcaagccagctgagcagacccccctgagcgccctgtacatgggcgccctgatcaaggaggtgggcaagctgatccaggaggccgccggccgcagcaacctgaagagggtgaccctggagctgggcggcaagagccccaacatcatctttgctgatgctgacctggactatgctgtggagcaggcccaccagggcgtcttcttcaaccagggccagtgctgcacagctggcagccgcatctttgtggaggagagcatctatgaggagtttgtgcggcgctctgtggagcgggccaagagaagagtggtgggcagcccctttgaccccaccacagagcagggcccccagattgacaagaagcagtacaacaagatcctggagctgatccagagcggcgtggccgagggcgccaagctggagtgtggcggcaagggcctgggcaggaagggcttcttcatcgagcccaccgtcttcagcaatgtgacagatgacatgagaattgccaaggaggagatctttggacctgtgcaggagatcctgcgcttcaagaccatggatgaggtgattgagcgggccaacaacagcgactttggcctggtggccgctgtgttcaccaatgacatcaacaaggccctgactgtgagcagcgccatgcaggccggcaccgtgtggatcaactgctacaatgccctgaatgcccagagcccctttggaggcttcaagatgtctggaaatggccgggagatgggagaatttggcctgcgggagtacagcgaggtgaagacagtgacagtgaagatcccccagaagaacagctag

SEQ ID NO: 247143 - DNA, 3297 bp, Artificial Sequence
  derived and/or modified sequence
atacaggcgagcgcgcccccgggccgcggaccgcgcgcacagcccgcactgccccacgccgcgggctagggacacccggcccgccaccatgacttccagcaagatagagatgcccggcgaggtgaaggccgaccccgccgccctcatggcgtcgctgcacctcctgccgtcgcccacgcccaatctcgaaattaagtacaccaagatctttataaacaacgagtggcagaactcagagagtgggagagtgttccctgtctataatccagccacaggagaacaggtgtgtgaagttcaagaagcagacaaggcagatatagacaaagcagtgcaggcagcccgcctggctttctctcttggttcagtgtggagaaggatggatgcttcagaaaggggacgtctgttggataagcttgcagacttggtggaacgggacagggcagttcttgcaaccatggaatccctaaatggtggcaaaccattcctgcaagctttttatgtggatttgcagggcgtcatcaaaacctttcgatattacgcaggctgggctgataaaattcatgggatgaccattcctgtagatggagactattttacctttacaagacatgaacccattggagtgtgtggacagatcatcccatggaacttccccctgctgatgtttgcctggaaaatagctccagctttgtgctgtggcaatacagtagttattaagccagcagagcaaacaccactcagtgcactctacatgggagccctcatcaaggaggttggaaagcttatccaagaagcagctggaagaagtaatttgaagagagtaactctggaacttggaggcaaaagtcctaatattatttttgctgatgctgacttggactatgctgtggagcaggcccaccagggtgtgttcttcaatcaaggtcagtgctgcactgcaggctctcgcatcttcgtggaggagtccatctatgaggagtttgtgagaagaagcgtggagcgggccaagaggcgcgtagtggggagtccctttgaccccaccactgagcagggtccccagattgataagaaacagtacaacaagatcttggaactcatccagagtggtgtggctgagggcgccaagctggaatgtggaggcaaaggactgggccgaaaggggtttttcattgagcccacagtgttttccaacgtcactgatgatatgcggattgccaaggaggagatctttggccctgttcaggaaattttgagatttaagacgatggatgaagttatcgaaagagccaataactcagactttggactcgtagcagctgtctttactaatgacatcaacaaggccctcacagtgtcttctgcaatgcaagctgggactgtttggatcaattgttacaatgccttaaatgcccagagcccctttgggggattcaagatgtctggaaatgggagagaaatgggagaatttggcttgcgggagtactcagaagttaagacggtgacagtaaagatcccccagaagaactcctaagaaggccaagaaggaggatgaagcccagcctgcacgtctgtccctctctgctttctctgtagggcccagctctcaggaatacaaagttgagccacggtccttacttaaagattgaaaagataacatgtaggccaggcaggtcactgcacaactaaagcaaaccagctgggtacagtttcttggcactctgtaaggggccaccttaatcataccaaatattggggaaagtgggataaagggaggaggaggagctagcagacacatccagtatctccttctggagcacaggatgaaataagggagctgtattatttcatgtctttgtcacaaagaactttcctctcaaggaaaggtgacctttctcctgtcttcattttcctccttccaggccctcctcgctcacccacccctccctctcttccaaggagatgtcagctgagctcattctggggcagatgtttgggccgggaacaatttttcaaggttgtaaagccaaattatcatttcatgttatccatttcttcaaagcaaaacatgaaatggttttagctagagtcagaccagaatgaaaatgccaggagctggtacactacagatgtagtaagaacctgggatattcctgacccaatctggttttcttttacccataaataacatgaatgaaaaaagattgggacaatagagactggaagtcatcatgtgcagttcaccgcttctgagcttgctgcagttttggggtgtgtgtgtattagattccttctcagttattctggaataaggcaaggagtgggttgtttttcatagctagataagatcttttccaaagtttttcttagaaccaaccaaaaaacaatccgagtaggcccaagaatttgataatgctggatgccttgcagacatcattcagtttctaatattgggcaacaattattattaaatgaattatttctgtagttggaatctgtaccttctgaacctctacaccaataactgctgcaggtgtgattttggtctgtcacactgtacatctatcataatgtgccctgtatctattggcagtgaccttggaaaatctggccaagcctaggggtttccttttccatttgccaagttccattgtgccaggactgccgtgctccactgagctcctctgtcacaccccattcttgcccctcactgggcaggccatggcctacagcttgcagggagtaaagcaggcccgcctccctttcttcccatccacatactcctcttctgctttccagtgactccaccagtttgatgtgggaagtgttagcttcctttccttcttccatcccttcttccatctttccagctgtcaaatccaatccagtctctaacctaaatgcagatcatttatttaaaagtaccaaacataacccagagtatgtggaatatgggcaacatatatatagccttctgtatttaacgatcttctgcttcttaaccgtaccagttttctatttataactcttatctatccatgatgttttaaagtctccacttgctgttatttacaaacgacagtgcattcagcagcccagtgccgtgagccctgacagatgccgtatttctgagtgcttccatgtgaatgctgccctcctgtagcatgtgtccaagtggacatagccactaaccaactagttacctttggactgcaacaaaaaatgtgaaaatgaagatttatttcttttaatttacttaaaaagaaacctctgtgctagcaataaagcatttatattgtg

SEQ ID NO: 247144 - DNA, 664 bp, Artificial Sequence
  derived and/or modified sequence
agctatagtctggcaggaaaactggactgagtggactagcttggggatcgtcaagactcttgatcttattggaggcagcttggtacattgcaatgagggggagatttgggatcagggaacctgggatggagccatgtctttctcccttcccagctgtgtaaccttggacaagtcacttaacctccaagactcactttcctccttcatcaagtgctgtgtgaagaatgcaggagagtgatttaagcaaagccccctaactgcctggcgtctagtaagtacacaggcagtgtgtacacaaggaaggaaatggcaggctgttcatatgcagcaagatccacacttggccaaacctggggtcacagagatggacatggaatcgagggcagaagatctgggtttgagtccagcagtgctttagatctttataaacaacgagtggcagaactcagagagtgggagagtgttccctgtctataatccagccacaggagaacaggtgtgtgaagttcaagaagcagacaaggcagatatagacaaagcagtgcaggcagcccgcctggctttctctcttggttcagtgtggagaaggatggatgcttcagaaaggggacgtctgttggataagcttgcagacttggtggaacgggacagggcagttcttgca

SEQ ID NO: 247145 - DNA, 554 bp, Artificial Sequence
  derived and/or modified sequence
attgaagcattattataagctccagagtacacgtcttctgtggattttcagtcgtacttacaatttcatgctcagaagaggcctttagtatatattttgcagtgtcttctgtgaagtcaaatttctgctcagatctttataaacaacgagtggcagaactcagagagtgggagagtgttccctgtctataatccagccacaggagaacaggtgtgtgaagttcaagaagcagacaagatatagacaaagcagtgcaggcagcccgcctggctttctctcttggttcagtgtggagaaggatggatgcttcagaaaggggacgtctgttggataagcttgcagacttggtggaacgggacagggcagttcttgcaaccatggaatccctaaatggtggcaaaccattcctgcaagctttttatgtggatttgcagggcgtcatcaaaacctttcgatattacgcaggctgggctgataaaattcatgggatgaccattcctgtagatggagactattttacctttacaagacatgaacccattggagtgtgtgga

SEQ ID NO: 247146 - DNA, 1443 bp, Artificial Sequence
  derived and/or modified sequence
atgaccagcagcaagatcgagatgcccggcgaggtgaaggccgaccccgccgccctcatggcttcactccacctactaccttcacccacacccaacctcgaaatcaaatatacaaagatctttattaacaatgaatggcaaaacagcgagtccggaagagtttttccggtctataatcctgctaccggcgagcaggtgtgcgaagtgcaggaggcagacaaggccgacattgacaaggccgtccaagccgccaggctggctttctcattggggtccgtctggcggcgcatggatgcatccgaacgagggaggttgctcgataagttggctgatctggttgagcgcgaccgagcggtgctcgctacaatggagagtctgaacggcggtaagccttttcttcaggcattctacgtggatctgcagggtgtgattaaaactttccgctattacgccggctgggcggacaagattcatggaatgactatccctgttgatggtgattatttcacctttacacggcacgagcccataggtgtttgtggccagattattccgtggaactttcccctgctgatgttcgcatggaaaatcgctcctgcattgtgttgtggcaatacagtagtaattaaaccagccgagcagacgcccctgtcggctctctatatgggagccctcatcaaggaggtcgggaagttgattcaggaagcagctggtaggtcgaacctgaagagagtcactctggagctggggggcaaatcaccgaacatcatcttcgccgatgcggatctcgactatgcagtggagcaggctcaccagggcgtcttcttcaatcagggacagtgttgcacggcgggctcgaggatcttcgtggaggagagcatctacgaggagtttgtgcgccgctccgtcgagcgcgccaagcgtagggtggtaggctccccctttgacccgacaaccgaacaggggccccaaatcgataaaaagcagtacaacaagatcttggagctcatccagagcggcgtggcagaaggggcaaaattagaatgtggaggtaagggcttgggacgtaagggcttcttcatcgagccaactgtgttctctaatgtgaccgatgatatgaggattgccaaagaggaaatttttggcccggtacaggaaatactacgtttcaaaactatggacgaggttatcgaaagggccaataatagtgactttgggctcgtggccgccgtctttacgaatgacataaataaagcacttaccgtgtccagcgccatgcaggctggtactgtatggataaactgttataatgctctgaatgcacagagccccttcgggggatttaaaatgtccggcaacggcagagaaatgggggagtttggcctaagggaatactccgaggttaagaccgtgactgtcaagattcctcagaagaatagctag

SEQ ID NO: 247147 - DNA, 1443 bp, Artificial Sequence
  derived and/or modified sequence
atgaccagctctaaaattgagatgcccggtgaagtcaaggcggaccccgctgcattgatggcaagtctgcatctcctcccctctccaacaccaaatctcgagattaaatatactaagatcttcattaataatgagtggcaaaatagcgaatctggccgagttttccctgtgtacaatcccgcaactggggagcaagtctgtgaagtccaggaagccgataaggctgacatcgacaaggctgttcaagcagccagattggctttcagcctgggcagcgtttggaggagaatggacgccagcgagcgaggtcgtttactggataagctggccgatctggtggaaagggacagagcggtcctggctacaatggaaagtcttaacgggggaaagccattccttcaggccttttacgttgatcttcaaggggttattaagacttttcggtactacgcaggctgggcggataagatccatggtatgactatacccgttgacggagactacttcacctttaccaggcacgaaccaataggcgtgtgtggccagattatcccctggaacttccccctgctgatgttcgcatggaaaattgcgcctgcactgtgctgtggcaacaccgtggtcatcaagcccgcagaacagacaccattaagcgccttgtatatgggggctctgattaaagaggtagggaagctgatacaggaagccgctggacgctccaacctgaaacgcgttaccctggaattgggtggtaagtcccccaatatcatattcgctgatgccgacctggactacgccgtagagcaagcgcaccagggcgtcttcttcaatcaggggcagtgttgcacagcgggttctcgtatattcgtagaggagtccatttatgaagaatttgtccggcgaagcgtggaaagggcaaaacggcgagtagtcggctcacccttcgaccccactacagagcaaggcccacagatcgataaaaaacagtataacaaaattttggaactgattcagtctggggtggctgagggcgcaaagcttgagtgtggcggtaagggattaggtcggaaggggttcttcatcgagccaaccgtttttagtaacgttacagacgatatgcgaatcgctaaagaggagatattcggtcccgttcaggaaatcttgcgcttcaagacaatggatgaggtgattgagagggccaataattccgattttggcctggtggctgccgtgttcactaatgacattaacaaagccctcacggtctcctccgctatgcaagccggaaccgtatggatcaactgttataatgccctcaacgcccagtcacctttcggaggctttaagatgtctggcaacgggagggaaatgggcgagtttggactccgagaatactctgaggtgaagacagtcaccgtgaaaattccacagaagaactcctag

SEQ ID NO: 247148 - DNA, 1443 bp, Artificial Sequence
  derived and/or modified sequence
atgaccagcagcaagatcgagatgcccggcgaggtgaaggccgaccccgccgccctgatggccagcctgcacctgctgcccagccccacccccaacctggagatcaagtacaccaagatcttcatcaacaacgagtggcagaacagcgagagcggcagagtgttccccgtgtacaaccccgccaccggcgagcaggtgtgcgaggtgcaggaggccgacaaggccgacatcgacaaggccgtgcaggccgccagactggccttcagcctgggcagcgtgtggagaagaatggacgccagcgagagaggcagactgctggacaagctggccgacctggtggagagagacagagccgtgctggccaccatggagagcctgaacggcggcaagcccttcctgcaggccttctacgtggacctgcagggcgtgatcaagaccttcagatactacgccggctgggccgacaagatccacggcatgaccatccccgtggacggcgactacttcaccttcaccagacacgagcccatcggcgtgtgcggccagatcatcccctggaacttccccctgctgatgttcgcctggaagatcgcccccgccctgtgctgcggcaacaccgtggtgatcaagcccgccgagcagacccccctgagcgccctgtacatgggcgccctgatcaaggaggtgggcaagctgatccaggaggccgccggcagaagcaacctgaagagagtgaccctggagctgggcggcaagagccccaacatcatcttcgccgacgccgacctggactacgccgtggagcaggcccaccagggcgtgttcttcaaccagggccagtgctgcaccgccggcagcagaatcttcgtggaggagagcatctacgaggagttcgtgagaagaagcgtggagagagccaagagaagagtggtgggcagccccttcgaccccaccaccgagcagggcccccagatcgacaagaagcagtacaacaagatcctggagctgatccagagcggcgtggccgagggcgccaagctggagtgcggcggcaagggcctgggcagaaagggcttcttcatcgagcccaccgtgttcagcaacgtgaccgacgacatgagaatcgccaaggaggagatcttcggccccgtgcaggagatcctgagattcaagaccatggacgaggtgatcgagagagccaacaacagcgacttcggcctggtggccgccgtgttcaccaacgacatcaacaaggccctgaccgtgagcagcgccatgcaggccggcaccgtgtggatcaactgctacaacgccctgaacgcccagagccccttcggcggcttcaagatgagcggcaacggcagagagatgggcgagttcggcctgagagagtacagcgaggtgaagaccgtgaccgtgaagatcccccagaagaacagctag

SEQ ID NO: 247149 - DNA, 1269 bp, Artificial Sequence
  derived and/or modified sequence
atggatgccagtgagaggggcagactgttagacaagctcgccgatctggttgaacgggacagggccgttctggcaaccatggagtccttaaatggcgggaagccttttttgcaggcgttctatgtagacttgcagggtgtaatcaaaacatttaggtattatgcagggtgggccgataagattcacggtatgacaatacccgtagacggcgattactttacatttactagacacgagcccattggagtgtgcggccagatcatcccatggaacttcccactcctgatgttcgcttggaaaatagcgccagcattatgctgcggcaatactgttgtcatcaagccggcagaacagacgcctctttctgcactgtacatgggtgctctgatcaaggaggctggatttcctcccggggtcattaatattctgcccggatatggtcccaccgccggggcagcaatcgcatctcatatcggaattgacaagattgcttttacagggtccaccgaggtcgggaaactgatacaagaagccgcaggaaggagcaacttaaaaagggtgactttagaactgggcggaaaaagtcctaacattatatttgcagacgcagacttagattacgctgtggagcaagcccatcaaggcgtgttcttcaaccagggccagtgttgcactgccggcagtagaatctttgtcgaagagagcatttacgaggagttcgtgcggagatcagttgaacgtgccaagcggagggtggtgggaagcccatttgaccctaccaccgagcagggaccccagattgacaaaaagcagtataacaaaatacttgaactaatccagtccggggttgccgagggggcaaagctcgaatgcggtggaaagggactgggtcggaagggattcttcatcgaaccgaccgtcttttctaatgtgaccgacgatatgcggattgctaaagaagaaatctttgggcctgttcaggagatccttcgctttaaaaccatggatgaagtgatcgagagagcaaataatagcgatttcggcttggtggccgccgtgtttaccaatgacatcaataaagctttgacagtgtcctctgctatgcaggcaggcaccgtttggatcaactgttataacgccctgaacgcccagtctcccttcggtgggtttaagatgtcaggcaacggcagggaaatgggcgagttcggcctgcgcgagtatagcgaggtgaagacagtgactgtcaagatccctcaaaaaaatagctag

SEQ ID NO: 247150 - DNA, 258 bp, Artificial Sequence
  derived and/or modified sequence
atggatgccagcgaacgcggacgcttgcttgacaagctagccgacctggtcgaacgcgaccgggcggtgctggccacaatggagtccctgaacggcggaaaaccttttctccaagctttctatgtggacctccagggtgttatcaagacatttcggtattacgccggatgggctgacaagatacatggaatgacgatccctgtggacggagactattttactttcactcggcacgagcccataggggtctgtggatag

SEQ ID NO: 247151 - DNA, 1269 bp, Artificial Sequence
  derived and/or modified sequence
atggatgccagcgagcggggccgcctgctggacaagctggccgacctggtggagcgggacagagctgtgctggccaccatggagagcctgaatggaggcaagcccttcctgcaggccttctacgtggacctgcagggcgtcatcaagaccttccgctactatgccggctgggccgacaagatccacggcatgaccatccctgtggatggagactacttcaccttcaccaggcatgagcccatcggcgtgtgtggccagatcatcccctggaacttccccctgctgatgtttgcctggaagatcgccccagccctgtgctgcggcaacacagtggtgatcaagccagctgagcagacccccctgagcgccctgtacatgggcgccctgatcaaggaggccggcttccccccaggagtcatcaacatcctgcccggctacggccccacagctggggccgccatcgccagccacatcggcatcgacaagatcgccttcaccggcagcacagaggtgggcaagctgatccaggaggccgccggccgcagcaacctgaagagggtgaccctggagctgggcggcaagagccccaacatcatctttgctgatgctgacctggactatgctgtggagcaggcccaccagggcgtcttcttcaaccagggccagtgctgcacagctggcagccgcatctttgtggaggagagcatctatgaggagtttgtgcggcgctctgtggagcgggccaagagaagagtggtgggcagcccctttgaccccaccacagagcagggcccccagattgacaagaagcagtacaacaagatcctggagctgatccagagcggcgtggccgagggcgccaagctggagtgtggcggcaagggcctgggcaggaagggcttcttcatcgagcccaccgtcttcagcaatgtgacagatgacatgagaattgccaaggaggagatctttggacctgtgcaggagatcctgcgcttcaagaccatggatgaggtgattgagcgggccaacaacagcgactttggcctggtggccgctgtgttcaccaatgacatcaacaaggccctgactgtgagcagcgccatgcaggccggcaccgtgtggatcaactgctacaatgccctgaatgcccagagcccctttggaggcttcaagatgtctggaaatggccgggagatgggagaatttggcctgcgggagtacagcgaggtgaagacagtgacagtgaagatcccccagaagaacagctag

SEQ ID NO: 247152 - DNA, 258 bp, Artificial Sequence
  derived and/or modified sequence
atggatgccagcgagcggggccgcctgctggacaagctggccgacctggtggagcgggacagagctgtgctggccaccatggagagcctgaatggaggcaagcccttcctgcaggccttctacgtggacctgcagggcgtcatcaagaccttccgctactatgccggctgggccgacaagatccacggcatgaccatccctgtggatggagactacttcaccttcaccaggcatgagcccatcggcgtgtgtggctag

SEQ ID NO: 247153 - DNA, 1269 bp, Artificial Sequence
  derived and/or modified sequence
atggacgccagcgagcggggccggctgctggacaagctggccgacctggtggaacgtgacagggcagtgttggcaaccatggaatccttgaatggggggaaaccattcctgcaggcattctacgtggacctccagggagttatcaaaacatttcgctattatgccgggtgggctgacaaaatacacgggatgacaattcccgttgatggcgactactttacattcactcggcacgagcccatcggcgtgtgtgggcagatcataccctggaattttccgctgctgatgttcgcctggaagatcgccccagcgctttgctgcggcaacacagtagtgatcaagccagccgaacagaccccactgtcagccctttacatgggagcactcattaaggaagcaggttttccccctggcgttatcaacatcctccctgggtacggaccaacagctggggctgcaattgcctcacacatcggcattgataagatcgcattcaccggcagcaccgaggtcggaaaactgatccaggaggcagccgggaggtcaaacttgaagcgtgttacgctcgagttgggcggaaaatcccccaatattatctttgccgacgctgacctggactatgcagtggaacaagctcatcagggggtttttttcaaccagggccagtgctgcaccgctgggtctcggatttttgtcgaagagtcgatttatgaggaatttgtgcggagatctgtggaacgggccaagcgtcgcgtggttgggtctcctttcgatcccaccacggagcagggcccgcaaatcgataagaaacaatataataaaattctggagctcattcagagcggggtcgccgagggtgctaaactagagtgcggcggtaaaggactgggacgaaaggggttcttcatcgaaccaactgttttttccaatgtcaccgacgatatgaggatagcaaaggaagagatcttcggacccgtgcaggaaatcctgcggtttaaaacaatggatgaagtaattgagcgcgcaaataactccgactttggactggtagccgctgtgtttactaacgacataaataaggctttaacagtaagttccgccatgcaggctggcacagtgtggatcaactgttacaatgcgttgaacgcccaatcccccttcggcgggttcaaaatgagcggcaacgggcgtgagatgggcgaattcgggctgagagaatattcagaggtgaagaccgtgaccgtgaaaatcccacagaaaaactcctag

SEQ ID NO: 247154 - DNA, 258 bp, Artificial Sequence
  derived and/or modified sequence
atggacgccagcgagcggggccggctgctggacaagctggccgaccttgtggaacgggatcgagccgtgctggccacaatggaatccctgaatgggggcaaaccatttcttcaggcattctacgttgatctgcagggcgtcattaagactttccggtactacgctggctgggcagataagatccacgggatgacaattccagtggacggagattattttacttttacacgccacgaacctattggcgtttgcggatag

SEQ ID NO: 247155 - DNA, 1269 bp, Artificial Sequence
  derived and/or modified sequence
atggatgccagcgagcgaggcaggctcctggacaagctcgcagatttggtggagagagatcgagccgttttggccacaatggagagcctgaatggcggaaaacctttcttgcaggcattctatgtggacttgcagggcgtgattaagacctttcggtattacgcgggttgggccgacaaaattcatggaatgaccatcccagttgacggggattatttcacttttacccggcacgaacctataggagtgtgcggacagatcatcccttggaactttccacttttgatgttcgcttggaaaatcgccccagccctctgctgtgggaacactgtcgtgattaagcctgcagagcaaactcccctgtccgcactgtatatgggagcactcattaaggaggccggttttccacccggagtcatcaatatccttccagggtatggccctacggccggagccgcaatcgcctcacacatcggtatcgacaagatcgccttcacagggagcacagaagtggggaagttgattcaggaggctgcagggcgatctaacctgaagcgtgtgaccctcgaactagggggtaagtctccaaatattatttttgccgacgccgacctggactacgcagtggaacaagcacaccagggcgtgtttttcaatcaggggcagtgctgcaccgcaggctctcgaatctttgtagaggagagtatttatgaagagtttgtaagaagaagcgtagagagggccaagaggcgagtggtgggctcccctttcgaccccaccacggaacagggaccccagattgacaaaaagcagtataacaagattctggagctaatacagagcggagtggcagagggggctaagctggagtgcggaggcaaaggcttgggcagaaagggtttctttatcgagccgactgttttcagcaacgtgacagatgatatgcggatcgcaaaggaagaaatcttcggccctgtgcaggagatacttcgcttcaagacaatggatgaggtcatcgagagagcaaacaattccgacttcggtttggtcgccgcagtgttcaccaatgatattaataaggctctaaccgtgagcagtgctatgcaggcagggacggtgtggattaattgttacaatgccctgaatgcacagtccccgttcggtggcttcaaaatgtccggaaacgggagggaaatgggcgaattcggactgcgagaatacagcgaggtcaagacagtaactgtgaaaattccccagaagaactcatag

SEQ ID NO: 247156 - DNA, 258 bp, Artificial Sequence
  derived and/or modified sequence
atggatgccagtgagcggggaagattactggacaaattggcagatttagttgaacgcgatcgtgccgttttagcgactatggaatccctgaatggcggaaagccgttccttcaagcattttacgtggatctacaaggtgtcattaaaactttccggtactacgctggttgggccgataagatccatggcatgactatacccgtggatggcgactacttcaccttcaccaggcatgagcctatcggtgtgtgcggctag

SEQ ID NO: 247157 - DNA, 1269 bp, Artificial Sequence
  derived and/or modified sequence
atggacgccagcgagagaggcagactgctggacaagctggccgacctggtggagagagacagagccgtgctggccaccatggagagcctgaacggcggcaagcccttcctgcaggccttctacgtggacctgcagggcgtgatcaagaccttcagatactacgccggctgggccgacaagatccacggcatgaccatccccgtggacggcgactacttcaccttcaccagacacgagcccatcggcgtgtgcggccagatcatcccctggaacttccccctgctgatgttcgcctggaagatcgcccccgccctgtgctgcggcaacaccgtggtgatcaagcccgccgagcagacccccctgagcgccctgtacatgggcgccctgatcaaggaggccggcttcccccccggcgtgatcaacatcctgcccggctacggccccaccgccggcgccgccatcgccagccacatcggcatcgacaagatcgccttcaccggcagcaccgaggtgggcaagctgatccaggaggccgccggcagaagcaacctgaagagagtgaccctggagctgggcggcaagagccccaacatcatcttcgccgacgccgacctggactacgccgtggagcaggcccaccagggcgtgttcttcaaccagggccagtgctgcaccgccggcagcagaatcttcgtggaggagagcatctacgaggagttcgtgagaagaagcgtggagagagccaagagaagagtggtgggcagccccttcgaccccaccaccgagcagggcccccagatcgacaagaagcagtacaacaagatcctggagctgatccagagcggcgtggccgagggcgccaagctggagtgcggcggcaagggcctgggcagaaagggcttcttcatcgagcccaccgtgttcagcaacgtgaccgacgacatgagaatcgccaaggaggagatcttcggccccgtgcaggagatcctgagattcaagaccatggacgaggtgatcgagagagccaacaacagcgacttcggcctggtggccgccgtgttcaccaacgacatcaacaaggccctgaccgtgagcagcgccatgcaggccggcaccgtgtggatcaactgctacaacgccctgaacgcccagagccccttcggcggcttcaagatgagcggcaacggcagagagatgggcgagttcggcctgagagagtacagcgaggtgaagaccgtgaccgtgaagatcccccagaagaacagctag

SEQ ID NO: 247158 - DNA, 258 bp, Artificial Sequence
  derived and/or modified sequence
atggacgccagcgagagaggcagactgctggacaagctggccgacctggtggagagagacagagccgtgctggccaccatggagagcctgaacggcggcaagcccttcctgcaggccttctacgtggacctgcagggcgtgatcaagaccttcagatactacgccggctgggccgacaagatccacggcatgaccatccccgtggacggcgactacttcaccttcaccagacacgagcccatcggcgtgtgcggctag

SEQ ID NO: 247159 - protein, 302 aa, Artificial Sequence
  derived and/or modified sequence
MEIQELEEIQACQGLWEVFVTLSERARDYLHKTGRFIVIGGIVSPVHDSYGKQGLVSSRHRLIMCQLAVQNSDWIRVDPWECYQDTWQTTCSVLEHHRDLMKRVTGCILSNVNTPSMTPVIGQPQNETPQPIYQNSNVATKPTAAKILGKVGESLSRICCVRPPVERFTFVDENANLGTVMRYEEIELRILLLCGSDLLESFCIPGLWNEADMEVIVGDFGIVVVPRDAADTDRIMNHSSILRKYKNNIMVVKDDINHPMSVVSSTKSRLALQHGDGHVVDYLSQPVIDYILKSQLYINASG

SEQ ID NO: 247160 - DNA, 909 bp, Artificial Sequence
  derived and/or modified sequence
atggagatccaggagctggaggagatccaagcctgtcagggactctgggaggttttcgtgaccttgtccgagcgcgcccgggactatctacataagacaggccggtttatcgtgattggtggaattgtgtcccccgttcacgatagttatggcaaacaggggctggtcagctcccgccataggttgattatgtgtcagctcgccgttcagaattctgactggataagagtggatccctgggaatgttatcaggatacttggcagacgacgtgctcagtgttggagcatcatcgagacctgatgaagcgggtcacaggttgtattctgtcaaatgttaacaccccctctatgacaccggtcatcggacaacctcagaacgagacaccccaacccatataccagaattctaatgtggccactaaaccaacggctgccaaaatattagggaaggttggcgagagcctttctaggatctgctgcgtcagaccacccgtcgaacgcttcactttcgtggatgagaatgccaatctcggcactgtcatgcggtatgaggaaatcgagctgaggatcctcttgctttgtggctctgatctactggagtcattttgcataccgggactgtggaacgaggctgatatggaagtcattgtgggcgattttggcattgttgtagtgcccagggatgccgcggacacagataggattatgaaccacagcagtatactgcggaaatataagaacaacataatggtcgtaaaggatgacattaatcaccccatgtctgttgtgtcatcaaccaaaagcaggctcgcactgcagcacggggacgggcacgtcgtggactacctctctcagcccgtgattgattatatactgaaaagccagctgtatattaacgcctctggttag

SEQ ID NO: 247161 - DNA, 909 bp, Artificial Sequence
  derived and/or modified sequence
atggagatccaggagctggaggagatccaggcctgccagggcctgtgggaggtgtttgtgaccctgtctgagcgggcccgggactacctgcacaagacaggccgcttcatcgtgattggaggcatcgtgtcccctgtgcatgacagctatggcaagcagggcctggtgagcagccgccacaggctcatcatgtgccagctggccgtgcagaacagcgactggatccgggtggacccctgggagtgctaccaggacacctggcagaccacctgcagcgtgctggagcaccaccgggacctgatgaagagggtgacaggctgcatcctgagcaatgtgaacacccccagcatgacccctgtgattggccagccccagaatgagaccccccagcccatctaccagaacagcaatgtggccaccaagcccacagctgccaagatcctgggcaaggtgggggagagcctgagccgcatctgctgcgtgcggccccctgtggagcgcttcacctttgtggatgaaaatgccaacctgggcaccgtgatgagatatgaggagattgagctgcgcatcctgctgctgtgtggcagtgacctgctggagagcttctgcatccctggcctgtggaatgaagctgacatggaggtgattgtgggggactttggcatcgtggtggtgcccagagatgctgctgacacagaccgcatcatgaaccacagcagcatcctgaggaagtacaagaacaacatcatggtggtgaaggatgacatcaaccaccccatgtctgtggtgagcagcaccaagagccggctggccctgcagcacggagatggccacgtggtggactacctgagccagcccgtcatcgactacatcctgaagagccagctgtacatcaatgccagcggctag

SEQ ID NO: 247162 - DNA, 909 bp, Artificial Sequence
  derived and/or modified sequence
atggagatccaggagctggaggagatccaggcctgccagggcctgtgggaggttttcgttactctgtcggaaagggcaagagattacttacataagacagggcgatttattgtgatcggcgggatcgtttctcctgtccatgactcctacggcaaacagggcctcgtttcttcccgacaccgtctcattatgtgccaactcgcggtacagaactctgactggatccgggtcgacccgtgggagtgttatcaggatacctggcaaacgacctgctctgttctggagcaccacagagaccttatgaagagagtaacaggatgcatcctttctaatgtcaacaccccctctatgacccctgtcattggccagccacagaatgaaacccctcaacccatctatcagaatagtaacgtagccactaaacctacagcagcaaagatcctggggaaggtcggagagtccctaagtcggatctgctgtgttcgcccgccggtagaaagatttacattcgttgatgaaaatgccaacctggggaccgtgatgcgttacgaggaaatcgaactgcgcatcctgctgctctgcggtagcgatttgctggagtccttttgcatccccgggctttggaatgaagcagacatggaggtgatagttggcgactttgggatcgtcgtggtaccaagggatgccgccgacacggaccggatcatgaatcatagctcaattctgaggaaatacaagaacaatatcatggtcgtgaaggacgacatcaaccaccctatgtcggtggtctcctctaccaagtcacgcctggccctccagcatggtgacggacatgttgtcgattacctctcgcaacccgtcatcgactacatcctgaagagccaactgtatataaatgcatccgggtag

SEQ ID NO: 247163 - DNA, 909 bp, Artificial Sequence
  derived and/or modified sequence
atggaaatacaggaacttgaggagattcaagcctgccagggcctctgggaggtcttcgtaaccctttctgaaagggcacgcgactacctccacaagacaggcaggttcatcgtgatcggaggcattgtgagcccagttcatgattcatatgggaaacaaggactggtaagttcacgtcaccgcctgatcatgtgccaattggcagtgcagaattcggattggattcgcgtcgacccctgggagtgctatcaagacacatggcagaccacatgctccgtgctggagcatcacagggacctcatgaaacgcgtaacgggttgcatcctctccaacgtgaatacacccagtatgacccccgtgatcggccaaccgcaaaacgagacacctcagcctatctatcagaactcaaacgtcgctacgaagccgacagccgcaaagattttgggtaaggtgggtgagtctctgtcccgcatctgttgtgttcgccctcccgtggagagatttacgtttgtagatgaaaatgctaatcttggcactgtgatgaggtacgaggaaatcgagctgcggatactgttactgtgtggctctgatttacttgagtctttctgcattcctgggctgtggaacgaggcggatatggaagtgatagtcggagacttcggaatcgtcgtagttccaagagacgccgcagacacagaccgcattatgaaccattctagtattctcaggaagtataaaaataatatcatggtggttaaggatgacatcaatcaccccatgtctgtggttagctcaacaaaatctcggcttgcgttgcagcatggggacggccatgtggtggattacctgtcccagcccgttatcgactatatcctgaaatctcagctgtacattaatgccagcggatag
